United States Patent Application Publication US 2014/0325702 A1 - sequence listing, part 40

SEQ ID NO: 83725 - DNA, 1524 bp, Heterodera glycines
atgaagggccaccgtccacaccagaccgactatctggctggtccttcagatcgctgtgacacccggcgggctcaggaaggaacttggttccatccgtccaggccgcagccctggataccagcgcaaaaggaccagtggaaagcgaacgcccacgcccacccaactgggaagaaaacccagtaccaggcaggactccacggttttcatggatggcccccagggtattcgaaaaagcgtatcaaacatcctataggggtttactaccgcgtcaaccaaatatgcaaatgtttcggcccttcaaagccgtagacacggtttgaatttcaaaaaaatacgagcgggcctcgtcagtacggcactcgtattttattttttttgttgctaagctcaccagtcagcctttggcgtcaccccggattgttgctccctaatggtcaaaatgtttttgaaaaaaaaaaaaaaaatttaaatgtttaaatatttgttcattaaaaaggaaaaaaacaattttagggagtaaaaacatttttgttcggaaatgaaatgaaaaagagatgtttggggggacaaaaatatttgttgttcggaaattaaatgaaaaagtgatgtttggggggacaaaaatatttgttgttcggaaattaaatgaaaaagtgatgtttggggggacaaaaatatttgttgttcggaatgcggaaagaacaaatgaataatatgtgcaaaaacatttaattatataggcataaacaggaaaaaacggcccacgtaatgtctgaacatttgtttttgcaaggaaacaaatggaaaaacacaaatgcgcatgtttaaacatttgtttatgcaaagaaacaaatggaaaaacacaaatgcgtatgtttaaacatttgtttatgcaaagaaacaaatggaaaaacacaaatgcgcatgtttaaacatttgtttatgcaaagaaacaaatggaaaaacacaaatgcgcatgtttaaacatttgtttatgcaaagaaacaaatggaaaaacacaaatgcgcatgtttaaacatttgtttatgcaaagaaacaaatggaaaacacaaatgcgcatgtttaaacatttgtttatgcaaagaaacaaatggaaaaacacaaatgcgcatgtttaaacatttgtttatgcaaagaaacaaatggagaaacacaatgcgcatatgtgttcacagtttgaatagataacgatacatagttggctgttttttttggtttggtaaaaccaaacattgttttgataattttagtaaaaaccaatttgttttttattgtatgttcaatttaaatattaattttttttattgttttttatatatttttatttgttttgttattttaaaaaatttatttaatatattattattctttctgagtgaatctttgcaattaatttggttctggtaattaaacaaatattttcattaaatggttaaaaatttacaaatttttttttggtaaaattcaattggattttatgacaagaaatttcgatttttgtta

SEQ ID NO: 83726 - DNA, 267 bp, Heterodera glycines
tacaaaaataaaagtgattttgagattcgggaccaaaggggtgaccatgatttttgagtggaaaaattttttcacccaaaatcctccaaaaacatgtcattagggctattttatgacgctgatcacgaatacgtgatcagattttacttttaacatcgataagacctcagaatccctgtgtgattggggattctgaggcatcattttgaggggggagggggcaggttcggatccggacggtgtaacattatttttctgtgcatttta

SEQ ID NO: 83727 - DNA, 8565 bp, Heterodera glycines
atgagtgagctcttgcgcatctccattgcaccaatggtggtgcgtctcaagatgtatattgagacagcccaagaaaacttgggcaaagagctggcggaccaaagtgtccgtgcagatctgatcgcagagagacaaaatctctgcaaaacaatttctcttttggagaaatacaatggaaaatgggaagccattttcctgagagtgaagggacaagctcttcaagatgaagagcaaaattacagagacttcaaaccagaaggcaaggccttcatgcattgggtcgaccaagcccgagggcttgtcgacaccattgaaggggctttaggcctctcggagctgggggatgcaattccccagccaaatcagccagcacaagttgtgcagcaggcaccagtggtgcatcagcgtcatgatgtgacgcttccgccgataacattgcccaaattctcgggggaaccccgagaatggcctttgttttggaagctctttgagacttccgttgaaagtcttcaaattgaagacttcaagaagcacatttatttgctgggatgcctcccagagaagtcagttgctaggagagcaattgacttatacccaccgtcagatgaaaactacccaagggtagttgagattctgaaaaagcggtttggggatgaaaagacaatggtggagtccctccaagcggagttgctccaccttgccaaaccagctgaatccgttcagtctctgagacaattctcagagtccattgaacggatttgccatcagttattggactatggagaaaatgaacaaaacaagttcatggcctccacaattaagtccaaactgccctatcaccttctcacccaagtggtggagaaggaaatgagggcaggaggagccttcaactgcacagagctccgaagagctatcacctcaatcgttgaagtgaaagaggaagtacagagatgtactcaggttttccgtggagaggaaaaacctcgcaattttccccctcatccaaatgggggaagagccaaccaagggagaggaacaccgttccgtttctcccagccgttcagacaagaacggcagtggaggccaatggaacgaaacgaaccggtgaggaggatgtctcctcaaccgaatcgttccttctcggccatcaacaaaccacagacccctatctcagatagggggtcaaaacgcttatgttccctttgtgaaacaaaggggcatgcaccgagcaggtgcacaaaatacaccactccgggggcgcgaaggaagcgccttacggatcaagacaggtgtattaattgcctgatgatggggcataacaccaagaactgcacctcaccccgcaggtgcagtcattgtggtgaaagacaccactttatggtgtgttttggagaaaagtctcgagagggaacctctcggggccaaccaaataatcagatgaaaagagaagcgagaaaatcctctcaaagtcatctgactatgagcaagcatgctcataaaagcgtgcccagttcggaatgctcacccatcactacaaatgtgatgacaagcgtgatggcgaaaaagcctcacgcatttctaatgaccagaaaaatactggtcagatccaaaaataatcgaagagtttggatggaagttccattcctcttcgacccaggaagtcaaacttcctacgcctccgaccctctcatcgagaggctcaagccaccgaaagtgacttccgaagaaatggaagtctatggctttggaggagaaaggaatggaccaatgaggttccattctcccgtgtattccatccaaatcagaagaacggatggaaagtgggaagaaatcctcctaaataggacggagagaatttccacgccattcaaaatggcagaatggaattctgaggaattcccactcaaaggaatggacatggccgacgctatgagtttttctcgggaagagcccgaaatactcataggtgctagacatttctggcaattcttccaagggaaggaagaagtttctccagggttgtttgtaattcaaacaaccttgggccctttggttaacggagagtccgactttgggccggaacttccgaacccaggactatcaatgatggccattgatgagtccaatcaagggcaaatgccaacagttaaagaaattgaatatttctttaatttggagtcattggggatcaaagacgatccaaatgaaaatgacgaccaaacagcaatgagcctgtttaacaagtccatccgtcgagaaaaagacggaaggtactctgttaagtggccatggaaggaggaggtgcctgacctcccttccaattaccgcatggccttttcaaggctaatgtctacttttggtaagcttcgtaattctccagacttaatggagcaatacgatgctaccattagagaccaattggaaaaagggataatcgaagaggccaggaaagcccctggcactcttgagcattatatccctcatcagggagtccttgccaaaggcaagaaattgcgcgtcgtttacgacgccagtgctcacaccagaggaacaaacagtctcaatgcctgtttgtatagaggcccggtaatactgccggatctcatcggaatgcttatgcgattccgatgtccaagattccctctcctctccgacatacaagcagcatttttgcaaattgctttggaaccggaggatagggaagtcaccaaattcctctgggtgaaggatgtcagtaaaccactgacaccagcaaatctgatcacttaccgattttgccgagtggcattcggagtgatcagttctcccttcattttggctgcgactttgcagcaccatttgaagggataccattctccagtggccaacgaattggcccaatcattgtatgtggataacactcttcttgagtgtgaatccgcagaagaggctttgcataaatatgcagagtctaaagccatccttaaagaaggacttttcaatttgagggaatttgttacaaattccccagaggtaatgaaggcgattcctgaggaggatcgcctgaacaagcccaaggtaaaagtcctagggctcatttgggacacagacaaagacgaaattgtctttgagttcccaactcatggcttagaaaagctggcaacacgccgtcttgttctaagcttcctcgcctcattatttgaccctcttggtctaatggggccgtgcattcagcccttaaagcttttcttccaaactctttgggaagaaaagaaaggctgggatgatgttctttctgagaaagaacaaattcaatgggcctccttccaagaaaattggaaggatcagaccctcaaaatcccacgcagagcaatgctacaagggaatccatcccttgaattgcatgcttttgtggatgcttccatacacacatttgcagctgctatttatctaagagcagtaaaagataaccaaatatcagtttggcttatcttctccaaaaataggctcaagcctaaaaatgcttcaaaagcattaacaatccctagaatggaactcatggccattctaatagggattcgcggtcttaaatttgtcgccgatcaaattcggcgacccatttctgaactccatctttggggcgattcacaaatcgctctaagttggattgcttcaaaggaagcacagccaaaattcattgagagacgagttaaggaaattcgtactctcaatgaatgcgcctttcactttgtccgaacagccgaaaatccggcggacattgcaaccagaggcgcaaaaccaggagaacttaaggataagtctctctggtggaatggtccttcctggcttaaggaagaccatgaccaatggcctaaagaaatggaatttcaaataaaagatcctccagaaaatctggaggaagggtctctggataacgaagagaaagttttcttcgttaataccagaacagaggaactgattgatagtcctctgattgaccccaaaagattcagctcttggacaaagattgtccaagtgactctttttgtgttaagatttctccgtctgaaattaattcagaggggaaatcctcatcaacttttcgagagtcatcgaaaagaaatcgccaaagtgtccgaaaaaggaccattttcagcagaagatgttctcctagcagagaaccttctgatccgcatggatcagatgaaaaaggctgaagattccctcagctatccttctcttaaggatagcgaggggattttgaggcttaaaaccaggttgggacggtgtgaccaaccttttggttttagccatccaatcattctcggaggacaatcctccatccgagacttgatcatcttaaaatgccaccagaaaaggcatcattttggggtggaaggcaccctcactgagttcttactcgagtattggacacctcgagcaagaactaaagtgaaaaaagcactgaaaggatgccttcggtgcaaaaggatgcaggcataccagtttgcattgccaaaaatgcctcctttacctgacgagcgagtatgccgtcaggctcctttcaaagcaatcggcattgactttctcggtccaaccgaaacacggttggccggagagaaagtcaaggcatggatacttcttatgacttgcctcgtaacacgagcagttcatttggaggccatgcttgacacaactgccgagtcattcctcaatgttctccgacgtttcataagtcggagagggaagcccgatttaatttggagtgacaatgccacttcatttaaattggctcaaaaaaccattgagcatttgaccactccaggagtggatcaaaacacgcaggaatttttcgcacttaataaaattaagtggcgattcattccacaaatcagcccttgggcaggtggcgtttatgaacgccttgtccaattgtgcaaaaattgcttcaaaaggactttggggagaaaagtcctcagttatgatcaactcataacttttgtggctgaagttgaagccacattaaaccatcgccctattacttctgtgtcagaagggatggatgaaatcctgccccttcgtccagtggacttccttcaaccggaagtccaaattcactgggacacgaatggtgaagaattcgatccatcggatcgaaatctttcatcccaccaaaaattagttgccctttttcaggcaactaaagaatcccatgaatttttctgggaaatgtggcaaaaagaatacctcctccttctgcgggagagaggtaaatgggaccacaagagtccccgtcttcaggacaaaacagaaccaaaggagggaatgatcgtcctcattcatgaggagttcactccccgaaaccaatggtctttgggaaagatcattgagcttaatggccgaccaggggccattagaagcgttcagttggaactcccaattcatgggataaaatcaaagaggtatggaaccatgcctcggaaaatcattatcacccgtccggtgaataagattttcccattggaagtaggattagataatcatacagaaaatgaagaaaaatttgaagaaagttcaaatggaactcctcaaataacaaatgagaaagaaatatctcatttggaagctccaatggatgaaaaggagactgaaactcttcaattggttgatcaaccaattgaccaaaaccggcatggcatgatcactcgcagcaaagcaaagatggggacagttttgaactgtctttccatcctttttgctatgtttgcgttggttggagcttatccaaccaatcattgcaatgaatgcaaacttctttgctttaacaaaggcgttaaagcaaagattccaaaagaaatcaataaagttgagctctgctgtgcagagaactgttacattcatgagaatgtaaagaagctcacttacgagctgcccaaggagatcctcctaaatgacttcaaatgcgaaggtcatttctggatggattcgaaacacatgttcaaaaaagacattttatgtccagcagttgatgagtgtgaactcatcgaatgctatttttgcattgaacagttagcgaatccaacctgttatccattgatttcatcaatgctagcagggggactttgcttatcattcataagcataagctttgtggctttttccatattaaaagtcctgttttcaggactttatatggtcatttggctgataattcaatttatcaggccaataatttatttagctggcccaaatcggcctccgaaagataggaggccaagggcaacagcttctcaaaattggacatcacgccgtgtttacagaacaatggcgtttgttgtccttatggctaactctctccagaatttgactggagcagagaccatagcagtcatggccaaatcggaaaaatgcattaaaaatgcgacaagcatgaaatgcattgtcgaaagttcagcaactttgacgttgctaccagttggccaaacaaacactcttcttctgaaaacagaagaaggtgttctccttggttcaataaacgttgtgcttaaggctttagctttggagtgccaaagctttactaaagcctggcaacgttcatatgcaattaatgttttggccggcaaaaggtgccctaaaatgggctcctgcgaaggaaagtattgtggagaagttcgccacaatacttccattcctgagctaaaagatgccaacgaatttccaggcaattcattttgcctggacagcacagccttttggggcaataaatgcctcttaggcggcagtgcatgccttttttatcgttggtatgctcaggaaaagtccaagacagtctatgaaatcatgggctgcaattcttgggaatttattgtttatgcaataattcgcctggaaaccttgggtgaaaaacccaagtcaactcaagtgttcctctatccaggaagaacactgaaatggaacaacatcagccttactccgatcggagtaacttttccgcccgctcccgtcttaaactcagattttgttttcgacgggaacaacatggctctaaccagagagccattaacaattgactttaactgtaaaagtcggcaagaagcaattgatttcaattgcagtcttggtgttcaggcatgcactgattgcatacctgaccattcatcaggtttagtgaactgcaattgtcgttcacataaccttgaaaaattaatggaaagtccagagaggagacttccattaaacataaaaaattaccaactcagaaatactgggagaaaggtaattgctttgacaggatttagtcctgtccaattaaaccttcaaatcgaaggtctccaaatggctttggaacttcaccaaagcctttgcacaattttgccgttgaacatatctgggtgttacagatgttcaacgggagcacaattccgttatgtgtgctcgacaaattttggcaattctcttgccgaaattaattgcgccgatggaacacatttttcgacaaaatgtgattccaatgcatcaatttaccaaacaattttggcttttgataaagccagaattgacacaaagtgccaaacaaagtgtttggctggaagcacttcttttgttctaagcgggacattacactatgtccagcctgaacaaatagaagattacagcccaaatcactcgggaaaagtgatggatagccaatccagttggcataactggaattttgattggaaggcgaccctttggtctttgattggcctccaatcatcacttgccttcataatgattatttgtgtaggcattgtttgcctaacaattttcattaaaatttctcctttctatagactttggaaatttatttcctggtctttaatgagaaaaagatacggtaacgtgtctacagtattggcaatactgtacttggccgggggaggatccttcgtatgtggaggtgactcacggcctaatgactcactgcctatccctcaaaaaatttctataaatatagaccaactctcatttcacttaccattcatcccacaatttaaactttcacccacgaccaaaatatccatgccttttgagaggaccccttttagcgatatcacaaatcgctcctcaaggaatgaacacgggggagaacctcgtcgtctcgctccctcgggtcgagaaaatatcgacccggaggattttctcttcactgaagaggtggatcctcttaccacagaggaagaaattcctctggaacatccatggaattgggaacaagtgtcagagcttggctctgaccctcccggttccgattcttctcttgaaagagaggtttccccaatttcggccgattcagattggtcgtggactccacccagatcaatctggccacaaggaaatcgcgagcgattgagttcgtggtttccacgaatcttgggaaaccattggtaccaaagagggaggagatcggcagaagcacttctaagagactttcttagaagtggagcctttcttcggaccaatcacctctccaccaatcgcgaactaaccattgatgggttaactcgcggtggagctgagcggaccttaatttaccccggaatgtcg

SEQ ID NO: 83728 - DNA, 633 bp, Heterodera glycines
gtaacacccagatatgttcaacggcaaaattgtgcaaaggctttggtgaagttccaaagccatttggagaccttcgatttgaaggtttaattggacaggactaaatcctgtcaaagcaattacctttctcccagtatttctgagttggtaattttttatgtttaatggaagtctcctctctggactttccattaatttttcaaggttatgtgaacgacaattgcagttcactaaacctgatgaatggtcaggtatgcaatcagtgcatgcctgaacaccaagactgcaattgaaatcaattgcttcttgccgacttttacagttaaagtcaattgttaatggctctctggttagagccatgttgttcccgtcgaaaacaaaatctgagtttaagacgggagcgggcggaaaagttactccgatcggagtaaggctgatgttgttccatttcagtgttcttcctggatagaggaacacttgagttgacttgggtttttcacccaaggtttccaggcgaattattgcataaacaataaattcccaagaattgcagcccatgatttcatagactgtcttggacttttcctgagcataccaacgataaaaaaggcatgcactgccgcctaagaggca

SEQ ID NO: 83729 - DNA, 586 bp, Heterodera glycines
tcgatgtaaatgaagacaaaatcgttaagaattccatcaaacagccgagtcatgaatcgctggaacgtggctactgcattcgacataccaaatggcatgaccaaatattcgtaaagcccaaactctgtggtgaacgcggatttgctgactgagtcagggtgcatttttatttgccaatatccactcatgaaatccatcgtactgaatacttttttattgcccaacatcatcaaagtgttgtcaatatttggcaaaggaaatgcgtcttttactgtaattgcgtttaggcctcggtaatcgacgcagaaacggattgttccgtcttttttcgggactaaaacgatagggcttgcgtaaggtgaccaggaaggccgtatgaggcctctgtccaaatagtcttgtagcatcgttgccactttttctcggaatgcataaaggacgggccttacacgcattctcaaaggaggagctgtcccagtttcgacgtgatgcattacgaggtcagtttgtgtcaattcctggtcctcaaatgcaaatatttcctcaaaatcacaaatcagttgacaaactggccgttgttctactt

SEQ ID NO: 83730 - DNA, 621 bp, Heterodera glycines
atggccatgctgatgaagcagtttaaaaaaggacaaagtgccaaaaggtaattaacggagccacgaaattccctaataattataattaaagggggggggggggggcctattttaaaaaatactttgtcctaattgttacgtaaatgatacaaaaattgaaaatgattccaaatgtggcgatggttgcccataaaagtacacagccaattagagaacagctgggatttatgtctttgaatgtcaaatgaaactaaaaattgctaatttgaaaattgtttattttaattgaaatttttaccgaattgttattaatgccgtccataattttggcaaaattagaaaaaataattttgttaaaaactgaaatatttaaaaaattaattatactgtaagtggccactaaattttcatgataataaaacaatctaaaagctatcgtatgataccccaagattattttttaggttatgtttaagaaaagatatgacggatttttcacgaaaattctgtaaattggcagttttacgaaacgccaatgttggcagtttttacggaacgacccagcacgaatccatattatggagggtttaggaaattttaaaaaatacacctcaaacaata

SEQ ID NO: 83731 - DNA, 145 bp, Heterodera glycines
atgcattcctttcttgtactgaccattctttttgccaatttggcatcaaatgcttttgggcaacaatggccaaaagcgactagtgaagaaactgatgaggcaacaattaaagtgtcgggaggcgtcaaagacttaaagtcaagcg

SEQ ID NO: 83732 - DNA, 104 bp, Heterodera glycines
caaaaaattgatagcggcgagttggccaagccggaacagacgcagttggacaaattggcacgacggggcgagttggagcgtgacattgagcagctgaacgaaca

SEQ ID NO: 83733 - DNA, 1055 bp, Heterodera glycines
atgtcgaaaacttcccaaccccaacaacagcggaggttgtcccacggtggtgacggcaccgagaccaccccaaatgggggcgatgtgcgcgtgaaaactgtttcgggtaggcatcgaaatgtacgaaaacaaaaaatggttggctattatttgcgcgtttcctctttatgggcacccaaattttaaaaaattatcaaaaataaatgcatggatttattaatgtggcatttacgcctttttgagccaatttcattttcatacacgcgacaattgtggattttttgaaaaatttagcgaaatttttggaaaatttgggtgaggctaactaagtctgggggggggggtagtagtaaatttttcaaattttaggacagtggttttttggctgtaaaaatttgtattttggtttttcaggtgaaactttcattgccgccacacaacgggctgatggtaaatttccaaattgttttgcttttttctaattttagaattgtaagtagcgagaaaccctccacatttggggaaaaatggagaattctttcgtcgggtcaaagccgtcggacgcataatttcaccttaatttttagaaaatttgtcaacttacagaaaactcaaatccaaaaaaatttgaaaaatcattttttataatctttcccctctggctaacgaattttgccaaattttttatagatgtagtgttttccagggactttccgagttttcgtgcatggggagaggcatagtgccacaaccacaccaggatggggctgtcgtgtcgatgaattttcggaattaaaaaaaagttttttaaattccatcaaatttgaggcagttggcgcaaaccgcgccgggtgaaggccggctacgtgccgcaggacgagcagccgcgcttcgagtgccgggcgcaggcggagctgcgccagcgcagcggcggcgccgaggacagtggcgccaaagtgccgttgggctgggacccggtggcaatggtcaaaggcacgccgacaaagcaagagcaaatgccatcgaaacagcaacagaaacaaccgcagcaaagg

SEQ ID NO: 83734 - DNA, 1270 bp, Heterodera glycines
atgttcatgtatttttggggtaattaaaattttaattggccaaaaaaatgcgatgatacaaattgcaacagtgcgatttgagttttgtattcatcactgagaataaacatgaatatataaatgaagattaaaaagaacaccacggttaatttttgtgctaattttttcaaaattttccttattttaggctaaattacctatttctaaatggcaccgcccgtcaaaaaaaagaaaaaacattcccccgtcgctttgaggaaaatgtgagccgaattctttttttttgtcaattgctcaattaattttcccgcatttcagcttttgaccatgcccaacttggcctcaaattggcactgatttcgccacgtttcaatgcgctggtggacaaacatttcgatggcaaaagcgaattggcactttcgagtcactttacaattggcaggatgagaacgagagcaaaattgtttgttaagaagagcaatgccacaactgaaactgtgccatttcttttgcacgaccgtctccgatgcacaacaaaattcgctttaaggaccttcggattgagtaaatcaaacaatcaaagaattatcaatgggttccctttcaggcacattgatcattccgtcagcacatttcttcgttccaaccagcaaatttttgacaaaggcaccaatttggatttgcatgtgtctttatccaaagatgtccagctaatttggaatgcttttgcccgtgaaatttggcccatttttgcgccaaacattcgccatttgaattttatgtatggtcatgatcttcaaaatttgtgtcgccacactacgccgacaattctctccgagctcgacatcatttcgatccattcccatgatttgttgcccggtttgatcgctgatgatgggccaaatgcaactgcggcccaagcattgtccaaatggttgcatattccaacaaaagatggacggctcaaacaattgatttgcagtggtgctacgtcaaaactcaatgcattggtcaacaatttcaaggaggtgtgaccatattttcgtaaaatatttggattgattgccattggcttttcgtttccattgtttaggcatttccccgtgccaccacttcttcggccagctacaaaattcgacttgaaacttttgaatcaacggaaattggcccatttgaattgttgaacgaacggaccaacgaaaagctggtattggagaaagaagaaacaaattataaatattataatatcatcgatttgctgttgaagtga

SEQ ID NO: 83735 - DNA, 725 bp, Heterodera glycines
atggtcggtaaatgtcggtccacaattttctgctaaccaaattaaaagcatataagaacagggagggcttccatcgaaaaataatcagaacatcaagtccaacaaatcaattttggggtcgaaaatcatgatttccatatttggccatattttggcgttatgtccatatttttgcatttttccataaaaactctattagaacggcccccagcagttaaagtagcttttttgaccggaaaaatttccgaaagaatcatttgcaaattgaatccgcgaccgcgggattttctgtccgcgtcccaaccctgctggttggcaatggctctattgcagtttacacgaccataaaataagacttcaaaaaattttcgttatgttttgaaaaattatgtcaaaatccattgtttatcctctggggatggaaagggacacgccggcacattttttttactcattttttctaacccaactcccaatcacttctgatgtgtaaaagtcccaaaaatccaaacaattaaaatatattcaaacaaaaaagcaacaaataaatgtgaggtatgcaattttcagatcaatttccattcataatgatcgatttatctttcatttcccaataattcgttcattttttcttctgctgtccaccaggcccgggattcattttcatacgaccaccttttgccttcattttgtccgtctttggtggagagaatcgcctaaataaa

SEQ ID NO: 83736 - DNA, 737 bp, Heterodera glycines
atggccatggttggtggcactgtttgcccgcgaggccggcatttgtggcggtggtggcaacaaattctgttgtacggcatcaatcattgggccgcagcatgtgctgaccgcggcacactgcttcatgtctttcaaaggcgaacagcgagaaaatatgcacgaaaaggttaatgaaaatcgaagggaaaatatttttatattccttattaggcccactaattaattaattttatctatgatttgccgaattgaacacataaattgtagggctattgaatattgtgcatgagtagtctatataaattctcttggagtagggttgtcgctgggacgatagtcaaaatctatcaaattggcgatagtcataaaaaatgtcaactagataatctgtgacagagaattgttcataacttctcccattttcatcagaagcttttcagcatatcgtagattaagattttagtccggctcattatactaattatatttaaaatgtcaaaaaaatgaagggcgggggggggggtggccgaaggcccccctcgaggcctcgaagcggccgagtgagtaccatgggcgcaggaaaattattaaggaggagggttcattatttatttatttttgcaaaattaattcataaattttttttcagaaactgctctgaaacgcgatccaaaatttatttacaagttgaataaggcactctgactcttatattatcaaaaaaggagatgaataaa

SEQ ID NO: 83737 - DNA, 118 bp, Heterodera glycines
cgggcgcgaagcgcccgtctgagcttaacaaatttaaaaaacgggcgcgaagcgcccgttagagcaaaacaacatttgaaaaacgggcgcgaagcgcccgtactatgccgcgaagcgg

SEQ ID NO: 83738 - DNA, 615 bp, Heterodera glycines
atgagcctagctcaagacctattgagcccagcttccatgtcgtactcaaatgttgaacaattttccgtgcccctctcagatgagtgcgtccgatcggacatcggtgccgtcaattcagccatttcggcactgaacccatggaaaagcccggccgaaattatggcacaaatttcttcacagttaagcattgcccaagcagcactattggtcaaaatgaattgggaatgtttggagaccaaccaaaataggatggaagcaacggcaccggaacagttcgacttggcacttttcgtggaagcattggaagccacagtggaaatggacgacgtggggaaggaagtgaagttgaggagggacaaactgaacgaatgggctaccaaaacgggcggaaaagccgacaaggagggagataaagtggaacaagaggaagataacgccgaaaagggagataaagtggaagaaatgagagataaagccgaaaaggaaggagataaggccgaaaaagcgcgcaacaaagcggaaaaggaagcacaaaaggatggaaaagaaacagagacatttagaaaagcggaagatcatggagacaaggaagagaagaaggaccccggaggggaa

SEQ ID NO: 83739 - DNA, 612 bp, Heterodera glycines
atgtcgcccgaaatgttgaccaacaacaatgatgtattttttctgatcaagaccatccattacgatcaatatttgccatttccaaggtctgtccttttttgttgtccttttttgatttttcaaagactctatgccctttctgttactgttcttgaaacataaatctcgtcttacccttggcatttagcagggatttagggatttgttggccgtcttaagataataggccttgtcctagagcttagccaaacagcagaaggagaatgactattttgagaacaactcaaaatccctaaaaatcccaactattaatttttggaaattttagagaaagagaaagtgcaaagggcaacagaaaattcgccatccttaatcatatgacatgtgtaaatgttaatgccatggaaatgtgtgcttatggagaagaaatcatgggataatttggcatgccgtcgctattcattcattcatggcatggcattaccctcttccccccccccccccaattgtacaatagttgtaatagaatcaggcatgaatttcatggcattgtatggtatgtgccaatgcattcacggcaccctcagcaaattggaggggagggcaaataaa

SEQ ID NO: 83740 - DNA, 657 bp, Heterodera glycines
ccccacgacaaccgcactttcgaggaatggtatgaacggttcggcccatttgtggaacaggagggtaagccgatgtcagagcagagcaaagtccgactcattgtaagtaaattggggacggatgtgtacaagcgttacactgagagcattcaaccacaaacaccagatgtgaacgcaatggcagaaaaagcgaaattggatcttaccaaggatcaaattaagagtctaattttcatcaccggtttaggcgaacacaatgccgaattgcgacatcgttgtctcaaactgttggacggcaacgcaaagacgcacagtgttcagatcaaagggacggagtgcacgccgacacaactcaaagaagagttacaggctcagtttccaaatgtaatgattgagttgggagttctgcaaaaagtcgactacagcaaatgggcagcaccaatcgtcgcggtcagaaaagccaatggcaaagtccggctgtgcttcgacttcagcaccggattaaacaacgcattggaaccgcaccaccacccacttccacgtcccgatgaactttttgccaaactcagtggtgccaaattcttctcacaaattgattttaaggatgcttatcttcaaatttgtgttgatgagcaatcacgcagcttttgggcgtga

SEQ ID NO: 83741 - DNA, 364 bp, Heterodera glycines
atggatatgatggacagactgggattgtcggacaccatcaggaatgatctgaaagataacttccagactgagactgccaaattgaacggagcgagcccgaagaaagataagaaattcttcagaaaagacggccgtggtaagaagcagaacttcttcgccgttggagcaaatgtgatcgccagcttgggagatgaaccatggcgtgccggacgtgtgatcagccagaaaagaggcctttacaacgttcagttttcggacggcacgaccggagaattcccggcaaagagtgtacagccgtacatgccggacgaagacgaaaatttgaattttcttgacggatttggactgaagagatcctcatccg

SEQ ID NO: 83742 - DNA, 971 bp, Heterodera glycines
atgttccaaaaccttggtggtatggccggccttttcgggggcatggctaacgctgcgagtcaggcacagcctccgacttccgccggtgcgactgaggcgggcccacagccgaggtagtctttttcaatttccaatactaacacttccatttccttctcaatccctttcatttcagtgcccctcctggtcaaaacattccgagtggttttgcggaattgcttggttctctgatgaatttaagcaccacagtgaatgtgaatgatttgtcttctaattgttttctaattgtgcttaattattttcagagcagtcagcccccggaggagagattccgtgcccaattggagcaactcactgcgatgggattcactgatcagcaggcgaatattcagggtaggatttgttgcaactttcaactgcttgtttattgaaataaaaattcggcattggttgtaaatttattgaaacaacgctagttaacagattattattgaaatttattttaaaaaacccaaaggggaatttagtttgcagaaaatgttttgtcttaaaaatcgaaaaaaaacatggaccccgtggaactttggcactacacaattctttattctttacattttcagctttgttggccagttttggcgacctttcgggtgccattgagcggctgctgggcggtggcgggcaagggaatgccgataccttttgagagtgacgaagtgctttgaatccattcctgaaagagagctcctccgacgtatttctcccgctgttttgttgtggtgtgataaatttgatcgttccttataattgccccccccccaaaataatggctaaatttcactgacaatgagtgtgtttttatctgcccacaactcgtcatatgttaatcgctttatacacaatgtatcggcttaggacgcgccgtcattaattccattgtttcggttgaaatgtcaattaaactattatta

SEQ ID NO: 83743 - DNA, 794 bp, Heterodera glycines
atggtgttgttgctgggattggttttggtgttgtgccattggttgtgggtgctgctgctgctggtgatgatagaatggtggcatcggaagcgcacccgaagcaatcggatggtcattaccaccaactgttaaaaaatggcttttttaaatggtgccacaattcgtgaccggaaaatgggtaattgtaaaacagaaagggacaactgggcgatggccaactgggtcacgggaatcttcggtcttgagtgccatacaataatttaggcaccagggatgtgtcggaatgccgatttccggcatttttgtgtcattagaattccgattgccgaatttatttggccgttggaattccgatttctgaaatttttgagagcgtttgcacaaatccttgttaggcatccccgaactaattggtcgcacttcattagcaattaatgataatcgatttaaatttagcaccacggtgaaatctgttgtgatgaggaagatgatgatgatgttgatcatcaccaacagcaatattattgggcggaggtggaggataactcgtcgcaacatgttgcggatggttgtgatgcgggagttggacgttgccatatgagtacagttgctgctgctgttgctggtggtggtggttgaacattggcatttgctgctgctgctggcttcccacatttgcacctgctgctctcattaacattgtgccatcaccgccggcatggacaccaaaagggtggtgaagttggtggtgtacacgctcgtcctgtaaaagaggaacaaaaaatcaaacacga

SEQ ID NO: 83744 - DNA, 3264 bp, Heterodera glycines
tcagtcttggccaaatgcaccaatttttggacatttgtgcactgggaaaaagccgagcaactgcggagccgagtaaacaatgtttttaaataattttatttaatataaattgaaacagtttttgattcatttaatcatatcaattgttgtttatttttcctaggcactgctgtcgtcggtgcaattgcagccacatcaattggtaattacttaaaaaattctttttgtttcacaaacttatggcaaaaatactcagaaaaatccgaacttttaaagaaaaaaattttcatagatttttttaatttaacaaaaaatgatctccctccaccttaagcctcgccattaattaaaaaagaaaattctttcaaaatctgcgatattaagcatggtttaaaaatttttttttcaaaaaatctaattcttttttttcttctaaaaaattcggtaaattaaaaaaatttcatgatcgggaacgatctgctccgctccactgggggataaaaaattttaacagaaaagctcaacattttttctattaaaaatttacctcgcataatttttttatccgataatttttgcagttgtctcattaaataattatatactttaaggtgaaccctccactcagatgacactgaaaacctttcactttgctggcgttgcgtccatgaacatcacccaaggcgtgcccaggataaaagagtaagcaaaaaataaaaatatttttttggcatttttaaaaaaatttacaaatttgtatagaatcatcaacgcggtccgctccatttcaacgccgatcatcaccgtggcattggccgatgagcgggacgaaaagttggcacgacgggtgaaggcacggattgagaagaccacattgggtagcaaagcatttttaaatgaaatcccccattttaaattaaaatattttttattgtctaaatttttcccaaaaatgtatgattttaggagcatttgcgccttgaaaaatttaaaataaatcgtgattttttttttaatattgagattttttttaggatgcattactctccccctgtgttaaattacttttttattttacttcaatttttttaagaaaaaaattgcatattcttcaggcgatatcattgattatgtggagcaggtgtttttgccggatggcctttacgtactcgtcaaattgaacacccggcggatcagagaaatggaactggaggttttttattaaaaaaataaattcatttttgaacttattaatataaatattttgtttctaactaaattccggggcacgggaagcgacccgacgatctgtaggcttcgccggaccaaaagtttgcctataaagctacctcttttagtccaaattttgctatattttttggtcctcccctcctccccaaattttttttatttgatgagggaagcgggggaaggtgaccaatggcgtatctagggggggggcgttatgtcgggggtacgaaattgatgttaaggtgatcctttcctaccaagaagcgaaggatcaggacgcgcaggaggaattcgatcagatgcgctgcggcgaactcgacggatgcgttgaactcatcccgcagacgtcagtcagggcactgcaggaacggatgttcactttgcggtccaatgactgctcgaaagtggcaacggacgaaggaaaggtgggccgaatcatgtcaattttattgggccgaccggtaaaaccggaaagcccaaaggccaataacccattaatgacttttgggactctttcaaaattgaaagagggacaggttgacaccgcgctgtgcatgctcgacgaggtgccgcgcctggtctcccaacaggccgggcccggcaccggcaagacgttcagcgcggcatcgatcgtggccacggtcctggccacggatcccacggcacgtgtgttggcgctggccccgccgaacgtcgccgtcgttaagctggtgctggagatgcaggacgcactggccgccggaaaccacgtggagccgatgcttgccttgttctccggcacaggtaagttgagatatgccaaggaagttgagcggatttccccccacctgctcgccaccgcggtggaggcacaggactttcaggaactcctacagaaggacaaagaccgcgtcaaggtggagcggtacctggacgcctgcgagcggaactcacgcctggcccaggaaatggcagttgccaaaattgtgcaggagcacaaaaaccgccgcctgtgcttcgccaccttgtccttctgtgagcaattgccggcactgtttggggaaacgacgcatttgatcatcgacgaggccggacgaggcgccatacgtccaaatcctcaacttagtaagccaactcccctgcctaaccgaggtgctgatcaccggtgatcgccgccgagcttcgcgtccacttgccctccctgccgatcgccgtccgtgaggacttcggcatggacacggtcatccaaaacatggatgttgcacaagggacggacgtcacaacattatcggtcagttttcgctcacattctgctctcgtccgcggtacggaggccggattttacaaaccgcacgccgagtagttgacaccaggacgcgacgactctgagcgggcactcatgaccgaccaaacggccttcaaattgccgaaaaagggagtccctctaattttggtccaccagagcacacctgcgcaacgcgacgaagtgtccacctcttcgcccaatcctggacaaaccgacacagcgatgagagccctctggcgcttggcgcgggccttccccggcacactcatccgctgcatttgcttctacgccgcccaagccctggagatcgaacggttggtggcccaacaagaaatcccggacattttagtgaccacggcggacgcgacacagggccacgagtcgtcacttgccgtcgtcgtcacaacatgctccgtcttcgacagtggagccgactctcagcctttctgggctgatgccgcacgggtggacgtcgccatctcccgcgccagccatggaatgatcatcatcggcgatttgctgctgctcaaccggacggagacgtggcggcgctacctggaccaagcgacgactgagacaacagtggtcggtccggagtacttcgacttcgagcagttcaacaaccccgacaactattacgacagagacggtcagctgatctcggccaacggcggtgcggtacggtcagagcatttctacagcaagtacggtaaaaatgtgtggtacaa

SEQ ID NO: 83745 - DNA, 2577 bp, Heterodera glycines; identical to SEQ ID NO: 19008
  unsure (1)..(2577): unsure at all n locations

SEQ ID NO: 83746 - DNA, 447 bp, Heterodera glycines
atgccaacgtttggtaacaatgcgcagcatcggccttccaccgttggggcggcgatggcgctggacaaattgccgccgtctccgtccgcccgaattgcgtcatcaccgccatgtaataaaatgaaaatgcaaccaattgattgtgaattcgggttttaaatggtttcattactggtcgaatttcatgccattccagctcgtaatgtaatagcgttgttttgccacaaaatttgaaatggaattccgaattcggaccggattttttggtcgtaattcgttttttcgcttcggaacaaaaaatgtcaccaaacattttgccaagagccaaaccaaacaaaacaaaaaaaaaccaaaatatatttttaaaggcaagccaaaagcgattgatcatcagctgaagcagcaacgccaacatcagatcagtgccattgacgatttgctggggaa

SEQ ID NO: 83747 - DNA, 173 bp, Heterodera glycines
tgtttgccttaattttaacttattacatagagaaaacggcaattttaataaatttcacctctacatttgaaactttttcccccctattttcgcccctatttcgcgaattttttgcccctatttaggtccctaaattggaatttttcgcccctaaaaatccccaccctagtgat

SEQ ID NO: 83748 - DNA, 701 bp, Heterodera glycines
accctacttatcacattcatcacacattttctctaaaataaaaagcaaataagcagggttcgcagatgcgagactttgaggcctacataagccgaaaatgaaaagcggacatttgcgctccgtttcttgcggaccatttttacccaatccatttgccatgccatttaatacactgcgtttttttgcccgggaaatcaaatggacggcacaacaccagcaaagtaaatgttcaaaattttcattgtaatcaaacaaaaatcatttctggccatcatagaaatggggacacaatgagtgattatacaaaattggcggctggcataactgaaaatgatgagagattatggaaaattaatgacaaaaaaaacgaaggaacaattcaaaaacattttgtgttgtgtgtgggctatgggattttactaattatgattcgatgtaagcacagaagaagaaaaaagaaaatcaaaaatgagaggcaaaaggaggagaagaaggagattttgtagtggctggctggcaaatgtaattagcgattcattggcgataatgagggtaatttgtggcggttttttcgttgtataggcaaaaacaattagcgctgtgtttaaacattaaggcaaaaaaagaaaagaaaagaaaagatgccacacaaaatcattttctttttttggacacttttttccgtcttttattgtttttgg

SEQ ID NO: 83749 - DNA, 293 bp, Heterodera glycines
atgtacgaggccgaatttgaaacggtgaggagcaattgtaggcaattaattaaatggctaattgggttaattggttaattgattgtcagatggacaccgccgattcaccgattgtcagcaaaacgatgcttatcccaccaatggaatacagctgttgtgggctgaatgaggaggagatggagatgaaatggggaaggcatttgacacgcgtgtacagagacggagaagtgccaataacggcggagagggcgaaaatgatttgtgtgatgaagggggcggaccagcgcaaaaag

SEQ ID NO: 83750 - DNA, 954 bp, Heterodera glycines
atgaaggttttgtgtgaaattgttgcggttatgctgagcaaaagtttcctggacgaactgtttgaaccccgtgaaatgtacacgagacaaggacttcgccaacactttgagcaaattgcgcattcttcggtgatgcgcctcaacgaggccaggtagataagcacataatgaggcacttagattaagccgggtaatgggatttattagcagcaaattccggataaaatagtaaaaaactcggaacagaaccaaagttcaaatcagcaagggtggaggtgcggacaaaaaaatcccgcgggtatcgatcggatcggcggaatcatggcggattgaaaatgacaaatcgcttttgatcaaggaaaaaaacgccgcggatcgcgatcgcgctccaccctctgattccaaacaagaaacagaaatttaaatcttggggattttgagatttccgttacggtaccgcagaattttaaagaaaaaccatcacactactgtatgaatggtcaaaatttgatcaaaaacacattaagcatggttaaactgtttgatctgatgacaatggcagtcaaataccaatttttgctgtgcaaagagccgtcagaaattgtactggtgacaatgaaccatttggacgggatgaagacaattttcaaggaccaccaggacatcattgagcgcattgatcatgcaagcaatttggtcagatgttttagctaataatctaataattagaaaaattactcaatttaagcttatggaccatttcggagacactcctttatgggtaatttcaaaaaaagtatacaaatatcaatatagaagttactgtaattaagcaaatgtccgcaataaggtgcgaattgcttaattttttgagtggaactcgtgtcaaagtttcgctgatgttacgagaacatcgccaacttgacggtaattaattaaaatgtgtctaataaa

SEQ ID NO: 83751 - DNA, 954 bp, Heterodera glycines
atggcaaatgtgggattggatataaatgattaattaaatagtataaataaatttacttataaatattgggttttttatttggtaatttttatttatttaaaaaaaataaaattgaaatataaattctgattaagtaatttaaggtctttaacttttgttcttttttaaaattaatttccaactgtaataaatctccgaaataaattttatatatatatatatatataaaatacctaattagttaagggatgataaaaataaataatttggcaacaatatgtaatttacgtgattttaggtctccgctattaaggatgggctttgttctggtccaacaaacagttcgccatcatcttcatcatcagctgatgatggcatgcattattcgctggagggcagttggtccgacttattcaaattggacgaatttggcggaatgttatgcatcaaaaaaggattgcatttggagcaacacgggcaaaaaatccaattgaaagcgatagccaaacataacggtgataacaacattcggagtttcaacaccacattttttgcctatggcaaaaaaattcttttgagaaaaatttttaaaaatactagtgatttcgttggatcataaaatttcaagtttttcttgacgagttcgagatcacgaaaatttaaaataatttaagcaattaattttttccaaaatatctcatgaaaaattgctggaaattcttttcttttttttgttgttaatttataagcggaagaataattttgaaactcaattttaagtatttttagttaaaagataccctgttttgaacagcttttttaaccttttcgactaatttagcatatattttaaaaaattttgtgggtttttagcagttattttgatggtaaatcccaccacagttcacaaatgaaaaattttactattcccccatttatttacaaataatttaa

SEQ ID NO: 83752 - DNA, 317 bp, Heterodera glycines
atggctctcatccttggctccgtggtcacttccccgttgccaataatgtgccaaattctccttactgtacagctcaaactcaacaaactgcgatttttggtgctcgacgaggcggacaagctgatctttgactcgatcttctttaagtctgtgctgaaaatcaaagatttgatgctcacccatcacaaaatgcagcgcgaatttgacaaggtgtgccatgcaatttggccctgtaaatcatggctatttttgcttttcagagtgccgtttctctcccccctcgaactctgatgctcagtgccacttacggagattcg

SEQ ID NO: 83753 - DNA, 503 bp, Heterodera glycines
atgcatctgacccaaaaattgcaaaaaatagccaaaccacttcagcctcgaaaggtgcaaaatagcaaatacctatatgatattgtattaattaacaattttcagtatccatttgtcgaacttgttcctttgatgggtaaaaatcatcttgacactgtctcagagagagttcgcggtatctctaataattcttttttacatacatataattttcaaaattcaggaatccatccatgtgttgaagaaagacataatttgtttgcatgtttgaaaaaatgggactacgacgacatgaaatgcacaaaattctccgattcattattcgtctgtttagctaattttgagagcatttaaaccattttacaagcttgattttggaatgtcataagtagggaacggatttttaagggcgaaaaattccaaaataaggccgtaaataagggcaaaaataaggtcgaaaaaattcaaaatttaggggtataatttttaaataacttttttta

SEQ ID NO: 83754 - DNA, 778 bp, Heterodera glycines
atgcccgagggcacacatttgctggcaactgtctcttgcgcgaaaggtattatgactgacaagatgaagattgactgattctttttttttttacttttgtgattttgtatcaattttatgccatttgaaaagcttcagctgaaatccaactaaggttttacaaaacaattgagtctttttcttaggcgcgccatcccttcatgttcttccggtggaagtagtccacgtagtacggcatgtgtccgcggcgcttcataactttggtttggatctaaactattcgagttatgggactcaaattgtgagaaaagacaagcaaaggactcgccgtgccaagttcgggctgtttccatttgcggaaaagccggtcaatgtctgcttggagtatgttggacgcctccgctttcacactgctacccttagattcagggaatgaattagttcaagaaattatacagaaattaaggaccacataaacgatagtgccaactttcataaatcgaggtcccaacaatttaactgttaaactgtcaatccttaaaatctatacaatataaatacggatttactgtcgcattaatttaattccagagttcaacagatgcgagtattcgactaacttcatcgacgatgtgcaagggctgctctcccttaattctttgctcattgtgtgcagcgacaatttttttgtttgattccatacaactctaaattgtaaaagattagtagtctttttcaaatttttggttcaaaaccggctctaatacccggaaataaa

SEQ ID NO: 83755 - DNA, 536 bp, Heterodera glycines
atggcatcggtgcaaagtttgggagcggaggccgaggatttgggcggagatttggtcgcaaatggcgcaagaatggaagggacggacgcctcgaaacgattcgcgaagggacgtacggaagagacacggcaatcgaacagaacggtgagagggcgggacacgggacggtgcagagaggcggcagaagacgaggagtgaccgtcagaagaaatgagatgcagcggcaggagcaatcgatcggccagagcgacttccatcttaaagcgatcagcggacaatgcgacttccaatggcaaccgatcggatgggacgacgtctttcagcgagaaatcgccagaggcaactcttttgtgacgtcatttggaagaattgacgaagaacgtgcagaaaaaccgcagcagtcggtccgtggaaggggaggaggacgcggacggagtgcaaacggcggacgggggagacgcggaaacggcgccgggcgcggatggtctcgcggagcatcgcgaaactttgaccaaggtggacggactgatcactaa

SEQ ID NO: 83756 - DNA, 172 bp, Heterodera glycines
atgcgtcgtataaagatcactgttttctcggaccgggactttgaaaagaccaccagttacggaccggaaggcatttttcgggttgatgtgccgggaacggagcgattggccaaagagtcattcgaattttgggcgaaaaccgaaaaggacgagttggcccacaaaactggcg

SEQ ID NO: 83757 - DNA, 669 bp, Heterodera glycines
atgggaaagcgcgcgttcgatcgcctggacgcgtcatcgcttggcttaagcggctataacgcctattggccggaggaggagccgctgaatcggctggcatttggccaacgacaatttgcggatgccgaaacggagcaggaaaagccgactggcagcaaaaagcatcgccgatggtcgcgcccactcgcgggcacaaagcgccgagtgaatggcttcggactgtttggccaattgcgattatagcgcgccagtctctgatcgatcctcaatttcttttttttgtatcgggccgcttttgtcggatcactgtcctgaactgaactagtccaataatattattgatcaacatttctgatcagaaaatcacattggattgaaccggaattatcccttatataagctttggattttgatctgattaaattacttttctgatcaaaaaattaagaactgctagttttaaggtgttatgtatgagttgacatgatcagctttaaagaaccgtgtttgatcagtattttggcttgttttttttgatcacttgtatttggttacggttcttttgtctgatcgatcataaatgtgttatttctaaaattggttaatcaatgaaattttaaaaaaacgaagataatttttcaaacccagtaaatttatctcatcgtaata

SEQ ID NO: 83758 - DNA, 258 bp, Heterodera glycines
atgcccatcatgttcacatttatcattataactcagctgctatttgtgcaacagtttttcgtggtaaaattgaaatttttaaattaattttaaataaataaattttgttttttttgcaggttgttgccaggaatgttaatgggcattatcctgaaacatattcttcacaaaatttgctgtttgacgacggcgattcaatgccaaccgaaattaaaacgtaaaagttttttagaatttataaaattataatatgatgca

SEQ ID NO: 83759 - DNA, 650 bp, Heterodera glycines
atgacaataactttatatggtaagtttattttgcgatgtattatatttaacaaaaaataaaaatgttttgaaaaatcaatgatatatgagaaaataaaaaaacattttttttaattttgaaagatattagataacatttttactatttaatcttaattatttatataaaatgattaatacaaaaaagaaagcttgcaggctaatttaaaatttatggaatgaaagaactcttattcgttattattttttttcaattaacagtataagctttttttaaataattaattaaaataatttagtttaatattataatagcatttaaaaattaaataaattaaatgatttttaatcaatgttaaaaaataattttttataagcctgaacaattgcgttaatattaaattattattattatttaactaatattcaggtcatattcatcaaagcatcaaacgagacacaccaaagaaatgataagtttaaatattgaattttatattaactttgtatttaatttttatgtcttaaaattatttaaattttagtttaaatataaatactcaactaactatagtgacggaacaattaattggaggaaaaaaaagtcggcaatattttaatatttgaattttttaatcatcctcaaaaaa

SEQ ID NO: 83760 - DNA, 1119 bp, Heterodera glycines
atgccgtcattttttgccattttttcattttcgttgctgttcattttgtgccatcattgttcatttgccgcttttttgatcaccaattatccaaatccgttaaacaacgcttcgctgtggaaatgcggcatttcctcgccgggccctttgtgcgacccggactcgctgctcaacgaaacggcacggcacgaggcattggagcttttgaagcagttccaggaccaaacggacattgatgtgggagaaacaatgaaaaaaaacaaaaaaaaaacatttaaaataatgatatttaaatttaatagagcggatttctcggttttattgtattttaaaaatccaaacacattatttaaggaaatcagaaaaattaaattaaaattccgattattatcatttgtcacaccaaagaaatttaaatgttgaaaaaacataaattattataattttattgaaggacaatggcgatggcagctgcaaaggcaaaggagtgattgttgggttggcgctaacgaaacagccaatcattgcgagggtattaatttttaatttaatgaccaaattaccatggaagtcgatactcattcagtcttcggacttatttggcccattccgttttatcactcctttacactgccgaacaaaatcaaaaagcatattttaaaaaattgagggatcacggctaaaaatgccaaaaccgaccattactgcctaaagatccttcacgccattttaccaccacagaatgcgcggatcaatgtgacggacgatctgatgaagaacatttggcagttggacaatcggtgcaacaaggcgctgatgctgacgctgtccgtacagccaacccccgtggtgcgcttcactcggtacatgaccacgccggtgtttgacgacgagttgcaccacctgatctggactgaggtgtcgaccgaccgggaattaggcactcaccaattttcaatcaatttattttccaattagatactttaattttgtttgaaaatgatcgtagtcgtgtgagcttttctccgccattggatgttttacagcaataagttaccgtatgccaaattcgtttggattttcagctgactcttaataatcttttgattttaatgaaaa

SEQ ID NO: 83761 - DNA, 265 bp, Heterodera glycines
atgaaacccaaaccgatttatgacagattaattgaattgttatttattttgaaggtaaatgctataaattcttcatccaactcgtgctccgcttgttgaggatcaaaaagcaatattttaaaattctataaaattatttttttaagcacatttttatgttgatatcacgtgtaattttttatcttcatgtgttagatctcagatttgtataaaatgaaattattttatgttttatttttattacaaaatctttaacacaaataaa

SEQ ID NO: 83762 - DNA, 398 bp, Heterodera glycines
atgggagtacgtaacatttttcaatgataaatcaaattattatccattacagttccagacggcatgaggcaattgttcaacccggctcccaccccgccagtgctttatgtgttcagaggaccggcccgaaatggagttgcgatttttaacccaacaattccaccgccacctccggtccttcgcgccccgggaacttagtgccgatcaaacaattggacgattttaggaatgatttttggataattgttaaccgatccctaaactgttgatctctcataaaagctgtcttccttttaggggcatatctttcattttaagggaaaagctaaagaaaatagtgtggtgtgacgggtgaagatgctatgaaagtggtgaaaataagtgataggcaattggaa

SEQ ID NO: 83763 - DNA, 741 bp, Heterodera glycines
atgtcagtgaatttatattgtaaaggaattacagaccctgtagtaatacctatcagaccgaaggagcaaatatctgcggatacgattcttaatgagtttattaaattacaacaatcgtattcggaaatcaatttactcgatcaagaaatatcagtaattttcaccacttattcaacacctgcaggaagcggtaaaaaatataattaattcatatgctcatcatttttaggcagaaaatcaaataaattaatggaaaaaaatgatcttagtcgtattcgtatttctaacgctgacaatttctgtaaggggttaatcaaaaaagagaatttaaattgtttttcaggtttattttatgccttagagctcacccgtcattaccagctcattaacaatgggataacatataaaaaatatttatgtgttataaataatcaaaaaaaacaaaaaacgattgtgcgagatttgatgaatgaggcggacattaatcaaaaagaaaaatcctacgggctcgatcatatcaaaataattcaaaatttttgggatcaaaaatattcgaaattatatagaattgtagcctttgattatgtaagaacattctcgaaaaaactttctttatttgtgttttagaaatgtggtttgaagcctatatttaaagcagaaggtgggaggcggtttgaagttgctgttttattgcaaaatggacattggtgtggactgaaaagaatcagacgttttttcaat

SEQ ID NO: 83764 - DNA, 533 bp, Heterodera glycines
atgccaatccgattcccaaaaggatttcgttcattggccaaatggacttccgaaaggttttttaggttggtcgatgaactttcgaaaaaagatattaataaacaatttaaaaatgatttaaaaggtcattaaagtacagaaattgagttcttctccgttaatgaggccattaactgaagtttgttgtatcgatatgtaccaagaagtgtgcttaatccacgaatgagaaaaattaaagaagcaactaagggaaatgatcagttgtttggactcacaaaaaagggtagaagtgcaaaatgaaagggattaagccgaaaaaaattcgggaattgaatttttccatttcaaaataataaattattttattgttacatggattattataattatttagcaaaatccgtccttcgctttctccacttcctttttcccaccagacattcgttcttccgcccaattttgacggaaatttattatacaatatttttgtgtggcattctttggaaatgttcaaaaagaaaaagccgttttaa

SEQ ID NO: 83765 - DNA, 478 bp, Heterodera glycines
ctaaatcccggctttgacaagcgatctttcgattccttcactggccccggcttcactgggctggacaagcgggccgctttcgacaccggcttcaccaattacgacaaacgcgcgttcgactcgttcactgggcctggcttcaccggacttgacaagcgatttgaaccgtttgatggtaaaaaggacaaccctttgattatatttgatttatgttttcttttttcaggctatggcttcaacggatttgagaagcgatcgttcgattcgttcatggggcccggcttcaccgggatggacaagaaaaagagggcgttcgattctttcacggggcccggctttacgggaatggacagaaaatgaacacaaaatggacggatggccaaattcaatcaaatcgttaaaatttgaaatttctatgtgaccccagctgttttctttgctgaattgcaccagttcgatattctcaatttatgcgcca

SEQ ID NO: 83766 - DNA, 978 bp, Heterodera glycines
acccacaggaaaatatcattttattattttaaaaaccaaaattttattttagaaaaccaaaaaatgggaagtgcccattttcttggcccaattttactggtcgcttttgcggcgcttatccttggccaacgttcgtctccaaatcactcttcgggatcgccttcacagcgtgagaaatcacatggactgtctcaacagggaaaaggccatggagcaaaagaggcaccggggcaacagatcaaaaacaaagacaattcgatgccaacaattaaaaaaggaacgtcgacgaaaagccaaaaaaagggaaaaggacggcacgcaaaaaacaacgacggaattggcactttgggaaaaagcaaacgacagaagcgattcctcacagaaatattcggcaattcattggacaaatcgaaaaataatgcggaagagagtgaacgcaaaagagaagggtttggcattgtgccagaaaaagtgaagggaaaagcggaaaaaacaaacgaaagagcggcagaaaaagcaggtgaaaagaatggaaacggaggccgccaaaagcgcttcgatgaaagaatcctcggcaacaactcatttgaaccgcccgttctgaatcttggcccaaattggccaccccctcaataccggcacatttctttttccgatgcctccaacaaaagaggacagcaaaaagatgaagcggaaaagcgcaacaaacgaagcacaagccaagaaaatgaagcggaaaagcgcaaaaaacggagcataagccaagaaaatgaagcggaaaagcgcaaaaaacggagcataagccaagaagatgaagcggaaaagcgcaaaaaacggagcataagccaagaagatgaagcggaaaagcgcaaaaaacagagcataagccaagaagatgaagcggaaaagcgcaaaaaaagaaacattgcggcaactgggaaaagcggacgccctcgcggaccgattttgcccgaatga

SEQ ID NO: 83767 - DNA, 1708 bp, Heterodera glycines
atggctcgacttctgttgcggctttttggcttggccttcgttttcgccgttttggcctttggcactgcgcagcccccgccgcccttccaagggagcggttcgttcagagaaggtgaagccatcaatttaaatatttaatttgttatttttggcattttaaggccaattcggcgcccctccgtttggtggctctccgccgtttggtggcaattcggcggacgtttcagtctcggcgagtgattcgtcggaatgcagcggaggaggaggaaatggagtgcaaggaggtgaaacaaatgcgcatttctactctataattcattaattcaggtgggcattacggtaatggcaatggttacggtaatggcaatggttatggcaatggcggctttggcggaggcggtgccgaaggtggccaagggatggacatcgatgtggatgttcagcagtcatccgaggaggggaaacgacgccgtaaaagacatagcggattcggacaattgatcgacaaaatcaaaaactttgttggcggcaaagaatcgatggagaggggtaagccaaattagcaaaggaacaattagtgaacgattaattgacccgggattattatacaatttgcaaaattgtaaggttagttaagtattttttaaaacttttattttttaaacatttttcatttttttcaaaataaagtcatttttgccccttattttttaagaaaatgataaaaatgggttccgtccaaaacgcaactataaccctttgatgatgggagcaatgggagcatcgcaatatggtcaaattgatcatcaattaattaacaaaaatacaaacatttgttcccaatttgcaggttcgatgtacggctcgccttatcagtcgaactcggcttatgggaataatcaacagtttggatatccgaacaatcagcaaaatcaatttgggtactctaatgaccagcaaaactcaaattatcaaatgcgctaccaacagcagcagggatttaacccccaattgttgcaacaaaattcgaatgatcccaacgatttttatcagcagcagcaacaatataattcgaatcagcaatatggtgcgaatttggcacaacagtacgacccgaatcagcagcagcaacaacagcggatgatgatggcaatgatgggacagcagcagcaacaacagccatttcagcaaatgatggcaccacagcaacagcagcaaaactatggaatgtattgaaacgaaagattgagaaaagaatgaatgagtcatcgaaatggaaaaaaggagaagcgattgaaattccttatttaaaagtgaatcattcactgatcggtagtacattaattaaacaagaggaatgttttatttgctgctaaaaaggcgcgatgagaagagcgaagagagaaaggaacgggggaaggcatgacatttgtgtcaccgtaattttctctgctaaaattggggaattcttgggcgggggagtctgtaagtctgtaattacgggtttagtcttttttttttaaagtagcaatttggggcgctcacacaacaaagtcaaatccgattgcgcggcacgcgccgcaatgattcctttcctcaaagagtttttgcgcttttccactcatttgtcagcccactttttgttttgaaaatgtatcatttgtaaagcaaaattaaaacccttatcagaaatttcgaaaatattaaa

SEQ ID NO: 83768 - DNA, 863 bp, Heterodera glycines
atgatcaaaaaaagtgccgtcattccttcccttttgctatgcgccattttggtcgcccaatttattgagcaggtcaaaatcaaacgaataattaagagctaaatatccattaatcgattgcttccgtcgttgtcccctttaaggccaatgcttactgttgtaaagtgtccgattggccaattggccatccgccgaactgcaacatttttggctgcaactgcgactgtctccattgtgtgaacggttcgccaaatttggactgatcatgtccaaaatttgaatcgatgttattcagtgattgagaagggttgttgcattgcgcaaaagacggggctgaccgttggctgctcagaaacgcgcctcaaacgccacgcgctgccgcaacagccgaagcgggcggaggccaaagaggtgtttcagcaagcggacactgacggagacggggcactgagcatggacgaagcggtgggacgaaaatgaaaagcgatgattaggaaaaagaataattaagaaaaacggaaaatgattgggaaaaaggataattaagaaaaaggagatgatgggaaaaaaagaaacacagattattgactaaaagaaattaaaaaaatagatttatgtttttctaaaccacagcattttgattgttttcaggtcaactttttggtgtctaaatggaacatgacggaaggtgagctgaccaaccccgacaaacgccattggttcaccgaaattgacgtgaaccgaaacgaaaaattggagcccgaagagatagacgaagcaatgacaaagtgagagaaagaaggagaagaaaagcggacaaatgaaagaccaacggaataacaaaattagcaaacatttaaata

SEQ ID NO: 83769 - DNA, 865 bp, Heterodera glycines
atgggcaatgtccaaagttattcgacggccgaatgcaatttcaattgtgaccccgaagctgcgcacattgtgctcaaggagatgcaatgtccggtcacaattgtcccttgggagacatttatggccaaaagcgatcgaaaagttggtcgattagcaaagacataagctcaatttttaaattgggaagaatgaaaaatgaattttcaatgaaagtattttttaatcaatttttttttaatttccacaggtcaatccgtcctgctgtaaatgcttttccctctcactttaagcatggcattgactttcacgcgcatttgtccctcgacgttccgttggcaaaattcttcgccacagtgaccaatttgggaagggcgcggatggaagcgaacaatcgccaatttgcgtattgcgacgaaatcgccgtgggaattgccatcgccgaggggaaaataattcgggaggcgaaaatgttaagggcgtcggtggaattgcacggggaattgacgaggtaagcagcggaaaaacggaggcaaaatgatggacaattcccaaacagaggtcaaattgcggtcgattggacaagcgttctttacggaatggacaacggattaatcggtaattaatcattcaaaaataaattaacaggagattaaatgcatttgtaaaaagtaattatgccaaggcgaacacccaaagttgtgcaagcggagacagcaaatcgaattcgtgttggattacgatgttcaccgattggaccgaatggtcactgaagcgattgaaaattcggcaaggaatatagacaaaagcctcacaattgatagcgaattatcacttgctgaacgcgaaaataacaacgaagaataaa

SEQ ID NO: 83770 - DNA, 901 bp, Heterodera glycines
atgtccgttttcactttcttcccgtcagatccctcactcgaaaaattgtaccaacaattggtggtggaccaagacttggacggttggcagaatgtccgtggaccgagggacgaagaggacaatgccgagtttgaggtggtcaaagcgcgccgaaaggcggaaatggacgctaaacgggaacaggtgggcaaattaattacgattgaaaagccattgatgccattcgttcagtaaatttttattccttttaattcatggaattttcggcggcaaagtggcgctctttaataataattataaacccgactggctattgacccttatttgttaagtttgtaaaaatatttttcagaatatttctagtcgtgaatgggagttcccgggtttaggaaaaatggaaatttgactaatttcttaactaatttcattcaaaaaaaaacaaaaaattcctttagtgttatcgccttatatgagtaaaatcgcggtgcaccccaaaactccgccgcccaaacttcgccgagacataagtccgccgaggcaaaaaattttcaaatttagaaatttttcaagaaaaaaattctagaaaaatcaaaaaattttcctaagatttttttcttgaaaaatttcttaattttgaaaatttttttaaatttcttcttggcggaatcgtatggcctttggcctgagaatcacttgcgctttccgttttcattttggttttgcaatggtttcaccccccccccctccctccaactaggacaaaatagtcaaaaactaggtttttttcctttttttaaatgtttgccaatttttagtttcgtggcaaacgcgaacagctcataaagaggctggagaagcagcaatgaaaagatctcaccattttatttttgttttgtttaga

SEQ ID NO: 83771 - DNA, 1482 bp, Heterodera glycines
tcgctgttctcttccctctcccttttccgtctcttttattttaatgccaaagtccatttgcggtccatcgccaattgggcatccgctgtggccatttggttggtccctcctcctccaatttcctattaaatgcacattttgaggtgtgtgatcgccgtgtgtactgatcggctaatcggaattcgcaacccgttgtttgcccgggggcacgtcccccggcgaaagatggcactgctaatgggcttcattttggcggtgcctgcgttgctcaccgcacaccagcacttctcccacaaatgtctgatccgcgccttttgcaacggcacgcaaatccattccatctgtctgccggtcactcaggagtttgtggcacttttaaatgcttgcgacaatttccgtttgcagagaatggcccaaaaaggccaatccgtactccgtcgcttttcgcagatttatcgtaagtcccccgagggagagaacttggcaaataaatatgcctttagtcaatcagcacgttgataaacacggtgatcaggtgaatggcaaatgccaacgaaagttttccctcgtccacacattcactccccccccctctccccactttcagtgtcattttccccatcattttgctgaccgtcctcaacgttttgttgctttgcgccctccggcgtcgccagagggaactggccatcattggcaccaccaaacagatcaagtatttattggcgaatgatcaacccactttttgacaataatttttccctctttgaccccttgggctttcttttgctctttctccccaccgttccgtccgttttaggccctcaaagtccacttcttccgagggtctctcccagcaaatggttcactccaaaactgaacagcgagtgacgtggaccgtcactttgtgagttccatttcaattcagatgaaaggcgtttcgcttctcattttgcctttgtccaaagaatcgtttcgatgttcactttcactaatggcccttccgccgttattaatttgatcgaaggctttggcattaagccgccgatggacagcaaacaatggtacaattggacattaatcgcaaggtgaaaatgggagagggggggggggtaattagctaataaattaccaccacaaattggcatacctattacagtacattggttatccttggcaaagtgtccaatttcattttgttttgtttgtcttcaaaacactttcgtcggcgtctttttgcacttgcccaaaaacgagcgaacgggcgactcggtgagtcccccgcgggaattccttcattaaattcgccctcctcggcttgttcagcttcgtttcccaatcgacaccgatcctcttacacggcaatggacaatacaacgcggaggggtacgccgaagtaaatgttcaatgagcgtctgagaggaagagcctaccgattcgaaaatgcctgtgccaacggtacactgcgaaaaaggtgacgtt

SEQ ID NO: 83772 - DNA, 383 bp, Heterodera glycines
  unsure (1)..(383): unsure at all n locations
atggaacggatggtcacattcccgagcacatgcgtagcaacttatcggcttgaagaaaggccaatgcgtttggtgcgcaattgcaatttggtggaccagaaaatacgattataccgcgatcaggtcgaaaaagaaattaattttatttggtatatatttaatagtattatcttgaaattatgaaaattaataagtttccagcttttcggcaaatagtgaaaaatggtaatctctttaaatactattaaaaatatagaaaaaattcaatttctcgttttctgttattgaatggttcgtacaaaaatttttgtaacccaagaaaaccgaggatggcttcctctaaaataataggagtatttatatttcattanaataataacata

SEQ ID NO: 83773 - DNA, 104 bp, Heterodera glycines
tgtccgttgtggtgctcactcaatcatggggagcgataatccatcgcagaattaaagtacagactatagggaagctattccggaaggattcggtctctccataa

SEQ ID NO: 83774 - DNA, 418 bp, Heterodera glycines
atggtggaccaatttttggaggaaatttaccaggaaatttgtcaggaaaatgagcagaaaaagtgccaagaaagtgagcagaatggtaaaccataaacaaaatgaataaaaataaacctgaaaaaataacttgggttctgttttatttttttaattgcaataatttgagttagggggcgattggttgggtcttagattcttgaattgtttgtttcggatgtcttaaaatatatttgatttgacaagatgtctaatcataataaaagtttaaccattcataattaattgtgcatttttaaagttaacggaaccgacaattggccaactcaagaggacaatccgccgacagaggacagtgtgccgcatgtgccaaagcttatccacggtagtgccataccaaaaccgatggattgaacca

SEQ ID NO: 83775 - DNA, 950 bp, Heterodera glycines
  unsure (1)..(950): unsure at all n locations
nccatgcccaaaaccatcctgcaccgtgcaaagagtccacatcgactaatgccggaccatttttcggcaaggaatatntaatcattgtcgatgctttttcgaaatacccggaggtattcgaaatggccaccaaatcgacagcggcaacaatcgaaaaacttcgatatttgttcagccgacacggcattccggaaattttggtgtctgacaatggcacccaatttacgagcaacgaatttgctaaatttatggccatcaacggtgtcaaccacctgttttcagcgccgtataatccaatgtccaacggccaagccgaacggttcgtggacacgtttaagagaacgtttcgaaaattgaaaggggagggagccccaagcaaggaaatcatcgaaactttcctggtaagttaccggactacgccaaatgattcgttgccgaacagcaaaacacctgctgaaatgtttctgggaagaaaaccccgcacaactttggatttgttgcggccgccaccagcacaaccgatcgaaagagacgtagaaatggcgagacgcttcaataagcgatttggaaccaaattaagggagttttcgatcggaaacaaagtctttgcccgccacagaatttcccaaaattggcaacagggcaagatttcaaagcgaactggtgtgatttacgacgtgacattcgccgatggtaagtcagggcgataccacgccaaccagcttcgtcctcgcaacacatctgactccgacgaacagctctcggtgatgctcgaagtcttcgacatcccaagaccggttgctgttgaggagcaaagggcaatcccagtggaaatgccattggaggacccgcttggcgaacaggaaaatttgggaggtcaaattgaccagggacagcaacgacggtaccctcagcgaaatcgccgtccgccgcagcgcttctcaccgtaa

SEQ ID NO: 83776 - DNA, 1122 bp, Heterodera glycines
atgtcaagctggtatcccatattgaaaatcaaggacattggcaatgcttcttccaagccgaatgtgccggtgattccattggcacaaattgtccgttgggattgggacacaaatggggcacaacagatcagtgaagtattaaagaaatgatcaagcttataatttaattacctaacaaatattattttagacccttacactcaacaagggcagtgaagttaatttcaacatccgagccaatgtttctccttcatttattattcgaattcttaaaaaacggtagaaaaagtaaatattataaattacccacattttacacttttttttttaattttggcccaaaaatggcatttttttatgctctccgcgctcaaatttttaaaataacactggcgaaaatggtcttcggattccccccccccccataagtccttttaaagaaccagaaaaataagtactgatcccgattggagttgcgagagttgagagtgatcctcctccgatcatttaacatttattgtttcccgccgattaagtgcgttcccggcgccttccatcaactcaactgatcacgacgatttgacggtgaaaattggtgacaaacaggtgaaaatcagaaagaaagagagtaatggaatttatcttagcccaaatttatttgaattctaataagtttagcagaccattgataattttaaaaagagattatcatcgattccctaattcttttttgatcagatcagtgaaattttgatcaggtcttgcttaagctttataagatatatcactgacaaacgattttgatcagatctatcttgaaaatagataaaatcattgataaatttgatagatcactgatagtcttgatactgataaatcttgatcaaatcgttaattaattttgttgatcagatcgctgtgtccgcccattggctgtcgtccgtttccccggtgatcagtcgcatgctcagcgtggagatgaaggagaagcagcagcgaatgatcactttggacgaattgggcgtggacatggaccaattcatggagtttttggaggccatcaattatctgttaatgagcggaacttttctgccaaaccgtaattcattgatactgtatcta

SEQ ID NO: 83777 - DNA, 522 bp, Heterodera glycines
atgacggcaagacaaaaatggatggcaaatgcaacagagacagagaggggaatggaagagaatgtcacgaaaatagtggaaaatgagaaggattggcattattggcttgggattgggggccgaatgcccctcatacgaggtcgcgaagcggccgagtgagtacattaagcacgggaaaattggtaaatgggggagaggagggtccactgcgtttcggcgctggtgtttcggcgccagcatgtttttggctataacttttttctttgtaaaccaaatccaacattgttggtgtcattgaaagcttaatctatttagaagctttttctaagctattgcttcgcgattagacaattaccaaaaaagttatacatgaaaattgcgaaaagtcgaaatttttgaagttttttcttcataaaatttttccaaaaaatcttttggttttttgttaggctaatagagcatgttaagagctttcgaatgataccaagattattggtttggatgccaaagaaaaaagcttaa

SEQ ID NO: 83778 - DNA, 1080 bp, Heterodera glycines
tgtgctgaacaatgccttttcagggcttccaaaagatttacaagcagttattccctcagggcgaccccattgatttttccaatgtcgtcttcaaaacttacgacgacgatcaggtgaattaccaattcaacacctatggacgtaatgtaacgcgttacggtaacacagtcaccgccctcccccaccccgtccattagaaaaacacgaaaatgttttggtgatttgaactcattcaaacgaaagtggaaatggcattttctgatgtttttaggacggagcaattgaatttgatcagtttgtgcacggtttgttaatcaccggacgtggcactttagagcaaaagttggcatgggtctttcggttgtacgaccaggacaaggacggagcaatcacccgacaggagacgggtggagatgataaaatgggaggggggggggcaataaaagacgaaacatttgaaagggagacggtaaatgaactgaagagagacggtagccaaaaaaagtaccgaaaattatggaaatttttaaagacaacgagcaacagctgatcagatgatcagaaataaatacttcaaaatttatgcataaccaactaatttttcaagttttttgcagtaactttttgtgtctattgaaatcctttgaccttttgtgggcaaaaaaaacatttaaaattctcaaaataagcataaatggcgaaaaatgtcatttaatgcaaaaacaaaaaaggggaaatattaaatattttctgaaaacaaagccaaaaaaaaccctcgcctacttttttcgcttattttcgtgcttttccacagaatgcctaattaggcacatttacaaattgtccggcgatgattcagagacagcggacacaaaaatggtgccgaacagagtggcgatgatttggacgaaactgaacaaggcaaggccatttcggctccgccacagaacagaggccaacggacaaagccatcctttttaggaaagcgatgccaaaataaactcggcggaatttgtggaaaatgtgaagacggacaaagcgatagtcaacgttcttagcctatacgaaggattgggcaaa

SEQ ID NO: 83779 - DNA, 1182 bp, Heterodera glycines
aaaataaaaattgcgaattcaatcaacttttattgttccagttttccgtttgtactttttcctgtctctcctctcttttcctttctttctggctttgcttcttttccctctcatccttttcgtttctgtccctctctttctctctctccctccctttctctcccctttctctctctctctctcttttaactgctttttcaccttctaaaagagcgatcctttgccgaagcccgcgcccgattttacaccaccgaagtcacaagagctctcgcatatttgaacgcgaaggatatcatttacaggcactcttttccttttcgttcgttcgctcttcgaaaagcgctcattttcggctaattgtttagggatttgaagcctgagaatttgctgctggacagaaatgggcacgtcgttctgacggacttcggcctgtgcaaagagcacgtcaaaatgcggcagaccaccagcactttctgcggcacccccgaatatttgggtgggcctttccccccgtgcctttctcagcccttccgccgtttgctttaagcgcccgaagtgattcagaaaaagccgtacgatcggacggtcgattggtggtgtttgggctgcgttctgttcgaaatgctcttcggattggtccttttttgcctttcccaccctaccgtacctcccgaacactttcagccacctttctacagtaagaatcagaatgaaatgtaccacaagacgctcacccaaccgttgtgcgttccctcgtccgcttcgactttagtgcgcaaattactcgtcgaaatactgcacaaagaccgttcggaacgattgggcgcaaaatccgattttgaggcaaattaactaattaatgattagtgattttggatgaaccgaacggtcatttgctaatgcgcaggaaatacgaagccatccctttttcgcaccaatcgattgggaaaaactgctaaacaaagaagtgaaggcgccgtttgtgccgaaagtgcgtgccgaaacggacactttgaacatcgcgcgcgaattcactgacattgagccgaaccctggtgatttgagtcaccgcatcatttgtaatgacaaatctcagcttctttggtgcctttgcaaacattcgtcaacagagaaacggaattcgccggattcacttacaatcagaagccgaatttgcacatt

SEQ ID NO: 83780 - DNA, 1362 bp, Heterodera glycines
  unsure (1)..(1362): unsure at all n locations
atgtcatattcatggtcagcgacccttaaaacccccgaaacatgtttcaaggtacttaataaaaaaaaaattcgtcaaaaaaactaagttcagaagaaagttagaaattcgaattttaaatttcctaaatttgagtcttaaacttacaaaaatcatttgaaatgacctaaaaagtgtataaaatgggtgccctttttaaagtttaaacagtgtaacagatccaccgaactcattttttgaatttacctttgaatttcaaaatttctgccaacaaattccaatatttgggatggcatggtttttctgaacgagagacaacaaaaaattttaaggtagagagcctaaatatttgagaattttggtggcttttgggcaaaaccctctaaatttggcattattttcggtttctttttcttttgttttaaaacattcttttcatcctttccctttcgtcagaattgccacgcatttgtgacgngggagcattcactggacgacttggcactgcactacaccctttccccagttgagctgcagcgacttttagctgagaatggcaatttccgattcatcgcccgctgacttttttacccattttcgttgattttgacacatatttatttatttaatttatttcctctcctccctctctgccttcttttctgttactttctttgagtgacgatatacgggaaaattcgacaaaaatctcgtgttgccatctgccgatgctactgcttgttttttaaccacctattttggtcttttcaagaaattccataaaaattgtaataagaacgaaaaatacacccctaaaatcgatcctaaaaatttcagaaaaagacaaccttaaaaattgaccagaaattcagaaaatataccctctaagaaattaaaaattttcgcaaaaatgtgtctccaaaatttattatttattttcttgacaaagttgcggttgtgcgggagaaattgataaaatttttttgtcacttttgggattttttttttgcataaagacattagagtttccaatttttagcacctattttgcacttttttggcttaagaaagtatgaaaatttggcttctcttcagtttctttatcttctttccaatctttttcttgttgttggcctccataacaaggcgatgattttatgttttaaaaattcttaaagaaattgaatatttatgtctcgaacggacagaaatatttattttgttttaaattttagttcacaattttatgcaaaatctcacatgctaattattttgtatttgtttttttgttacattttgcattaacttttattgtggtaaacaaaaatagagataagtaatttaaatcaaaacaataataaa

SEQ ID NO: 83781 - DNA, 526 bp, Heterodera glycines
atgggcagtgactctccagcagcgcgcaactacgcctatacatatgtaagtgcataattgtttataaaatcccacaaattaatttatttttaatagattatcaaccaacgacttaaactacccaaaattgaggtaatccctttaccaccagctgatcaaatccaccctgccgacctcaacgcaatgaatgtcctcctccaaaatctttacatcgaggtgaaaactgaattggggaaatgcagaatgctgtggaaagggatgagggtatgaaaaaacttaattaaaattgattaatccatatttttagctcaaaaatagactcataattaaaaaaacaatgtcgggaacagaagttacggcgtaagtcctttgaaaaattaaactaaaaatgattttttttctaaaatcagaaaaaatcatttaatttttagtgtaattggaaatattcgccgccctaagggatgataatttaagaacattttatgttctggaatggaagcttgttcaattgcaaaattcttaaata

SEQ ID NO: 83782 - DNA, 317 bp, Heterodera glycines
atgtttttaagttggtttacagtttacccacccctttactgtgttttagtcaattttgaaatttggaaaaatatttttctaactttaaatttttttaaaattttgttttcagtaaaaacggatgtcatattcatggtcagcgacccttaaaacccccggaaacatgtttcaaggtacttaattaaaaaaattcgtcaaaaaaactaggttcagaagaaagttagaaattcgaattttaaaatttcctaaatgtgtgtcttaaacttacaaaaatcatttgaaatgacctaaaaagtgtatttctgaatccaaataaa

SEQ ID NO: 83783 - DNA, 1189 bp, Heterodera glycines
atgggcagtgactctccagcagcgcgcaactacgcctatacatatgtaagtgcataattgtttataaaatcccacaaattaatttatttttaatagattatcaaccaacgacttaagctacccaaaattgaggtaatccctttaccaccagctgatcaaatccaccctgccgacctcaacgcaatgaatgtcctcctccaaaatctttacatcgaggtgaaaactgaattggggaaatgcagaatactgtggaaagggatgagggtatgaaaaaacttaattaaaattgattaatccatatttttagctcaaaaatagactcataattaaaaaaacaatgtcgggaacagaacaacgaacagttacttacaatggtcagagtaaaattcggtatgtaacatttgattatgatagaattattattttttcaatcccccaaaagaagggttatttatgtaaaaagaaattttattataaaataatcgagcatttcttttgaaaattttctttgacagcatctatcgaattgtaaattttcttaattaagaatgttttcagaaaatttgctattgaactgttcctccattccaaatatgtgtgaaattttatatttaaaatatttaagtttaaaaactttgatggaagatttatttaaacatgataagttaaaatatttatcattcgatagaaggaggcgcacgaggagaaatagtttatgtcatagtaagaggaacgggacatgagtcggccttagcacgcaactacgcttatacatacgtaagtgcatgaatttatataaatcattaaaattaaattattttttaaaattaataaaatccttattttaactcagaaaacacttgtaaaaagaacactgctgggagagaagtaaagcgtaatgttccactgtcagaagttctttctcttggcattgttcgacaagccccactcccaaatttgcggcatcctcagttgtgtttgaaatttctgaaaaatggcgcttcatccggcttttttgtagactttctagcgtattacggaacatttagtcggtcatcaataaaaaactctgaagtcaaaaaagcacatattttaagcgaattttgagcctttttcttcttcaggtgggtttaaggttgggaaatgggcaaaaggtcgtattcggattctgaggccccgaaaactctaa

SEQ ID NO: 83784 - DNA, 1663 bp, Heterodera glycines
atgatgaaaattaattttgtgattattgtcttcttttttttaatcatactaattgatgcagttaacgaagctttatttgatgatttgtgggataatctaaagccaccgacctcaaaaaactttaaaaaacaaaaatttggagaaaatattgctataaatgaagaaattgttgacaaaaatgaaaattatgagcaacaaaatgccaataaaaaaatgataaagtatgaaaattgcaatgagaaagaaatggaagacacaaagccaaaaatattacaaaaaacattggaggaacaaaatgataatttaatgtcaaaaataaaagtgccaaaaattgaatttgacaaattgagcgaagactcatttgaaaataaatttaacaagctgaccacttctaatgattcggattacaataatatggtaatgtataataaaaaaatgaacaaaacaggaaaatcttaaaatagaatgggttcttaaatacttcaattatttataatttttaaatatttattctggaggcagaaagaagaaacgaaatggaaaccttgaatagatttaacatgatgaagaaggaattacgaaaagaaaatttttataaaaatttgacaaattttctttttgaatgcgaaattgcaaaaaagttgggaacaaatcgtaccaaaatttgtaaattaaagcgaaaattaaagcaagaaagaaagagagctgaggaaagtgaagaaataaaaatggaattgatcagaaaatttgatcaaatgagaaaagaaaaaatttatgggtttaactacgccgagaagaaaagatcaaaaatagaaattgcaattggcaatgaattgggaattagtcgtaacaaaatttacaaatggaagagggaatttagtaagagatcaatggcctaattgaattttactcattattgtcaatttaaggtatcaaaaagaaattttcaacgaaagaaaaaattgaaaaaattaaacaatttgaaaaagtgagagaggaatttttaaaaaaatttaatttaaaaacgaattggaaatttaaagaaaaaatagcggaaaaaataggtgctagattgagcacaatttgtgattggaagagaaaattggactttagacctcgtaagattccttatacttttatttaattataactaatgaaattcaatttaaaaatttaatttttgttaaggaaaaatcagaaattacacgaatgctgagaaattggaatatgtgaaaacaagtgaagagatgagaaaaagaaactcaatgatgagtgaggcaaaaattgccgaaaaattaggcattccaattacgaacttaagacgatggacgaaagaattgggcaccaaattaaacagttaaccttcgaaaattttaaatgctattgcaattttaagaaattatatcctatgatgacagttgagtcaacttaattatgcagagaaaagcctagtgtagtatctctttgtttcttttttctttgtaatttctcggggccaggacgttttcgcgtggggacgttttcgcgtgagtgcctgtttaccagggatggcacggaattccgagttccgacttccgaaatttttgatgaaaagttggatttttcggaatttttttgagttttttgttcaaaaaaattagcaatttttgtacaatttatgtta

SEQ ID NO: 83785 - DNA, 514 bp, Heterodera glycines
atggacgaaaatcggataacaactacatctggaaaatcagtcaataaacaacagaagttaattcgacagggaatgggttttttgttgcaacaggtttattaattttgcaaaatgaaatcaattagtaataaagattagagcagacaacgcaccctccgatgtgtcaacgagtcaaagggaaagttcaattaccaaaaaagtaatttggttttaattttcaattaaaattttactctaaccctgtcagaacaccgcctctgaggaaattacttcgaaggaacaaatcgtctctctcccgaacaaaaatttaattcattcggctgttgtcgagaaacgtgaaaataaagaattaccaaatgattcttcgttttttgctaatctgaagcctgcacaagtcatttccaattgttttaacgagggaacgactcccgacttcggcttacacattcacagatttattggagaaaacaattacgtccggtcttgcagatggtccgatttacttaaaggataa

SEQ ID NO: 83786 - DNA, 911 bp, Heterodera glycines
atgtcaaagaaaaaagctatcgtggaaaaagagctggcgccgaaacgcgagcgccgaaacgcgtgggtcccgtttgtacatttagtctttctaaaatattttatgaattttaaaaaaatactatttttttcagaaaatttttgtgttttaaaagtatttaaaataacaaataaatattataaaattatccataaaaagcgacgaagaaattgatgcagaagtttcctaatatttttttgttaatgttttattaaaacaaattgttcaatagtttttgcacgtttctgacttcaaaagttttgaaaaaaaattttttttgaggggggcttatattcgaagggggcttctactcgagggggggcttctatttttcaacccccctacaaggggggcttatattcgagggggggcttccattcgagggggggcgtataatcgaggaaatacggtaaatatttaaattattcgttacgcagaaaaagaaccttaattttacctttggtttgcttttttctactgaaaaattaataaaaaatcttatttacctatttcgagatttttgtgcctatttaataacaattttgagctttttttgtacctattttgtggtttttttgtacctaatttttaccgacctaataattattaataaaattgaattgttttattcctttatttatttttcagttttatcctcttcggattcgccgtcaaacaacagacacaattaaatggcacatttcaatatgaaaatggcacttttgcatatgaaggcgatggcgaactttggaccgacggaaaacaaaaaggagcaaatgcccaacattcctacggtaatggcgataccgtaggaattggcgttaattcggccactcgacagatcattttcacaaagaatggacttcgtttgg

SEQ ID NO: 83787 - DNA, 1767 bp, Heterodera glycines
atgcaggaacaaaatccggaaaatgataccgaaataattaaccaactacttacagaaagtgaagagattaatgaaaatgaagaaaatgaagagagtacagaggattttgaagaaagtgagaattcggcagatttttttgaggcagatagaaaaaaacgaactactgtaacgactcccgatgcacggtggcttaagaaaatcgggaaaagcaaatcaaggaaagggggacaagagaataaaaatttgaatacaagggtcaactatgccttatacaaattaaatgaggaaaggaaaaggcagtatgaccacattttcactcaggcatgtctaaactcaaattttcaactccaattagcaaaagcgattttgcaaattaacccaaatgagggggtacggaaaatttttaacagggacgatttggtggctcgttggaatggagaagaaatggaagttggtttttgcgtaccaattattccagaaaaagtgatttgggataaaaggataggagaagaatgttatgaatggacaccgatttttgccgaaaataccacatttttcataaaacccggcacaagagaattgagtattctgggtaaaaccattgagtgtgaaagtttgcaaaacgaaaacatttttaacgcaacacaaaaagaaattatagataagctcacaaaaaacttagaaaatttgcgtcctaaatatagaaatatgcagaatcctctcattttaaaagcaggcacacttttcgaatcagataatgttagaattgaagatgctatgttagaataccgaaaaaaaataaataatttgccttcttcaactttacgtatcgtacataagacaaatgtctcagaagtcattagactaattaaagaagaagcaaatgagacattgagcgcaattttgggaaaaacagggaattggattgacataatgaaaaatattccaaaaaaggcacaagaagcagtgaattacttaaaagggctatcaattttattaataattattccactaatcttattaatagccataataatttttatcttgacaaaatattggacaattatttcgggcggatttcgagcagggacactggccgctcgagtcgtcaggagaataattggaatgaaaaaaaggggtaccagggtcgctgcggtgccaacagcaccggaacgggagtcaattgaccaagaagcatatttattggaatatttaccgcctagacgggtggcaataattacaaatgatcccaggcgattaccatcaattcgtgttcatattaatgggcttcatacttccgcattggtggattcctgtgccagtgtttcatactgtcgggaaacaacagcaaaaaaagcagggttacaaatccaagaattggacgggggaaatccaaatttgactgcggcaaacgattcttttattcaaattttgggaaaggcacagggaaaaattcgcatttacgacaattcaactggaaaatttggagaatggtcagtgactttacttgtctctccagacaaacattgtccgggtcctttgctgttagggttaccaattttgacagagttaaagggaataattgcctttggagaaaaaaaagtgcgtcttgatgagatttggacaaacattatatcagtaattgaagttgaaatgcctaaatcaactaaagtaataatgggaaaaacagagataatcgaaccaagaacggaaaatattatttcagcacatgtaaaggagcattttccaaaggaacaaaatttcttg

SEQ ID NO: 83788 - DNA, 1711 bp, Heterodera glycines
ttctttttttttgtcaggaatgtcctcaagatgcggtcattctccgtgacattcaccgcacattccccgcccatgagtactacaaggagtccaacgaagttggccaaaagtcgttgtaccggatcagtaaagcggtaggatactgtaatataataattgtaatacagtaattagcgcaaagacatagctaaatttttggcatcgcggtgggggtctaactaacgcccacttccttccgacgacccttttttgctcttcggcctcttaattttttcgagcgcttttcaaaaaattaagggatagggttcggcctttgtcgagaggtgtagtcgggaattggaatttttgctcgatgctttttaacagattaaaatttttaaaaattcactgctcgtgccgataggttcgcggcagccagtaaattttgagcattttcacgaaattaatttgtcaagaaaaacggtattttttgcacaataattttcccattttttcattaaaagtgcctagacctgggcggcttaagtccagaaaaaaaaactcatgacacctcgacccagtgccctaataattaattattgaaatttaataataataataattatatatatatatatatatatatatatatatattatatattttttccatttaagtattccttgtacgacgaagaagtgggctattgccagggcctttcatttcttgccgcttcacttctgttgcatgtgcttttataatttaattaattaattaatttatttttcattgtgtttatctgtcttctttatttttggtgacaaactcatgtataatttggattttcaaaatagtcaaaaaattaatggcaattaaaaaaaaatttccttttttattatggattgagaatggtcgggctggatcttgaccctaaaattattattttttaaaatttttatttattttatttttccatttttcccctaaagatgccagaggagagagccttttgtgtgctggtccgtatcatgtttgattatgggctgcgcgagctgttcaagaccggcttcgatgcactccatttgcgcttccatcagttgcaacggcttgtggaagtcggcaaaatgaattgaaatgaattttaaattaacaataattaatccattttatatttttaattatttttatagaattatttctaattatttatttttatttcaggattatgttcacgatttgttttcacatttttatcaaatgggtattgaaacgcatatgtaagtgctgaaaattatttaaattatttttaattataaatttttattttttaaatttcatttgtttaattgatttaaaacttaatcttaaatatttaaaattaattcatttactaatttactttattctcaattataattaataattttacattaattttttattaaacgaatattaaatttaatttaaattttcaatttatttaggtatgcttctcaatggtttttaacgttgttcactgccaaatttccacttcaaatggtgtttttcattgtggacctttttctaactgaagtaaaaaataaatttaaaaataaatattttaattaaaaatattattaaatttttaagaaatttaattaattctttaattacatggatgtttttaagggaattaacaccatttttcacatatcgctggcgctgctgcaagactcaaaaaaagtaataataa

SEQ ID NO: 83789 - DNA, 85 bp, Heterodera glycines
gttcctgaacttttcctcctcgccactgatcaacatgtgcagttcattcagttcctttgtcacttcgtccgagtccatcccaacc

SEQ ID NO: 83790 - DNA, 2330 bp, Heterodera glycines
atgccaaaggcattgcgaatggacacccacaaaacgcaattccaatttcggaccaactcggagaatgccattgccgaactgaggcggataattttcagaaaattgttggccgacccaaagttagcggaggatgagcaagacatagggcaaagtgcacagaacggatcagaaattgggcagcacattataaacaaagcgaaagtggtgaaaatggaagcgttggaaagtgatcggatcggaacggccggaggcatttgtatggtgagcaaattggccacatttctgagagagccgaacaaagtggtgagcccgaagaaaggcaagcaatgcaaaatgagcaaattaattaaagcattaatgagttttaatggctcatttcctttcgcttccttttttcaggggtttccattctgaaaagcatcgacaaatggtggcccagcgaatgtgagcagcgcgaggaggcccaatcagtggtcgagactcagcggatatatatgacaaaaggcaatcgagaattgtattccgattttatgatagtttggggtcaattggccactctccgcggtggtccgacgcggttgcacaaatttttgtgtatgaatgaagccgaaatagaatttgaaattgccaacaatgaacggtacacggaccctggaggtaaaaaaataaggcccgatttttggattttcccaattttttacaaatgcaaatttgtttgggctttaactcaattaaaaagcaattttttcagcttggttcaatgcttctatgcatgctttccatagtcaaatacatatttggacattttcactgaaaaacttaaaaaatggaataaaatcaaaaataaaaatgtattttgacagagagattattaagaaaattagaaaactttcatacctcgctatctgacatgtttggtcaactaattaaaacgttctgagacgaagtacgaaaagtgcaaaagatcaaattaaaaggaaattatttaattttaaaaattaaaagcaaattattatgtttattaacaatatacatatattatttaaaatattcgcgacataaagcaaatattttttcacattgcgttaattttaattccaaaaattgaaaaacgatgatttccataaatctcgatgtagcattaaaggagagcaaaattaatttcgaaaaagaaagagaaaaactactgatcgagatccgcttttgtagccaaagttaatgaatgcttctttaaatttcggctcaacacgtattatgattaatataaattttaaatgtagcgaatattttaaacaatatatatatatatatataatatatatatacgtatattatatcaagtttaatttaaataatatttttcttttaatttgatcacttgcacttttcgtatttcatcatagcaccaattaaaaaagcctaaaacaaatatgaaaattctatgttatttttcttactaaaagctttcggctccaacgcattaaaatttctttagatttttaaaatacagtccaattaagcctggaaacaaattaaccataccaaaatgaccaaaaatcaatttgcaaatttccattttaagtttttcgaagtgccgatttgctacaaaagcattacctggatgctttcacaacaatttccccagaacctcgtcaggcactaaaattggctactgacattttctgttgggtgctttggctggaaaacgatgttttgaaattatgggatgacaagaaaaaggaaaagggtaaagtgatgccaagatttaccatggcatggaagcagaaccggtggtactacgaaatggtttatgaccaaatgttcgacattgaggaggcgaatggaaaagtggaagtgccgaagaaaaagcgccaaattggcattctgttgcaaatgtccaaacatttggtggaacagaagctgaaaatgccggacgaaaagctgagggtcgagctgcgcaacaaaaagctggaacggctgaagaagggccgacagtacggcacggcatcgccgccgccgaacggaacggtggacagagaatggcacgaaattcggcgaaagtcggaggagggaaaagaggacgaaaagcagagcagcgcaattgaggaatggcttaagcaacgccatttcgccacaatcaaaggctttttgtgcaacagcgaaaagttcaacagggaatttgagcaaagtgcgcttttaataatgccattcattgcctcattttgtcataaatatggctattaatggaaatgccacttttgcgccaaaatttaattctgtttagcactcagccccacacaaattacaagcttgtttattttattattaaa

SEQ ID NO: 83791 - DNA, 845 bp, Heterodera glycines
atgaatttgtggcatttattatttattatatttttctttatttttttaattaaatccggcaaaatccaaccaaattttgaagaaatatttggccaaagatgggacaaaaatgaaagtgaagaaattgtgataataaaaattgaacaaaacgaccaaaacgagcaaaatgaaactacgggcattgatcaaattggtggagaaaatggaacggacccaaatgatcaacaaaaaagacaaataattttgaaatttgaagcaattaaagaaaagttaaaggaaaaaataatatacaaaaggaaagattatggcaaaattgagagaaaaattgcaaaattattaggagcaaatcggcaattaatacaaaaatggaaaaatgaattaaatttaaataaaaacaaaattaaaaaggaatttatgaggagaaaaagcgcaaattcattgaacgatttgatgaatttaaagaattatatggccaaggcaaacagaaagaatttgcgaaggaattgggcatttgtgaaagaaacatttcgaaaatggaaaaaagaattgttgccaaaatacaataaaagtaagcgaatttctaactttttaaaattatttattattttcagcgctaattaaaccttcaaattatgacaaattaaaaaaagatgaagcaatattttgaaataaaagaaaatttgaattttatttgtttaattaattaaaaaagcaatttacaaaatttgttggatatgaagccaattatggtcaattaattattttttttgaattatgtgcccaaaaaaaaaaaatcattttgagtaaattgctacactttccttttaatttattttttccataaa

SEQ ID NO: 83792 - DNA, 489 bp, Heterodera glycines
atgaggagaaaaagcgctaaattcattgaacaatttgatgaatttaaagaattatatggccaaggcaaacagaaagaatttgcgaaggaattgggcatttctgaaaggacattttggaaatggaaaaaagaattggtgccaaaataccataaaagtcaaagtaagaatatatttttagtgaaattaaatctaatttttatttaagagcaatatacaaatgaagctaaattaagaaaaatgagaaaatattacgaaataaaagaaaaaaatcagaaattgagcgatgtattaattgccaggaaattggaaattggatcgtcaactctgaaaaatctgaaaaccaatttactacaacactaattgatcagttatgattgaacatgatggatgataatatgatcacatcgggcctctccccccgggcagtatctgttcccgagacctatcgggtagagaaagcctaagaattgtgtgattttctttcccgga

SEQ ID NO: 83793 - DNA, 932 bp, Heterodera glycines
atgcacaaaaagtttgacacttttgaggaggcgaagcattatttggagaagtattatgagggaaaaggttcgccatttattgaaacaatagcaaatttattttatttttgtagcggatgaaaaaaagtcgccaagaaagtcgcgaacttcgacggatgcaaaaatgaaggaagagaagtcgaaacagacaacggatgaagagacggacgaggcaacggcggaaaaggaaagagacgagcagacgaaaggggaggacgagacgggcgcaaagccagtcggtaagagcatttcaaaaaccaaataatcggagttccctaaaaacgaattctaatttttgaggccccaaaatattttatctttcgcataggtccgtaaaattaaaaattcacaatgtaaatcgactgctttatccaataccaatgtatatgttttttttccgactgacagctcgcgaggtttctttgttttagtacgttctctgtgtatctccagtcagattgtttatgtccagtttgcacgaattgcatatttattttgtagctcgtaagcgcacttatggcaccaaactgaacgacgaacacgatggcgacgaagagacaaagttgggctcatccgaaggacacaaagcactcagagaagaggacattcctcgcggagaggaaaacgccgatgccgaaatgcgcgaaggggacgaggcgaataggacggaaggacagcccaaaaaggaaggcgattcgatggagagcgaagcgactgctgacaacgacgacgagcagcaaattgcgaaggaggcagccaaggcagaagagaagatggagcagggaggggaggaggaggcgcagaaaaaggcggagacaaccgaagacgaaggcgtggccaagaaggcgaaactcgacgactccgactcaacagagaaaagctcgcaaaaatag

SEQ ID NO: 83794 - DNA, 81 bp, Heterodera glycines
atgccaacaacacgaccacgagcgacagcaaaaaattttgtgaaggaatcgtccacagacactgaaaatgaagtttcggag

SEQ ID NO: 83795 - DNA, 167 bp, Heterodera glycines
catagtcggactcggaaagcctttcgtcgctgcttgggcctcttggtaactgccgaacactccacgctgatgaccccaagcaaccgcataaaaaacggacggagtggaaggcgctttcggttgatgatcagacattttcagtgataaaataaatgggtacttttaat

SEQ ID NO: 83796 - DNA, 477 bp, Heterodera glycines
atggacaaattgaatttggaagagagtgttcaggaaatcgggcgaaggactgagctggcaaaagtgccgaattggcggtgcctaatccgtccaaagttcgcttccgttgcgttcgcttctccgtcactttaccctttggacgagtgccctcaaactttgcagcgccccgtggcaaacgctcggcaaaaagtaaccgccctcgagcagaaggcaaagagggacgccctgctgtgccaaaaggcccgtcatatagccgaagccggcgggggacacttccatttgcccttgggggtcgccgattcctgcgtcgaagccgcaggacacgaggacaagtccgggacgccactggtggatgattggaaggacaatgcagtggaagaaagcggcgtattcggcgtccccacaaccgacggaattcaatggcacatttatggtgttaggatctttcggaagaacatcgctgttggtctgacatga

SEQ ID NO: 83797 - DNA, 1306 bp, Heterodera glycines
aaaggagcaaagtgcagctatcctttcccatccattctcttcagtgaagccccaaatgcctttgtggccattcgaccgccgggccatcacgtaaaagggcaaatgcgcgggggggggggggaaatgcccaattcaacgacaaaaggaaatcaaatgccattggtcggattttctcatttttaaaggcctcgcagaacgacccttgcggcttctgtctgctgaataatgttgcgatctgtgctcgcaaagctcgctcattgggcgttgaaagggttctgatcgtcgattgggatgtgcacgcggcaccaggggacgcaatattgtgtggagggggacccggagggcattcttttgctgtccattcaccgctttgaacgcggcactttttggcccgagctccccgaaagtgccatagttcaccaatgtaagcaaaacgtgttcatgtcagaccaacagcgatgttcttccgaaagatcctaacaccataaatgtgccattgaattccgtcggttgtggggacgccgaatacgccgctttcttccactgcattgtccttccaatcatccaccagtggcgtcccggacttgtcctcgtgtcctgcggcttcgacgcaggaatcggcgacccccaagggcaaatggaagtgtcccccgccggcttcggctatatgacgggccttttggcacagcagggcgtccctctttgccttctgctcgagggcggttactttttgccgagcgtttgccacggggcgctgcaaagtttgagggcactcgtccaaagggtaaagtgacggagaagcgaacgcaacggaagcgaactttggacggattaggcaccgccaattcggcacttttgccagctcagtccttcgcccgatttcctgaacactctcttccaaattcaatttgtccatcgtcacaaatggccattcttcgcgcgttggcttcaaattctgaacgctttgagggcaaaaagaaagttgcggccaatcgaagtacagaaaaagggcgaacagtacgaaagcaaaggctttcacctgactgaaactgatcaggtccctcagtcggaatattttgggcagcgacagaaaccattggcagtgccacagccgacgagaggacaataccctcccagggagaaggaggaggaacggaagttcgaactgcgcatccaaacgatgctcaacaaatatgaaaacagagagagtgaagaggcaagaaaaaggggaggaagagagaggagaattgagagggtgccagacagtgagagagagatggaggaaaatagaggggaggggagggag

SEQ ID NO: 83798 - DNA, 296 bp, Heterodera glycines
atgggtcaaaaccttgaaaaatcaaatctctatcaaatggtcaaaatcggaaaggacctttatgagggatttgcaaagcttggggaaatgaaggaacaagtcgacgagatcagtgaccacgcgaagggtcgacagcaaaacttggacagaatcgacttccatgagaaactgaaaatggggggaaagggggagagattcaaagaagaaacccgggaaagttcgaagatgggtcttacaatttgcactgccgacagaaaagactttgtcaatgcgccgtatttgtgccaatgtttaaa

SEQ ID NO: 83799 - DNA, 740 bp, Heterodera glycines
atgaagccaagtggaaggaagttcgccccctgccctagcgagattagtgtaagctttttggaggtggcaccggcactctgtgcgggattattgccataaagcgcgaggcatggagcgcatggaccacagacggacggacacaccggcacggcatacaacaacaaaaaaaagtgccatagtcggaaaagggcggcactatgagctatacacacacaaaaccgcaccaacttttttggcatttgtgccatttgatccgcacatggccggccacctaatttgatgcccacaaaaaaccattagcctaattgggaaaacatcattaagccttcggcggtgtggggagagggatttggcaaaattttaattgcctaaaagcatatggggttaatgtcaattagaatatgcaattttttggggaattttttgattaaatttcttgttccatgtacaatattaatggacacttttttgatcaatgggttttcgaagatattcactttttggatcatcgttgaccacaatatatgaatgagtcgccctgatcactttggatttttgatggttttaccatttttttgagtggatttttgatggattccaagttttttttcccatcacttttgtgtcagtttatgggttgatcccatctgctgatcacttggcacttgagagagcgtgccatttggaccagcaggaaggcatctcaaaatagaacatcagtgatcagggcatcaaataaa

SEQ ID NO: 83800 - DNA, 936 bp, Heterodera glycines
atgggcgagaagttcagcgaggaggaagtggacgaaatcatcaaagagtttgacaaggacggagatgaacaggtagaatttttcatggattttttattaaagatttatcttttttaaaattagtgcagttttgatcggttttaagactgctgttgatgatatattttttaaataagcaagcttctttaaaatgagtttatttaaaaaaatcggagaaaaaaaaattaaaaattatgaaaaataggaactaaaagctcaccttttgagggggcatgtaaaacagagccccccgttggctctgttttaggaaatacggtaatttagaaaaaaaaaaaattaaaatgggaacctattttaggaatagctataaaatccttgtctttttagtagccctgcaaacttaaagtgcatttttggtcattttaagaatggaataattccttaaacttgctaaaaaataataagtctaaaatatttaattttttaaacagtgggaaaaatcattatgtttaatttgaattttgaaagattgattatgaggaatttgtgaacgcggttgccccaattgtgaacgatggagcaaaagaagacgcgccatgggtccaagaagcgtcgtccaccgctttgccaacagttaatggaaacggcacaaaaaagcaataaaagcagataattaattaatcagtcaatcagtcactaatcaattctgatcactgttgatctgatctctctctatccaacaaaacaattttgatcagtttttgtaccataattattaaataccttaagcatatattgatgatctttgattttttcattcgttatgtgttctagcttattttatcatatgtacggtttgtttgtttttcttttatctcattgatattattattattatgttttattaattaaaatttcaggtgttaaaaaaataaa

SEQ ID NO: 83801 - DNA, 47 bp, Heterodera glycines
atgccaaagaaatcatggcaaaaagagtgtggtgcactgaccagatt

SEQ ID NO: 83802 - DNA, 225 bp, Heterodera glycines
atgttatcgccaatcagagtgccattttcggtgagttttttggcattggcactgatcagacaaaaacagaaaattgagcaaaatccattgacgcgtttttggccggttgaaatttaaatttccaagttccaggaacaccatagcacaaattgcaaagttggtcaaccatgtggtggcaaaatgccaatgcttttcggagggaaacaaaatgccaatgccgaatag

SEQ ID NO: 83803 - DNA, 1346 bp, Heterodera glycines
atggaaatcgaaaaaaaaacaggcgaaaaagcaccgaaatttatccagtcgagagccaatccgagaattgtgcccacgagagtgttcgagaatgtaaaaaaaaatccgggaatttttcaccctgagaattgattggtggtggtggtggtgaacagctgattgttggcgtgccgaatttacaacaaacaaaattttaagtttggcgattcgtccgaaaatcgtcccggcgttggccccgcgccgacacattgcaccgaggcgtggcagttcccctgtgacgatggcatccattgcattgcgcgttacgacgaatgcgacggcatcgaacagtgcccggacgcgtaaattttaaattttaaatgtttttggaattttaggaatattgtttacaaaatataatagcgtataataacgaaagaatacagaaatttttagttaataggagaacagattaaggataagacagacaaagccaattaattagtgatactcgagaccgcaaactaacgaagactcgagaccaaaattctcgagcatcttttttagatcggatgaaaagcattgtcaagcaaatgagcgagcttcaatgtcacaagaacgcggaaggtagatcaaaaaaaatatttggattttttggaattaaataaattaatttagtattttataactttttttaaaatttccatttacagacattacactcaacaacagcagcatggacgagaagataatcagcagcacaagcagcaacaggcacagaagcaacaacaacagcaacagacaaaaagtgccgtgccaaaagtgagtcaaaatgccaaaagaaaaaattggaaaaatagcgcccaaattagatacgctttttgattttctgccgaagaatggcaggctttattcccccaaatttgcgagtcaatccgagcctatgtctctgggaaagtgtcctgaaaagtgccacagtctcaaatgaacagctgggactcttcaaaagcattgcttgatgtattcacgggcacaaaatttgaatattttagatttttggaataccgtactcactattaatgcattggttacggtattaccgttcttttcaagaccgacatttttttaaagacaaacgccgcgggcggggacaagcgcgtgccgctggaactgttgctggcgggtgctgctgccttcgtgctcgtctcggcgctcgtgcacgcggtgatgaaggcgacgcggcggcgccggttggcgcggcggcgcggccgcccgctggcgccaaccgacgcggcgccggcttccgcaagggtgaaagtctggtggacgaggaggacgacctgctgatcgcgcaaatgtacggctga

SEQ ID NO: 83804 - DNA, 591 bp, Heterodera glycines
ctcttctttttaatattgatcactgacttatgcatttaattcgtttatcattgaagcatttggtttaattgattagattttctaatccaaaaaacccctcaattctgaatcttcatgatcagcccaattattcaagtaaaacatttttgcccaacttttttggcatttttggatttacggatgggactgattgctggatgatggcggctttaaatatgtttacttctgagtttccggtcactgttgtgatgtacaccttcaggtcctggtgatgctcgttcagctccgacgagccgctgggcgagaacatcgctcgctttgagaaggaatgaacggaaatggaaaaggaggcggaaaatggcacaagaaaaacgaaaaagctaaaattaaatataaaaaaagataattacccaattaaaattccattttttcaaattgaaaagccattgaaaaggcggcggataaacaattggtgcagccggttgggtgttttgttaatggatgatcgacgaagtgagaaagggacggatcagagcggaaggaacactttctttcccgcttttccttgctaaattggtttgtcttggggcg

SEQ ID NO: 83805 - DNA, 1007 bp, Heterodera glycines
atgcctcacaagggaaccacccgaactgtaagtcggaaaatccatatgtattatatctcattggatagagtagggtcgacttctattgtgaaattttaatattacgcccatatagcaagaaaacacaaagatatgaggcctcaaaaaacgaaattttgtctgtgttttcaccaaaaattggtggctcagttggttaatttgcatttttgaagttcgtgttcaaatccaacatgaaaataaatattttttaattaatgtaaatattacaaaacaatttaaaaaagtattttttaaacttaaaaattgtaagatagtttttctttaacaaaaatatgcaaaaaataacaataaatgtaaagtttggaattaataaaagtgataaaaactggaaatggtcccttaggcgttgattttgttttttgaggcttcataactttttggtttcttgctatgggaacgtaatattaaagtttcagttatagcctttttgaaaattatacaaaatttgtccatttttgtgaaatttttaatttcggggggatggaaaggcacctgccctccacttccccttggatacggacgggcctatccccgaaaccattccatttaattgtcattcacctttcccatttgctgcagacgacagtcccccacaatgccttttatgcgaaaaccacggcccgacttcgccgaagtgccttaacagtaataaccagtaaatcaaaagcgaaaaatagttcaatttagattatgctttaaacaacagaaattttgcgggggagggggaggctaaggaaaaaatttgcttgtaaaaaccaagggtctggggctacgcccttgcataagctggggatttcagaaaaaaggcaaaaaaaaaaaaaaacatttgttacaagggaaccaatcaaaatgcatttgaaaatttgtaaacgtaaatttcaatttttcagatctgtgcgtattttctttgtcttaagaatttcaaaaaatttacagttattccttaa

SEQ ID NO: 83806 - DNA, 1089 bp, Heterodera glycines
atgttgggaaatatagccctgtccttatttgtaaaaaccgtttttgtaattagttattttaaccgtacttgtattcaaggaccattccagccacattttgacttgcttgtgatgggacaaaaatttttggattcggtgacgcaaattatggtcaatggaatacaaagaggaaattttgacgaagaattaacaactaaatttgataatgaaagctttttgggcattttgtgctttaacgccaattttgaatgtgaaatgaacgacaattttggaaaatttctgagcaatttttgccatgaatttaaaactggaaaaaatctggaagaagcaattgaaactgtgaagaattctttgataatactagcaagaagcatcacaattgagcaaattatcactaaggaaagtatatttcaaaaaattgccaaaaacgaattttttggtgccaaaaatgcggaaaatattgcaaaattttttgaacatgccaattctgcgtttcgcctaaatttatcggcacagttggtaagaataaaaatttaaacgcaagtttttaatttattaaaaaaaattctatctttttttagtttgtaatattttaaaaatgttttagcatcattttaacaatttaatgagtgcatccgaaaatgtgccatcgacaaagaaacgaattcgtcgtatgatacgccgaggttttagcagagcaatggaccaatttcaaaatagcctggacaactcacgatatcgccttcgaaatgatcggaaaaaatgtgctttctttttggcacttagtgtcgttttgctggttggcattgttttcacgatggccaatttggccaaaatcagtgccaatgccagccatggtcaatgggcatttttcatcctgtttttcaccatcattgtcacttatttcattatgcatactgtctcatttgtacttttgtgtgttcaaaatccacatcatcaacaagaagaacaaccggaacagcagggccaagaattaggcgaaataggcaattagagaacggagaagcgagtacgagaagtgcaagactgaaatggatggcactaattggaaaatgatgatatttttaa

SEQ ID NO: 83807 - DNA, 294 bp, Heterodera glycines
atggcacaatatgtggtgatgcctgttgatggaaaacaatggaacggtttggctgaccatggaacgataattttcaaagatggcgaaggaaaggtaaaaaatatcaaaattccgttgataaatcaaaaaccaagaatttttaaatattttttaaatttttaacatttaaatccaacaaactttaaaattttataataataaaaattacatgttgtgcccataattcatttttgtatacaaactttttgtcaacaaattaacaaatgttaaatatcataaaataaattttagtag

SEQ ID NO: 83808 - DNA, 527 bp, Heterodera glycines
atggacattgtccatccatatcaggcatgtaagcagaaaaaattgagaatccaaagaaaatttttttgctgttcggtcaaaaaaaaattttcggtaaattttgtctatggcggtttaaatagcgccgcaggggaaatttttttgcaaatttatctttttcatgaaaaaaaaaaaatttttcatttctagggggtgagagaggcacctctctcctctggttacgggctggggctgctggtcctcaaacatacagaacccacaaaactgatcatccgttccgatcgatcaaatttcaaccgtacaccaaccgaccaactgatcagtctaccgtatgccaataccatcattccaacacttcctatcacaaatcttccttctccgtctgccaataacgctgtaggttgttcatgaagcccgttttctgctgcaggcgttgcagctcgggcgaacgcttgtttttctccatctcagctcgaacttcggcttcaacttctttgggcggattctaaagaaaatttaaaaaaaaa

SEQ ID NO: 83809 - DNA, 1018 bp, Heterodera glycines
atgattgacaaatatgaaaaactcatggagaagttgattgatcaaatctatgataactatgaaaaagtttgatttattttaaatttgattaaaatatatttttcataaaaattaaatattaaattaattattttactaaaatttcaaaaaatgctttagttgaatgtgcccgtttactcgctgcacacggaagtgacgtcatttaaaccagttgctaaaccaatcgctggcaatgaactgttcaaatacgtgccttacaaagacgcttcccgcgtggaacacgtgggctaccgcgtgaaccatgtgttgctctactattacccggatgttgtgcacttcgtgttgcatgcaatgatggacgtggcgggtataagcagcgcggtgaggctgcaacgaagctttgcgtacttttatcgccgcgtgcttgataacaccaagttgcgcgacaaacgtgagcagttggtgcacgcgatgaagcagacggctggcgggccgaaaatgtctgcagagaagcgtgagcgcgttgcggatgcattggtcctgtttgctgcagcgttcatttgcgctggcaaaatcgaagcagatcaatgtgaagttgttcatcgtaacgaggcaggaaacaagttgaaggcaattatcggcgagtcgtaagttcaaaaccaaaatgattggcacatgaatttaaaaaaaaaatttatattttaatttcgtaggcttttactgtctttcctaaaaattatatatatattttagaaatttcattattttaaatttaaaatatttcaattcccttattttttgaaagtttgccacatgttttttaataatgtttaaaattttatttcgtaaggatttattgtcctttttttaatttttaaaaatttaatatttttatttatttattttaaaaaaattttcccaattttttcttagcgagtccattgaattggagaagcatgtgaaggtttttgtgcatcaatttattgtcagttacaatgagttgattgctgaggaggag

SEQ ID NO: 83810 - DNA, 435 bp, Heterodera glycines
atgctaatatttgcaggtatacggtaagtaatttaataccgtatttttacaaagaatacggtaaagagcggagcgatgaactcaaatttgaattttaaaaaacccttttaaaattaatttcagtttttccgttaaacaaactgcaagtcagtggacaatgcaaaatgaaaatggaaaagcgttgttgtttttctatgtgtgcctttgtcgaaaattggttggctttttggggatgccgtacgcagaaaatgccaaatttggaaaggtgtgaaaatttaattaatttaataattcattgaattgtttgttgtttaaaaaaaggaaattaatgaattgagtagttttatcaacaattttccatttgtaatcatgcaagaattgaaaaagaaaattggaaaaattgagaatgctgagaaggatgaattcgagagaaag

SEQ ID NO: 83811 - DNA, 593 bp, Heterodera glycines
atggcaaggattattgggaggacaaacagacggagggctttcattgtgagtgtggaagcagcatttgctttgaaaaggtaatgaaaagtgccaattgtggcaaaacaattaaaatgcgaaaggcgaaatgtcccaaaaggcgaaaaagcgaaaggcgaatgtcccttgaccttctactgggaaagaaaaaatcggggacgggcggggggcaggaattcgtttccgaaattgtgggattgcgggcgtaatcccacgggatcccgtcccgcaattaataaaaaatttttagctcgtattatgaaataacaattattttctgttttcttactcctaacgaatttatgaaacgcccatggtgctggtatatatcagggatgggaaacgtacaaaaaaaaaaaattcggaaacaggaaattggcagccgttatggcactcagacggctgaaaaattttttggaattgccaatcggaattccaatgggccaaaaattttggcaatcggaaatcggcggaattccgagctcagaaatgtcgaaaaccggcattttctcccatcattgtatatttggcacaacaaaattacgtatctttaa

SEQ ID NO: 83812 - DNA, 806 bp, Heterodera glycines
atggaatcgttttgctgcgtttgtaaagcaatttatggaggaagtcacagctgttatgtctgcaaattgccgtgccacacattctgtggcgattctggcggagttgaaaacgaacgcttcggcggaaaggtcgtgtgcaacttcgcaaacgaggaaggcaatgcaccgatagcagaaggctcagaaaatgatgactacgaaccgcaaaacaaagagaatgaaggcacgccggcaaaagagaagaggcgccacaggaacaacgatgcggcgaaaaaactggaggctgtcgagtgggcgcgaaagaactccataaatgcagcagcaaagaagttcaaaatgtacaggaaaacgatcagagactgtatcgcgcatgaagataagctgagaaaacaaatgtacttaacaatttttttttgtgatcaaaaattttagcatgtcaccaaatggggggaaacgaatgagactcgacggagcaggtcgcccagttcaccgtccggacatcgacactgaactggccgaatgggtcaccaaaaaacgaaaaaataaacagcctgtgtcaaggaatatcattcgacagagggcggctgcgctgttcacggacactgacaccaaagtgagaaaactgctagtatgctacaaaaataaaattttttgttcaggcatcacttggatggctgcaaaaatttctgaggaggcacaatttcgtgctgcgcaaaaagacatccgtttgtcagaaacccccgtccaactatgctgaagcggtggccaagttcatcagttttgttgccaaaggcgcaaggcgatga

SEQ ID NO: 83813 - DNA, 2018 bp, Heterodera glycines
atgtatgaaatgaagatccgagcgcaaaagaagagaaacccgaacatcatttttcgagactcattcaatctgatgccctgcgctcttggtcaacttgtccctgcctatggattggatgttgaggagaagcctttcttcccgcacatggcaaatcgtccagacaactatggacgagagatcttcccgacccccgacgactatctcgcccaaggaatgatgcctgaaaagcgacgccaatttgacgactggtaccaacaacaccgagaagagccttttgtgttggatgaggcattggctagctattgttccaatgacgtggagatcttaatggctgcgttggttgcttttcgtcgagaattcatcgagatttcaaggcggcaagagtacgtcgatggggtcgacgaccgggagaaccacgacggaattgatgtcttacgggagtgcatgaccatcgcaagtgcgtgcatgaaacacttccgcaccaatcacctcccggctgagcacctcgccattgtacctgagcgaggatatgacaacgctcaaaatcagtccctccttgcgattcgcttcttcaaaaggtatgaagaacgccatggcgtccaactccaagctgcgcattctgccggtggagagaggaaagttggcaattactctctcgatgcttgggttgaagctgaacaaagggccattgaagtgaacggtaattttacttttaaacattttaaaatattgtttttaaaaataggttgtgtgtggcacgggtgccaaaagtgctttccggatgataatatgctgttgccaaatggaaagtcggccggagaagtgagggagcgggacgcaaagagattggaatttctgcgcaatcaaattggccgtgtggacgtttattgggagtgcgagattgagcgaatgcttgctggtgaccgagaaatgcggcaaatgttcaaaaaatatgttgattatggtccactcgaaatccgagccgcctttatgggaggacgcacgggaccattgaagctcttccggaaagctcgggatggagaaaagatttcatactacgacttcacttctctctacccattcataaagtgaaaataatttttataattttttaattataaaaatttagctttacgacgcgctatcccatcgggcacccaagagtccatgtgctgaacgaagaggtggaatggacaacatcggccgacaacccctacgatctctcacttctgaaagtttgggtcattcccccgcgaaactgtgatgtgccggttctcccagtgagagtgggtgaacggctttgctttccgctttgcatgaagtgcgccagcgatcacccgacaggcggagttaatgaaaattaccactgcacacataacgattcacaacgtggttgggtcagcacttgcacatctttggaactgaatgctgccctggacgagggttatcgggtcaccaaacttttccgcgtattggaataccaaagcagcgatgatcaattgttcaaatcgtacattgcggaatttatggcgctcaaaatccaagcatccggctttgacaccagtatcaaaggcaatcctgagcttgaggaagcgtttgtgagggagtgttatgagaagtttggcattacaattgatccaacaaagatggagccgaacaaagggaaacgatcgatagcaaagctctgcttgaataacttatgtatgttgtctttaaatatattatttttaaataaatttctagggggccgattctctcttcgcaactttgggctgtcgcaaacactcatcacagatgaccctgtggttctcgctgaatatttggacaaccggtcgctcgaggtcacagcgatcgacgaatttgacgctgaacacatactgatcagttatgagaaaaagaaagagtgggtcgaggaacatgcatggtccaatattggtataataatttatgaacacaaatacaagaataatttagtaatatctctttggacaacttcgggggctcggctggattactaa

SEQ ID NO: 83814 - DNA, 296 bp, Heterodera glycines
atgcctggaaaattaattgtaagtgattaagccaatttatattgttaattgggcagatataaaacaacaaattagcatttgaataatttcttttttcaaaggttggggatggggacgccgataaaccaacgggaaaatggcgaagatttggaggccgcggcaacggattttcaatgggattggcgacgaaagatgaacatgatcaatcagaaaaaccttctcaaaacattttttgtaattatacaccgctggacacattacaaatcgtattgtaatcagaagcaaaaatatttcca

SEQ ID NO: 83815 - DNA, 134 bp, Heterodera glycines
atgtgcccgaatcaaatgagtgtgccgtcccaaaattcatttaaaacgttttcgcgcaagcaaaatggcatgatccaaactgatcaggcttctggaccatttttgattatccaaaatggccttatttgccacca

SEQ ID NO: 83816 - DNA, 678 bp, Heterodera glycines
atgtcgaaacaaccgaccaaaacattccattacccggaatgggttctgacgaagtcgcttcttcgtccaacaagtcgtgcagcaacagctcgagaatgtgcccgaagtaaggcagggaccgacacgcggtggccaaatcaaatgcaaaggcgccgaggttgcgtttcaaaagttgcttgagaagtttgtggataaacacctgggaaatacaaatggtaaatgaaagcaacagagagaaagagaaaagacacctcactgactctgaccaaagtgtggacggaaagtcgcgacaaaaagtcaacatttttgacgactccaacgaaggaactcagcgaggaagaaccgtcatcagtgacgagggaaatgttgtcggacaatttggcggacgaggatttcggtagagaagaaacgcaactcgcaccacacgccaaataatcatcgttaacacctgaaagttaaatcaaaccgagtgatggcaaaaccattagtaatacaaagcggataaatgccaaggtcaattggcaacataatgcgacgggaaatgaacgagcgagagctttgacgactgagcctccggatttgatctgggtctgtcgatgtgcacaagttttgatctgtggacaaaggaagccaaacctaaaaacacggaaaattaattgtcaaaaatgcaaaaataaa

SEQ ID NO: 83817 - DNA, 3312 bp, Heterodera glycines
gaacaatctctgctgttgaacggcggactcgcaatttacgaaaattatataatttgttcggcctcaaacagcgaatttccggacggtgaaaaggagcgtatttacgtattccatgccgaaaaacaattggatttgtacgaagcaaattccatccaaacaaatcgaattttgcaaatggccctcaagtaaatggaatactaaacagaagttgaatccgtacaccttactcccgaaaatttgagtcgctctcatttgctcactttcgacgtgaattcgctgatcgccatttattctctgtcgctttccctcgaaaatgatcaaagcgcagattcgctctctttggaatgccttgccgaaattcgtattgctgaattcctgccccatccgaactgtctcgtctcaatggacctcacgaggctcaatttctattcgggttaagtttccacaatgctgttagaacatcgttttgtatagtaataacaaagtctaatatttatttatattttaattccattgtgtttctcatcctcctttaaacaaatgaattcttttatttgatataattgcttttttagatgctgttcccttttgtgatgatttggactcacttttggtgaatatttctgggcatttgctgttgctgagcccaatgcaatcccaacaacccaacgaagacggacattccgggaaaacgcagggggaaaacagtgaaaacagcgcggaatttcaagtgaatttgtcatttctcccctaattgaaaactgctaaaaaggggttaacaaaaaaggttttctactcaatttttcaaagaattttgctagagagaaaaaaatattttcacggcatttgccatactatcaaattaaaaacttttttcaaaatttattaagaccaatcgggtgtatttattttttgtcaaacatttaatactgcttgtgtgttcacccacccttcactaattcatttttcattctctcccctcttttaataaatctttaaacacaaaaattaatcactcttaaattgtttgctttgttcaagcttcatcccccaacattaatcgcttcttttgtggagcatttttgggccgcgttgccttccgatcagcacaaaaacactaaaaatgatggaagaattgcctttctcgaagacgctttatggattaatgctggttgtaaaaatagcaaggcaatccttcattattattattatttatttatttttgcatttttgacaattaattttccgtgtttttaggtttggcttcctttgtccacagatcaaaacttgtgcacatcgacagacccagatcaaatccggaggctcagtcgtcaaagctctcgctcgttcatttcccgtcgcattatgttgccaattgaccttggcatttatccgctttgtattactaatggttttgccatcactcggtttgatttaactttcaggtgttaacgatgattatttggcgtgtggtgcgagttgcgtttcttctctaccgaaatcctcgtccgccaaattgtccgacaacatttccctcgtcactgatgacggttcttcctcgctgagttccttcgttggagtcgtcaaaaatgttgactttttgtcgcgactttccgtccacactttggtcagagtcagtgaggtgtcttttctctttctctctgttgctttcatttaccatttgtatttcccaggtgtttatccacaaacttctcaagcaacttttgaaacgcaacctcggcgcctttgcatttgatttggccaccgcgtgtcggtccctgccttacttcgggcacattctcgagctgttgctgcacgacttgttggacgaagaagcgacttcgtcagaacccattccgggtaatggaatgttttggtcggttgtttcgacatttctcttcagaccctcttctcccaaccgccgtcgcatttcttcgcgagttccctgctgaatacctccgcaccattgtcttttgtgctcgcaaaacagaacccgctttctggagtctgttgttctccgtgagtcaccatcctcgccaattgttccaaatgtgtctcaaagaaggccaattggacacggccaccagttgtttgatgattttgcacagcatggaaaattttaaggagagctctaaggttttactttagctcgtgttcaaaatgtcagcatttttagttgtcattccgtttgttagaagaggcgttgacaaagagtaaatggaccgtagcccaagtaataaattaaattaattcctttttttaataaaattcgaggacatcatctgtttcatgcacaagatttcccatgcggttgatcaggaaattggcgtcagcagtgaggactctttgttggaaggagggggccaaaaagatcactgtatttattgtcggacattttcagtgcatttgattttcagttttcagattctcgatcaaaagttgagaaactcatcgacgaggctttccgggagaaaatccaagtatttctggacaattgtaagttcacgtttgccggaacatgcaaattccgattcttttagcacattatgattgggagttagagcagtcgagtggagtcgcaagtgaatatatgtgagtgatgtcttacgatttgttttcggaaactctcatttcctgtctttgttttagcactgatctgatcacttttctgaacaccactttcgtttcctttgccaaccttccgcccgttcttgccaggcatgtccgtatgcaggtcggaaactcaccaggcccttaaccagccgaaggcgggaaggggcaggaggagcttacctcaaaatgaaaaaaaattgaggaaaaatatacatttttttgaaaattaatatcatttttcttaatattcgcaaaaatttgttttctccgacaacatcgacaaaaagtcttcgggttcctccaccgatattcttttctgattaatgtggcctataaacgcacttaaaccctatttcatatgttttttagacgtgtaaattccttgccgatcgcatgagttcgatgttactttcgtcggagcatcgttcggtcagtatcggtgcacttgaacagttttcgcttgatgtgatgcaatgcgaacttttcactgcccaacgccccgtgcccggtttcgaagataatgctctcgccattactttcgcacatttgcgtcaattgttggatttggtgatggggcccgactggacaactttctttgccgaaagggatgaaggaaattcgcatcgcaagggcggaagcagcggcaccaaatacgcccgagtaaaggcgtcgagtgccgcggcacttatggaaaagtaa

SEQ ID NO: 83818 - DNA, 143 bp, Heterodera glycines
gactcgggggcacaattagtgagttaaacattgaatttgccgggggttggccctcgcacacaaaatgccccaaaaatgccggcactttgggcattttccaaagtcactgattgatttgccattcctttctccaaattatccca

SEQ ID NO: 83819 - DNA, 111 bp, Heterodera glycines
atggaccgttgtttatggggacgattgcatttggcagcagcagcacgactatttgtgtgctcggcccaacctgacgcagaatcgggtaacacaaatcaggaagagggaccg

SEQ ID NO: 83820 - DNA, 1015 bp, Heterodera glycines
ccttccataagggtgaccctctgatccgtgagattccgttgcggcatgacgcgggatgcaaagtgtggcaaaagatgggtggtgagcatggcattgagtggtcaaattttgttgtagggaaggccttggtcggacacaatgccaacgaatgtggaggattacctttgtgcgaaggcattaaatccgaaggattatcatgcggccaggacatgccatgtgaggggagaaaatccgatttaagtgaccgaaatgctcagggggacagcgggtcgggcatggaatggaaacggaggcgcaccgttggcattggcacggcaccgccgcggcaaaacgccacccgacaaagggcaaaaattgagccgcaacttcccccagctgctgctttgtcttccgccccattttcgcgttccgcgtctgatcagctgaccaacgtccatttggtgggcaacggatcaaaagccaacggaagtctaacacaacgaattgttacgatgccaataacagaaaaaagagtgccgttgaggatgaaacgccgaaaatcgaaaagtaaattcggacggatggaaaagcaattatcaaaaagttaaaaaattatcctttttgttagacttttcccattgaaaatgcaatgaattattgaagtctttacagtacattctcgaaatgtgctccgaacgccgctgataattcccgaattggaactgatgaaaaagtggcgaaacagtcgaagaaatgacgaaaagccaagcagagaattaccaagccaaggggaagatgaagcagtaaaattattgctgctgaatgatattgggcaaagtgcggaagagcgacgggaagaagtgatcggaagaacggaccgatcggaagtgatcacggaactgatcggggtcacctcgtatgggtctcgtcagtgcggttctgacgaggtattagttcaggagagagaaagtcgttgatgattcccctcatttgtcagttggcccgattcactcggattgcgcattatgtgaagaaa

SEQ ID NO: 83821 - DNA, 281 bp, Heterodera glycines
caccggcgattgggggtaatccccgcatcccacggcccccacccgtccgaggcggaagaggggaaaacggacggaacgccgtgtcggggagcaacagaagcggcggaagattgggggcgagcaaaaaacaccgtcgccgtgggccggacggaagaacggaagaaaactgtgtgatgatgggagatgatgagagagggggattggatgatgatgatgatgatgatgatgatgatgaggaaaagttgcgtttatcgctgccgtcaaatctcatctccgtttag

SEQ ID NO: 83822 - DNA, 1138 bp, Heterodera glycines
atgccggtgaagcttgagtcgctgaaagcgacatttaatttggactgtgaggacaagccctttttcccctattattacaacaagaaagaaaattatggaatacgattggaacatctgccaccgatggaggactattcgccgggatctatgaacaaggataaatttataaaattcgaaaaatggtaagaaaagaaggacaaaattaacaataaaaaattttttttcaggtacaacgaaaacaagggggcgcccttttatttggatgatgaattgaaaaattattgccgaaacgacacggagattttattgctgtcaattattgagtttaggaggatattgattaacgatattacgaaaggatttgacccactaccgaggagttgtacgaatgcgggggttgcgatgaatatttttaaggcaatgtttttgttgacggagcagttatcgattgtgccggagaagggatatgagcggtgtgatcgcgccagtgtgatggcaataaagtatttggagtggcggagccagcgggatggaattgagatacggcacgcggggaacggacgagaggtcaaagttggaaaatataaattggatggatttattgcgaataacggagctagggacaaatgcatcgaggttatgggatgttacatacatggatgtttgaattgttatgacccggcggcggaactgattggaggaaggacggcccaggaattgaacgatgagactcaggagagattggcggagctacagaagactttggatgtcgaagaagtttgggtatgtttatttgacatttgaatttataaattctactttttaggggtgtcaaattgagaaggaattgaaaaaggatgaggaaatgaggggcttcttcgacgacagaggaaatgagaaggggccgattgatccgaggatggcatatgcgggagggaggaccggaccgatgaaattgtttgcgaaatcggatgagaagaaaaagattagtgtttacgatattgtgagtctgtatccgtcagtgaattacggtacagcttacccgattggtttgccggagattattataccgaagagtgatgagattaatgtaaattggacaagaccggaggatttgaagtttaatggattgtataaa

SEQ ID NO: 83823 - DNA, 1201 bp, Heterodera glycines
atggtgggtgaaaacattttattttttgggtcattggatacccatttcgccatgatgaagtttgcccgtgtatgcataaaatttttttattactctcaccgactgtaccggagttataattatggcattgacttttttttgtgagacagtttagtcatcacaaattattgaatatttatttttcagaattttggctctagggcaatctgtcaagttatggaagagaaataaaatttgaaataattattattcttttggtcagtttaccctaatctcaaattttgaatgatacaaatccttaatgatatgacaaacaaaaaacagaaatcaagccttaattcactaatcacaaagggctctttacaaattcaaaaagcggaaggattttgcgaattcctcattaagctcacatgaaaggagaattttgaaatttttgataggctcctaacatggatttgtttttttaatccttttggctttcttaaacctgatcaattttataccaagtctattttcagactgagaagcttggagatctcttagcttccaatgatggaccatttccgaatttttaaggggtactgtaactgtattggcaaaccaaaaaagacaagtgagaataatctaaaggttcagaaaacactgggtttaccatgcgaatttggctccttaggtacccgataaatcactgattttttaatggaagaaatcatcatggatagagataggtttattagcaaaaaacgaaatgaaactttcagtacaaatgactcacaacagcttattaacaaggagacctcacaggggaagctgaaggatttaatatttgaattattgaccgctcatccgagccatttccaatctgagtttttatgatcaaagccctcgggcaactctgtcaagaatgaagggacaggagctattaaaaaaaattatttaattgcagtcgaaagtgttaaaaaaaagtaaatgtataatcttgtcagtaatgatccaatacctcaaaaaattgatttaacaaccagccagatttctatcagttcgattatactcaagtgaacagtgagaacctttaatctttaaaacgaaccttgtcgtcaagcaaagctaaggttgagagccaagaggtgccaactatcattatttaacctatcattggtcatgtggattggataaaaatttatataaatttataaataaa

SEQ ID NO: 83824 - DNA, 290 bp, Heterodera glycines
tcgaaagctcttcacaggctctattagcctactaaaaattacagaaaatttcgaactataaaaaaaagatagaaataaaaaacttcgaaaattctgccttttttgcggttttcaactgacaacttttttgagagctgattaatcactgagaaatagcttataaatatcttctaaacatctagggctttcgagtgataccatgattgtgaagtttggccaacaaagaaaaaagttatagctttttgaacattgctgagatggagttggccagacggagttgacctctaccg

SEQ ID NO: 83825 - DNA, 1359 bp, Heterodera glycines
atggaccttaacaatggtttttacgacagggaagaagacaaagtgaaattgaccatcgatctcacaactgttgatgaaccaaaagtggacaaattcaatttggatcaaagcaattcgaaaggcacactctttatggaaattgaaaaagtgtcggaatttgcgcgagaaatctttaagagtgaacgtaaaagtgaaactgtgcacatcaaaggattgccatggaaaatatgggcacaaattgaaaagaaagatgaaagcactgacaaaaatgagaaatggttcgccattttccttttgtgtgatgctccaaaagaaggtgcaaaattactaataattaatatatatattaacaacaattaattaattgatattgagcagaaacttggagttgcaaatgttcggcaaactttcgaattgtctctctaaagagcggcgttgcggatttcagaagaaaactcgatgaccatgtttttgacaacaaagagaacaacaggggatacaattacatttcatttgctgtgagtgccaattcaaataaatagtgcccaattaaattttaacataattaaggaactgatgaacccaagcaaaggcttttacgaccaaagcgaggacaaagtgacattggccattgatgtcagtgtgaaagaagcgaatattgaggatttcataaatacccaatatgatctggcaaaaatctcatcattgaattatcatcctatggacctgctgtttttagcttctttcttattgtttatcttttgggttttacaatattgatttatgatttattaaagcggcttttttctttttttttcagtatcgggttattaaaaaaaatttcggtaatggttacttttacttgtccctaaaaaaagaaaaaaaaggcgtttttttatgatattttgttctactcgggggctatcggggacgctgatcacgaatatgacatcagatttgtcatatgacatcatctaatatatgatttttttcaaatctttgatttttcatcaagtaatttttttcaattttttttttgatccaaaaacggaattatgtttaaagatctttttatgcatctaaagttgcacagatcaggcattgacaacttaaaactgagcaatttgatcaaatatgttttcaaatgctgcaagtgtctttttgccatgaaattggcgccgcaggagggttgctcggatacgatcagcaacccattgaatgactccaatatgagcatggacatcgtaaagcccaaagacccattgttggcggacgacccgtccttggtggttttttcgacgtgcaacaagactttcgtctatttgtacgacatgtccaacccctcccaagctaaataaa

SEQ ID NO: 83826 - DNA, 1361 bp, Heterodera glycines
atggcaaccatcgatgcgcgagactacgaagtctttctcgacccagaattgagaattctgtcgacaacggcgcagacagcaaactgcgaaggattccgataccactactttgcgatgaatgaggaggcgaaagagtgggtgaaaatcgacagccgaacgggaacaatcggacgaatggaacggacatccatccatgaatggaaagacggaaccctaggaaaagaggggccagcggaaatgccaattggattccacaattggatcctacggaacgattcgaggagcagttcgtccatttcgccgagagagagagatattcgagagttggcagcagcgagacgccgaatacgcgatgaaaagagcgacggcgcttggagcactacccggaggactcgagggagtggccaaaacatggctcaaagggctgtgggaacaagtcgtggaggcctggatgaaagcagcctgcctttatgcgacattcctgctaatccgtgatgtgctgatcccattggcactggcctatctctcagcccgatccgctcgagtcttcgcgtattgatcggaacacggcgcagacgaccacaagcaagagacaatctcgaggatacccggacggcggaagaaacgccgatggtcgatctgacccgaggatcgatacgggggagcacgaagagaaggcccatcacgttgggcctgaagcaacaaatcgtcgctttccgcacggaaaacccaacttgttctcccgcccggaatgttgcgactgcccccggaagggcagaagaaattgcgaaatgagggaagggggcgcaacgggggaaaacgaaagtgattgaacgaatgaatgatcggctgggcgtcaatgatcaacatgatcaacaagaaagaagaaaaaggggaaaacaaggggaggaagaatttgccctgaggggaaaacgagatgtgcatgtgaaagggggggataaaattgacaataataaattttgttagtgtacaatcccccctaaaagttgttattggccaaaatgccattcgaccccgcccctccctcacatattgtattacccctatgatcacccccaattcatttgtgatttacccgccaaaccgccaaccccccttttttttgtccctcctcccctcccattttattttcatattttaattgtatttttatccaaaatgctgacaatttaacagccgaagtgagtgattaaaaataaaaatttttagggcaccctttgaaaatttgatgatattttattagttttattcattccaacagtcctaatgcgcaaacttttacagggaatgatgcaaagaatgcgcaaatttgcaagagagccgcacagaaagtacgaaag

SEQ ID NO: 83827 - DNA, 663 bp, Heterodera glycines
atgaaaatatcaatcatcgacctagtattctttggaatgctttttgcatttcttggaaatggtgcatctacttttcccctgaattcggctgtgatggaggtcgagaaggacgaagcggacaattcgactacggtggaggccgaagacaattcgactacggtggacgctgagacggaagaagcggacaattcgacaacagtggaggatgtgacagaagacgctgacaattcgactacagtggaggatgtaacaaatgatgcggactcgactacggttgaggctgaaacggaagaagcggacaattcgactacggtggaggctgtgacagaggatgcggacaattcgactacggtggaggctgtgacagaagatgcggacaattcgactacggcggatgatgtgacagaagaagcggacagttcgactactttggaggatgtgacagaagacgcggacaattcgactacggtggaggttgtgacagaagatgcggacaattcgactacggcggaggatgtgacagaggactcggacaattcgactacggtggaggctgtgacagaagatgcggacaattcgactacggcggatgatgtgacagaagaagcggacagttcgactactttggaggatgtgacagaggatgcggacaattcgactacg

SEQ ID NO: 83828 - DNA, 607 bp, Heterodera glycines
gtagtcgaattgtccgcatcttctgtcacagcctccaccgtagtcgaattgtccgcatcctctgtcacatcctccaaagtagtcgaactgtccgcttcttctgtcacatcatccgccgtagtcgaattgtccgcatcttctgtcacagcctccaccgtagtcgaattgtccgagtcctctgtcacatcctccgccgtagtcgaattgtccgcatcttctgtcacaacctccaccgtagtcgaattgtccgcgtcttctgtcacatcctccaaagtagtcgaactgtccgcttcttctgtcacatcatccgccgtagtcgaattgtccgcatcttctgtcacagcctccaccgtagtcgaattgtccgcatcctctgtcacagcctccaccgtagtcgaattgtccgcttcttccgtttcagcctcaaccgtagtcgagtccgcatcatttgttacatcctccactgtagtcgaattgtcagcgtcttctgtcacatcctccactgttgtcgaattgtccgcttcttccgtctcagcgtccaccgtagtcgaattgtcttcggcctccaccgtagtcgaattgtccgcttcgtccttctcgacctcca

SEQ ID NO: 83829 - DNA, 402 bp, Heterodera glycines
atgaacaaaaagctcaaaaatggaccaaaatatggactaaaaactgtcaaaatatatgtaagaaacaaagactctcgaccatctctaatgatcaaggcccagatttataaatgctgaatatagatagataaaaattgaattcaaaaattttattcaaattaaattatttaatttacattttggttaaaattaaacaataaaaattctcaaaattaggtacaaactaaattatttctttaataaaatttgattcaaattaaattaggtaattaaattaacaaataaaattaattaattaaaacacaaatttggttaaaattaaattcattaatttgaattattgaacagattacaattcagtcaaatgaacaaggaaaagcttcggaccgcaaaaaaggatga

SEQ ID NO: 83830 - DNA, 531 bp, Heterodera glycines
atgggctcagatgcttgtgagacgcttagagacgcacttcatcggtttacaattgaaggaattccaaaagaatctgttgacaacgaattggacttgaccgaaggtaaacattttagagtaattgataacacattttttttgcagatggagaaatgatttgttctgcacggacgggaagcgatgatttattgtcagcactcgaggaaaacattcagcaattgaagccaattgaaatgcccgtaagggtgacgagaaaagacattccgggcgtcagaatgcaattgcagagagaatttaaccgaatgaatttcacgattggcaattgttaatattttgagaaagtaacaatacactgactaaatttcctaatgctaattacccaagaaaacattcgaaaatgcttcagggaggagcgaagtgtttcattgtcaagcggacaaacttcagactgtggtttagattatcataatacaaaactcaaaaagtataacttgaatttttggcaaaagtaaatcttaaaaatatcctata

SEQ ID NO: 83831 - DNA, 1095 bp, Heterodera glycines
atgcaaatgaaatttgagatgatcgatttgccactttctcgcaaaaaatttcacatgagacaaaaattgcgtcgggcagtgaaaagtgctcattttttacattcgcttattgatgacaatccgctggtattcactgttggattgttattgatgcttatcttcttcgtttttcaggtccatgaggtcactcgtgttgaaactgtttcttacgtgtctttcatcttcggcagtttggaactcgaactgaaaaattggaaacgagccatcgaaacttttgacagagcaaggtttgtctgcttttgtttgttagttgatttgagttgctttcagaatcggttactccgaactgcttgaacaagtccgaaacagcgatctcagcgaaacttatgctacaaagttcgccaaatatgttgtaataattaaagagcaattaaaaggtgtcgcgaggtcgaaaatctgctcattttgtgccgggctcagacaggagatgcgaatgttctgctttcaactgtcagttcagtaaatctcaatgcttctgaagatgaccggaagccttcgcccgagcaattggtagttatttagttgttaggattacgaattattataggtcgttattcaaaaaatggcttacagactgggacagacatttgcggaattttcggaaataaaataaatatttctttagaacgtttgagaaaaatttttctatggaacctcttcagtgtagctcttcgtaatttcaaatataaagaagaatttcgagttcaattaatttaactagtcaatctcttagaatttaaagttccaatctgtgttattttactttaaattctccgcaaatttcccagggcgcgaaaagttctcaacaaaatttttgaaaattgttgtatagttatttttatgaatatttgttaaatataaattttagatagggaaggcaatcactgaaagcaccaaacagcagaagaaaaaagccaggatgatgaaagagccaaagccaatcaaacctttcttcttcgatttggcagccaatttcaccgaagtatgttgaaagcacacgcattgatgaaaagggactcatttatgttgaataaa

SEQ ID NO: 83832 - DNA, 3024 bp, Heterodera glycines
tgatcacgagctgatcgtctgttacaaaaccaaaaaagtgaagcacgtggtcaacaatgaaattgccgaagtttgccaaaaacatcttggaaatgttgggcaacagcaggcgcacggatttcgcatccgcttttgtgccaagcgtaacgcgacggagcagctgatcagtgtggaatccattctggatttctcattctcggacaaaatgtaattattgacataaaaagtgattgtttttccaggacaaaggtccttttttgaaaaggatttccaaggactgtccttggcgattcgagccatattttttgaggatttttgccatttattttttttgtaacctatttttttaaaaattttcacgataatagagcaaaccttaaaagctaccctaaggtacaaaaatttttatcgttacagtatattttcgtcttataaaaataaataaattaaactgtatcatcattgtcaattaattatgattctcattaataaattttgcgttttttatagatacaaaagagagcacagttactcatacaaaccgggtggacacatcgcaatgaaggagaagatgccgttttttttcattgagttcggcaatgcgaagcagcacagtatgcttcgtggcacgggagacagtagcgaactgtcagcagaattggtaatttatttatttattataattaattaatcagctaattgataaattgcgttttgtgaggggaaagaacttttggcacaattaataatttatgaaggtttcgcctacccactcctaagaattgaacctaaaaatttaagcttcaatattcgggagggggaatcgggaatcaataaaaaaatgcaataatatgaaaaaatgcccccccccttccctattaaccaaaacccggaaaaattggaaaattttctcagaaattcatcccctaaaatttatttttttttttttgcttttttaacacttatttgagtttttgtgcctttttgagcgtctaacaattggcacaattttgccatcaattgcctcggaaccatcatcatcatcaccaaacaatgatggaggagcacagcaccgcacaaaactgctccattttgttccgccagctaatgaagaattgaaaattttcttccaaacccgattgcccttctcgcgattgatcactcgcaaaacggatttgctgccttatgaaaacaatcccaatatcgtaagcgataaaattaattactgcatttaacgaaatgaaatttaaaaagtttaatggcacacccattacgcttttatttagccgactaattaatgtaaaccccgacgagtgtcttaattttatggtttttcttaatttggaaaggagatctttaaacatcgagtttttttttttggaaaaaacgcagcaaaaataattaggcttactaatgaagggctaaaaatacgaaaaattatttaattaatgaaaaactaatgatccattaaacttaaatttttaataaaaatccgtgccttacttattattagggatgcgatttttaagcacaaaaaaccgcgaaataggcacctaaaaaggcattaaaaatcgcaaaataggcattaaataggcacaaaaatcatcaaataggcactaaaataagcaaaaaaaaaatttttattaatgctttttaggtagcaaaactctaaaaattaatcaaaaaccctattttgcttatatttcaattgttttaaagttgttttcgataaaaataattttttaacacaaaaatttttatgaagaaaaaataattaatttttggggacgaatttttgtgaaaattttttttcaattcttaggggggtgtattttctgaatttttttcagggcgtttcttaagggtgtattttctgaatttttttttcatttttattaaggatttttccgaaaatcctgaaaaattcgtcaaaaatggcgaaataggcacaaaagcgtttttcgtgcttatccaagcgtattagtgcgcaaaaattttaggtatttgcctaaaaatcggatccctacttattatcatttaattattttttgcttttgcgtagctctacccggacaaatgcgaacagttgggcgatgactgtgagccgactcgggaacttttactgaaaattcaagatgtgctgcagtgctgttcgccagccaacccgtggaataaatgcctttgtgatgggtcgaacagtgtggataaagtactgaaattcaaggaccccatatgggaagtctatatcgtgctcgtgccaaaacgaaattgcggactgggatcccgcaaaatcccgcgcgggatcccgtcccgcgccggtctctagtcctccatatggacaaaaaaaaaacactattttgaaaccattatggaaattttcacgacaatcaatccgtaattatgctgtagttgtagagctaaaagttataaaaccttttttttgtaggctaatagaaaacacttagggctatctaatgatatcaagaactaaaaatttagatgctttaagcaaatttatctgaaaaaatattttcgtttgatcgttttttgactaacgcccattatggtggtttttgactaacgccatagcacattccgaggcctcaaaaattttcgaaatcggaattccgacccaaacgatgtcggaaatcgtaattccgtgccatctctggtgcaaatcggtgaggaaaccgggtcaacattttcaggtttaccccgtctgatgtcccctgcgatccaccaaaatttataaaatagcgcagaaaaacaattgggagcttggttaacaaatttcaaaaagtaaaaaacaatattaaaatccggggccgaccaatcccgaaggttttggaaaaacgatcgggagcaatcccgaatcaggatctcaatgaaatcccgttcccaacactttcccgaaaatattggaaaatttatccctgttttgtctcaatatttttgtatttcatgtcattatttcgctattttgcatcaagatttttcgaaccctactaattgcaatactcttaa

SEQ ID NO: 83833 - DNA, 1122 bp, Heterodera glycines
atgtgctgcagtgctgttcgcctgaaaacccgtggaataaatgcctttgtgatggatcgaacagtgtggataaagtactgaaattcaaggaccccatatgggaagtctatatcgtgctcgtgccaaaacgaaattgcggactgggatcccgcaaaatcccgcgcggggtcccgtcccgcgccggtctctagtcctccatatggacaaaaaaaaacactattttgaaaccattatggaaattttcacgacaatcaatccgtaattatgctgtagttgtagagctaaaagttataaaacctttttgtagaaaaaaatggccaaatttgcgctgctttaagaattccaaattttttcctagtcctgtctttacaattatttgaaaatccccaaattttttggaatttatagggacaattagagggatgtacgtacatacaataatttttgtcaatttttcagactgaattcgccgcaccgcccgggaaaaaagattcctcgccggacactacgccaaacaacagcagcagccgatggggccatttgggtgatccgctgaatgcagacgacattttttacgacagagagatggcgcagcgaagatacgacgatattatggagggtaaaggaaaattttttttgttttgtaaaattattgtataaaaaaaatgattgaatattatgtccaaaggtttatccctttcactttctatacagacatctcttgatggactattgtactcaaaaaaacaaacaaaaactttactagataagctgctgaaattgcgtgggaaatttctcaacttcaaccaaattaatttttattggaatcattcaatagatttagttgttctctataagaatattaatttggattgaattttagccaagctattaatttataattttttttaaaaacaaaaatttactgtcgaaatcaatcaatcactgttggaaaactaacagcaccaccatatatttacagccatttttgcctttttaatgtctatttttaaaatgcaattaggtgatttaattaagattgtgcccaatgtgtacaacagacaacgcctgctgaaaagtcgacaaaaaatcggaggaaacgacaggctaatgcacatttga

SEQ ID NO: 83834 - DNA, 1834 bp, Heterodera glycines
atgatttcaagcccgtttgtgctgaatttgaaaaaaaacaacttggcaaccctggcttattattggatggtgcttgtgcgtttcttaaatccaccaatgggttcgaaagcaaaaaatgggtaatatatatatataaattaatagcttgactccaattctacttaattaatatttcatggtagcattaaatagatttagttgttttctttcaaaatataattttccaaaattttttcccataagtttaaaaaaaagttataaaacattgaacattctaggttttttgcaatggtcatgcatatataattattagcatttacaatttttaagtctttaaaatgcaattgagccaaaattaatttatatatttgatagccctaggaattctcaatttgtctttaaattttcataaaattgcattgattttcaaaaaagttatggacaagaaatgctgacttaagactttttgaaatattatgacaataacttttttttatacttaagtaaaaaaaaattaggaaaatcatattctgatagagaacaattaaagctattttgaatgataccatgaaatattaatttggttgaatttgtgccaagatatgaatttatatacatattacccatttttttgtattcaaaccgattggcggaatttaagaaatacgccaacacgttattggatgcacgattaaattaattggtttatttgcagacaagctccattgcccacgaaattttgcatacactcgctctttaccacgaaatgcatcgtgacgacgcattttacttcctcaaactcaatccatttgatagaaacacggtaggtatatgaaacacatacacgcataattgtggcattaatttatttatttttactttaatttttcattttttatagttttgggtgaacaattatgtaccgctgaagaagaccaacaattttggctttacatacgactttgcatctctgttgcaatatccagctagtataaaaaatgggtaatttaacaacttttttattttcaactattctgatgctttgcccaaattattaacaaaaacaataaaaatgaaaaattcacacctattaatcgattctaaaataattttgcatttacacccctaaatgttaaagcttttgacaactattttcccatttttagagattctattttgggtttttttagaacctagaaatagttattttggcaatttttagcaactataaattgcatccctaatcttcagcatagaaaaattcaatgggtcgcgctaaattcgggatttttatttttatttaacatactaaacctaataaaatttagggtcgggatcagtttggcgccgaccgtttcggcgccgccaactttcaaatgccaaacttttttatttgtcaattaacgttagcaaatctggcatcatttgaatgcagtgttattaattaatagttcatgtaaaaatagaaatacacatcatataagggtaaaaaagtaatgacatgtggcgcacgccaaaaaagccaagaaaaagtaaatttttgaggattgatttttcagctactttaacatgatcacaatgagccgcttttatcagcgaacaattggacatggtggaatcctttcattcaaagactcggcaataatcaaccacatttactgtcgaggtgcggttactgtaaaacaggaatttttatttttgttatttgttataggttactgtaaagaaaagaaaaacgagtgccaaaacggaggctatccaaacccaaaacaatgcaatgaatgcttttgtccaggaggttatggcggtgcacattgtgacgatgtggaacaga

SEQ ID NO: 83835 - DNA, 415 bp, Heterodera glycines
caacaattcaccgcccttatgcagtcacaaccccaacaaccgcccgctgcccacgcgcacgcggcacaccaaacagcgcagcaaaatgtccaccaacaccaccagcagcagcaggcatcgcagttgtcttccgcttttctgccccatcagcagcatttgctggaagggaccgcgcaaagttccaacgcctccggcgtgcccagcggtgcccccgcgggcgctttgccatccgcctcgacgcaattgtctgccgcaacggtcggcttttaccagcagctgctcgcacttcaacaagcccagcagcagcaccagcacggcggaggtgcaggcggtgccagcggaagcgcaagtgcagccgcaacaccggcagtggccacgctgccgcaacaattcaacacagcacttcacttggcaa

SEQ ID NO: 83836 - DNA, 1064 bp, Heterodera glycines
atgctgaacccggcaaccgccactttgtacgcctaccaaagctatttgcagcaacaccagcagcaaccgcaaacacccgcaccagcggcagcgtcggttggacaggcaaagaaagggggaaaagctaaaggggcggagggttggcaaaatgtacaattgaactcgatcagttgactaatgccctaacattgtacagctccaacttctcgcccaattgctcgccggcggaggcgtttccaccggcaccgccggaaactgcggtgtttctgcagttggcagcggtctccaatcggtgctgagcgctttccccggcggaggacagcaacagaatttgttggccgccttggcagtgcaacaggcggcgcaaccgcaacaacagcagcaacagccaacgcaacaagaagaaacacgcattttattggagcagcttatcagacaacagcaacagggcagagaccaacaacaacagcagcaggtagagaagcagaggggggaaaagagtgtgggagaggggaagaaacaaagaaggaaagacttacatgataaagagagagaaagggatagaaaaagtgtgtggactatgggggaaataatgaggaaagaaaaagagatgtgagaaatagagggagaacggtgatttcggctttttagagagaacgtgagcagcagctgaagcagcaacaaatgctgcagcagcagttgggcaggttcaacgccgctgcggtcggtgccatctcttcggagccgcaagcgccgcagctcgaacagtcgccgacgatgacggcaacagcggtggcggcatttgcatcggcgcaggaacaaatgcaacaacagcagcaacaaacggcgacggcaattgccgtggagcaacagcagcagcagcaacaaaatgagcaattccatcaacaacaacagcaatcacaacagacgaacggcaacgccctcagggagcaacaacagacgacgggaaacgccgcgggggcacagccgcaacagcaacaacggcaggcgacgcccaacgaacggctgctcacatccgaggcgttgcaggacagaatatcgcg

SEQ ID NO: 83837 - DNA, 503 bp, Heterodera glycines
atggcaaaggcgacgaaagcccgatgggccaagaaaagtgagttttttcactaattttaattcaagatcattttttttaaatttcagccgctccacagctgaatcccaatgccaaaattccaccgcaggacgaagcagggccgaggatcggggcccgaagggaacaatttcgaaaaagggatttgaccggcaactcaataagaaaaattttggttcgcgctacagaaatggacgaacttttcacaatggaatggcccaaagctatttgtaggacactcgaacacctcggcaaaattcaaattttttcaaaagtgttttgtccgattttattaagataaaatcataaattttaggcacaaattttgtccccaaatgacctggacggacttgagcgatcaattgacgatttcaaagtgtttttggcagagcaggaccggatgagtgcctttctctcaaagaaacccaaggcccatcttctactcttccacttagtattgaaatga

SEQ ID NO: 83838 - DNA, 696 bp, Heterodera glycines
atgtcgaatgggaccgctgaacggtttgtcggcatttttaaaaggtcaatgaaaaagtgccgtcaagaaggcaaagattggcttcaaaaagtgcttttggcgtatcgcacgacaccaaacacggcactcaacggtcattcgccagacgaacttttccttggccgacgcatgcgcacaagaatgacacttgtccatcccgaaaaacaaaaactccagccaacaaatttggaaaattttcaacaattccaagggcaatacatcaaaaagatggaaaatcaattcaacacaaaacatggagccaaatcaaccattttccaaaatgaggaaccaatttatttttggaatttgaaaaacaataaagccatttggctcccgggaaaaattatagagaaattcggcacatctccgacgtatcgcatcttggaaccgacgcttggccgagccattcatcgtcatgcaaaccaaatcaggcgacgtttcccaattgaattggaggacaatgatcaagttgtagaaaatgatcaaacccaggcacaaaatccgcaacaatcgccgatcgcgcacaaaccgcagacaaatcgtcagcaatcgcctgctcaaccagttcttttgcgccgatcaggaagagccaaacaagcacctcaacgactggtcctggatccgacaaagccaaaatatggcttaatccgatcttaa

SEQ ID NO: 83839 - DNA, 196 bp, Heterodera glycines
atgggaggagtttatcggagtagtaaatgtgcgtgggaaaataaaatgccatttccggtccaggccttacattgttataataccatcaatatttttaacaaaattttttaatttcagacgctaaaataaaaaaagaccaagaataaaactaaataggaatttatatgcaaaacaaaaataattttaaaaaattaaa

SEQ ID NO: 83840 - DNA, 327 bp, Heterodera glycines
atggatcaaatattatcaaaagtttatttcaatctaaaatccccagctagctatgcgggaattttgaaggttttagaagaagcaagaaaagtagacaaaaatataacattagaggacgttaatacgtttcttgaaaaacaaagaacctatacgattcataaaccaatcaagaaaatatttccaagactcaagacgatacccagcgggcttcatacagattggcaatgtgatttgtgcattttcgatcagttgaaaaaggataacgacggatacaaatatttgcttgtctgcattgatgtgctgagtcggatgatcttcagtgcaccg

SEQ ID NO: 83841 - DNA, 816 bp, Heterodera glycines
atgggctgtccttatgctttttcctgtaaatttctgctcatcattttcacattatgccaattcgttgcgccaaactttagcttttttggcacttttggcgattgttttgatttgtttaacattttccacaacaattggtgcaaggagaaggttgcagtggagagcagaagcttggaccaaatgtacacttccgcgttgactgaaggcgggaaattggtggtgtacgctgggggcacaatgaggggccaacaagtaatgaaacgccgaaattgcctaattaaaaaattaaacggtacagaaaatttacaaaaaatcgatattaaaattataaataaaataagattcttttgatttttatgcaatattaaagggacccacgcgtttcggcgctggcgtttcgacgccgatgtttcggcgctggcgtttcggcgccagctcgtttttccacttaagcttttttctttggcatccaaatccaacaatcttggtatcattcgaaagctcttatcatgctctattagccttacaaaaagcggatagattttcaagcctgtaaaaaattttattaagaaaaaacttcaaaaatttcgacttttcgaaattttcatgtataacttttttggtaattgtctaatcgcgaagcaatcgcttagaaaaagcttctaaacatgttaagctttcgaattatatcaacaatgttggatttggattagatagaaaaaagttatagccaaaaacatgctggcgccgaaacgccagcgccgaaacgccggcgccgaaacgcagtggacccattgttactgcataaatcgttaa

SEQ ID NO: 83842 - DNA, 723 bp, Heterodera glycines
gctgcatcggatgcaagtgccgccgttgctgtacgcctaacagttggtgagcaatgacggaaaattgcttaaaaaagaaaccaaacaaactcatcaattgttagctcccgttgacaaaccgaagggtacattggggcaatggatgttgggctaccgtatcagttattaaaattgttgtttttcaaaaaggatactaaaactgggataaccccattcagagactagtcaaaaaaaataataataggcttggactaccatactaattagaaattttagaatgtgtctgttaaatgcaaaactgttgtgaaaaattgttataactccattcagagaagagatagaaaaaaaataaaaataggtttagagagcccgtgaacagctgcatcggatgcaagtgccgccgttgctgtacgcctaacagttggtgagcaatgacggaaaattgcttaaaaaagaaaccaaacaaactcatcaattgttagctcccgttgacaaaccgaagggtacattggggcaatggatgttgggctaccgtatcagttattaaaatttttgtttttcaaaaaggatactaaaactgggataaccccattcagagacaagtcaaaaaaaaaaataataggcttggactaccatactaattagaaattttagaatgtgtctgttaaatgcaaaactgttgtgaaaaattgttataactccattcagagaagagatagaaaa

SEQ ID NO: 83843 - DNA, 1265 bp, Heterodera glycines
atgaccagcagaaaggaaaagaaaaataatttgaagaatgaaaataatttgccaaataatgacaaaatgcaaaatgacggcacagaattacttgaggaattcaaaggtatttttgatagaatttttttttttgtaatttaaattttcagcaatactgaagagtgacacatatatgacaaaaggagccaagtaaatttaataaatattcaaaataaatgtcaaataatttaaatttattagggtagggctccgatcatttggggtgagaaaagtcggagttcgtcggtgacatttaggcgagatcgggtggaccaaaagggtctgggtttttcaatttttgccataaattaaaaacaaatgcagccagaaaatttaggaattcttaatgaaattatatatgttttagacttttggacaaaaatcaaaaatttgacaaatatattttaaataaaattttgaattttgccattttaatttttttggcaaacggaatggaaccccaacaagaattaattaaatagtgtaatgcaatactaacaataagcacaatattatcgaaacaatactcggcgaaacaaaattatattttgattcaaaaactttcggccaaagataattaaaagcgaaaaattgaacaaactttttttcttttctctccgtcgttttcgaattccctaattgccttaatctcgggggcaggggtcctatccaaatattaaacaaagctcacttttgaatttaagcgttttggaaacgaaaatgttccaaatgccacccaatacatggcaaatgatttcaaagcatttctggacgaaatgccagaaacagagggcaaaagtgcaatcattgcacttttggcatcaaacccttcgtcacccattttgccaagcgatttgattgagcggctgctgatcaccaagccaacaacaaattcaaaaaatttggaaacaccaattgttcatagacgtcatgctcgtaacggtttcaaaatcagcgcgagtgacatggaaaaaattattaaaacaataattgaaatccgcgtaattctcacactgctgacactttatttctggtattgtgaaaacaattttattttggtaataattatattgatcttcatttggtttgtggtagatttgagagacgacttagagcagggagggagtgatctgaaaattttcaaaaaaatcagaacattttgcaaaattgctccatcaaatcaggacatttgtaataaatcaggacagatcacatccctgacttag

SEQ ID NO: 83844 - DNA, 1294 bp, Heterodera glycines
atgctatcaactttttctattgcaacaattatcttaataaatgttgtccatttcaatgcttttattataaatgaggcaccaacaaatttagcaaacgaacacaaaaagccaattaacgaaacaccatttcttaccgaacttaaaggtgattttgatgaaaattgttaattaaaatacaaatttaatttaggaattatcaaaagtgacaaattcaagacgaaaggcaataagtaaatttaaagcgataattataattaaattaaaaaaaagagttatttcataatttgaccttttcaatctcaaaaaataattaattaaaatacataatttgtaatataaaatttttccactaatttttaaggccattagttgaatgggcgttagaaattggttgcaaaattattattaaaaatttgaacgaaaatgccaaaatatgtgaacaaaatgaagagaaatgtccagcgcaaataacaaatttttacaaaataatgaccaaaatttgcatcaaaaatggtgacaaaaacttaattcttgatgaacatcgagaacaactgacacagctcaaggacattcttggcacacaaactttggcacaaatgaaaaaatatgagcaaaactttcaacaaaatggtccaaatgccaaacaatactcggcattgctccagtttggcgatgatttgaaagcatttctgaatgaaatgcctgaaatggagggcaaaagtgctatcatagcacttttgtcatcaaatccttcctcacacattttgccaagcgatttgattcaactgatgctgatcacgaacaaaatcaatccaaaaaatttgatcaccacaaatcgacgaggtcgccgagacatgcgcgattcattcgctatagcattcattatttggttcattatttatttatggtggtttgggtactcctttttggctggtttggtcaccggttttttgctcgctgtttggcttggtaggaaattttgatttttttagtgatgtaattttagagcttttgttatgctaaatttttggaaaataatttctgtattattttttttttaaatttatttatgtaattttcttttttcatccgcagcaacttttttttttgctattttctgtttttccttaactttcttttaggtatttgcacaaattattttctttttttttacacattgataaattgtagtttgaatttttaaagattcattaaccaactaataatttacatagttttatgcttacaattaactgaacaaaaaaaaacatgattaacttcaaacaaaaaaaaa

SEQ ID NO: 83845 - DNA, 1782 bp, Heterodera glycines
gcctacacagcaaacaaccgcagcaaatttggagtcggcactattcaagagctttacttccctgcggttagatcaaataaacaaacaaaatgtttgatcttctaacaatttgtcaatcttgggtgccatacttggttcagatcggtttaatgagaaaatttggaaaaaattagcctatttttaagagtaaagcaattaaactaataccataaatttttttggttttagaccgatttaatgagaaattttgaaaaaaatgagcctatgtttaataataaagcaatttgcctaattatcataaattttttgacactcaatagtggcacataattagattttaaaactataaaattacgtatgaaaattataaaaaaaaaaattaaggattcctcattaaacgacagcagcaaagttggagatggcattttgcgagagaatggagccaatttgttcgacccaaatgttcaaattggcacccaaattagcaaaatcactttgacaaaaagggtatgacatattaaataaaaatattttcaataatttgaaaaatttaggaagcaaatccgattgaacagattgacaaaatgatcatggttgatgaaggtgaaggagttcgaaaggagcgaaaagcttcggccaaaacggcgccaaaaaagaacaaagaaggtaattatgaaaagtgaatttttaataattttaattaggaaaagatacaattttacagcaaaaaatcaaaccgataccgaataacaatttttaaggaaatttgaaatatttttagaatttcccattcccaaaaatgctaaatagaaaaaaatgaaatttattttttaagtaagatttttaaaacatacagcttaatgcaccaagaaaagatataatttaaaataattaatagatgcaaaaaagcaaaaatccgatgccaaagccaccagcactgcggcacccccaacttcaacaacaacagttgcatcagcagctgcagcaaagccaaaagaagatggaaaagagggacaagcaggaggaacatgtaaaaaattatttaaaaaataaaattgatttttatttcttttagcaaactccgaagcaaaatctcaagtaaaaactattccgcaaggccctccaatgccaccaccaaaatctgctccgccggcgccaccgcagccaccagcttcaccatctgctcccccagcatcaccgcctccacaacagcctgtgattgtaatattaaaaaaaaaaaataaacaaaatgcctaaagtaaaaataggagaattaaatgtgtgccattaaattacagggaaattttgtgtaaaaattataggaaaataataaatttatttcaaaaaatatcactaatttgccttgaaaatttcataaaattcgttatgtttcggaaatattatgccagaaaaattaaggaaaccatattttgtcattctagaaatgattttaattttaatgtcatgatgggtaattaaaatatttaatttcataggtaccaccaaagttggtcaaccaatcgtcagcaggtatggcattgccgatgccaattggtgttggtggaaaattgcccaacttcaaactgatctacttcgatgcgcgtggcatctgtgagccgatccgactgatatttcactattccaaagtgccatttgacgatgtgcgaatttcgcgaaaacaatggttggcattgtgagttttgaattgtttttttttgtgtaattttaatttatttttttagaaaggacaacacagtttacggcaaagtgccaattttggag

SEQ ID NO: 83846 - DNA, 107 bp, Heterodera glycines
atggagacgaacaccgtccggctgaaggagtatatggaatgcgacaatggcaccactgaaaggccattggatgtgttggtgttgcagagggatgccggtggaggacg

SEQ ID NO: 83847 - DNA, 972 bp, Heterodera glycines
atgctcaagctgtactacagctttggcttttcaaactccatcgaacaaaacgtgcaaacaattggtggtgatccaagtgaatggagccgaacggcgaacacagcgacgaaacgacggactgtcgcttttgtcagtgcgtggcaaatggcaattggtcatcgctttttcctcgactccgtggccaatgcttttgtggtatttaaaaacaaaatgtttaaaattgaattcatttttaatttaattcaggaagaacttttcagcagtttgttggaagacgtgagaacagccgaagagacaacagaagcgatggaatttgaggaaatgatgcgccaaatggaaacactgatggaattccgagagggattcatgcgaaagtgctaactaaaatttgacaaagtatgctacgaaattttgtgcagattaagccgacacccacgcgttgtcctggacaaaggaaaatacggcgacggggcatcggcacccgacccaattttgccaagagatctctgtaagccgcaataggcttattgttagctcagcaattcgctttttttgccaaggcattcaacccattcatttgatgaatgcgtccgatcactccaaacggtcgatcactttacaattgcgaatggacaaaagtgcggcagaaattgcacaaatggcggcgaacgccttccaaacgcggcattttgttcacttatcaccgcacattaacggcgatgctcatttgcaaaaaggggaacaattggtggcaggaaatgagcaagaaaagggggaggaaggggtcgctggggaggacgacgaatttgtgttggtggaaatgcgcccggggggaggggaagcggcgacccgccaattcgagccaagggaatgttcggtgccgacaatgctcagcccaacggaagcggaccaactgttcgtggcacgcagaaaagaactgcataaactggcaagtgaagcatgcgactgaca

SEQ ID NO: 83848 - DNA, 418 bp, Heterodera glycines
atgtcgcactacggtacaagtgcacgtaagagtcaaatcattttagacgcataattgaagtaaattataatttcacttttcttggtgcataaaaacatcaaagacatagtaatttcacgttttattggtgtacacataaataattaaatcgcaatttcacgttttattggtggacacataaataattaaatcgcagtttcaccgtttattggtgtacacataaataattaaatcacaatttcacgttttgttggtgtacacttaaataattaaatcgcagtacgtcttattggtatacacataaataactacatccctacaaaacaaattctcaggtgaaacattagtatttgctgtaagaattggcatggaaagggacatttggtgattctttggaattcatcttttggtttaaaaa

SEQ ID NO: 83849 - DNA, 173 bp, Heterodera glycines
atgccgacggtgccgctggcgttgttgctcacgagtgccgtttgtttggcgactgtgctgctgccgccaacgccactgtcgccgctgctgctcacactgctcgccgcactacgcgtcgccggtgcgccagcgtacgccgcacgctcagcgagttcagtcgccatgggcaattg

SEQ ID NO: 83850 - DNA, 96 bp, Heterodera glycines
gggaccgggaattttgggcaaaaccgggaccgggacttgccgggacctgagaagtcgggaccgggacctcgatttttgttcgggaaccgggaccaa

SEQ ID NO: 83851 - DNA, 58 bp, Heterodera glycines
aatgagcagcaaaacgaatgggactaaagtgtgttctgcggttgcggactcaaaattt

SEQ ID NO: 83852 - DNA, 2093 bp, Heterodera glycines
  unsure (1)..(2093): unsure at all n locations
ccgtcaaattcgctgttcacgtgcatttcaccattcactcactttacagtccaaaaatacgcccagcaaattgcagcagcagaaaagaggcggagcatgtcgttgacaccaatatttatgatgatgaagaggggcaaatcgccgcttttgctgcttcatcaccagtctttgtcgttgtcgtcttcttcgtcatcatcattgtcgagtcgtctcctcccgccgctgttcttcatccatcgtcgcgatcactttaataatctccgtcgtcacattttcaccgccgagccgtcccaaaatcggctgatcacatcgatccgccaccgccagatcaccacaatcagcggctatcattctgctgctccgatcactctcttcaacggcagcggcaattttcgtcagcacaaaacagcaaccagcaacaacaaaatgggttcaatcacgcagctgagcagtgtggagcagcacaagtgcgcactgctgcacaccaacggcggtccggcggttgcgcccgcggcaccgttgacgctggagccgttggccggccctgacacgggcatcctggtggcacggattagtgtgccgtccacgcgcaacgcgttctcccgcgcacttgcacaagcggttggtgccatttttgggattaaattgcaaaaaacaaaacaaaaaaatttttttttgcgagtcttttactaggtcgttgcataaaaaagggcgctttttgaaggaaaaaaatttatgaacaaaaaatgaaaaataacaatcataacaaagccgatcaaaaagctacttaacaaagtaattgccctgactgtctacaaccttttgccgccgagatgggagtttaacaatgccctttttgtaaaattctgtgccattctttgaacctaggtaattttcactggatccacgaccttgccatattctttaaagagcctaccctataaggaattttcgaagagtataaagctactagaccaaaaaatgaatttaaattggtttaaaactcacgaaaatggcattttttttatacccaccccccnccccccccttcgaaaaaaataataattttttctttcaattttcagttccgtgacatggtcgaccaattgcgctacggcctcgaaacgcgtgcgttgattttgaccagttctgtgccacaagcattctgttccggtaagccattgtcattttacaacccccaaaaaaataaaaaaattataaatttttaggcgtcgatttgaaggaaagacgcaaaatgacgtccaacgaagtgaccacttttgtggatggttcgtttttatttcttttaaagttttatatatatttttttttgccattttattcgttcaaattttatcggtcataaaaatttcagaaaattttaggccttcgtcgaaccattaacgacctgtccgagttgccttttccggtcattgcatgcattgacggctgcgcattgggcggcggtttggaattggcgttggcctgcgacatgcgcattgcgagtgagcctttcttggaattttcctggcccttttctcaatagtttggcgattttatttgattgtactatagtacaaagtttaaatctgttccgctaaagtgaccaggttgaacaaaaacagaaaatattcggcagcattcttccgaaaattcggggattttaattttttttttcttcgtcctcctaagaattgtccctacatttgcgaccgctgatccacaaaatcgtgccaattttagcattttttcaacgacactttcataaattccaaaactgtaatattgaacccctatttggattttaaaaaatagtttgattgaccctaaacaccatttgaagttacagagagtttggtactcaattttccgtaaacgaatttttctctcagattttaaactttaaaaaacaattgttttttctgcttgcagcaccccgttccgagttgggcctgcccgagactcggctggccatcatccccggctgtggcggcacccagcggttgccccgggtggtcggcgttgcaaaagccaaggagctgattttgaccggacgcaaagttcggggggacgaagcggcacaaattggactg

SEQ ID NO: 83853 - DNA, 205 bp, Heterodera glycines
gtgtttagggtcaatcaaactattttttaaaatccaaataggggttcaatattacagttttggaatttatgaaagtgtcgttgaaaaaatgctaaaattggcacgattttgtggatcagcggtcgcaaatgtagggacaattcttaggaggacgaagaaaaaaaaaattaaaatccccgaattttcggaagaatgctgccgaata

SEQ ID NO: 83854 - DNA, 2329 bp, Heterodera glycines
atgggaacagctggtaaagacgacgacggagaaaagccatcggttgaaggaggcaaacaagcagaagacgttcatggcagcggtgaaggacctcgagttttggctgggagaggtgaatttcatcaaaaaaatgttaaaacaattaaaatatttttaaataaatgatttttactgacagcaatatcaaattagtttttgccgcaaataaatcaattaaatttaagaatttaaggattttgaatatttttttaaactgaattccgagatttagtgatattttattgactatttaaaaacattaatttgaatgatgcgatttttttaaaatcatctttgataaaaatgataaaaacttttttattttattttttaattagttaattttttttacttttttattactaatttttttatctcttaaattgttttttgatattaccaatgtattaaacattttttatacaattttcattttttcaggtcgaaacactgctcgcctctgaagactacggtcgggacttggccagcattgagaatttgttgaaaaagcatcaactattggaggtaaaatgcatttctaaaatctcaaaaaatgttatatttttaaaattatttattttttaaggccgacatcgtcgcacatgccgaccgagtggaggaaatgaaccgtcaggcggatgccctgctcgagtcggagcagttcgaccaggcgcaaattgacggacgccggcgcaacatcaacgagagatatgagcaagtgaaagtgggtgaaaagaatcaattgtattttaatgttaaatttatctatttaacattcgtgaaaaggaaatccgaaatttaaaaattaattttggaaaaaccgacgcaatcctttctgtttaaattataagtggatttatcttttaatttattttgtaagcatattttattaattaatggaaaaaaaccaattttaaatgaattgcatttctataatttaatttaatttttgttttaattcaaataaaaaatggattttttataaaatatttattattttatcatattgttgattaaaaaaacatctcgccaattcactttttttgcaaatttaatatttcaaaaatattttgcaatttcgaaaaattatttttgtgcttcttaaccctctttagttgttgcttctttcaggactcgactgatgtgcgtcgcgaaaaactgaacaaagccatcactgttcaccaatttctgcgcgacattgacgaggaggagtcgtggataaaggagaagaaagtgagtgaatttgttttaatcggatggatttattttttaaatatatttcaacttattatttgaaattttcatgaaaaccccagtttaaaaacgtaattttttttcttaaaaaattatttaaattcgttgttttttttttcaaatttaccacaaaataataaactaactttctagtgtaaattttttttaaatggcgctgaaattttaaaatttctcatggcgacgcctgccgacacagcctggaccttcattttacaaatacataagttttaaattatttttaattaatttttgttttttagctgttggtgagcagcgacgactatggccgtgatttggccggcgttcaaaatttgcgccgtaaacaccgtcgttttggcaggtgagctcattaataaaattccaaaaatatttatttgccagaaataaatgcaatattttgtcttttactgatgagaagcaaaaattccgtgcgccaacccacatttaagccaatttaggccgcctaacttttccaattattgtccaattattttttttatgttagaattcacgaaaatttagaaaaatgcaaaaaagtaagaatttaaaaaggtgtccaatgttaggactgagaacaggaaaaaccgaattttttcttggcgttgactcaagaccgggtacaaaaaatgtacccccaaaaattgcgtcattttcttacactttttttttcaaaaacagtgagttggacacccatcagccccaagtggaagtggtgcgctccaagggcaaggaattggccaagtccagcgaaattggcgggccggagattgagcgccgtatcaaagcattggaccaaagttggacacaaatggtcgaattggcagacgaccggcaaaaaaagctgcaggagaggtgggaaaagggagaaaaagcattgaaaatttcaaaactatatgagtgaatttattttccccaatttttctaatattttttgaaaaagttattgaaatagctcttcaaaatctacacaaagcgatattttcaaattttatttgaaattctcggtccaaataaa

SEQ ID NO: 83855 - DNA, 51 bp, Heterodera glycines
cttttcttcacagcgaatgcatatgacttaatattcaagaatatttccgtg

SEQ ID NO: 83856 - DNA, 711 bp, Heterodera glycines
atgggggatccaattcagctcaatcctccactgaactactttttcgaagagagaacggtggaaatgcgcggatggacttttggcaacgaaacggacattggccaattccccgttttagcgacactttcttgtgcggtcgaaatctgtgcggatccgtgtgaacagagctgtttggacaaaattgtgagcacattttgttgtgctttgggtttgacaaatcttggaaaaacaaaaattttaaaatcgaaaaattcaaacaatgggtttacctgtcaaaaaatactcaaattttgcatccttttgggatgcggcaaaaaagggtattaggtaattttaaaaaaatcatttagttctaagaatcaccaattttgattaaatggatttttttttgttaatttatgttgtttttgttactatttgtccccttccgaatgccctccaattaaacaataaatggcactaatttatatataatttcctcattttttctttacagtctcttgacaagtgcagcctcaatgattttatcggtgacaaaaatgccacggatatttgccacgaaggaaatgccgccgctgttcagggcacaatcagtttttgtttgatgacgcttctgatgttcctctgttcttccactgttttgatgtttcagtgataccaaaaaataattttattttgttttttaataattctaattcgttaaagaatcaa

SEQ ID NO: 83857 - DNA, 50 bp, Heterodera glycines
atggccgaaggaaaaaaggacgaaatatggatttaccaacgcagaaattg

SEQ ID NO: 83858 - DNA, 2114 bp, Heterodera glycines
atgattaaaactgctcttttcgatctcctcgacggacacacagcacaaaaccttccctttctgcgtgaaaatggtcgaattgctgtccctaaaatgcttttttgcttttatcggaatccgttgagaatcgatctaagcaattctaaaaaggtaacaaatgcctttctgctaaatcccattctcatcatcaaatacatttattgtagaaggaactcttggaaaaaatggagaaatgtattgagtcgcaagtttcacattttatgaggcaacacggaatcatcgacaatcgcttgtgggtttgtcttccaattcgctttttgtttgattggttccgtgtaaataaactcccacaatttttagtcccgaaaatgctcttggccaaattacaatttcttccggggcgcctttcgtttacatttttaaccacgacgaacttcccaaagatgcaaacaatgaatttgtgctttccctttaccctgaagagtcatgcgaagatttctctgctgaacgcattcagaaattaattgaaactgtgttggaattgcatccaaaaaacaaaaagtgtacgtacgtcttttgctaaattttaattctcattaaaaaattagtgttaagtcgttccgattacaatttcgactatttcctacacacagcaattttaaatattcggaataaaattgtggaagatattggcacaacacttagtctgaatgactttgtgcaagcggcaaaattcctcaagcgaatgtttgtggacggggcggcggacggatattcaatggcattttcgcgccattccctgcaggaagtcgacacgcttaacaggtgcttaattagataattgttatcaagtctttaaatgccaaactgttttagcataatcgattcttccgtcggattcggcatgaatctttataagagtcagctcaaccagcagccgaatgtgacgggaggtggtgacatcgccttctctcaactcgagcatgattttacggttaaaaaatacataattatggaattacatttctttactcttaaaatttggtgctttagttgaacatggtaagtgaccaattggtgcgtcgttcgccgagggctttgggcaaagcaaagcaaaatacgatggtcgagcgaatccgaacggactgcacggcactttggatggatgggcaccaaagatgtgaaacactttctctcacgggtgcacttttgctatttgtaatcgaagcaatcacttaattgttgtggtgataattcaggacaattgtgccattttacagtgagtttcccttttgttttgcctattccctttccttttgttttattgttagctccatgacttgccaaatgaaacttcggtcggggggagtcgttctcgagatgaaaagcgccctcggaaggagcactgttcgggtgtaaaaacctactcaatgtaattaattgtctgctcatttcccatcatctgtccttccctctgttcatttctttaggtgtaattgcggtctgtcgcgtcaaattcgaagcgaccctttttctctgaaggtgagtttcttttattaacaagagaatgattcattgtaaacagcaaatttcaggaagcaaacttcactttttaccaaaaatcggacctcacatttgccagttgttgtgctgatttggatcgttacgactttcatttgttcaatgttcacgacgcagcaacaaatagggcctctaaaagtgacgaggaccttgacacgacaatggtctttgatgatcagaacccaaaagggccaagtccaagtgggacgaagagagaaaacgaagcccattttgaagtggacgatgaagaaaacgttgtcatcgatccccatgagtacaatattcggtttttcgatgatgatgatgacggcgcggcccaaattccttcagacgaaggcgaaggattagaaatgtcggaccaaccgaaaggcaatgaagctcccattgaaccgatgacgcaagatgatgtgccaatgagcaaagcatttagtggcgatgacattgaggaagacgaggaggtcgaagaacagcggaggaaagagcgaatcgaatcgacggaagaagacgaggaattggatgaggaagcggaagag

SEQ ID NO: 83859 - DNA, 605 bp, Heterodera glycines
catcttgcgtcatcggttcaatgggagcttcattgcctttcggttggtccgacatttctaatccttcgccttcgtctgaaggaatttgggccgcgccgtcatcatcatcatcgaaaaaccgaatattgtactcatggggatcgatgacaacgttttcttcatcgtccacttcaaaatgggcttcgttttctctcttcgtcccacttggacttggcccttttgggttctgatcatcaaagaccattgtcgtgtcaaggtcctcgtcacttttagaggccctatttgttgctgcgtcgtgaacattgaacaaatgaaagtcgtaacgatccaaatcagcacaacaactggcaaatgtgaggtccgatttttggtaaaaagtgaagtttgcttcctgaaatttgctgtttacaatgaatcattctcttgttaataaaagaaactcaccttcagagaaaaagggtcgcttcgaatttgacgcgacagaccgcaattacacctaaagaaatgaacagagggaaggacagatgatgggaaatgagcagacaattaattacattgagtaggtttttacacccgaacagtgctccttccgagggcgcttttca

SEQ ID NO: 83860 - DNA, 3650 bp, Heterodera glycines
atgctcgaacaacgcgacaaaatgcaggaacaattggtaaggcaattatttattactttttattggccaagggacgacggatgggccaaggccaagctgatttttcaaaatttaaaatttaattaatcattttttgattaggtgcgaatgcaaaagtgcgtcgaagaaacggaagagaaatgccgggaaacggagagagagcgagatgtactgagacggcaaattcaccagcagaccaaagacatgccattggtcggcgagcggggggggggctaagcttggcaccaattagttgggaaagtatggcaaaatttgacctggggaattagaaaggctcgcaaatgtttgaactgtttaaggagattccaaagactgggcccgggtgaaaaagtttgataattttttaaattaattttaataggtagctttaattatacattaaatttttttgctgattgttaaattttagaaaaaaggaattccgaactaggccggatttgttaaattattttggtagatgaaattaatttgaattaatttgccaaactgccattggacaccattttctgaaatgcatctcttttttaaaaattcaaaagaaattttcgctataagatgcaaacaaatgaggcattatattataaataaaccattttttggcaatttaggaagtgcaaaatttgacccacgaattggtccaatgccgggagcaattgtacgagaaggaggaggaaattgtggagatgaaggcggaacggaacaacaccagactgttgctgtcagtgaatttgttaaacacacttttaatattgttccccgctttagggaacacttggaatgtcttggtaagttgggcatatgccgaaaaattcaaggaggacgggttaatggcattttttgattttctatcggttttcgtttggcatttgactttgttttctaagacggaaccggtgccagttcgcgcctttacttagaaaggaccaacttcgtttctcgatgggtgttcgaattcgccaccctttcccgggttttcggggctctttttaaagcttgggttttttactaccaatgaaaaatggtagaaaagtcgtacataggacccgagactcctcttttagacttaaattggccctgggcttattaatccctttctgttctttggttttttcttaattggtaatgatacttttacaatattccccccccccccctccggcacagtgtccaaacatgaaaagtctctgcgaatgactgttgtgaagcgccacgcgcagtccaaccgcgacaacagcgtttcctccgaggtcgaagtgctcaaggcgctcaagtcgctgtttgagcatcacaaagcgttggacgaaaaagtgaactccgtaaaatgaataaaataattaattttcaatttaaatgtcatttttttaaatttaaaaattaactgcacattttccataggtcagagaacggctgagagtgtccattgaacgagtgcacaatttggagatgacactcagcgcaacgatggaggacaacgcggcactgaaagcgcagctggaactcagccaagaacagcagcagtcggcagcactgcaacaccaggcagaacaatgcccggggaggggataattaattgattagcccatgttattggacaccttttatgggaatgattagcccactttatggggtcccaattttattggccttgaaattacattaataaattcggctttattttaaatatgggcaaaaggggaagccgaatatagagccaataattgggctatttgaatgttgccatttatttttcagcgtgtgccaaacggcgatttgaaaaattctgtcgatttctgcgccaacggaggcgctcaatccgccgctgttgttgagctgcaaaaacaattggacaggctcagccaggagtatagcaccagcatcaaacagaccaacgaactcagctcgaggcaaaaattgttttaaaataataaattattacaattttatggccggggtaaaaaaagcgagtggaaaacaaaaattcaactcccgttttaatagtgattttaatgactaaattcaccaaaaaaagagatttaggttcgacaatgccgataagcaccgcaaaattggaattttaattgatttttttaaaggcatttaatttttttgaaaattccattttctttccctatttttactagctaaacaacaaacattaccaaattaatcctatatacccaattaatcctataagtcatccaaattatttttaggaattccgaattgcaaacggagctttcaaatgccgaaaaggaggcgcggcaagccaaagagaagatgcatagcattgagcagcaaatccaagaggtgggacataaatggaggaagaaagtatgaatatgcattccctggatcatcaaactcatgtcccaaccggtctttggcaaaaaaaaaactcgagaaaagccaaagccactaaataatgttgtgttgcagttacaagcccagcgggacgagcaggacacgcgcgtgtccgtgctggaaggacggatgatgggcgcgcagcgggagacggcgtgcatccgcgacctgaatgacaagctgatattccaggcaaaacggggaattttgaatttatttaaattacaatcaaaatgaattaaatccgagcatttatcttctctttaagattgccaacaaagacgcggccattcgcatcagtgaggagaaagtgcagcagctgaaggaacgcctcgaacttgcggaggcgcaattggcccaaagtttgaagaaggccgagtcactgccgtcggttgaggcaaatgtgtttttttgaattggcacaatggcttcatcctgccaaagcctctgagattgcttttaaatttgggagatttaccgctttttattctctgttttaggccgaactgttccaacggatggaggcattgtcagcagcggaaaaggtggacaaaacgccaacaaatgagaattaataattattaattttaaagaagcaattgtcagcggaggaacgcattcaccgaatggaaacgcttttggaggagaaaaatgccgaattggagcggacattgcaacgcgaacggattaatgagggacacaatgtgaagaaggggggggggggggaagacgatttgccaaaaattagtgggggaagacgatttgccaaaaattagtcataactagggctactatttatagctctaaaaactagagtgccacgggaccgggaatttttgccaaaaccgggaccgggacttgccgggacctgagaagccgggaccgggacctcgattttttttcgggaccgggaccgggaccgcaagaaaaaccgggaaccgggaccaaccgggaaattttaaaaattcaaaaaaattttaaaaatttaaaaaattcaaattttaatttatatcaagtgaaaataatacaaaattatttggttttttatttaataaattaaattaatgaaaattttcaaacaaattttcttcaattatttcaaacaattattcatcgaatattaatagaaattcagatttgattttcacatcactttttttcggacgttttttcaaaaaacttttgggaaagaaaggggtccggcgttgccaataggcgccgtcgggggg

SEQ ID NO: 83861 - DNA, 1770 bp, Heterodera glycines
  unsure (1)..(1770): unsure at all n locations
acaaagacgcggccattcgcatcagtgaggagaaagtgcagcagctgaaggacgccctcgancttgcggaggcgcaattggcccaaagtttgaagaaggctgagtcactgccgtcggttgaggcaaatgtgtttttttgaattggcacaatggcttcatcctgccaaagcctctgagattgcttttaaatttgggagatttaccgctttttattctctgttttaggccgaactgttccaacggatggaggcattgtcagcagcggaaaaggtggacaaaacgccaacaaatgagaattaataattattaattttaaagaagcaattgtcagcggaggaacgcattcaccgaatggaaacgcttttggaggagaaaaatgccgaattggagcggacattgcaacgcgaacggattaatgagggacacaatgtgaagaaggggggggggggaagacgatttgccaaattttgcaataaatatcatccctagtcatagctcgtgccagattttaaaataaatgcaaagtctaaccctaccgattggtgggtgcctccctgggaaattattacaaaaaaaattatttattttttaataaattctaataatataattaatgtaaacctaaatttgctcagaatcgcctctccgccaccgtcgacaaattgttgagcgaatcgaatgaacgcctccaaatccatctgaaggagcgaatgcaggcgcaaattgacaagaacaaactgatgcagcagcttgaccaggccaagaaaatgtttgaccaggtggccatttgacacgaaaatccggccaattaattatatttaatgactaattaattattaattaatgccccttgacagacggaacggttcaaagagcggctgctgcgtgagaatgacgaccttcacaaggagatggacatgctgcgcaattccctctacacgcagcggacagcccaattttattcccggtaattttaatttatttatacattaattttatgattactatattacaatttgcctttgcttagtctcaacaatggcgcggttggcgccggcatttgcgcttttcccccaccgtccgctgtgtccgtcggtgccgctgtcggggtgccgcatcatccgctttatcagcaggcgccaatgccgccgtcctatcccacgcaaagtgtttgcgccatggacagcgaggacagcggagcgcccgcgtttaagcgacgcatgcagaagggacgcgtcacggcgctgcaggacgatccgggcaaagtgcaaacgctgggcgagcaggagtgggaccgcattcagcaggcgaacgtgttggccaacatccaacaggtggggactccaacagcaacaaggaacaacaatcagcagttggaaaattagccctcaaatggacccacaaattttattgaattttcaaaaaaaaaattccccgcagggcttttccatgttcgatttgcgacgtttcactattcagtcagtcacccataaataggattttttcaaaatttaattcaaaatccttttaatatttatgaaattggggtacatttcattcctccacaccttcatcattcggcactcccctttctccgttattttaatttatttaaaacatttttaggctttttccacctcttcttcaatgctcaatgtgaacgcggcaccgccgcctgcgctggaccaatcgacgactgatccccacacattggcctatttcattcaggaccgactggacgcaataaacaacgaaattcggctgatccaa

SEQ ID NO: 83862 - DNA, 142 bp, Heterodera glycines
aatgctaagcaatttgacatctcagaaaaaagttatgagagtcaaatttttatcaggttataactcaactccaaaactgctgttttctaccaaaatgcgaaaaactaatcattttttattgattctaaatgtccaaagtaga

SEQ ID NO: 83863 - DNA, 75 bp, Heterodera glycines; identical to SEQ ID NO: 54636

SEQ ID NO: 83864 - DNA, 491 bp, Heterodera glycines
atgcacaaattggacaatgttttggcgaaaaatgctagtgtccacccgtccaatcactgtgaggtcagttccgtcccgtcaactccatcccagcccagttaaaaagccataagttttttctttaaaaagtttgctaaaaaaagttggctttctcaaaccatcaaaaaaaaaaaatccgttttattttcaaatggaggcattttggcgtaatggtggtgatggtggacacagagcaattggtggaaagcacgaagcgggcggagatgaatgtgtgaaacaaaaggaggggacggtcgattcgatgaagcggtggtgaaaagcatacaaaatgcgccgcaaattgggattgatcaaaatggggacgggacgtgcgggggaagaggtcgcgcgtcgccggcgatcggatttgtattgattgatgatcggtttaagaaattgtgggataagaagacagtagagataagctgattagaaaatttaaataacattta

SEQ ID NO: 83865 - DNA, 226 bp, Heterodera glycines
atggaccttaaaatgtcggagaggaaaaatgatggagaaaaagtgttcaccggtgagtgaaatgattgaaaactactcacataagcggatgcattgaacaaatattaggtgattgtgcatgtccaaaaactgaacaagttgaaatggacagaggctggtcgaaatgttgagcagaagcacggagtcggagcagagcagcatttaacagattaatgttgaaattaaa

SEQ ID NO: 83866 - DNA, 432 bp, Heterodera glycines
atgtcacttccaggaaagccatttaactgttggaattcttctgcttgtcacagtgacctcgaaatcactgatgataagtgtttggcagtgcattataaggaaaacgaatacggtatagtttataatttacaataaaatttcgaatatattttttcaaaattttttattaaacaaataatttattccaaggggggcatatattcgagagtggggttttattcaagggtggggttcgattgttcaacccccctttttttttacaaattcctatgattttacgcatgaaatttttattaatttttgaaatatctaggtcaacttttttggctttttacacaatgatacaattaaatcttaacctgaaattttgaattgaaaatttttcaattttgacccttgaaaatataagcgaatatttgaaatagaatttta

SEQ ID NO: 83867 - DNA, 634 bp, Heterodera glycines
atgatggagaaaaagagcaaaggccaattttatactgaatcagtcgcctatggaacggcccgtcccaggggcagtactcaaaatgcgactgccgggtcgtttcgtaaaactgtcaattgccaagagcatttcctaaaaactgccttggtcgggagggagcagatatattcgggtagagtgtaatttgtgagccagggcgtgacagccggctgagttaaattaggtgggggattgagttgatataaacctaaagttggttaaaatgattaaacaaaactttttagaatgatatcacaaaaataaaaagtaaaagtgaaaatgtgtgtaaatgttgaagaaaatggccactttgattagaagaggtgtcgatttgggacgcgaacgtacagctgagttggaagaaacgcacgcaatgctgaatgttggccaagcagcaactgcaaatcaacagagaaaggaaagagtgcttggcagagagaaataaaaagaaaagagtgtaagcagagagaaaacgaaggaaaagaatgtaagcagagagaaaacgaaaagaaagagtgtgtggtagagaaaatgaaaagaaaagaatgtatggcatagagaaaatgaaaggaaagagtgtctttggcagagagga

SEQ ID NO: 83868 - DNA, 808 bp, Heterodera glycines
atgcgtcgtcctgctgagtcagtgctgcatcggtggtcgatcgaaggaaaatgaggcaagttctgagcccacccccccccccccccccataatcaaaactcaatttttaatattcacttttttcagccggagcaaagcatcacttacgtcgacttgaacagcgcgattctcggaggaacggcaccaccggtgaagccgatcgtgggcactggaacgaaagacgacactggaaagaagggcgagcgaacgcaatttttgaattggttaataatttttctttgtttttcaggttcggcgcattccgaagccaagaagcaaccgacaaagccaaaagcagcggacaaagggaaaaaagtgccatgtaggtgttcattttttaatttgaatttatactgattgtcctcccattttagcaaacgagcctgcctgtgcagagaaagggaaggaagtgccggcacaaaagggtgaaaaggagcaccaggcgaaaggtgggcaaaccattttatttaatggcatttaatccatccctccccattttcagatgccaacaaaccgcaattggacacgagcattgctgtgaagaaatagtgccgtcaacagatgagcctaatgaattcgtgcgattatgaggaaattgatgatctccaaatgttacaatgctctaattgtcatgttatttggcctgttttgtcatatacatattcactgttgtacataatttgtatgtgtatatcgtattgcttgttatgtctccaccggaaaaaaagcacataaatcaccttttatgttatttaaagcaattctgaca

SEQ ID NO: 83869 - DNA, 1441 bp, Heterodera glycines
atgacgacggacactgctgcaaatcgacagcgacgcggccgaggcgagagacgcacacgagtggtaagacagttggatggagaacacgattctgacatccatttcgagcccctgacccggattcgaaccaaaactcgaaaattcaatttccgacaaaattcaaattatgcaacaaaatgcacgagctataacggagaacgtagtatttcggttacaattgaactgttttgatgcataacttgaattttgccgaaaattgaatttcgagtttgtttgaatccgagttcggggttcgaaatggatttcatacagcgcctccgaaaagcccctaaaacatcacaaagccgctcattccttttttcctcttttatgggaccacaaactgattttgacattaattttagtcaattttcagcagctgcgcgacagtgccaagaaaatcaccaaagcgtccattcttcgtctggcccgacgcgccggtgtcgcccgaatcaacgcaagagtctacgacgaggtccgtgccgcgctgcgctcgtacttggaaaccatcattcgagacgcggtaagttttcaaaaaatgattaatcccgatatatcacatcacccaatgctttcaggccatctactgtcagcacgagaggcgcaagaccatgaagagccgggatgtggtacacgcactgaagcgccagggcaatttgatgtacggcttcgaacaataagcgcaaggaggaggaggatggatatatttggaaccggcaccatatgatatcttcatggataatattattgtacatgtgtgtatatgcatatattgtattgtatattgttatgtcgatgctattgtacaccatttatcagtgtaattgtgagccgttattattattgtctttgtgtgttgatattgtgtatttggtacgataaaggctgatatgactttttggcgcggtgcggatcgaaaattagatacgaattgttgaacattttgccgatttagtgacgcttttatccaaccccctcctaatttttgtacaaatcattgtttctaagagcaatttgagtctaaaaaaaacaatatttcgaagttttttcatcataaattttttccagggttgaatttttttttgctttttgtaaggctaatagagtatgtaaaggagcttttaaggtactctttcggtttgggtccgccttttgggtcaaattttttttttcttttttattgtcagaattgctttaaataacataaaaggtgatttatgtgctttttttccggtggagacataacaagcaatacgatatacacatacaaattatgtacaacagtgaatatgtatatatgtatatgacaaaacaggccaaataacatagcaatgctcgtgtccaattgcggtttgttggcatctgaaaatggggagggatggattaaatgccactaaataaa

SEQ ID NO: 83870 - DNA, 698 bp, Heterodera glycines
atgaatatcgcctccggaaattcagcgcgccacgaaggtatttaaatgagttttatttacaccgttccaagttcaccgagggaatcggtgtcgccgtcgggcaaaatttaaaaatagaaatttttttttaaatttgaaactttcatgacatttgtccaacacatcgaaaatagaaatgttattaaaaatgaaaatagttaaatctttttattatatatatatatattatgatttaaataaaactatgcaaaaatttttatttcaagaaaatttgtaaataaatttatgatttaatttctaccctcctgcttggctgaccattgattttccaggacattcaaattagcttgtcaaaatttttcgatgcaattcaaaattgactcgaatcgaaaattgtttttgcatcattaaattttcatatccaaaattggtctataatttatatttccatgcattttaaagatgcaagtggaagcggaacggaaaaagcgtgccgcaattttggagtcggagggcatttgcgaggcggaaaagaaccgagcggagggcgagaagcaggcgcgaattctgcgctccgaagcacaaatgcaagagcaggtgtttcaataaaagatttaattccaaaacttgaagagcagaaatgaaaaaaaaccggaatttaaaggatttaaatgatttttgaattaaatttgaggaga

SEQ ID NO: 83871 - DNA, 757 bp, Heterodera glycines
atggccattggacttgccaagtcggccgaaagtgaaaaagagtcgcgcgtcatattagcggaagcggaggagcaggagcaagtgattgtcagccgtgggttggcgtgtgccatcgaaacggaggccgaagctcgcgcaaaagcgttggaacgaatggcgcaaggaattgagaaaatgggcggcactaatgcggctgcctttgtgacagccgacaattacgtgaaggtgagtggggacgcgaaatttaaaaagaaaaatttaatttgaattaaaattgattatgaatcgaaaagactaccgtattcctacagttcctccaacccttacagtggtaggagaacatcggtcctaatttgtaagtacagaaaagtgtttgaaatacttacttaaaaatagtataaaaatggcaaatcgtgtgttaagagatcagtgaaccaaaccaagtaaaaaaaaagttgttgggttgggaaaaaaaccaatttatccggcatcccaaaacattccgggttagttaatcggagtcgggtaaggcacaaaaatttttgctagcgatggcaaagtacaatttttaaaattatttcatataattattttaatttaccgccttaggcctttgccaacttggccaagtcgtctaacacggtaatcatcccgtcaaacagcatggacatcagcggaatggtcacacaagcgatgggcatctacggcacaattgccaatgcaaacacagccaacaaacactgaccatttttattga

SEQ ID NO: 83872 - DNA, 307 bp, Heterodera glycines
atgatttgtctggcacttcattctccaaacaacaaaatgagtgcgacactcaaaatcagcaaatcaaaatggaaaacaagagcaattctaacatttcaaaaaagttacaaacgaaaataatcagcaattaattaattaatcaaatttttttggtaattgcctgaacgctgcgattttatatattttagcttcgttagactgtgtgctttcgaatgatatcaaaaagataggatttgttcgaacatggaaaaagttattgtatgaaaacccgggattgtcaattgattggactcataaagtgcattag

SEQ ID NO: 83873 - DNA, 1523 bp, Heterodera glycines
atgaacgagtcgcagctacaaaatgtttctcttaccggggaaatgtcgcaagaattggcgttggaattgttcgaaaacggcggtgtgttggtcagtccattttcatttctcaattactagacagtaaatatcaaaaatattgtatttaagatcttcaaggacttccctaagggttgtgagttcggcatggattatcgctcgtggattgtcggcccaaatttcctcgggatgaaagttggccaacaaacagcgcttttcatttttatcccttttaatttcctttttgcagatgatacctcctggcattcatttcatttactttaggtgccgtctttggtactttttcactttacgccacataaatttcttttttctgaagttttcgggggctcacgaataaaatggctatgaatctctattttttttattatattcccgtctatttgaatcggttttggacaataaatgtgaattttggtgaaaaattaatttacgtctttttttccaattcgggtccggcattttaaatgaatggaaatgattgtcatattcgtgatcagcgcccccgaagacccaagaaaaatacaaataaataaaaaaaattatgtggcgaaaagtgaaaagttaccccgtcttttccttctttatttcctttttattcattctttttttagtgtaccgggtgcgcctcgcattgctttctttcacaattttcggcaaaaggaagtgattttgaggaggtgggacacgaaaaaggaagacttggtgactgacgaaaagtcggacgaagttgaagtgcgtttttcgaattaggcaaattgtctgtcttttcttcattttgtttagttggatcgacttcgcgagaatctcagaaacattgatcgctttttgggagtttatccattcgcaggtacattaaaaaatgatgatcttttaaggtcactggggaaaacttaagaaaattttggcatgctttattaacatttctctaagactatcgcaattggctttccctttcgtcgtacattacgccaaactccgtccgtcgtctttccccctcaaattcactcggacgcatttcgtcccaaaatgaaatggtcacgcaggaggcgaaattggagaagaaattggtgagaatgcaaacaaaggcaacgcatttttccattttcccgcctttttcagggtgatccctttggtctttcgattgtggacagagaacaccgcgggcgcattcgcttcacggacgaaggcggacttccgctgatgagcgaaggggaggaagcgaagctgaacttcactcggatatcgcagatcacagtgaggaggagaacaaaatgggagaaaaaaatatgcggaattaaaaataacaaatagtttgtttttagttggctgacacaaatttaaggagggcgggcattgacagttccgacagacttttccaatgtttcgaagcaatgggcggtgattatcgcgaagtccttgcagaattccaatttgcttttgtcgtttttctcgtggggcag

SEQ ID NO: 83874 - DNA, 853 bp, Heterodera glycines
atgccaacttacccaaggcgaaacaactcatttgcggctaatgctgtcgcaaatgatcgacgcaacaatgtgcttgtatatcttgggaaattaggcgagaagggcgccatggaaatgggcgaggaagtgactgtactgacatctgcggagaggagggaggaaaacggtggcgacccatttgcgatgcggcgaaaaattgggcgccatcacaaaaatccatcggggacgacagtagcacagcgggattctgtatacatgtcgaagggtacggtaaccttggcgaaggcaaaaaattgtagtggacttttagaggggaatgaacataaaaaggagaaataccagtggaagttgatgaatgatgctaatggagaagggaaggaggaggaggaaagggcacggaagttggacaatgacaacgcgggaggggaggcggaaaccgcggtggacggacgcggaagggacgaagccggaagagagccgcgtaagcggaaaaacgagacgcaaatgctagtgaatgacgaggacaagttggagccgtggacgaaaagcgaggagaagcagctgaacgggcccaatttgaagatggacgacgacggaaaggaggcgcgaaaagcggacgaaagaaagcgaaagatgcgaattcatgggcagcaaaagtcggcaaaattggaggccaacgaggacggcactgaagaaccatttgaaacgacatttatcacgccaaaacttcacattgaaggtgaaggattggttgaagcagaaaaagcaattgaataccacaacaggggagggatgtccgactcggaatgtggacggagaatgggtgacgcactacggagacaccgtgttcagg

SEQ ID NO: 83875 - DNA, 1513 bp, Heterodera glycines
  unsure (1)..(1513): unsure at all n locations
atgaacaatcggctgaaccaaaaccacnccggatctgccgcatcggcattaccatcacaacaatcacatgggcagaagatgaggcagaaactgaccttcgaaattatttccaaagaacacaggtttggacattcttgacttttttttaattactttaaatctattaacatgtagacaaatctaccgagcgtcgggacttccttggaaactgccggacaattttgtctatatgctcggcaagcgcattagtgaggtggaatctgctatggccgatgatgcgacagcaccagcctccgcacttaaacttcgaaagttcaaacatacgggctttgtcgtcgaatccttccacaggccaacgattcagtgttatcttgattctatcgagtatttgaccacaacacaaaagtctgccgttatggcttctttcaacaaagagggcttgtctgctattcaagttttaatattatgcacctcagtcaataaaattttctaattcagggaccaccagggaatggaaaaaccgagcttatagctcacatttccattctcgctgcactctcatatgtgtgcaattacagcaaagaggaggatgaggagtgccggaaccgcatgcaaaatatgaagccgcaaattctcatcgtttgtgccacaaacagtgcagcagaccacgtagccgaacaaatttcccgactcaaagaccaactgatttcggacgatgacctcttccaaatttctgaaggacttcaaaaaagtctgccgacttccggcaaatgcatgacactcgggcaaatcagaatcatgcgcaaatatgcggcttcatattcggcagaccaagttccacatcggttgtggtattgttccaacaaaaacggaataccctaccatcctaaggtgctagctgctaatttgatttgatttatttttattttaaggacatcaacgtcacaataatgactattgacatgcaaagggctttaaattcttggcactttacgcgcctcaacttgtagtgttcgaggtattctaaatgtaattcgatgttgaggagacacactatccatttcctgcagagacacactatccatttcctgcatatcggggcagtattaggaaaataggatagtgtgtcccatataatgttagtatcataaatgtgtctcacaatcctgagtaacacgtgtctttcctgattnggnaatataatgaaaatgtgtctcataatttgtgcatgaatttttgaaaatctttgtcacatgttatgcctgttgtcagtttttaacattttcaggaagcctccatgacaaacttctttgagatgtttggtgtcttgtgccgaccaattaaccaagaagcaagggaaaacatggtcgagtcagcgcatcagcgacgcaaaggtatttatcctttaatgatgttgaccttagcaaaaccctttaagcaaacgatggtctgccgctcggctcaaaacatcaacatcaaagggaaaatgatgatgatggctgtacttgattga

SEQ ID NO: 83876 - DNA, 967 bp, Heterodera glycines
atggcaattggctacacacttttagcattcataacgccctccaacccgttgctaattcaaagtatgtacgtcctcatcatgtctttggttggcttgtgcaccattggccttgtaaagcaagcgcgatgggtgagtaattattactaattaattaattagctaattaaggattaattcaattcaaattaaaattcaattgtctatttttttaaattcaggtagacgctgagaatgctcaagcaatcaactcaacaaacacagcaattatttatatcatagtgatgtaagttcaaaaaataatttgtataacaaaaaatttattaaaaaataaagtaattattatttaataaacgaaaaaataaaaataataaaggaaattatggacttataatattatttcaaaaaacattttaattttattgaatattaataaaaatgttacaaatgaaatataaaaaacttgatgattggtcaaattttacaaaaataccgattttcgcaaaaattttattaatatttacagctagaatcaagttaattttttaagcatgatgctccatattcaaaatatacgtgccataagttcatatacctatgaacaatggtcttaatatttcaaaattttaatctattttaatgttcatttaaattaattaatttttaaatatcaaagtgtttttaaaaatctgattaaggttgatccctgaattcgtcactttgattattccgaaccctgatgatcaaaacgggagaggggtaaatttaaatttaatttaattaatattatttaattattaaacattttaagtggatattgttttcctttttattgctgttttgcaaacattgagcgcagcaatttcgcacatttcgattatgaggaagaaataaaaaaagaccaaaaacgataaatatgtttgtctaattcaccgcaattatgtacataattaattaatttaaatattta

SEQ ID NO: 83877 - DNA, 1459 bp, Heterodera glycines
atgcccgtcattgtgccaaaatggttgtcgtgtgtcgagagtggaatcagttcgggattcagaacagatttacgggaattagcagcaatccttgtgagctgcttgtgagttggcacacaccaaaatgccaatttggcactttctcgaggggataatcaattcatcccttacaagtggtaaaagaatgtcttaataatggcaccagtgagaccaggacgggaaaattttttaattcaaattaccaattttctttggaaaatccacgcttattctttggcctcgttgaacttttttttagtcttttgcagcttttcctttttgttgcttttcatttcaaaatttatgttttgtgttttcaattttctgttgctgatgcaattttcttggaccaaaggccacaaaatgaaagtgcccatttttgtttttgcattttgcaaccaaagattatgaaatattatgtgattttattgttgttatcctcggctgttcttatgtttctttatctttgaaaattggtggtgctttgttttgtacccccgggggtcaaatcgacggacgaacgaacgacggaccgaactgaacacatgacagatcaacgaccttcccgttcctgctgctaatgatgcaaccaactgaacaaattgcatttttccgtgatcagaaaatggatcagtgaatcagaacttcttgtaaaatgcgacatacggtagttttgaggatttgaattcatatgccagcagatatggaaacaaatttaacttttttagggatttgggtaaaaattttaaaatttaattaatcttttaacctttaaaaaagtgaattgtaaaaaaattcagaaaaaaaggatttaaattcgatttaatttgcaattttgccatttttcttcagtttttcattggtttttcttccctatttttggccacatttaatttcaatcatcaatatgacaagacatcatttaagttgccagcttaagaaattctctatcatttatgctttccatcaatttttggatgctttcgtttgcatattctttccttttcgcaaattatttttatttttcttggtttcttttttttctccttttttttgtttctgatttcagaaagttgcctaaataatctttaaaagattttttttaattgttgctaaagccattgctagtagtaaaaaaaattcggtaacagtatgaatggtaccccctctcttttaaaaaaattttaactttcgtaaagttgttttattggttttcgggccggatacggttctgacatccattttgacctaatttgaaccctgaacccggacttgaacaaaattttcaaaaatctccaaataggcacttaaaaaggcagaacaaaatcgcaaaacaggcattaaaaggcacaaaaacaagcaaatcaaattttttgttcactctttttaggtagcaaaacacataaaacttattatgtta

SEQ ID NO: 83878 - DNA, 2090 bp, Heterodera glycines
caaatttggcggatgttcagcaatctgtaacttcattttctccaattcagacctcttcattcataacaacggacaaaaaagcgcaggtgtccaacattcgcattgaacctgagcagggcgcgggcggattcgtcggatatgcgtatgtcattaatgtcgatgtaagatctaacaaaaagtttcgcagggataagggcgtcagcatcgttgagccggacatggatgtgcgcgttgtgctgtttggcatccacctggacgaaattgaccttgtcggcttcacatccaccgacaattgctccgacgcggcggtgctcatcgatcgaaatgaatttgttatccaatcggaaagacgtgtcgtggtcatctatcactttgcaaggttttgtgacgccatgattgaatttgttaaacccataaaactttaagcaattcattatacaaattgtgcgtgcgacaaaagccccatcctgactattcacacgagcttcccattcatttggttggttggtttttaaataactatcatatcgctccttttgcttgcagacggatgaagctcactgttgggtgtctacgaatataccgcctcgcaaatactacttctcaatgcctcttcaaattgtcatcattgcagtgctgctcgtcctttctggtctcttctcgggtctcaaccttgggctgatgtcacttactccacaagagttgactctcatcaaaaattcgggttggtgagaaaatttttgtggaataccatggatttattgtttatctgcttgttgatagttcttggtcgttgttttttttcgagaaatgatgttcctttctgtttaggttcacgaaaagagcggaagtatgctcagaccatcctgccagtgcgcaagtccggcaaccggttgctgtgctcgttgctcatcggaaatgtttgcgtcaactctgccatctcaattctcttcgacgatttgaccagtggcaccgttgcattgatcgtttcatcgaccggcattgttgttttcggcgaaatcttcccgcaggcgctgtgtgtgaagaagggcttggctgtgggtgcctgtaccatatgggtcactcggttcttcatgatgctcacttttatagtatgttttttttggtatactgtttgtaagcaatttccttgttcacgccctctcaggtatcctacccgatcagcctcattttggacaagctgttgggtgaacaagtcgagtcatatgatcgcaagcgcctcatcgagctcatcaaactgaacatgaagaatgcggcgcaagcggaggagctgaagattgcgattggcgccttcgagatgaacgacaaaattgtgaaggacgtcatgacgggaataaaggtgagaattttgttgtaacttttgtgtactttatttgtttttaggacgtcttcatgcagccgcaggatacaattctcaacgcaaaaaacatcgccgaaattgtgcgctcgggctacacacgcataccgatattcgacggctcgcgcggcaatgtggtctctctgctttttgtcaaggacttgattctgttggatcccgacgccaatttatttgtgggctaatatcttgattttccatttttatctaaaaaaataattcaggttaagactgtgtgtgagtactaccagcatccagtgcgtcatgtaccggaaaataccccgctacgaacaatgctcgaggagtttaaaaaaggcggtaagtattaactcttactgataaaaacgataaatattcgcttgtctttaatttccagattatcacatggcgctggtggaccgtgtcgttgccccttcgacggaggacaaagaaagcaaatacgaactggtcgggcttgtgacgcttgaggacatcgtcgaggagattttacaagcggaaatcgtcgacgaaacggacgtcgtcacggacaatgtcaccaaaatcaagaggcgccgccaacaagtgtcattaagaaaatggaagagatttcacaaaatacccctgaaaaaatttaaagcaccgtgaccttgaattgttcatcgacgacggggaagcttgtcagatttctatgcaaatgcaactcgtaaccattcag

SEQ ID NO: 83879 - DNA, 253 bp, Heterodera glycines
cttatctccattgcatttgattgccacacaccatcacattttattccggtactttgtcgatggatctgcacccattttttggagggggacaactttgcgtcaccactgaattacatttgttggaatccaaattaaaaagtcataaagacatgtttcctgggtgacgagggtggacatacttttgggcaagaaaaagtccgacttccatcttaaaaattgtttacggccacaatttgccgcaaaggcacacatt

SEQ ID NO: 83880 - DNA, 709 bp, Heterodera glycines
atggccaattggaatggtgcccaacagagtgccgaggtaaagtgccgagaacagccaaccctcttcagcaaaagagaacagcggggccgagaaggaagtgcctaattattattcaaggaataaaaaaaaacatttaataaataaatttgaatgaaattgaaggagagaagaataaaaatttatttacaaaatttttatatttatggtattcattttgtccttttttttagtatttctaaattttcattactgatgattcaatttttggttttatattttttgtaaaatatatgattattttaaatttttactgaggcattttaattcaataaattaaaaaataaaatttgtataaatatttgctccgaaaaacaaatattttatgtaaaattcaaaaaatttctgatttcagaagccctctctttgctaatgagagaaatttgtggacgcggcgaaagccaattaattaatacactaataattattatttttttttatttttggcaccatttatcgttgtctcttctctcatgcaaatcacggtcatatgaagcacaacactgccgcacatgccgaaggttaagcacaatgtgctcagggccaaaatcacaaagcgtaagccacggaaattgcggcggcaattaatgccaataattgcagcagtcatttttgttctggcaaattttggcaaaagaaatttgaaaataaa

SEQ ID NO: 83881 - DNA, 438 bp, Heterodera glycines
atggcagtgccaccacaagccccgtctgatgcatgtcaaggccaattgactgcgaaatcaattaggtaattaagaaataattatgtaggcaattaatgggttgttttttaaaaataccaagaccagcagataccaatggataaagccggattagcaaatttatccagacacttccgaattcccaatgttgattcgggattttacgaggacaggccaaaattttataggtaggaattaaaaaacgtataaaaatattattaaaataattcaattttacaatagtaatcaatgtatgctaaacacttacattgtgcaaataaattggtccgtacagtgaaaaggtatgggcaccaaacgcaatgccaatgccaacgccaaacaaagagagcacgtgccaatttgcgagctttgaaaaacggaaatattaaatttaataaa

SEQ ID NO: 83882 - DNA, 1089 bp, Heterodera glycines
atggcaattggctacacacttttagcattcataacgccctccaacccgttgctaattcaaagtatgtacgtcctcatcatgtctttggttggcttgtgcaccattggccttgtaaagcaagcgcgatgggtgagtaattattactaattaattaattagctaattaaggattaattcaattaaaattaaaattcaattgtctatttttttaaaattcaggtagacgctgagaatgctcaagcaatcaactcaacaaacacagcaattatttatatcatagtgatgtaagttaaaaaaataatttgtataacaaaaaatttattaaaaaataaagtaattattatttaataaacgaaaaaataaaaataataaaggaaattatggacttaatattatttcaaaaaacattttaattttattgaatattaataaaaatgttacaaatgaaataaataaattaaaataatgataaaaaatttatgccgattggtcagagttctcaagtgtacgaacttttcaatttctcctgaattggggatagtcaatctaagaaaacaaaaataccctgaattttcaatttttaaaaaccttgatgattggtcaaatttttcaaaaataccgattttcgcaaaaattttattaagatttacagctagaatcaagttaattttttaagcatgatgctccatattcaaaatatacgtgccataagttcatatacctatgaacaatggtcttaatatttcaaaattttaatctattttaatgttcatttaaattaattaatttttaaatatcaaagtgtttttaaaaatctgattaaggttgatccctgaattcgtcactttgattattccgaaccctgatgatcaaaacgggagaggggtaaatttaaatttaatttaattaatattatttaattattaaacattttaagtggatattgttttcctttttattgctgttttgcaaacattgagcgcagcaatttcgcacatttcgattatgaggaagaaataaaaaaagaccaaaaacgataaatatgtttgtctaattcaccgcaattatgtacataattaattaatttaa

SEQ ID NO: 83883 - DNA, 1349 bp, Heterodera glycines
atgcccgtcattgtgccaaaatggttgtcgtgtgtcgagagtggaatcagttcgggattcagaacagatttacgggaattagcagcaatccttgtgagctgcttgtgagttggcacacaccaaaatgccaatttggcactttctcgaggggataatcaattcatcccttacaagtggtaaaagaatgtcttaataatggcaccagtgagaccaggacgggaaaattttttaattcaaattaccaatttttttatgttttgtgttttcaattttctgttgctgatgcaattttcttggaccaaaggccacaaaatgaaagtgcccgtttttgtttttgcattttgcaaccaaagattatgaaatattatgtgattttattgttgttatcctcggctgttcttatgtttctttatctttgaaaattggtggtgctttgttttgtacccccccgggggtcaaatcgacggatgaacacatgacagatcaacgaccttcccgttcctgctgttaatgatgcaaccaactgaacaaattgcattttccgtgatcggaaaattgatcagtgaatcagaacttattgtaaaatgcgacatacggtagttttgaggatttgaattcatatgccagcagatatggaaacaaatttaacttttttagggatttgggtaaaaattttaaaatttaattaattttttaacctttaaaaaagtgaattgtaaaaaaattcagaaaaaaaggatttaaattcgatttaatttgcaattttgccatttttcttcagtttttcattggtttttcttccctatttttggccacatttaatttcaatcatcaatatgacaagacatcaattaagttgccagcttaagaaattctctatcatttatgctttccatcaatttttggatgctttcgtttgcatattctttccttttcgcaaattatttttatttttcttggtttcttttttttctccttttttttgtttctgatttcagaaagttgcctaaataatctttaaaagattttttttaattgttgctaaagccattgctagtagtaaaaaaaattcggtaacagtatgaatggtaccccctctctttttaaaaaattttaactttcgtaaagttgttttattggttttcgggccggatacggttctgacatccattttgacctaatttgaaccctgaacccggacttgaacaaaattttcaaaaatctccaaataggcacttaaaaaggcagaacaaaatcgcaaaacaggcattaaaaggcacaaaaacaagcaaatcaaattttttgttcactctttttaggtagcaaaacacataaaacttattatgtta

SEQ ID NO: 83884 - DNA, 1417 bp, Heterodera glycines
atgcattttttgtgcaatttttggttggttttatttgtggtggcggacaaaacttacggcggcggaatatttttgtttgttaaaaaaagcgatgaaagcttatccatcatcatctatcatcatcatctgaagcatcatcatcatctgaagaagcatcttcatcggcagagtcaaaggaaagcagcggacaaagcgatgcaatacggtgcccataattaatttttttttaacattttattttttcaatttttaggcttcacaattggggcggcaatttcaaattttgctcccaaaatgtcgaatatccgcgcaccaccgccgaagtgcaacgaattgtgcgaagggcacaaaagttgcgcgtgttcggcactcgacacagtttcagcaaaattgcggacagttgcggcacgcttttgtcaacgctcggaatgaattcgatcattgccatcagtggaagccgatcgaccgtaacggtgcagccggggatcacttacactgacttggcaccgacactttgtcagttgaaaggagtgcttgcaaatattgtaattatgcttcatatgcttgaaacagatgccaacaatttcgctttgccaactttggccgcaattgccgacatttccgtcgccggtgccactcagacttgtgcccacggcagcggactgaccaactccaacttggccactcaagtgcgttccatgcgaattgtgctggccaatggcactgaagcctcttttggcccggagagtgccgaactgcgtgccgtcgcgtgcgggttgggcgcctttggcgtcatcaccgaagtcgagctgaatttggtgcccaccttcgacacgatcagctacaatttcgtcaggtatcatatacatatttcaaaagttgctagaccgaacctaaaaaaaaatcgcaaatggtaaaagctaaaagtatcaaggataataaatatttaaatttggttatacaagaaatataaataagttttgtcgcataaatatttaaaattaattattctattagtggcatattaattctgggcgagatcgaaagcacgagacttttctcaaaaatattttcttgttcacataaaatcctaacaaattgttgcttttttgaactttcatttagttacatatttaccaatccaatctttaatctaaaatgtgggtgttttaaattgaatttttttcctggcatatttttaaaaatgaatattataaattcagcgctccctagattgataatttttagtgaaatattttaaaaagtctaaaagaattggatgccggacgccagtaaaatttttcaaacaaaaaactctcctattcgattctaataatttgtgattatatttaaaaatgtgcaaaaacacataaaattaattctctcaaaacatataaaaacaaagagcaaaaataaa

SEQ ID NO: 83885 - DNA, 1786 bp, Heterodera glycines
atgacacagaatgccattcccgaacgcgaacacgcgccaaaatcactgatgcgcaatattctcactgtgctgcgcgacgacgattggagacgcgtgcgaaatcgcataacgccggcatttacgacgggaaaactgaaaaaagtgggtcactcagtaaaaaatggagaaatttaaataacaaaagtgattagcgaaggatgaaagcctaattaagtgcataattcagttgttcaatttcagttaattccgattttatgcgaaagcaccgaaaaactttgtaaagtgttagaaacggaaaacgcactgaaggggaaggaagtgccgttgaaagagtgagtgaatggcacagcggaagtctaaaaggaatggcaaaacaaactcattaaagtttattaaatcattgaaagtgtcccggtttttgtccaattttttattttgaaaatttttaaacgaaaatttaaaaaaatcgctaacaaataaaaagcgatttgtattttaaaaaaatcaaaaagaattttacactttttctgattcattgctatttaatagtgatccaatttttatgtttcataattgttaaagtggcaaaatatgtacgaaaaactgcctaaggttacaaattttcaaaaaatatccaaaataataaaattcacaaaaaatgtcgaaatatttaaaaatattacaaaatacgtagaaaaagccaagaaaatagtaaataaagttgcgatttttgttagtaatacaaaaaagaagttttttaataaattttgggaatttcttttgccttttatttaattaattttattttttgcagtctcttcggccgttttctgttggatgttattgggcgttgtgggttttcattggatttggacacttttgacgaggaaaacatttttgtgaagcaggcgcgaacaatttttgactttacgcggaagggacaaaaattgcgaatgattctcgggggtaatgggggacataattagcataattaaaacaaattaaaaagggggcggggggataaacaaacaatgctgaaattatttttgaaacttgagagaaggtgctaatgcgtttttaaatccgcgttcaaaacaaaaaaaaatttcttgctatatcttattgaaatccctctcattttggggttttaaagcgataaatttttaatttatttctattattttaaatttattttatttttcattttctgactgttttggcggatttctaaaagtgtcagcactaatcaaaaaagtgctgtttatgtatcttttcaaaacaaatacaaaagtctcttaacaataaaaaaaggtgacaatgagttgctttttctttggctatttttttcgcttcgctttcaaagcaattttaaaatttggttaattgtcgcattggttaaaaaaaattttaagtgtttttcccatgcgtctcacttttatacgaaaatatcactggcaaatcattcgcttttgccatggatgaagagtttttcatggaaatgatgagcgacctttacgaaaagcgccgtgccgaccccgaggcaaaagaagtagggctaattaaccaattaatacatatttaattagtaaattgtcagaaatacgccgacattttccaacttttgatgaatgcggtggacgacgaggaatttacaatttcagcagacgacgccgaaataattcacagcgaattgagaagcaatgagcagcagcagaaacaacagggaaagcatctgaccaggatcgaacttttcgcgcaaagtttcatcattttaattgccgggtaa

SEQ ID NO: 83886 - DNA, 305 bp, Heterodera glycines
atgttattgtttatatttgccatatttggtggaaatgccattttatgtcagtgtgccaatttgatggctatcactggccaagagttgacatacacgagaaagcagcagcaacccgagaaaacggaatgttaccgaaggaacagaacagagacctggaaattcaactgtgtagattccgctgcgggattggattttatttttgcgggatgggatcccgcgagatttatcctgctaagttccgcgccgatctctagaacataactggcaaaacacattgaaagagctgatttgaaaattaaggataa

SEQ ID NO: 83887 - DNA, 1093 bp, Heterodera glycines
atgacaaaaatatttttttcattcagaaatttaaaagaatttgattttgagtcgaagaaagtggccaatttggagagaaaaaggaagacaaatttaggcaatttggaaatgagcaaacattatgaggagttacgtacaaaaattgaacaaaaaattgacaatttgggaatggttgagctgtgcgaattgtgggacttcgcgcaaattgtgcaaaccgtaaaatgccaatttgagggacaacggacggcacagggaaacgtcaaagtgttgaagtcgatcactgtggagcgaaagtaagcaaaaagagaagcggcgaaaaagctttgtagtttttattttgattttgctaattgtttcattttaacattttaagctacgattgcgcggaattgcgccaaattggcaaaggaaatgagccaaattggatttctgactttaagaaggaaattgcactgaaccatttcgcatacattggctccaaattggcatttgatcaccacataaagtgcgacttttccgcatggtttggcgacgcaaaaatcgcaggcgaaagcgaattgtcgcatcgcttccgcacgagcagcacccaggccaattttgaacagattcaatttaccaaaacgatgctgcaaaagcatttgctgaatgtggccgatttggacaaactgttgcaaatagcgcatccgatcactttggctgctggtgagagaaaaaagcggcaaagacccaaccttcgggcaattcgggacggatttttgaaaaatggccaggcccgtagaccccttattatttattttgaattttaatttgatttttagatgtgttcacagaaagttcattcgcttttttggtcactggaatgtttggtgatgaaccgaacaatgcaatttggctcgaatatttttcatttctcggcagaattttggcattttttcggcactttaaaaatgatgaagccaaacgagcggagctaaacaaattttggggaaagacagccgcaatttttgggcgggaaaatgcaatgatcgatgagtcatacggcgaaatgaatttaattttaatcaaagaatttaaattaattttaaccgaattg

SEQ ID NO: 83888 - DNA, 1353 bp, Heterodera glycines
atgtctgctgaattttcgatttgtctgcttttgctgctgtttttatccttttctttgtcggcatttgccactttcgacggccaacaaaatttgacgacagatggccaatttttgggttgccaaattaagaatttaaagctgctgcaaacaaaatttatggacagaaaattaatggaaaagtttcactttgagctgagcaaaaagcagcgaattttggaggcactttttgtgggggagaaaaaagtaaaaaaaaaggaaataaaattaacaattaattattgtctaaaatttttaaagcatttgctcctctctgatgcttttcctcctcctttaattgctgccgatgaattcgaatgtctgaaaacaaaactgaattcgatccatgctaatgaccccgctttgagtcaattgctaaacggcttatttgctgctgaaatgcgcgcaaaacgaaaattggagtcattggcaggcaaataattaaatgccaattaattagcattaattaatcatatttttttaggtttcggtgatttttctttgttgaaagaattaaagcaaagcgtcgcttttgctttgcttttcgtggcaaaacgtcgccgaattcagctgaataaatacggagagaagaaacaatttgatttaagcaaagaaagcgtaaaatatttaatggaagaattaattggattttcggacaaagtaattaattcaaatttaggaaatttattaaaatattttctaatttattataattacctaggtaaaaagttgtgacagtttcaataataatggaagaaaaggaaggcaaaatgatgatgaaaaattacttagatttgcttttagagctaatcaaatcgatttggacgaagccgcactttttaatgggcgaaagggtaattaggaataattaacggaatatttaataagttgtgtgtaaaatttgtataaattatttagacgaaaaacgacgacggagaagaaagcgaatgattaacgcatatgtagtttattttatgattttggcaatgttttttctgataattatttgtttgtgtttcatcggttgtcatgacacgcaaaatgattggcgaaacattcacagaaacaatggacaaacagaagcaaacggagcaatgaccagggtagccaactctgctgaattatcagctgatttttgggaaaaaatactcaaaatggccatttttagcctatcggaaccgccgacccccaaattcgctaaaattttcacaaatttgatctaaaaattgccaaaatctaaaaaaaatgtacaaaatttgcaatctcatttttaaatttttcagttggcaaccctggcaatgaccaacaagcgatgta

SEQ ID NO: 83889 - DNA, 69 bp, Heterodera glycines
atggttgtccaatttgtcgacaagaaatattggacacggacatgttgtcaacaacaacagcaaatgcac

SEQ ID NO: 83890 - DNA, 268 bp, Heterodera glycines
atgtatgttaaaagtatcaggtaaactgcacaagtaccaaatttcctaattttttcagcggaggaaacgctgctcccgtaaaacaatcaattcttttaagaacttgcgcgccaatctcaccacggtggccgtggacgaggcctcggctccttctgaaggacgcttttttgggatgacaacaacgagaagggtgttttgatgcataagagttgtgaatggtgttgagggctgattgtgagattaaaagtggcacattttcaaaaataaa

SEQ ID NO: 83891 - DNA, 1302 bp, Heterodera glycines
atgccggaaccaaagaccatcaaagagttggaatcattcctggaaatggtcaattattacagtaaattcgtcaaagacttggcagagtgtgttgaaccattaaacagacttcgccggaaggatgtcgaatgggaatggcgtgatgagcagacaaaagccttcaatttggtcaaggaaaagctgacctcagacaaagtgctcgtgcattatgacccaaaaaacaatttgtttttggccacggatgcttctgattacggaattggagcagtcctttttcagagggacaataaaagtggaaaagaaggagtagtggcctatgcttcgaaaactttaagttcagctgaacgcaggtacgcacaaattgagaaagaagcgcgatcaattattttcggaatagaaaaattcaagcagtacctatatggacgaaaattcgttttacaaacggatcatgagcctctgaagaaaatttacggcccaaaaggcgaaatgccagtggtggcagcaagaagactacaccgatggggcctaattctgatgaatttcgattacgaaatcgaataccggtcaacaaagaagtttggaaatgctgatggtttgtcccgactgccttgtgttgagaccgatgaagacgatgatgataatggtcaagaagtaaatttgatccaagtccaggccattgaatcgctaccggtcacggtggaaatgatcgcaaaagagaccgaaaaagaccccttgctcaaattagtcaaaaaatttgtcaaggagggttggccaaataaagtggacaaggaatttcgaccattttacattgctcggaattcgttggaaattcagtcaggatgtataatgctcggaataagaaccgtgattccagcaacattccggcccgaaattctccaactgatacattcggcacatccagggattgtccgaatgaaatccttggcacgacaaaaagtttggtggccaggattggacaaagcgattgaagaaattcgaaagtcttgccggccatgccaaattaatgcttctgaggaatgtaaagttccattgcatccatgggaagaacccgaacggccttggcagcgactacacgtcgatttttgtggtcctttttggggatttatgtggtttgtaatggtcgacgccaaaacaaaatggcctgaggtcattaaaatgaaaaccacgaacacaagtacgacaatttctgaaatgcgtcggatttttgccacacatggactccctgagcaaattgtctctgacaatggcccacagttcacgtcgggtgaatggcacgaataa

SEQ ID NO: 83892 - DNA, 775 bp, Heterodera glycines
  unsure (1)..(775): unsure at all n locations
atgggaattgtgccggaagcaacgaggacaacaacggcatcaacaattgttgcgctgctcctcattcttctgttgatgagcgacggaggaacaattgccggagggaatggcgaagaaagtgggttcgaaaagttaattgttgttgctcttgaaaaggatgaaaatgaaaaataggaacaatttgaaataatacatatgcggggagcaaaaattgaaaaaattattattttttaaatatttctaaaataattcagtcgctaatttgtcgtctttgtccgcctccgccagcactgccctttccacaaatgttgtggtgccgcaccgtttcgattgtcgactgtccggcatggaatgctttcatgacggaatttgctccagggacggctcacattgcgagtgggtttttcagcttttaatttttgtttttttaagtttcattcaattttcctttcattttttttcctaattcgcgtaaattttattttcatagaaatgattttttttctgtcttccattatttttcccattctcttatctaatcttccgtttaattattcatttatttctaattgatccaacttaattaattgcccatttcataattccaacttaatgataaggaagagcaaacatatgaaactttaagcaattttactttagttttataaacttttttgccatcccctaaaatgaatccccattgagtanaattcggagttatccccgattttttttttgggttttaaatcaacgatttgccaaatgtacgaataaa

SEQ ID NO: 83893 - DNA, 882 bp, Heterodera glycines
atgccaccgcaggacgaagcagggccgtcaacatctgctgcatcggccgaagaagcgatggagccaccaccaccaactccagcaccagtgccaacgccggagatggacgaggaaattttggaatttggcttttcgctgccatcgacatctgtcacaccaatcggcgatttggtgccgttttcgacaacaccaactgcgtcaatggacaccggagagacgaccccgccaccgctggccattgacgagcgatcagagcgcatcgaacaactggagaagcagctcaatgacctggacgacaccatcaaatttctgcgcaagcaggtgcgcaatcgagaagcgctgatcagtgatctgcgtcggcagctggacgagcacatggtaccaccgatggcaccaccaacgactagcaaaagtgagtgaaatttttccttttttaatttcataaaatctgatcattttttcaattttagcaccaccaaacagaggaagaccgaagaaaagactggatgaactgcagcgcagcgccaggcgcgacatcgtcgaccaaattgtgggcgtcatcgatcatcgtcgaccaaattgtgggcgtcatcgatcgtgatcgctcgcgttccgcgagccgcgcatctctgcaccggatccaccgagatatccggcacaaattcgcgcactacacgccaaagaagggcaaggagcggaaggaggggatggacgctgaggatgggcttttgctgctcgcccaacttggaacacagaaggcgtacaagcggatgaaggcgattttacggctaattggccgtaatttcaacgttttgccgccgttggaaaaagtgcaattttcagtgaatttttcgtttgatcaatgttttttgggtcatcgca

SEQ ID NO: 83894 - DNA, 236 bp, Heterodera glycines
tgtacacggcgtccggaaactgagctgctgtaccaaaaaagatttgtatgtgtggcgaagtggtctgtgagaaggtcaccaagggggggggggtcccaggttcgattcccagtgcatgctattgatgtatttcgatgattttaatgaataaataaaaggaaaagtgaccaaaatgatttaaaaattgtttacaaatttttaaaaaatttatctaccgcttgtaatgaaaataaaaa

SEQ ID NO: 83895 - DNA, 364 bp, Heterodera glycines
atggagaaacaacagcagcagcagccaaaaagtgatcagaagccgaaaaatgatcagaagctgaagaatgatcagaagctgaagaatgatcagaagccgaaaaatgatcagaagctgaagaatgatcagaagctgaagaatgatcagaagctgaagaatgatcagaagctgaagaatgatcagaagctgaagaatgatcagcccagcaacgacggcgagccatctctggccagtgattttgatttcaaaaatttaaaaaaagttcaaaatgggacagaggaaaggcacgcgtcagccaatcatctcattggccaccctgagcggcgaaatccatagatttgctcataaaattatcctaaataaa

SEQ ID NO: 83896 - DNA, 807 bp, Heterodera glycines
atgatcgcggaggagaaaaaggggtctttgtcttcccattttccttggcagcctttcgcgcaaaatttggccaaattctaccgccatggtgatgggttaggtttaaattatatggatataaaatcccgaaatatggccataaaagagggaggggggggggggggggggggggggaatgttctggcttcctgttttgataaataacacccaaaaatgtgtgggaggcccgccgccgtcacgagactagtggagctctggggagcaacccaatttaacaatatatttttagaagtgaaaattgagtgtttttttttattcagcccatcaacatttggcaatccgttgtggtcactttgctgtgtatgggtattgatcagccacttgcaagaacaatcggtcgatttagatcaataaaagcgcaccttttcaaaacaatcaataactgttcctttccaatcaatcgataatgatcgatttccgaaaaatcaatactcgattgcttttccaaaagatcaacaatcaatctaatttaaggcaatcaataatcgattgtctttcaagtcaatcaataaccgaccaatttttgccatcgttcgatattcgactatacttttcaagcccatgtttcgcgggtttaagagtcaatttccccaattcaaattcaacgccatttaactgccggataattttcacatcatttagcattaaaattgcttccatcaattgatgccgaaaatatttaattggtcataaaatgggaaaatttaaaataatctagcctaattaatacctttacccacaaataaa

SEQ ID NO: 83897 - DNA, 791 bp, Heterodera glycines
atgtggatgacacgccattcaacatcaaaccgtgccacgctggtgaggcaatgggcatccagctcttcgaagacggaggtaattgaaaaaaacgtcaattgtaaattattggtaacgaaaaattttactaaaatcttttctgaaaatttttataacttttttctcgggatgatttaaggcgctgagtacgaatccgacctccttttttagcgaattccgaaccgcgaacccgaattcgaacattttcgaaaaccccagttttaaaattggaaatgtattgtcattaaaatcgcgttaagagagtttcgaggcaaaaaaataacaattcaaaaaaaaacaaatttagacttttttgatgctctgagcacgaatcaatgtttttaatgtgaaattctgaattttccggatgttcaaattcggcttctgggttcaaaatacaccaaaaaggaggccggttgcttactcagcgttttaaaacacccctaaaacacattttattagaatttttagaaaagatttaaaaaatcaataaaaaaagtttttgttttaacgccataattttaaggagagcgatggcgtttccggcagtggaacagtattttcattaatttttttttactggccaatggaaggctttgtcagtcagactctgccgtcaccgcctgggttgaaggaatgcaaatcatccgcggagtagatgatttggcactgaaagcgtattgatcaagttttcaagcctattcccccaataatttattctaaaattttgttgaaatgagttttttgttgga

SEQ ID NO: 83898 - DNA, 923 bp, Heterodera glycines
atgaccaaatctgctaccaccgatggtgggggtggcaccgccgctgcctcctctgtccaccgactccaatcgccacaaaaagtacctcatccgccaccaaagaagaggccagcgccagaaacagtgccgcaaccggcggtcgccgaagtgccggctcttccgggagcaccgccgcctgccaaattccgaaaacggcagagcagtttctatgcacatgtgaatgtacgcgacccgctcaacctgggcaatgttagacccggtgagagaggcggcgccataggttcgggcaattgaggcattgcccgaatctcgaattttttgatcagtattagagagaggttaagctgaaatttccgaatttgttggctgagagacggacattgggttatcgaactcggatttggattagtaaaacatttacttccgaaatttactagagctcggaattttgaaaaaagcctacctgtattctgtacctgtatttcctgtagaaaagtacaggaaaatacaggttttttcgtgtttagctgtacctgtacctgtactaaattctaaaaatggcctgtacctgtacctggatccaggaaaaatacaggcctggatccaggtacaggccgatctctaaaatttactaaccaaaatttcaagaaaattttttgtttaacaattgacagaaaatccaagatttttttttttaattttaaggggtggaggtgcagaaaaacagaggcttttctgattttttccttatgtttttcgttttagacaacccggacgacccgaactttgccaagcccatccaactgatcccgaccaatgtgaacgatccgttgaatttgcagaatttgtcgtccgccccggcagatgccgaagacgaggcattgccaacagcagcggacgcccaacagaggcgaaagaggtga

SEQ ID NO: 83899 - DNA, 2101 bp, Heterodera glycines
gcgttaaccgaggtgcaggacgcctatgaagtgataaagcaagagaatgccgtattcttgcgtggaatttgcgaaacgattccgaattttaatcggctttttcagcaaatagaaagtatttgtctaatatcttatcttgaaaaagaatttaattttataatgcattttataacatgattcataaccgattcttttttacagactcgtttacgtatctcaacgaagaaaatctcgcattggcaatcccgcctggtgattaaactaaacgtgttttctgatatataatttgcctattcagttccaccgaattcggttgagacgagcgccacctcttccggtcattcggagccaacgtatgatcagccacccgatggccccgacgtgaatgctcagagggaactgctgaaagtcgctgatcggtcgtccgaaactgaccattatttgaaaggttcgaaatcgcttttaacactaagattgataaacgatctaaatgggttttaaagcaatgcgcattgattgaaaaaggattcattattaaaaattttagtggcggttgacgctcctggctctgttgtaccctctcgtacagtccatccgacggaaaaagctgagcaaacgcgaccgacaggtcaaccgccaaaacctcgcaaatacgaaaagtaattcaggtgacaatgatcagtcaattactttcatttgattaaccaataaatctgtctttatcaaaaagtcctttgaaaggttcgaaatcgctttttagcaataacataaaggagagacttacaaaatgcttttaaaacagttcatattgattataaaagaattcattgttgtaatttttaagtttcaattgacaattcgggcactgaaagtcgtattcgtcagccgactgaaagtggtaagcagcaaaatcgcattccatcgccaccaaagtgtcgcccaccgccgcctcccgcacaatcagcaggtgacaattatcagtaaacaatccattattaaccaataaatctgtgactttattcagcgaaaaaaggcgaagaaatcacttttggtttggccggctcttctcccaaccgtcttcttccgtctgggcaattcgtttgcgatgcgtcaaccgctgggacgagttctcagccctctctccccgcaatcgaagcggtaatcaaaacacaaacagctaattttgggtttaatgggaattcagtcaacccaaattttcataatgtcattcctttttggggaataaaagtcaaattgtttttatctaataaaaattatgttgaggtcgaagaagatgattacgctgaaattgtcgaaccggaagagcaaaagtcaccgcaaaagaaggagtacatctcgagacttcgcatgccaacaatcttcactcgccgcaacacgcgaaaggtaaatgagtttaaagcgaattatttcctaatttggttggaattgctgcaaaagacgggcgacacttttggttcccctggtaagcacgaagcaaaaagcagcactattccctgatttggtccagaattggttccgtccccaaaacatacgaattgtaatattttcccatgggtcaatttgtttcccaaattagccgccgaagaagcattacttaattttttgcaatttcttaatttaaggacaccgaaaagaaatgaacgtcttccagaaaacaccgcgtcccatcgcatattttgttcggagaagtgatggatttctaacatttaactcatcttacacaaacatataaatatatatatatacacacacaatttatcgccttttaaattttaacttattacgttgttttatgtttttgtttttttgtcgctttcaaaacgtaaagtaaataaaaatgtgtctgatcgcgtcgaacgattttcgaaaatgttctattagacttgcacaaaatacgaagattttcaagtacatatataaagggcgacatgaagtttgggcaccaaattaaggatttaaaaaacaataaatatgtaaaatgctaaatcggtaaaatttagtaaattttaagaacccttgtgcatgcattttccaaaaacttgggccgccgccgaagaatagaccctattattcgtcatga

SEQ ID NO: 83900 - DNA, 563 bp, Heterodera glycines
atggacctggacctggatcctgaaaaatccaggactggttccaggtctaactctagaaatgaagtaaataaattttttaaatttttcgacaaaaaataaatttagaattggcgcaacaaacaatttgcttaacatattcattgctgtaattcaagcagaccacgacgagcggcaaggacaaaaatggccaatggcaatacaaaatgccaaaatttatttgaaaatttacaaatttgcggccatttatctccatgttgatccaagcaacaaagcagtcataaaaagcatgacaaatggcccacaagtgtgggaagtgatcaagaactttattgatcaaagtgtgacacaattggaagcactgatcaatcaatggaatgtggccaaggtgcacccgttctgtgacgagcaattggagatgcaggcaatcaacaaatacatcaaggaacattgccctaaaactgattagtgatcactgaagaaacggcttgatgattgaattttttcagaaatttttaattttttttaaatttaaatgaatcttattttaaagttctttaaataaa

SEQ ID NO: 83901 - DNA, 232 bp, Heterodera glycines
atggatacaaatattttattaactatattattatgttcatgcttcaaatttttaaattgcatcgacttcgaagaattcatatcaaatgaaaccgcaaaaaacttggttgatcaatatctaagaaacgcaataaagacaagaggagatttactagaaaaactgggtgatattggtgtcgacttaagcttttgtatccatttataaagaaattggtaaaatattttttattaaa

SEQ ID NO: 83902 - DNA, 1484 bp, Heterodera glycines
atgacaaacaatgaaggatatgactgttttcgtttggccgctggagcatccagctacgaatctcttaaagttcttttggattcatgtcaatttggtcctgacaacaagtaagttatggaatttcacttcaacatctttggggaaattccgattttcgaaaaatcttgggtgacagaataccgatttctgaaatttttggaattttttttttgccaagtcataatgattaatttagtgtaaaataattaatatagccactcaattttcgaaattacgacatttttggggtcggcggaatcccgattttataaaattattggtcctgggtatttcgattccgaaaatttttggggcatctggatgccatacctgttatataattagataaatcgctaattgaagtgttgtcattttcagaccaagactacttgaacttgccttcaatgctttagaccttaaaagaaatcaggcaaaatattgattaaaaaaatatataaatatatttaaaattgttttagttcatggaactcttaagagatgatgaaccactggaagcaaacagactggaaaatgagtaaattaaatatttatttaatgatttgaaaatgtgaaaattgcaaggggtatgactttgggcacatttggtttttataatgattttcatacactactagctatgttgacgaaaaaaacgagaaaaaaatgctttcttgaaatttcttccgtaagacaatttttgaatatttaaatttttttcaatcttccagatcgggaaatgtcaacgaaacattgcaatctttgcattctgaggaagatgagatggaaatcggtaaatccaaataaataatctgaaaataaaataaattatacaatcccgtagcaagagaaaattttcggggggtggaccatttttttttgctcttcggtcaaaaatttttttcccttttccggtgtttaaaatattgggggaattccccccggctctattgcagttcacacgaccataaaaaaaatacgaccataatttttttttgcagctttagtgcaccataactttttcaagaagcatccaatttaaatatcttagttaacactcgaagtcctaagaatcctctattagtctgcaaaatttcaaaaaattttgttgggtttcaaaaaatttatggccaaaaatgtttagaaaaccaactttttgaaattttctggccataaattttttggacacaataaatttttttgaaattttgcaggataataaaagattcttagggctatcgaatactaagaatgtttaattttggatgcttcttgaaaaatttaaatgtttccttcagctttggggaggccacgtggacgtccacgatcgatttcagaggagcgacgcaaaatggtgcagaagttcaaacaagcaaacccaaacagctcattggcagaaatcgcaaaagcaacacagacaacgagcggatcaatttcacgcatcttaa

SEQ ID NO: 83903 - DNA, 339 bp, Heterodera glycines
atgacggacagccaatcaccctcccgctccccccgtggccaatcaccctccccttcttccccctgccacgccaggcctaacctttatgcccccggtgggaaactccaattcgagaatgtagcggctgccaatcccggcacgaaagtcccaacggcaaaacagattgggcaccaacttatcgggaaagcccggaagggaaagttggcccgagtcatcgtccacgacgccaccgcaggcgaatttggaggaccacaaacgaatccgaaagccgcacttgcgattcagacagaacaaactgaacagccgaatgagagaagtcaaaagacggaagcaaagtga

SEQ ID NO: 83904 - DNA, 280 bp, Heterodera glycines
atgcgacagttggacaatgcgacagttggacaatgcgacagttggacaatgcgacagttggacaatgcgacagttggacaatgcgacagttggacaatgcgacagttggacaatgcgacagttggacaatgcgacagttggacaatccgacagttggacaatgcgacagttggacaatccgacagttggacaatccgacagttggacaatccgacagttggacaatccgacagttggacaatccgacagttggacaatgcgacagttggacaatgcgaca

SEQ ID NO: 83905 - DNA, 631 bp, Heterodera glycines
atgatgtgttttgtgcgaatgttgttcagcccgatcgtgctgtatggctttaatgtgcccgttgtggccaggcctttgattacggtagtggcacaattccaatcctacagtttggtcagtatgcgtttgcatatggtagcaatggctgcaaaccgtgcccatgctgtgctattcccatttcattatgcacaaaaagtcacaaaaaagtgggtgataattattaattattaattttttaaattgataaataatagttgattattatggcttataattatatggaaatcgatatcttttttcccggactgttgaaggcctgaaacgcaggaaaaacatcacatgtttttagcttagtttgaagcctctaggacggatttctatatccatatttttccatatttcgcgtagcgcagggtcgacttatattgtttttaatattatgcccccatagtaagaaatcaaaaagttatgaggcctcaaaaacgaaattttggctgtagtttcacttaaagttgatggctcagttggttaaattcgcatttttatagctcgggttcaaatccaacataaaataatttatgtataaaaaatcatttttttaaattaaaaaatgtatgatagtttttcttta

SEQ ID NO: 83906 - DNA, 701 bp, Heterodera glycines
tttggtgcactttagagcactttctgaaaaaaatatttatgaaacaaaaaaatcgattttttcaagtgtccgtttggggtactcaaacaattatggggagcaaaaatccaacgcagaattaaagtacaggctatagggaagctattcccgaaggattcggtctccccataaatctgggcgcatcggttcggggggactgccccgaaaacaaaaaaatcgattttttcaagtgtccgtttggggtactcaaacaattatggggagcaaaaatccaacgcagaattaaagtacaggctatagggaagctattcccgaaggattcggtctccccataaatctgggcgcatcggttcggggggactgccccgaaaacaaaaaaatcgattttttcaagtgtccgtttggggtactcaaacaattatggggagcaaaaatccaacgcagaattaaagtacaggctatagggaagctattcccgaaggattcggtctccccataaatctgggcgcatcggttcggggggactgccccgaaaacaaaaaaatcgattttttcaagtgtccgtttggggtactcaaacaattatggggagcaaaaatccaacgcagaattaaagtacaggctatagggaagctattcccgaaggattcggtctccccataaatctgggcgcatcggttcagggggactgccccgaaaac

SEQ ID NO: 83907 - DNA, 844 bp, Heterodera glycines
atggcatcgatgaacaagcgtttaccagcggagcttcttttggaaattgtcgcttcaattccaatcatgtacctttttgggggaattgcgaaaaagccaggtatttttttttaaatattttttaatttgaaagttgaataggtactactcgtccaccgtctggaatagtggttatcaaccgaatgttcgaaatttttcgggccaagcggcatctttacttcttaaatatagttggtaatatttaaaataataataaatctgaatttttagatcaatcttgctcgaaatttcgagaggctctgcgcaataaggaagttaccgtgtggcgaattgttcatccagttcgggttcatccagttcgggttcgaagatgaactggaagacgccaaatatttcaccgactttttggcgtatctatcttttggacgatctggccccaccgctacgacgagaatcgtgacttattccatggtaagaaaacaaacaattataagaaatattattattatttaatatttagccaattaaaattggagagctgttcggcgcaattctgatttatgtcttgggaagcgcaaacccgctgaccatgaagaagcggactgcaggcggttatttgctgcgtcaacacttcccgcggcttctccaattcccggcaacagaaatggcgtcacatggccttggtcaactggtccgcgccgatgggatggaactttaccgattgatgaatccgcatcacaaaggagatgttggttatttaatgattattgaaacaactcaacaccctggttcctactattttaatttttcaatcgaataagtttttttttcgtaattgaataaa

SEQ ID NO: 83908 - DNA, 1347 bp, Heterodera glycines
atggaaaaccgctttccccaacgcccctctaatttttcaattgactacatcttgtccattcctgcaaaaaagcctcgccgtggtgttcaagcgggagctggaccgtcatcggctaagcctgcaaaggaatacgttaaaaaattggaaagcagtgtcgagcatgtgccgcgcttccaatacgtcaaagccaaatcgaagttcagcattgaggacgtcccgacgaatcccgaaggattgattgccggcatattccaatgttgtattgatgaggccgtcatggaaagccaacagcgcggagtaaagcccacgcatctcggctgtgtgatcagcagcccgctgttgaccggcggcgacatacccatccccattcgccaaatcaccgacaacaccgtccacaccattatgaaccaattcaccaaagtcgcgcaaagcaaacaacagcaaaatatcacattgtggggcgagccgttcacagtgactgtgaccaccgtggaccgcattggccttcctaacaaaagaagcctgaaaggcggtgcgcggcgggcactggcacctgtgcatcatcgggtcaaggaaaactgcttgatcaaagtccgtcctgcaggaaaataagtatttattgtggccattttacagattaacaacccggatgagagaaattactgtcttttctacgctttgcaagccaccatggtggccaaaactcgcggatggccccgatggcttttttacaattatgtacacagccgatacggtcagcaaggatgtctgcggcgcgatgatttgcagttggtgcagcaaattggagctcgtcctgggttgaacgcatacgatgccgagatttttgttccgcgggtggtggattattggaacaacaacaacaaccaacagcaacaacaacaacaccgattttctgtgtttatttttggctcttctggtcagtacaagccgctctacaagtacataaaggaccattacgacaccccaattgttctttactttaacaacgaccattttgacggcgtacagaaaatccatggcttatttggtcaaaactattgcctcgagtgcgaaaagccatatgagcggccgtcgagacacctaaatgcatgcaaagcgcgctgtatgctctgctcccgcgtcgggcctcgctttccatgcgctcctttggatggatttttccgggagtgtccagggtgcaaaaaggtgtttcgcaacaacgactgtcaccaacatcatttgacatcaaacttttgcactcgatcaaaacgatgcaaagaatgcggtgtgatttgggacactcgagccaacaatttaaatggaccaagggtacaaaattacagcaaa

SEQ ID NO: 83909 - DNA, 729 bp, Heterodera glycines
  unsure (1)..(729): unsure at all n locations
atggcatcgatgaacaagcgtttaccagcggagcttcttttggaaattgtcgcttcaattccaatcatgtacctttttgggggaattgcaaaaaagccaggtattttttttaaatattttttaatttgaaagttgaataggtactactcgtccaccgtctggaatagtggttatcaaccgaatgttcgaaatttttcgggccaagcggcatctttacttcttaaatatagttggtaatatttaaaattataataaatctgaatttttagatcaatcttgctcgaaatttcgagaggctctgcgcactaaggaagttaccgtgtggcgaattgttcatccagttcgggttcgaagatgaactggaagacgccaaatatttcgccgactttttggcgtatctatcttttggacgatctggccccaccgctacgacgagagtcgtgacttattccatggtaagaaaacaaacaaatataagaaatattattaatatttagccaattaaaattggagagctgttcggcgcaattctgatttatgtcttgngaagcgcaaacccgctgaccatgaagaagcggactgcaggcgngtatttgatgcggcagcattttccgcggcttctccattnnccggtaaacagaatggcgtcacatggccttgntcaactggtccgcgccgatgggatggaactttaccgattgatgaatccgcatcacaaaggagaatgtg

SEQ ID NO: 83910 - DNA, 4597 bp, Heterodera glycines
atggaaaaccgctttccccaacgtccctctaatttttcaattgactacatcctgtccattcctgcaaaaaagccacgccgtggtgttcaagcgggagctggaccatcatcggctaagtctgcaaaggaatacgttaaaaaattggaaagcagtgtcgagcatgtgccgcgcttccaatacgtcaaagccaaatcgaagttcagcatcgaggacgtcccgacgaatcccgaaggattgcttgccggcatattccaatgttgtattgatgaggccgtcatggaaagccaacagcgcggagtaaagccaacgcatctcggctgtgtgatcagcagcgggttgctgaccggcggcgacatacccatccccattcgccaaatcaccgacaacaccgtcgacaccattctgaatcaattcaccaaagttgcgcaaagcaaacaacagcaaaatatcacattgtggggcgaaccgttcacagtgactgtgaccaccgttgaccgcattggccttcctaacaaaagaagcctgaaaggcggtgcgcggcggacactggcacctgtgcaccatcgggtcaaggaaaactgcttgatcaaagttttccgtacaggaaaataagtatttattgtggccattttacagattaacaacccggacgagagaaattactgtcttttctacgctttgcaagccaccatggtggcaaaaactcgcggatggccccgatggcttttttacaattatgtacacagccgatacggtcaacaaggatgtctgcggcgcgatgctttgcagttggtgcagcaaattggagctcgtcctgggttgaacgcatacgatgctgagatttttgttccgcgggtggtggattattggaacaacaaccaacagcaacaacaacaacaacaccgatttgctgtgtttatttttggctcttctggtcagtacaagccgctctacaagtacataaacgaccattacgacaccccaattgttctttactttaacaacgaccattttgacggcgtacagaaaatccatggcttatttggtcaaaactattgcctcgagtgcgaaaagccatatgagcggccgtcgagacacctaaatgcatgcaaagcgcgctgtatgctctgctcccgcgttgggcctcgctttccatgcgctcctttgaatggatttttccgggagtgtccagggtgcaaaaaggtgtttcgcaacaacgactgtcaccaacatcacatgacatcaaacttttgcactcgatcaaaacgatgcaaagaatgcggtgtgatttgggacacttgcgccaacaatttaaatggaccaagggtacaaaattacagcaaaataaattttcattattgttaaattcaggtccataaatgtgatgaacgttattgccagacgtgtaacaattttcacaacatggaacgcggttgcttcattcaaccaattgagcccaaggaatatgacccttaccgcatagtgtcctttgatttggagacaatgcagcaccaagcgatggaccccgatcagccggagaaaagagagcaccaaccgaacttcatcgccgcgagagtttcatgtccctgctgtattgacaacgatcgttggagaagagggacagggggttgtcaaatctgtggcctgcaccggaccgtcgctttctgccagcgccgctttgtgaacaccaacgttgatcaccaagtggttgccgacaacccgctggaagcgtttgtgaattggctggtgtttcaactcccaaaaaaatacgacacctacgcctattcgcactttggtggccgtttcgacatggtccttgtcttccgggagcttttccggattggcttcaatcccgaaatgctgagacgggtacaattgtcttctgaatttttttcaaaaattctcaattttacaggggaacaaaatgtatgaaatgaaagtgaggaagcagaagcggcaaaatccaaacgtggtcttccgggactcattcaatttaatgccctgctcattggcagctctgatcccatcctacggccttgacgtcgaggacaaaccattcttcccccatttggccaaccgaccggagaattatggtagagcgattcatccaactcctgaggactatttggccaatgggatgatgccaggcaaaaggcggcaattcgacatgtggtatgagcagcaccgcgaggaggcatttgttttggatgaggcattagcaaggcacaaattttttatattttttcaatttttattttattttgttcagctattgcaccaacgacgttgaaattctgatggccgcactcgtcgcattccgtcgggaattcttcgaaataacgcgacgacaggagtatgtggaagggattgacgaccgcgagaaccatgatggaatagatgctctgcgtgaatgcatgacaattgcgggtgcctgcatgcgccatttccgtacaaaccatctgccagctgagcatctggcaattgtacccgagcgcgggtatgacaacgcgcagaatcaaagtctcctggcacttcgcttcttctactggtactcggaggagtacgatgtagaagtgcaaaccgcacactctgccggcggagaaaagcggattggtccctattccttggacggatggattgaggcggagggtcgagcaattgaagtcaatggtaggctttaatttgttcaaatttgaaaatcatgactttaaggttgtacatggcacggctgtaaaaaatgttaccccaacgacaacatggtacttcccagtggaaaaacggcagggcaaatacgggaacgtgatggtaaacgaatggaatacctaagcgcacgggtcaatcgcatagacgtcttttgggagtgtaaaattgacgagatgttggcgagaagcaaagcgatgcgtaaatgttttgctaattacgtggacgacggacctctggtgatacgcgacgctttcatgggagggcggacggggccattgaagctgtatcacaaggcggccaggggcgaaaaaatttcttattacgattttacttctctgtacccctatgtgaagtgagttttttattattaaataaaacataaatatgtaaaactttagcttcaccacccgttatccgattggacacccaaaagtccatgttttcaaccaacaagtggtgtggaccagctcggcggacaacccttaccctctagcattgctgaaagtttgggttgttccgccccgccgcatcgacgttccggtgttaccggtgaaagtggacgatcgcttgtgcttccctctttgtcttaaatgtgccaaaaagtacccgaccggcggtgtggacgacgactaccactgccaacacaatgatcaacagcgaggttgggtcagcacctgcacgtccatcgagctgaacgctgcgctggacgagggctatcgcgtcatccgtctgttccgtgtgctggaatatgaggacagtgacgaccaacttttccgcccgtacatcgcagagttcatggctcaaaagatccaggccagcggatttgacaacgaaatcaaagggaatgccgccatggaggaacagtttgtgcgagagtgtgcggaaatatttggcatcaacgtggacccaaccaagatggcgataaacaagggaaaacgttccatcgcaaagttgtgcttgaataacttatgtaagccatttgtttttcaatggattttaaattttaaatttagggggggcgcttttcattgcgaaactttggactttgtcagactctgattacggacagtcctgttgtgcttaccgaatatctggacaacaaatccgttgaagtcgcgtcaattgatcagctggatgagaagcacatcctcatcagctatcagcacaagaaggactgggtggatgagcatgcctgctcaaacattggtgagaatttttttaaaatattaccgtaatcaaaaaaactacagtaatatctttgtggacaacttccacggcgcgacttgtcttgttgaaggcaatgcaaaaagtggtcaggtcggaacggtgcgagctactgtacacaggtaattgaaaaaatatatattgtttagtaatttatttttaaattttagacaccgatagtctcgtccttgtccacccggaggggcgttgccctctcaaaactggcccacacctgggccagttcacggatgagtaccccgatcacgacatcgttgagtactgcagcggcggatcaaaacaggtaaatttacacgtttttcaaactgtcattttcacacaaattaagtatggtctgtgtctgcggcgtaagggggcagggcccgatgttgaaccggaatacgtgctcaaagtccgtgggatgacgctcaactatgacgtcatcaacaatcagggactacgctatgaacggttcaaagaagaagtcatcaattatgcgacaagaggggactatgagccgattatagtgacatatcccaattttttgcgtccgaacatcagggagggtggtagggtggtgtccatgcccatgcagaagtgttaccgtccatttgtgggcaaaggaattgtcggcccaaactatcgtgttttaaattttggtcacactttgtaa

SEQ ID NO: 83911 - DNA, 169 bp, Heterodera glycines
atgaagaaatccgttaccatctctgtccccgagcaaaaagaaattaatcaacaaaacactgaaatggagcccacaaaatctgacactaccaaaaagcgcaaggcagacgaccgggagctgtggaaattggcaaaaggaaaattcatgctcgcgacatacttatgcccag

SEQ ID NO: 83912 - DNA, 1440 bp, Heterodera glycines
atgggaatttgcctttgtcgcgtttctgctgctgctcagtgagtgcttttgctcggttgacgcgcaatcaatggaaaagtaaacaatttttgatggcaaaatgccaaatttttataaaatttttattttcagcaatactgtgacgaccatcaccaccagcaggacgccaacgacgccaaatgggacggcgacgaaaaattggagcgaatcattagcggatgctgttggcggaaagaccacacttgtgctgatcatcgttgggtgcgtttgtccttgtttaccatcattcattggggaccgaccatgacgaaggcgtgtttttttgaatgtcgacaatggcacgaaattccggcatttttggatcgttgggggatcgaccctgacgaatgagtgtttggagtgccggcactgggacgaaattccggcattttgggttgttgggggatcgaccctgacgaatgagtgtttttgggatgtcggcaatggcacgaaattctggcatttttggaccctgggatttcatcatcatcacagcagataaaaagcagtagtaatttcacatttttccccatttgttttttcagcgcactgattgcaatcattgtcctgctcgtggttgtggtgtgctgctgctgctgcaaaaaacgcaaacgccgccgccgccacacttctgccgacgacgacaaggaggacaacaaaaagcgcaaacgtcgccaccacacttctgctgacgacaagaaggaggaggaccaccaccacattgaccagcacaataaggaggaggagcagcacggaaaggaggacaacaaatcgccgatacaaagcgaactgaaagtgtcgacgatttccgccgtgccaagcgactacaactcgaacaaacggctgggcgcaacagatttggacgtggaagcggaagaggtgccgaagacgaagcctgttcccaaaaagccgaagtcagaaggaggcacaaagcgcaaactgtccaatttcttttggtccaccggcaccaccgagaagcgaccgagcgcggcggaacatggcgtggaagtgccggaaacgattcgtgatgatgaagattgaagatgcttgaatgatggtgttgtattctgtatatacctatattatatattgtatccagtattctgtgtttagccatgcatatgtttatgtattgtatgtgcgtattattgtattatatttacggtattcaaagcgatgtttcatttaacacattcattgttggtatataaattttatttgtgttgttttgtatgtatggtctgaaatttcggaaaattcgcatagttctcaatgatttagtttttccgatcgactccctcagcttgtttaattttgttggcccacatttttttgacaatttcagctccgccgatttttcagagaaattgcacgaattacaatgactgtatttctaataaa

SEQ ID NO: 83913 - DNA, 924 bp, Heterodera glycines
tcgtttgcgctcgaccgtcgctttgtccgtctcttttggctttggggttttctcgtccatcgctttcgatggccccttttcttggcaccttttctgaccaccgctttcctcgcctttggcttcctttggattaatgaccaagtgagtggtctcttctctctctcatttttggcgttttttgccaaattcaaattgccaattgccttccttcctttaatctttgatttggctcggttcttgaggaaaccagggaccctttgttcgtcttttctccagagaatgcgcgttggaaattcgaacgtgccgcgctgtcggagcattggccgttggacgagcagcacttttggcccggcaaatcgtaacaaacggagaaattcggccttaaactgcgagaattgtccaaacttaaaaggtacgattacttcggctacgtcgatgtgatcgcagtgggacgaagaaattccgacgaagggggagagaggccgaacattctgtcgagggactatttgaacgaattggagagaattaacaaagtgagagagagagagagaaaggctaatgggggcaatgtaataaaatggcaaattgcccaattaatcaatggaatggcaaaacggcacggccattagtcagtcttttctgatcacaattcttgatcacattccctccccacgtttaactaaacaatttgatattccacctcaactactaaatttgagttcattctccacaatttgactgtgcccgttttgctgcccaattcttcgactcgtgaggtcggcttcaccgatttgtgcatgacttacgcttggaagtgctatttgaacgatcacatcataatgctgcagccgaaaggacgatggatcggcggattgcaagcggaagtgatcgaattggccaaggaaatcattgagcaggaggtgt

SEQ ID NO: 83914 - DNA, 1228 bp, Heterodera glycines
atgaaatttgcaaagaaaatgttaatgattcccgaggcggaatatttggctctactgagtgcgatgaatagtggtgattatctccaaaatgaaaaagcgagtttagacgcaaaaatttctcagaatttacaagaccccggcataagcgaggacctcaaggcgaagagacatgattggctctataaagaaagacgtacggtaaaggggatacttgaaaataggccacagaaggtcgtgattgagaatcatgtacccggtccaaatgttgcaccatatctgggcctcaataaccaatccaaaccacaggagaccgaagaaccacggaaaataattattcctaggaaaagacttaaagagcgaactcctgatcctgaatcagataatgatacccttgaggcgttaactccggaaccccaaacaccatccacactcaaaacacccgttccgaccaaaactattatacacccgacccttttaaacggtcttttttactgaaggatccaacagtaaaagacatggttgataaatcgaaggtcatgtggggacgtggaagtaaaaaggcaataaaatctataaaaacacacggcatagcacgagagaagaaaccattcaatccactaatatgggcaagactgtagagaaaattttatcaaaaatttattttaatttaaaatctccggcaagttttgctgggattcaaaaaattttaaatgaggccaaaaagattgacccggaaattacgaccgatgacgttaataaattcctagaaaagcagagaacatacacgattcacaagcccatcaggaaaaaattcccgagactaaagacggtaccgagcggcttccataccgattggcagtgcgatttgtgcatatttgaccagttgaaaaagcataacgacggttacaaatatctgttggtatgcatcgacgtgctgagtcgaatgatcttcagtgcaccggccaagtcaaagaagagtgaggacatgattgaggtttttgatcgggtgttcgaaaagtcgaaaattatcccgatgaaaatatatagcgacagcggactcgagtttcaggctggaaaaatgaaaaaatattttgaggaaaaatttattatcaaaaatgtgatgtatagtcctgaccttcacgccggagtcgttgaaagggcaaatcggacaataaaggagcgcttgtacagatattttacaaagaaagacactctacgatgggtcgat

SEQ ID NO: 83915 - DNA, 1364 bp, Heterodera glycines
gtccattctccctcagctttgtccaattgtccgcctccgttcagtgattccgtctctccaaaacggtttttctctgtcctccgacttcgcatcgaaaacgagtcgcaacttcgctttctgatggaccaatttctgcggaacagcacacgactcgacttttggaaggagccgtcgtccgtcggagaagacgcgtgggcttttaaatgtctttttcaaagcttttttaccgctttaagtcacgtgatggtcgcccgaggcccaatgcttaacgacttcagtgaacgcctgcgagaacaaaacatttcgtcgcgagtgatgatcgaagacgtaagcgaactgattagaagacgtgcgagagagacgacggaaagggaagccaaacagaggaaaacggaaagcagcggcaactatcaaagggtgggaagaggaggacaacaattaggtggacaattaatggggggggggacaaaatgggttgccaattaatgatcaataaaattcaaatagaatttaaatatggtctgatttggtctgatccgatcaggatgagtccatttggcctctgtctgacgatgactcggccattcgaagcactcgccgacgaaaagcgagctcttcgggtggttttgcgcgcttctccatgtccaagtaccactccttctccgatgtgattcatcatttgtgcgtctttcatttcccaaaagaattccgccaaaataaattaatttttaaggaatgctttggctgtgaactttccttcacgtgtccaagtgcaaccgatcggaacgacgcacgagggaagacagatccctctgatcaaaattggcaccagtccggcgggcacaaagccggccgtttggatggacggtggcattcacgcgagggaatggatatcccccgcggcagtgctttacatgatcgatcaggcaattttggggttgatcgatcggtcgatcaatgtttgtcttagttagtgacgggttatgactctcagccggcgattcgtcagttcgttgatcacttggattggttcattgtgccaatgctgaacccggacggtaagctttgggatggttttttgaatttgttttccgctttcgctaggctacgaatattcgcggagcagcgccgaccccgaggttcgcttgtggcgcaaaaaccgttcgcccgttcagtgcacccaaatcagcacgggtaagcgaaggaatgattagaggtattgagggtcagagaacaattcactgattggcgaatgaattttactaagcgacattttcgtccgatcatcgcctgctaattacttcccttgccatgtccgaccatcgggtgctaattgcccctccccctctttggcttttgttgat

SEQ ID NO: 83916 - DNA, 624 bp, Heterodera glycines
atgcatttgaaattgtgcctattattctgttcaatattatttctgatcatccgaactgatcagatcggatcagaaaataaaaaattggaacaaaaatcatttgatgaaatatttggagaaaaatgggaagaaaaaagaaacgaagaacagaaaaaaagagaaataattggaaaattttataaaataaaagagaaaattaagcaaaaaggaagaaaatattcaaaaaaagaatggaataaaattgaaggaaaaatagcaaaaaaattgggcacaaatcgcaaatatatttatgaatggatcaaagaattgggattaaatcaaaagaattgctacaaaacaatgactgaagaagaaaaacttgacactgtacagaaattcattgaaatgataaatgaatacaaagaaaaaggaagaaaatattcaaaaaaagaatggaacaaaaattatgaacaaatttgtaagaaaattggagttggccttttcatacttagaaaatggatgaagcaatttggaattagccgaaaaataatagcggagaaagaaaaaatggagaaaatgaaaatgtattggcaaataaaaggagaaaagccgaaaatgagtgacaaagaaatggaaaaatgttga

SEQ ID NO: 83917 - DNA, 535 bp, Heterodera glycines
atggagaaaatgaaaatttattggcaaataaaaaaagaaaagccgaaaatgaatgacagagaaattggaaaaattcaaaaattgaaattaggtaattagcatttgaaatttttcaaaaaagagaaaaaaattcaatgaatttttattctaaaaaattatttataaaaaatttggcaataaaattcatttattttcaataaattgttttcttttgcagaaacatttaatcgctaagaattaaaaaaataattctcttgacacttttcccgcacaattaagccctccccctccctttgatgtccccgcccaggggaaaaagcttcttttttttaaaatgtgcttatgttttacataagtaatctaaaagaaaaaaaaattgtcatgaattacataaatccctaattttaattagccaatcatagaaattaattatttgtaaaattgcgtcatcaaatttttaattagcatttttagatggaagaaacaatttggagacgaaataatggaggaatgaaaaacggatgattctaagaaa

SEQ ID NO: 83918 - DNA, 615 bp, Heterodera glycines
atggaattaacacgtatattattctgtttaattttatttttgatcaccctaactgatcagatcggatcagaaaagaaaaaaatgaaacaaaaaacatttgatgaaatatttggagaaaaatgggaagaaaaaagaaacgaagaacagaaaagaagagaaataattggaaaatattataaaataaaagagaaaattaagcaaaaaggaaaaaaatattcaaaaaaagaatgggggaaaattaatggaaaaatagcgaaaaaattgggaacaaatcgcaaatatattcaaaaatggatcaaagaattgggattaaatcaaaaaataaatcattcaaaattaaaaactgatgaagaaaaactcgaaattgtactgaaattcattgaaatgacagataaatacaaagaaaaaagaaaatattccagaaaagaatggaacaaaaattgtgccgaaatttgtaagggaatcggagtaagttatggcacaattacaaaatggaaaaagcaatttggaattagccgaaaaataacggagaaagaaaaaatggagaaaatgaaaatttattggcaaataaaaagagaaaagccgaaaatgagtaacaaagaaatggaaaaatga

SEQ ID NO: 83919 - DNA, 549 bp, Heterodera glycines
atggagctgagttcgggctattttggaggacaattccgcgggtttttattccccgaggagcaaattaatgacgaagcggcgaaggtgagaaaaagggaaagagaaagggaaagggaagagaccgaaaggggcaaaatgccaaaaagagatttttgacttaaatttgaatttaaaacataacgagtttgtgtctcgtctttctttgccaattttgcagatccttcccggcattcggactttggcggaaaaagtgcgagacgatgcgcaaatggacgaagaaagacggaaattgggaaaataattaattaattaattaacaaaaatcattggcagtagtaaaacccaaaatcagtttcggcataaaaattgaaacaatcaaattggcattatcacataaccacttgtacacttttttcctcgcaattttggcattttccttttctccttttggcaactttttttttgtttttcgtttttgtatacgaaagcgcaaaagtgtcgacattaaatatttctctgagggcgtggtaaattggcaaaccaaataaa

SEQ ID NO: 83920 - DNA, 1468 bp, Heterodera glycines
atgaccactaccagttgcccgttcgactccaactcggcacttcgtccgcaagtgccactccgagcacgtcatctgcaagcgaaacgaccagccaggtgggcgtgcgtaggatttacgaatgttttctcgaaaaaggctattgactcccatgtgaatcctccacaataaaaagtttattcatcttcatcttctgaagttcagtttctcgtcaaagtgaacaattccatcttcaaggacttctattcgtgtgaacaacttggctttgctcttatttctgatccgagacggtgaatttttcattataaaaagggatgaatttttataggttagtaatcttccgaccggattaacattctctgtttattttttcaagactgcttcgcaatgcgacgcatctcgaacatctcgatgggtttcccgtttggatttcagccgtgccggatgaatttcgtctcgctcgcttcgccatcatggcactggcctatccaaccaagaactattctcgactcgaaagatccggacggcatccggatgtctgtcatctgctatttggctcattgtcatttttttcatgtaacagattcatggccatggcattttgattgtgtcgtccactgggattgtcttcagcaaggaccacccgcaaactcgcatccgccttctgccagccgatcgccgctatgtcagcgtcggcgatcagttcatgttcaccgccaccttctatgaccacaatgagggctttatagtttgtgggattcagcttttggatgaggaagacgaagaacagttcgttggactcgactccatcaaattgggcggcgacgacattttggttagacaaatgtttcgtaaagtcaaaaaccatttcatgatgaagaacatttgcagtttgtgcagaaattgaagacacacatgcgacaatgggcggccgagggacatgacagtccgaactttggacctgtggcggacccgaaagagttggtcaccgactacatctgcagggaggagattcagtggccagaaaacattgaagttttggtctgtttcaaccccgagtggatgcagggagcggacacgctgatgaaggtgcactcattggtcatcgacggcgaatttgagcagggggtcaaagaaagggtgagtggtgactaacacggcttaacaacgccacccttttcggttaaatcgaattttcctcctacagattgagtccatgaacaatgatgagacgagcattgcctcccccgccacgctgtctcttcggcaggaggacaacgacggagcgcatgttcctgctcgaacccacttggaggaggaggaggaggaatgcaactgtttggaggtgtggggcattctgcgcgagttgttggaggacgagcgggcgaccagcgagttggagccggagatgatccagggaatggttgagctgcgaaaagcctttcatatcgataaccgcgccaacaattaa

SEQ ID NO: 83921 - DNA, 890 bp, Heterodera glycines
atgcttaaaggatgtctgtacgttatcttagtgctgattgctgttagtttgattcggttgggcaaatgttagaggcgatttgagccttttggcccttaatttctcctgaaaacttagaaaattcaacataactctgcctaaaagacatatttctgttcgcaaaataaacagaaatgtgaaaaaagatttattctttcttatttagtttgttttatctgtttatttttggtagttgagactttgttcgtttttatcaagtgtctctattttaaattaacaccccatttttgaaaaaaaatcgtaaaacttttttccgtcatcatttcggtttctcactttcagaatcttaatattttcagaattgctacgtacagttaaaaattcagctcgatcggttcatgggaagtggtcaaactcccaaaaaacagggtgtctttattttaaattaacacagtgtatctatctctctttttttttctctctctctctctctctctctctctatcctcacctcactctctctctttttttttgtttaaattgatgcggcgggttattagattttttcaattgcttttatactaaaatatgtgcattaatttacattttagataattatttttcagacaaaattaatactgcaaaaaaaaaacttaaccggacatttggacagtggacatcatgtgtccattgtgcaaatgtccgggagcccaaaagaaattgaaaaaactgagtgcagcgacatttatttaatggatttaataatattttttatacatttttaatagatttataatctttggatttgcgacagtaagtgaatattttattattataaatggctttagcagcaacaaaaaacatttttttaaatcattaggtaaaataaa

SEQ ID NO: 83922 - DNA, 123 bp, Heterodera glycines
acatccattctcccccgccgtttccctcatgtttcgtcgctgtggtcgtctgctgtgttcgctgcagttgctgaaatgggtgcagttgagggatcagtgccgccacgttcagcagccgtttga

SEQ ID NO: 83923 - DNA, 823 bp, Heterodera glycines
cattgtccgccgaatcgcttttcccgtctcagcattcgtccatcttcttccgctgccaatgggccgtcctctcaattcgttcctttgcccgctgatttggccgaccccgggacagaatgccaaatgatcggtttttccaccagcgaaaaaggtctgtcattttttttgaactgaaaaacagcgaattcagcggaagactttctgacggaggagaaagtgttccgtttgcatctgaacggagtggcggagccgccgacggacgaccctttccaccattatcggagccgagtgtacaaggacggacacaccgcatgctatgtaatctaatcaaatgataatgactataatgactaataaaataaaaaaattctttaaaattttcaatttttggggagaaccatttcctctttaaaacaatctcttaacctaatcaaagtgaaaaagtttcgcctgcgcttcagcagaaaatcacgttttagctgtcaaatactcaataaaatttgcgaaatttccaatctttttgaaggacgattccggcgccccactcttctgcaaattgtcttcgtccgacaaaggccacgttcagctggggctgtttcaatcgctgactgttccattggatgttttgtccaagggaatggacaaagggaaagagcagtgccgaaaagtgtgtcaataaaaatgaatgtgccatttcatttaatcattgaaggcccgagaaatgcgtttcactcttttgacggaggaccaaaaattggccgaggccatccaacgctatggcaaaattgacgagggattccacaattgtgacaaggaaaagtga

SEQ ID NO: 83924 - DNA, 703 bp, Heterodera glycines
tgatgacagcccatctccgttctttggtgtccatcgacaaaattgtccacgcaatttcgtccgtttagtttttccttcgctgttctgccttcatttatgtttttcagcaattacacttccgttgagaagcgtgaagagccgcttgactgtatggacgccctccttttttggataaataaggcaaaaccgaataaactgaaaaagcaaaattaagacaatttcttcccttctcgtcaggtttgtctgctcgtccgggatgacattgagcacaacggactgtccggcgtggacaaattgccgacaattcccgagatggaagacctttacgaagatttgtgcgacggcacgtgtatttgcgcactcatttccttctaccgacctgacgcattgcctcttcgcggtacgtacggctaacatttatgtcaacgaatccccgtatttcgcttcgcttattcccctttagagatttgcttcaaagacccgatgagtgtccacgattgtcgcttcaatttggaacttttgtggtctctccccttcgttttacctttttacttatccgtttgccttttcagcaaattctgttcctcttctctcccgtgggaccctttccattttgaaacggaggacattctcttcctgcacgagtcacttcagcccaatatcaatgtgttcttggcggatcttttccaattcttcgagattc

SEQ ID NO: 83925 - DNA, 539 bp, Heterodera glycines
atgacatttttctacatcttcgtagcgacttgtattatatatttgtttgttggaattgtgatcaaatttaaatcagctggtaataaaatgaaaaattgacacacaaattttaattgccctaattaaggtttgccctcatctgagacgatcaaccatcgagttttccgatcactttgttgcattctcacagtgaatgttggcggctatttgatcacaatgctttatggcggtttgatcaagccttcaatttcgtcaccgatcactgcttggttttggcatataatcaccgcaattccattgaactttggcggggcatcgaatgggccaattttatatttgacaaggtgtattttttaaattctaaaatatttaaatagatatttttatatacatattttagtacggagtatcgtcgggcatttcaaacggagtttccatttgtgttcaaacgaattttaaatcaaaatcgtatggcaccacagcaaaatgtccagattacacgcatgtttccagtcatgaacacttcatctcaacgataa

SEQ ID NO: 83926 - DNA, 1344 bp, Heterodera glycines
atggctgattccaacaacatttcggtaaattatagggaaaataattttcttaatttgggttttcagttttatttgtcattcaaagatgtaaatcccaactggccgctgatcagctgttcgtttgtcaatggaagcatcgccgtatttggaatcattttcaatttgtctgttatttgggtaacagttcagacaaagtgggcaattaaattaattggattgaaaattaattaatttgtttttcatattaaggtcattccgtggcaccgttaattaccttttggctctttgctccttttttgaattgcttcatcaacttggcaattttctttttgtgtataccgcattttctggacaaaatttcattgcgtatcgtttagccgttcagatcgtttttatttcaatgtttgggctcggtattttaaacacaaccaatcctcaatttaaaaaaaatatatatattaaggtggaatttacccggcgatgcttttcattggcattgacagactgatcggaatattttttgaagaaatgtatgtattaaaaaaaactaatttgataatgtaaatagggctcgaaattatatgcacatgcatatttttttgctaaactgtagaaggcctgaaacgcacgaaaatatatttctagctttgacgtatttccatatgcatatttttgtggatattttcacaaaaataataattaaatttattatgcgtatattttgcgattttatttatgtccatatagttctgagctctaatgataaagctgatatttttcagtcacaacaaacacaaaatgcgattgtatttgaccatgataacgcttatttgtattgccttctgcgttgatttttgtgtaactttataccaaagtatcgatttgtatggagatcagctgatcactggatgtcttatcgattttttcaaggtttttttgtatatccaaaatcaaatacatagttttttcaaatattttagggccccaacccatcaattttccgaacttccctcgtcccattgacaatcactgtttatttgttagttggatttgtggtaaaagtgaaatcttccggtgaatgatactgtaatttgataatgtatccagatcaatttctcattcattaggttttccatccgctgatgaggtcaatcagcgcgttttccgtgcacttttttgcatcattgtcattaatgtgggcggctatttgatcaatgcgttttatttgaatctgatcaaaccgtcaatcgcttctccgatcactgcttggttcgtccattttatcaccggaattgtggtgaatattggcgcggcatcaaatgcaccaattttatacttcactag

SEQ ID NO: 83927 - DNA, 701 bp, Heterodera glycines
atgcggtatacacaaaaagaaaattgccaagttgatgaagcaattcaaaaaaggagcaaagagccaaaaggtaattaacggtgccacggaatgaccttaatatgaaaaacaaattaattaattttcaatccaattaatttaattgcccactttgtctgaactgttacccaaataacagacaaattgaaaatgattccaaatacggcgatgcttccattgacaaacgaacagctgatcagcggccagttgggatttacatctttgaatgacaaataaaactgaaaacccaaattaagaaaattattttccctataatttaccgaaatgttgttggaatcagccattaattttgaaaccaaagcttttatggaaattaaaatttattcaggtgcttggtcactccgtaattttgttgaaaagcaagtgtcgcgtcaaaaaaagtattattttttatttacacattctttaatcttattttggcacctttgaaatagtttaatgcttttcggtctcaatgatgtgatggagttggacgagacgtgttgagtcaagcaaagacccaatcgtggaaaaccaaaaaaagactacaaaaattggcattttgggacaattgaacggaaaaaaggttaaaaaaaagcaaaaaattaagaattaaaaaagatatttaaactattttagaaggccatgcattttgtgcagca

SEQ ID NO: 83928 - DNA, 576 bp, Heterodera glycines
atgaacgcacaaaaccgaaaagtttaccggtgtgggtttgtaaatagagcccgacttggtttttccggaacccttgcctttaccggtctttaaatgaactcagttcatcattttaaacagtttttgtctcgaaactcggtccttgtgcaattcccaaattccggccctgaatttacaaattactttcctagtagtgagtggtcaactcagttccggtcatggtcaaatgacttactgagttcttcttggccaagaaatcatctccctgcaggcggcgcttatatgtgttgccgcaccaaacgattttccgttattttaccccgaaaatctatgtttctatgttctgaacttgaaaaaaaatcctgtcaaccatcggggcatgaatttttttttatgttaaattaattttattcgccaaatttcagggagccagaagagaactgcgactgtccagacttgatccgcgactttgaggaaaaggagaagcaacgggaggcgtccaagaagaaggcgagaagctcgaccagttcggcggccggagggccggccaaaaagcgcaaaacgtccaagtcaatg

SEQ ID NO: 83929 - DNA, 1136 bp, Heterodera glycines
  unsure (1)..(1136): unsure at all n locations
cagccactgaccaatctacagtatacaacagtccatcaaccncaaattgtgcaggatcaattgccagccaaaatgccttagttcaacaacaatgngctcagtcagtgcaacagcaaacccaaagaattcaccagcagaatcaatttatgggtcaacagaatctagctggcataaagaatcagtaatatttttctaactggaaatattatagtaaaactgaatgggtatctaatgtcaaaagaatatgggaattgatgaaatgggataaagcgtgaccggaaaatgcgtcagtgatacttttaaaataaagttctgtaattggttagaacattctattgttcggtagtgccgtagattcgagttcttaagtgtaaaaagttgtttctgtagtaaagcaattgagtcgaggcatttataattacaggcaattcccaataaattatcatggacagaatctgcaaccgcaatcagtgcagaatccatcacaaatgccgtcaacaggaaatcaaaaaattcaatggcaacaaacaaaagaaggacacacgggcaatatgcactcaactagctcttcaaactttatcatgccatcctctactggctcttcaaactttatcatgccatcctcttctggctcttcaaaccttatcatgccatcctcgactagctcttcaaactttatcatgccatcctctactggctcttcaaactttatcatgccatcctctactggctcttcaagctttgtcatgccgtcctcaaccggctctgccagctttactatgctgccagccgccgaaaatatttatcaaagcggcgggtcaaaaagttttaccatgaacacgacgggaaatttgacgcacattggaccaactcgatttaacgcacaacaaaaaggaaaaatgacagaacaaattggatcgacaagcttaacgaattatcatggaccgaatgtgcaatctggtcaatctgttcatctgacaccacatatgcagacagaaagccaaatgtcacaaatagggccagaaatgggacaaatgggaaacattggaccaacaaactttaacagtccaagtcggcaactacaaaatcagcaaaaacttcaatatcagcagcaaccactcttatcaatgcccatt

SEQ ID NO: 83930 - DNA, 1146 bp, Heterodera glycines
atgagtgaaatcctagggcttcggcaggcaaacggggtttgagacatctctcttacaagactctcatcataacaactcttgtacttatttttatttccactggatatttaacttaagctaattaatggaaatcttatcctaaatataaaccgtttttcagcttccgcaagggtatgccaatgccggcggcgtgggtccgtcatcatttgtaccgcttggccaaccgccaatgcaagcgcggcaacaaagcgttgatcacattcaatttccaccgcaattttcggtggttcaatatcaaaattttggacaacaaccaccgccaatgcaacaaacattagcagttccaatggccaatttgtcattagagcaagcgacggtagtacaatataaaccttaaacagccctatttttctgacctttcgcacttatatattttttaccaattttcgcaatttcagaaattttattgaaaaactgcgccgggaatatatttttgggtcggttttttctaaccctaatatggcaaataaaaattgtttttatacaattaaaaacatttaacaagttcaattatgtgttaccccaattagacgccagggatttatttaatatttcaaatacggcgaaccaatcggcaccatctgacacttaacccttctgatctttcatattttctcaaaccctagaaatagatcatttttgcctgtgaaaaactaagaagaaattctcacgttaaacaaatgaaaaagtaaatcaaatttctataaaatcaataaaaagaattatcaaaaagaccaatttttgccaaaatttagcaagtttaataaattttagagtaaaaagaaaagtgatcggaaaccaaagaaagcaacagatcaggaagcgcaaaaccaaacagttcaacaccaccatgcgcaaaataatcaatttgtcggccaaaattccttagttcagcaagcatttgctcagtcaatgcaacagcaaatccaaccactgagcagtcagcagtatatgtttgaccagaaccaaaatgttcaatttcaacagtccttgcagcagatggttcaataccaagggcaacaaccgccactaatgcaaccaacattagcagatccgatggccaatttgtcattcgagcaaaccaag

SEQ ID NO: 83931 - DNA, 550 bp, Heterodera glycines
  unsure (1)..(550): unsure at all n locations
tggccaaattattatccaggatggaaaggatttgcaagacaaatccaaagttcaattattgattggaaagcttggcgaacaggagtacaaacactacacctacagtgtcgctccaaaacttcggcaaaatatttttaattgtcgttgacgcattttccaaataccctgaggtatttgagatgacaaattcatcagcaactgtcacaatcgaaaaattgcgctatttattcacacgccatggaattcaagaaacaattgtttctgacaatggcacgcaattttcaagctcagaatttgccaaatttgttgcagccaacggcatcacacacgccccatataatccaattcaactggacaagtggagagatttgtcgacacatttaagagagcattcagaanattanaaggtgaggngaagccaaacaaggagatcatcgacatttttctgatcacctatcggacgaccccaaacgatacacttcccnatttgaagtgtcccgctgaactgctgctcggtcgaaggccaggacaacgattgatctccttcggc

SEQ ID NO: 83932 - DNA, 841 bp, Heterodera glycines
tcgccacagtcgtcatgctcaaacggtggcaacaacaacaacatgaatagtaacgggggcacaaatggaaatagcgccgcgggcgacggcggcgacgcggagggcgtttggagcccggacattgaccaggcattccacgaggcattgcaggtggcggcgctgggggcggggcgggcggggaaatgctggccggtcgtcggccgttcggcctccctctgctgctgttggtggctgacaaatgcgaaaaattctttggatttttaagtgtgctcaaggacaggggtgtagaaaggggaggatggataaattcactgggttattttaagcgaaattctgctgcctggaaattcttcaaatttttaaatagcaattggcgagtgagagagagagaaagggagagagagagagagaacgccaaagaaagagagagcgacagagagagagagaatgagagagaaagggagaattcgtggaccgggctgcactgaaattgtaaaattcctaaaataaaatgcgaaaaattctttggattttttaagtgtgctattcttaaaataattttactgacattaaaggacacaaatcagcaagaggcaacaaaccgacgaataaattttccgggccgtttttctgatttgtgatcatccaatttttgttgtttttaatagaaagccaaagttcataaaaaaatattcataaacagatttatccgccgtgtggacggcgcaaaatcattctcagcgacgagggcaaaatgtacgggcgcaatgaactgatcgccaggtacatcaagattcgctgtggcaagaccagaagtgagtatcacttatcatcataaata

SEQ ID NO: 83933 - DNA, 523 bp, Heterodera glycines
atgtccacatcctctaataaaaattatttaccaaaaaaccaatgcccaaattgtgatggtaattgcaattttttcaatactgtacaataattttttttttaattttagatgatgaagttgacactgaccctccacccgaagaagttgagaaatggacgccgaaacaagtgattgagtgggaccagcgttgctacgggaaaatgccagctgaagaagagctttggcaagaattcctcgacaaaggagaggcaaatgtcagtaaataaaatttttgatccattttttaaattatttctttaggttcggcgtgagttctttggcggaaaaggggcgcttgaagttgagaagagccttcgagaatacgcgaagaaaaaggaacgccgcgacgcaattctgattgagaaaagaaacgaatacaaaaaaaatgatggaaaaaaggatgaaaattgaatgttcgaatttctccatccgctatatcaatggcttttattttatgcaattattttgatttttaatactcgaa

SEQ ID NO: 83934 - DNA, 354 bp, Heterodera glycines
cacaatttgggcattggttttttggtaaataatttttattagaggatgtggacatttttaggaaaatggaagaataataatacaaagaactaaaaattttgcattttatacctttcaatgtttatttaacccataaaataaatttggctcattcgaaatcaatataaatagcatgtatacttgcttaatttttacattttgttgtcttcatctcattaatattgcatttttcctctataaattgcactcttcctttcgttaatttttccaaaattgtagcttccaaattctcaaaatggtgcttcttacggaaaaaatcgccaaaattttaaactgccgtgtcagcgagctccg

SEQ ID NO: 83935 - DNA, 908 bp, Heterodera glycines
atgcgcaaacacttttcacttgccgccctcctcacgctgtgccttcgtctgatcagtctgttcatgctgtcactgatcaccccggtggtgatccggcgtctgttcgcctccaactttgtggagttgctgcaaccgcttgaattcatcttcaagacttgctcagatgagttggccggtgtctgctcatttccggaggcccaattttcattggccgaggcaattttttcaaaaaaatgttgaaaataaattcatattttcaaatcctcgaaattttgaatttttaaattgcttttttactgacaatgagagtatccattgtttctttttcgaaacaaattatggaatttattgaaaaattgttattaaaactcaaaattttttctttgggaggggtagggataaagcgtcattttttttttgttttttttattattattccattttcaaacccaaaattcacaggaagacatccatctgcagcccggctattactacagttttgtgctcgacgttattctcttcgacacaccgcagaacagacagctgagcattgtgttggccagcgtaatgctcaaagtaaacccccggggggggggcaaattggcaccaattcgaccacaattcagaaaaaattttgattggatttttagggttttggtttaggtactgactggtgtataagtaagtaatggtgggtgttgtcttcgtaatttcgacataaaattttggggtgttaaaaacttttttgccataattttttaaggatgaacggatgaaactgttgttccaattccacaaaactgtgcccattttcaatgctttctccgcccgttcggtgctctcccgtctctacacattggtcagaaaatatttatgcaccgtttaggaattagactacattttttcaa

SEQ ID NO: 83936 - DNA, 527 bp, Heterodera glycines
atgcccgaggactcatttggtcgggacccaattagcccaccaccgaaacaggtaaaaatgccaaaaaaataaaagaaaaagcattcccctgaccgaaaattgtcccgtttggtggacgacctggatgaatttgttctgcagctgaaccacaatgaatcgggtgggccgcccttcacgttccaaataataattgggaaaatggatggagaacagctcggacacctcatgaccagcggtggagaagaagccgaccaagtacaggggccagaacacaatgttgcgagtctgaaaaaataatgtttttttgttgttgaaaatcggggtaactaataattccactctattttttttttgataaaggagtttctaaagtttttataaaataaaaataaaaaccaaaaattttttagcttcaataatttttgctgcaaaacaataagtaaatttcaacttttgggaccatgcaaaaaaatatattatcgaatttattcaatgattttaaagtcatattttttgctctaaataaa

SEQ ID NO: 83937 - DNA, 1190 bp, Heterodera glycines
atggcatttgcaaatggtgccgctagtggacaacaacaacagctgcagcaacatcagcagccgaacaggttcaccatggtgccgtcgccgatgccgcgcaaccatttgcgacgcgtgccgaccaggtacaatttaggacgggaattgttgttcaaagaaaagtctgagttgcacaatggagtgaaaatgccggatttcgggtgttttttttaccttcggcaaatgttacacgacttaccaaggcatacatggaaaaatgggttggacgtcaatctaaaatttttgggatttaagttaattattgaaaaataggagttttttgggccggcagcacctaggaaagattttttgttatgaaaatttaaaatttgcgaccccctcgaaactttttattttgctatcaaaacattgtataattcgcttccatttttacctaactttttcagattggttttggagcgttcggtgtccgacagtgtgttggacgacgcggcaattccggacgaccaattctccgccctgcagcactcggccgccgccgcgttcaacgcgtccattctgcgcagactgtcgtcgtcgtcgtcaacgatgtcgcccggtggagggctgctgggctcatttgatgaacagttggaggacaacattgtggacaacaagacggagcagttcatgcaccaacagcagcaaggcagcaacggaaatggcggcaacaattcgtcgtcctcctcttcgtgcccgtcctcgtgctccagcgagacaattggtgagtcttgttggcgtttttgggatcataactactctgaattgtttttttctcaaaaaatccaaattctaatgaaaaatgtaaaaaggccgtcgaaaccccgttgaatttttttatgatttattgcatttcaattttcattgtctggtttgaaaaaaaccctaacggatatatttttgggctgggatccgtaagaaatcgcccattgatttgaaatctcgatcattacagggaaatatcaacctcacattcccctttttaagacactgacggctccgcacagtccgcggcgcctgcaccgattgtgaagaagcgtgtgtccttctcggagtgtgtccatgccagatacttccgaaggtgcgttgtgtgggcacatggcattcaaatgcagaaaggggatttattgctaaaaacgaaatgccactaa

SEQ ID NO: 83938 - DNA, 799 bp, Heterodera glycines
atggacaacggctggtctccagaggagttcggcaactgtgattggggcggtaacaaccggacggaggagttcggcaactgcgattggggagacaacaaccggacggaggaattcggcaactgcgattggggcaacaacaacaacaaccggtcggaggaattcggcaaccgcaattgtggcaacaaccggtcggaggaattcggcaatcgcaattgtggcaacaacaaccggacggaggaattcggcaaccgcaattggggcaacaacaaccggacggaggaattcggcaaccgcaattgtggcaacaacaaccgatcggagggattcggcaaccgcaattgtggcaacaacaaccgatcggagggattcggcaaccgcaattggggcaacaacaaccggacggaggaattcggcaaccgcaattctgggaatggcactgcccagcgacgggatgccaatggcagaaacaacggcggcggaccgtttcgggtgccgtcgccacccccgcagcaggtgaaggaggaagacagcggtccaaacattttttgaaacaccaggccagtcaaaaatagggcccaattttagcccgcccccctcccccccaaaaaacggaatatacggttgtttatgattgtaagtttgcgttttccaggtgccggtgccaccaccggtcactccgcttgacttttgttgccccggcactgagccttcgccgcctgttcgatcgaatatcgtttacgtggacggaattgaggattacaaacacagtttgcctttgatgcgtattgaggaggtttga

SEQ ID NO: 83939 - DNA, 724 bp, Heterodera glycines
atggattttttcattgttactctgctctaccatttgactcttaacctagatgtaaatgcagcacctacgaagccgacaaatctgcgcaacttaaatctttccgaatggcaaaatgtgtgtactttaatcgaaatatttcagtttttattaacgttattacgcattaatttaaatttataattggttccctttatttttgaatatttataactttcacttaaataattaatgagtattcgaaaggttttttaataaattatatgacatttgacattactcataaatcaaccatagaaaaataataataattaaaaatatataccaaattttaaaacttttatttaaaaatagtcaattactagaaatcaatgttaggttaattcttaatacagtgagaattcagaattattttcgaatattcctctgccgaaaaaatttagcattaaagaaaaaattctctatcaaaagtccttcggcaatgaaaagtacgctatcaaaactcctggagccatcatactgaaaaaaataaatttataaataaagatcaaaaattaattaattcataatttcaggtggtgcaagtatttggaattgatactgatgcgtcagccttaatgggatcaagaaaagagagttttttaaattttttatgtatgataaaattaattcattattaaataggattggcaaaattaacgttttggaaaatttataaagttaaata

SEQ ID NO: 83940 - DNA, 385 bp, Heterodera glycines
atgtctgaatacgccaggttgttggaggctcgctgtccagcacttcatgaagctggacatgcggctgctgctcgcttcaatcggcatggtccgcgagttcaattcgtgagttaataagaaaaaatatttatctgtttccactctgatcaatgaaagaaaataatttaaatatgaagaattggattataatttaaaatatctaaggaatccaaggattaattattacaagagcccagacgggccccggtactagtgctgctcggatcaaaaatttccagagactcgagaatctagaccgatttcaagactataattttaccaaaaatcaaatttttttttaataaattttttccaggcttaaaattttttgtttttagcaaggcta

SEQ ID NO: 83941 - DNA, 1483 bp, Heterodera glycines
atgaacaacaacggaaaaaattccaacaattgtgactctgcggatgaagcaaggcggagtaggaaacgcgatcgggctgatctcctgcacgaagtcgagatggacaaaatccgtgaagagcagcgccgccgtaggcagagacgaaagaatgaagaggtacaacgtcaacgtgctctccttcgccttcggacggactaccgtaatgcacggtgtgcggtatcaacaggacaataccgtatgtcgtgcactggtacgacaacttttgtggcaattcctcaaattgtaagtttattttttcattaaatgattagttaggagggtttaacgaaacaaaaaaatcaaaaataaggattattaaacggaaaactaaaatatggtacaactcaaaattttgaataattgacagggtttgagaaaaaaattttttaggtgattatcaatactcattattgcatttttttgttcataagctaaatatgagtcgtttttaaaatttttcacaacccaaaatagttgactgttggaaagatattatagttttgctgatgctatcggtctaattcaaaattttggtaaaaccattttttgtgtctctctttctttcatcaaatatctgcaagatagatagacagaaaaatcctaaccctgataatatataattaaacgattttttaaacggaaattttcaccaatttttcaaacacactaattcaaatttttataaatgatcatcattgtataattaatcgagaacaaacaaattttcaactaaaatgataataagcatttaagtaagcatcaaaaatgctaaattaagaatgagataaacatgaaaatggtaaataagcataaaaaccaaaaaattttttttgttttaggcatatttttaagttgacaataaattcacatctttcttatcgtttgacattcgaaatttttcttagcaaatgacaagtttaaaccaaaaatttttagggatgaatttaaaaaattttcaatttatgatggatttattgtttaatttttaggttgcttcttaggagtgtgtttttgtttttattagtgggagacgttattttattcaaaattgtacaaaaatatcaattaaacacaaaaataagcccgaaaatattaaatttaaaaaaaaattttaaacaaaacaacatgaaaaagtaggacctagaccctcaaacaatgttaaaaaaagaagttttttttcatgttattagcatcagattcggcaattctatgaaatccggtctcatgtaattagtagggttattataggcgcaaaaatctcgaaatagactcctaaaatagaaagaattggaaaataggaatttaacagatattatataggtaaataattttttttattaatttcttataattattttagggtcaatctcgcgggcagccggcaatgccatttacgttggctttttcgtacgaacctgcactgccgattggggcacgcagttga

SEQ ID NO: 83942 - DNA, 736 bp, Heterodera glycines
atgccaacgcccacacaccaacatgtggcacttggaggatggaagcgcgagcgtgttcggctccgttcccaacagaacctgaaccgtctgttcgtccgtccggcgctgtccaaagaacaactcaaagaggaatacgaagcgcgtctccgaaaacgtcaacaaaacccagctccaccggcacctccaacccagctcccaaaaacgacgaatgaccagactcccattgttgcaccaaaccagaaggaggccagcgaagacatgtccaaaccgccggaagtttttgaccaaacaatcatcgtttgttatgaagcattaaaatcattgccaccaaccgacaaaatttctcaccaaattcaatcactcaaagaacaataccctcatcttttcaataaatagttctttcagacctccaaacatttcctcaattaaaaaaaatacatttgttccagtacttctaatttctctcaaaatttttcctcaaaaaaaaaaaaaaaaatttttttttttctctctttttttaaactcttaaaaaaaaatttcttttcgttggaggtctgactatatttttctccaaattcaattgtcttatttcactgctatctgactttatactttccaatcaaatttcacaatgttttcttcagtttgttttcttttatcaatacttcacatttgacctcatttccaccaaaagtgtaagtggcatatgcccttcttttggtatttttatttttga

SEQ ID NO: 83943 - DNA, 101 bp, Heterodera glycines
ctcccggcccttcttcttccatggaatttgtacttagcgcatgtgtggacaaaagttcgggtaaaagtggtgaatggttcactctccgacccgacaaaacg

SEQ ID NO: 83944 - DNA, 829 bp, Heterodera glycines
tcagatttgaaaatgctgtgcaacattttaaagtgctaagggacaccaaagttggccaatattacctgtgggcaaaacggtttaacagtctgaatgaactcattaactatcacaggtaaagccacaatttataaaaatttaagttgcactaaaagctttctgattggaaataaatgtttctttagggccaatagcatatcgaaaacccacaacatcctcctccggtccatggactccgccttttccaataaacatggccttgttcaggtgtttttttatttattataaggacctgtccaggggagggcgtgcaattgccccccccccacctcccgaaataaaaaacgaaaattttcaatttaattgaaactaataatttaagccctttgtagctcgctaatgctaattcgtagtctgaataacatttcattcgctttatcctttcaggccctcttcgatttcacccctcaagaagcgggcgaactcggctttcaacgtggcgacattatcacgggtcctttcacaccgtccattttttcttagtgtcttgttttgtgtttttagtgacaaaacgcgaagacgaaaattggtgggaagggacactgaacaatcggacgggcgtttttcccgccacttatgtgtaagtttatgaaagggcgaagaccaatggggaaaaagaggagaaagtgggcaaactgtgcgtttctaacagaatattgtcagaatccacagcaaatgtcttttttaaaggtctttgtttcttacagatgcccctacaatagcggatgaggtcgaaccaaaaccttttccatctccgtccctgtcgtct

SEQ ID NO: 83945 - DNA, 684 bp, Heterodera glycines
atgcacaaattaccatccgggaaggaaggacaactgctgagtgccaacagaaagccattggtcgaacagagcgaacgcggcggaaagattggcaaaacggtgggagtagcgcaaatgggtgggcaaaagtgcctggaaaaagcgaatgctttgtcgaattggtggccggcatcgcccacggtgtatccgatgagtcgatgggtggaattgtcccaaatgagggtgtcgttgtaattggtgaagagcacggatgtggaatggcggatgcaactgtccaactgtgcgtccacaaagtgcggactctgcacattacagcagaccgattcagcagaaggacgagacgcgcagctcagacgaacactccaatccaaaaaccttggaaaacatgggctaattagataattaaccgtcccaattaacagacaaatgaaaggcaatccaatccatgccctttgggttcctgaagacaaacaaattacctttcaggccaaaatcgggcactatgttcaacgaatggaagtgcacgcatctgttctaactgttgggccaaagctcgaagttggccaactgtccgcagatggaaatgattgtcggattccaattgagtcggcagagaattggcatcgaagtaaaatttggcagagattgcccgaattccctgaaatgaattgctgcaatgattaa

SEQ ID NO: 83946 - DNA, 1669 bp, Heterodera glycines; identical to SEQ ID NO: 19200

SEQ ID NO: 83947 - DNA, 855 bp, Heterodera glycines
atgtccaccgaatttgaggagaaattccgcaaaatactgaaccgcgtctaccgtaccctgcaacaatttgaaatccgtgaagaggtgggtgtacggtagacggggataataaaatggaatgaaagaaaaaattaggaaaattccgataataggcctactcgagaatcgagactgaatcagcggaatgcaatccgttttcttacctcggggagtgggggaacggtgccctgacatttgcggccgcgacatttgcgttccccagccaaaaacggcatttgcggccggcattttgcgcctcggacatttgcggcctcgggacacgggggtaacgagctattcccgattacaagaaacaaaaaaaaacacacatttctcggcacggaaatctcattcaacaataaacaacattgattgctgctcccccccccctccctcgaaatgaaaaattgacgaaattttttgaaacaaaaaaaggtggctgacgaacggcgtcgcattgtgtggcaatggcgcacattggcatcgatcattgaccgctttctgctgttcgccttctccctgttgacctttttgactgtcactgtgttcattgttgtgccaattttgttccgcgatcgttttgcatcaatgcaaaacaatgcgtaactaatttcaggcacattgcttttcaattttaaaggactgtccttgaaaacaaaaaatttagacgcattttctctggcattaaaatgtttttccccttcatttttcccaatttaaattcaatttgactattttttctattagtcacattttaggaaaattaatttcaattttttatgtaacttatgtaaaacatgcattaaatataataaa

SEQ ID NO: 83948 - DNA, 2465 bp, Heterodera glycines
atgggcttctttaaaaatgtgcatcgcggcaaccaaagagggaggattaaaaaacaaactaattttcgaaaaaattcaaaaatagcccaaaaatttggtggaaaaaaacagaaaattgaaaaaatagctccggaagatgatgaaattccttcctcatcagaggaagaaagtattggagatgaacaagttgagagacatgacgaggatgaggacaacgaatatgaagaagacaaccagacggtggcgtaccgggaggcgaaacggttgttggaaagccttaaggtgttcttttcatttggcttttattcactacttttttcattaacgaacccatctttatcgactcgttttaaatgggaaattgaaattttttaggaaattttgaatcaaatttaatgggttcattaaattaatgtggccctaattttctttgttttagggtactcgcgatgtggatgaacatgaagaaggagctgaagaggacgatgttgaccagcaggggattggcgactcggtggcgcaacaacttcgccaggaggcgctagcgaaacaggcgaaactgcaccgggccgttgctgcacacgtccgtttcggggcccaggcgcagcaacgaatggtcgcacaccgtggccaccgattggcgcccatttgcgtctgcttttcgacaagcggtgctgtgctggttagctgttccaaggacggagccgttgtcaaatgtaagtagcagcaaaaacggacgatcgcaaaaattggacggaatttttcaagccgaaattgatggagttgtttgggaataattgattttaaaacattttttcttaaattaattccagtttagttgacctaacaaaacggtgtcgtactgggattcttcgtccgacttccagcagttcaaaaatcaaaaacctcgggaaaaaaacaaacgatgccattggtgttaattgtcgggaacggcccgattctgagcatgacgacaatggcgcaacaaaggcctatgatttgtcaccggcattgtgttgtgctatttcgccagacgatcaatttctcgtaaccggatctattgatggttagtggccattaatacaaaaatccatgaaatagcatttttactgcaaagtaaggaacctttatattgggaaattcatgcctatatttggtaatatgtgcatttctgttttaaaaaaatggatagaaatatcccgggtccacccgtttccaggtttgatatattccaactacttttctcgccccttaggttggttcgcgtttggcgtctcgacacactttcgccggtgcgcactttcagcggccaccgcgggcgcgtgaccgcgttgcgatttcgtcgccaatgcgtcgcgttggaattgttttccgccagtgccgacaaatccatcaaggttttttttgtcggcggaaaaactcgaaccaacttttcaatgcatgaagttcgcttcaccatgtgtttttctgtccctcccattctttacagtgaaactttattccaattccgaatttattgcaaaatttaccttacagtccactaaccctcatgaataagccgagagaccagcccaattttacggtcggtctctgtgcagaagtgaggaaaagcatttgctggtcaatgccagtgcaatttcttgcactctctgagaaaagaaattgcatttttattgtccacagaaaattcacaaaatttgtaacaaaaagaacacgatttattgggaatatttcctattttttgtgctaaactgtctttgacgatttaaaggtgtggaacttggatgaaatgggcattgtgaacacgctctacggacaccaggacagtgtgctgcatttggacattctccaatggccccggttggtcagttgcggagcaatggttggtcgccaattttcatgttcggaaccaaatattattcacttttaggacaaaacgtgtcgtctgtttaaagtgttggaggacagccatttggtgttcaacggattggcggagtgtgtgagcattgactgtgtggcgatggtcaacgaggagcactttgtgtccggcagtgttgacgggttggcatttttctcgacaatttggattggtgatcgggggggggggggaatgagttaccatttaaatttcagaaagggactcaaaaaagttaaaattcttttttggttttataattcccttttttgctcattttcctccatttttaatgtcaggtaaacgatttttctactaacaataaattatatattctcatattcaagcggcaatcccccttttttctgcacagttccctttacgtgtggacgacggcgcgcaaaaagccagtttgtgtccgacggaatgcgcacaatgggacagagccatcaccgccacccccgccttactcctcctcctccttctgttcattttctgtccatccaaagaaggcaatggtgggcataaacatgggagaacattacaataa

SEQ ID NO: 83949 - DNA, 391 bp, Heterodera glycines
atgcccaaacaagtgtgggagtggtatgattacactggtccgttggtcgtatggattgtgttcttctccgttatttttgtcatctccgtcacgtgcattttgtggtgctgcatcaaaaaagacgacgaccccaccgtatttgcgaaggtcgtttttatgcaaacaaaattggcagcattatttaattttaccgtaattttttaatttatttttttcccttttcagtagtgcagaatcttttgaaggcccgaaggaacaaaaagaaaatgtggaagacaagaaatgaacaatggcattgcaatttcattttcgacggggttttgttgttaacaaattgtaaaatgttccatctggttttttaatgcatgtgagcccagatgataatttcaaa

SEQ ID NO: 83950 - DNA, 782 bp, Heterodera glycines
atgtctattaaacaagaaattgatctcctgccgaaggacgaaacacaggaggaacccccgttggactcattggtgcattgcacggaaaagcttaaaaaagtggttttctcattctcggaagtaaggcatttgaggaagcacgcaacgattagacaatgtttggtcggctgtttggcagcatgtaaacggaaactcacagagactgtgagtagaaatctcaaaatctgaaaaccctaaaattggcttaaattttttcaggtgatcgttgatgaagtcattttcgtagaccaaacatacgtcatgttcaaacactcggagactcgctatttgttcgacaatttggattacgttcatattactgacaaagtttttcgacaatggatcgatgaattagtaatgagggtgcgttttttgtgccgttaacacaaagcaataattaattattcattcattttttaaaggatgaaccgttgccactgtacgcacattattttgatcgtaaaataaatttgctgaaaatgtggaaagagctcaaagaaattggtttttttgacaaaacggaacaaccgaagaacgacggcggaacaaatttacaaatggaattagagaaacaatttgggattggcactcagcacattatggtcaccccatggcatttggtgcaactgttgcagcttagccgcagagaatttgaacatgtcgttgtcggactgtacgtttgctgcgtggtgagttcgtcattctcagcaaaaactgcgttaattaaaatgccaattcattga

SEQ ID NO: 83951 - DNA, 1251 bp, Heterodera glycines
atgcccaatgttggcgctgatgttggcggtttcttcaaaaatccggatgcgcaactgttggtccggtggtaccaggccggcgctttccagcctttcttccgggtttgtttgtcctgtttactttttctcaaaatttactgctatttattcgattccaacagcctattataactcttttaattgtccatccctttttaaaatcacttttttggtaggcccatgcacacattgacacaaaacggcgcgaaccttggctgttcggtgagcgtgagaaagcggccatgcgcgatgcgattcgaatgcgttactcctttttgccttattggtgcgttaaaaaatatgcgggttttgagggcattgtacaacagtggcattctttgtgtccatttgtccaggtacacattgttctacgagcacacaaagaccggtgtgccgccgatgcgccccgtgtggtccgaatttccggaggacgaggcttcctacgatgaggagcgcgagtggctggtcggtccgggccttttggtgcgtccagtggtggagcccgacgttgaacaagtgtcgctgtatttgccgggcaaagcacaaacatggtaactgacaaatcagtgcggatcctttaatgttggcacattaggttcgattgggacacacatcgcatttatctttctcccggcgcaatttacacggaaacaccgctggagaaaatcccggtctatcagcgtggcggcaccatcattcccgtgcgttgtgctttttcttgagattgggttcaatttaaattgatttttttattaagttgagggagagaccgcgccgttcatccaaaatgcagcgcaacgaccccataactctgtacatcgcagccatggcggatcgggaatttgccaacggcacactgtacttggacgacggcgaaacgcacaattaccgggaaaaaaatgaatacctttactgggtcagtggtgattatgataaataacatttggtttaatgaaaggtagccgattttggggattcgaattgagcgccaacgcacacaaatgttttttatatgatgaatgattccagggattcacttacaaaaaagtgagcgaccacacctactcaattctcgccaagagtttggacagccgcggcacttttgacccggacgtttggattgagcgcattgtgattcgcggactgcgctattacccacgaaacgtgcacatgtactacgagggtcagttgttttcgtccctaatgagataa

SEQ ID NO: 83952 - DNA, 319 bp, Heterodera glycines
gtttacattcttttgcgtgccagcggagcactcagcgaattggcgccgattgacgtgcacacagcagtcaaaacgcagggaacagatgtttttgtggggggagcgtacgatggcataaacaacagcaaacgaatatcggatgaacagaatggaattgagaaagaagaagaggaagagtacaacgatgaagaaggagaagaagcggaaggggagaaggaggacagaaaatttgcaacaatttagccagctcatgtgattgtgaatatttgttttgtgtttgtaatttagcacttctttaatcatttaattaattaattta

SEQ ID NO: 83953 - DNA, 253 bp, Heterodera glycines
ggcacccccacaaagtgtccaagccacgaaatgtccaaaagagtaaaaacccacgaaatgtccaaaatttttcaaaatttataaatacaaaatgagtctaatttaggatttttagggttttcggggtcgctgaatacgaatataccctttatattaccccttgcctaaccttaggcccatctgaataataaaaaactcaaattcgagacttggacatttcgtgggctggacattttgtgggtcagcgacagaa

SEQ ID NO: 83954 - DNA, 1040 bp, Heterodera glycines
atgacccgtcctaacacaggttggtggccacccacaggtgttcaaagcattcaaatattcaagtttctattattttcgtgaacagcaacatttttcggcgctaaaatttcatttttggccattttacaccaattttctgatataatgaaatttcataaaatctctttaatttttctaaaatctctttacattgtgaatttattttatttttattattttcgaatgagctccagtagaaagtaataaaattttatttaatcattaatttaccaattggcaattattttgtcattaagataaaattattattattatttctttgcaattaaacaggatttccttattttattaagtaaaataatgatttattcagttttttaatcagaaaaaatcatttaaatgcctcaaaaaatgaattgccatttaattgaagaaaaataaaataaaatcatttcgagacgacaaaaatgaaattatttccgctacttttattaattatattatttttaattgtcaaaattggatcagaaaagaaaaaattgcaacaaaagtcatttggcgaaatatttggagaaaaatggcaagaaaaagaagaagaaaaacgaaatgaactcaaaaaaagagaaataattggaaaattttataaaataaaagagaaaataaagcaaaaaggaaaataatattcagcaaaagaatggaataaaattgatggaaaaatagcgaaaaaaatggggacaaatcgcacatatatccaacattggaataaagaatttggtcttcaaaaactcaagtcttacaaatcaaaaagtgatgaacaaaaacttgaaattgttcaaaaattcattaaaatgaaaaatgaaataaaacaacaaaatagaaaatattcattaaaagaatggcgccaaaattatgctggaatttgtaagaaaattggagttggctatggaactatttgcagatggaagaatcaatttggcattagctgtaaaataacggaaaaagaaaaaactggaaaaaattaaaatttattggaaaataaa

SEQ ID NO: 83955 - DNA, 1009 bp, Heterodera glycines
ttggatttgcaacgacgtttggatggacattttcccatcgtttgaccatgcccaactcggcctcaaattggcacttctttcgccacgtttcaatgcgttggtggacaaacatttcgatggcaaaagcgaattgacaatttggaaaacaatcgaaattcgcaaggacaaaggaccagaaccgaaactttatgtaaagatggatgacaaatttgtgccatttccattgccagacgaccgtctgttgcgcagcaaaattcgctttaaatgccttcatattgagtaattaaaaatctgagctatggcaataaaagcattcattccctttttgcagttacatcgatcactccgtcatcgcttttcttcgttcaaatcaccaaattttcgacaaaagaggcaccaatttagacttgtggattccatcaccacacaccacggatggccagcggatttgggatatttttgttcgcgaaatttggccaattttttcggaaaatattcatcacttgggcttttcccatggtgatcatttggacaatttgcgtcttcgcacttcgccgacaattctcaccgacctcaaccaattgaattcaatcgattcatttgttctgttgcccgctgcgattggtgatgattttgatgggccaaatgcaacaatttctgctggccaatcattgtccaaatggttgcactctccgagaaaagatggccaacccaaacaattgcgttgcggtggtattaacgaacaagcgaacactgattgggtcaacaatttcaaggaggtgagtggccacattttcgacaaatcactgatttttgttttcaaattgttcagcattttctccgtgccaccatttcttcggtcagttaccaaattcatttttatgttcatgtgtcgtcaatgcaaatggtgccgtttgaattggtaaacgaatggacaaaggaaaagctgacattggccaaagcaatcaaaaacggatttgaggacctattgcggttcacacgaccataa

SEQ ID NO: 83956 - DNA, 459 bp, Heterodera glycines
atgaccgcgatgaagactttggagaagaacatgccatcatcaaattcgaactcggaaaaactcaaaagggaggcaattgtctttggtccgaaggtgggaagtttattgaaaaaataaataataattatattaaggcttccggtatgtacaaaagaaattggtggaactgctctgtgaggaactgtcctgcgcgcgtgacaatcaccgacaatagcgacaaaaaaatgtgcggttatcttggccaaagagaccataatcatctccctgagccacaaaaacaacaggtttgggatgctcattgttaattcaagtctgctaacaaaatttaggcagaaagtcggcgacaaaaaatactccagtgtgtgaaggccgaaccactctcatgcggcttctgccctcgcgaggaccaacaatggtctcgaagcaacccacctccatttctcagtatttgatgtgcta

SEQ ID NO: 83957 - DNA, 227 bp, Heterodera glycines
atggaagagttgcaactgaacatgccctaccgtgttcagcctcactttggcgacacacaagaattgttgggacgaggtaggcaggcacttttaaaaattgaattataatttaaatttatggaattggcacttttaaaaatcaatttatattaaaataaatttaaggcatgcatcccgtgccaaagagtgtggacacggcggaaccgttgcgtgccgaaatgatgtac

SEQ ID NO: 83958 - DNA, 113 bp, Heterodera glycines
atgcctaatgcagttttttgttcattgttggcaggtgtcgcttgtgttattgaaattcattacaatttcgattacactgacattgaatggacaaaaaatggacaatggtggca

SEQ ID NO: 83959 - DNA, 1049 bp, Heterodera glycines
cagagaagggttaaatgggagacatctaatggtgaatgacacgggaacagaggagggttaaatgggggacaagcaatggggaatggcgcgggaacagaggagggttaaatgggggacattcaatggggaatgacgcgggaacagaggagggttaaatgggggacaaccaatggggaatggcacgggaacagaggagggttaaatgggggacaaccaatggggaatggcacgggaacagaggagggttaaatgggggacaatggggaatggcacgggaacagaggagggttaaatgggggacaaggggaatggcacgggagcagaggagggttaaatgggggaccaatggggaatggcacgggaacagaggagggttaaatgggggacaacaatggggaatggcacgggagcagaggagggttaaatgggggacaaccaatggggaatggcacgggaacagaggagggttaaatgggggacaaccaatggggaatggcacgggaacagaggagggttaaatgggggacaaccaatggggaatggcacgggagcagaggagggttaaatgggggacaaccaatggggaatggcacgggaacagaggagggttaaatgggggacaaccaatggggaatggcacgggaacagaggagggttaaatgggggacaaccaatggggaatggcacgggagcagaggagggttaaatgggggacaaccaatggggaatggcacgggaacagaggagggttaaatgggggacaaggggaatggcacgggagcagaggagggttaaatgggggacaaccaatggggaatggcacgggaacagaggagggttaaatgggggacaaccaatggggaatggcacgggaacagaggagggttaaatgggggacaaggggaatggcacgggagcagaagaggcttaaatgggggacaaggggaatgggcacgggagaagaggaggggtaaaatgggggccacccattggggatgggacggggagaaagggagggtaaatgggggacaacccatggggaatggcac

SEQ ID NO: 83960 - DNA, 2209 bp, Heterodera glycines; identical to SEQ ID NO: 19218

SEQ ID NO: 83961 - DNA, 624 bp, Heterodera glycines
ggaattttcgaagccgcttatcacgaatagagaaattcatttcgacatatcaaatcccgatcctgaattcagacaagagtcggatattcaatttcgaatttctcacatccaaagttataatgcattttggctgatcttcgagtggagaagtcattaaggccttattgagaaatagaattttcagttattgtctcaattcagattcgggattcgaacttgtacgaaatgaatatattcgtgttcagtgctccgaaaccccgaaaacattctcaatttttttgccagagacaccatcggcacaattagcattttttgataggaaaatgtattttacgagcagcaattcatcatcaaatgacgaagtcgaagaacacttcacccattttgcacctgatcagtgtaaaaatattaaaatgaataaaaaaatgaaaaatatcccaaataatttaatttattttagcaatttttccaaatttgagtctgtccgaggaattgcgcatcattagggctcggatggcgcgaattttggagaagaaacgaacaaaaacaatgggaacatcgtcaagaggcacaagcgatgatgtgaccgaacagaacaccggtaacaaaaatatgtttcattag

SEQ ID NO: 83962 - DNA, 1340 bp, Heterodera glycines
atggacgatgatgatgatgataattgtgatgacgtgagcagcagttttcacgaggataccaagcagcaacagcaatacgagaagagaaaaacaacaaatattggtaaagcaaatgagaaaaagaagttaaaaattaattatgaatacggtaccaaaatatacatatacggtaaatcaatattaggacataattgatgattactgtacccaaaactatacggtaaatccatcagtaaaatttgaattaattgtttagcttttgacgttcaattcaaagcaattttgaaaagaatcactgagttggagaagaagcaacacaaacaaaatgaaaaagtgacaaaaggtaaaggaatttcgaattattgaaaattaaaaatgagtttttatttagcattggttggacaaatgaaacaattgcaaaatgatcagcagaaacagttggagagaatcagcgaattggagaagcagcaaacggcgattgttgatcagctgcacaccgcccaaaagcaaattggtaattaattaattaatacttgaattaataccttaattaatcgataggaatcgaaggattaatatccctaatgagcagtataaaacctagagatcagagaaattccgattttatgtcctggaaaaccaatttgttcacatttttttcagatgatcgcatttctcaaccccaaactgatcagcaaccgatggaactttgtgccaaaattagcgaattggaaagcaacacaaatctattgtttggcaaaattttggacgagttttcagagtttggcaattttgtgggcattttgaaggacagattcggaagaggtaaacaatcagattaataactgatcaccaacaaaattaattgaaaaaattaaaaataaaataaatttttaataaatacaaaattacgagaaaatcaatgaattcaatgcatttaaaaatgaaatatcatataatttttactcattaagagttgctaaattcggtccatcccaaaattcgtgcgaaaatttgtgaggtgaaaattttataacaaaataaacgaataatataaaaattcttttcagaaattttcaaatgttcaatcaaattgttgggatgcaaatgcctgccacaaaaacctccaaatttttggctccgaatgtttgataattcattataaagaagctgaaagtggtaagattaattctgcttaatgattaattaccgaatttcttctcatttacttaattgttttttcagcttgggtttctgtgttcgctaaatattccgtcccgagcagtgaaatcggcggacttttctatttcgaagtgaaaatcattaatttgagaaagtag

SEQ ID NO: 83963 - DNA, 892 bp, Heterodera glycines
atggcattttgtgaaaaagcggagggactgaactgctatgtgtatcgaaacgaaggcgaattttggacgcattgcacaagcaaaaaaggaaagccgaaatactcacgagacgatgtgatcggatgcggcgtcaatttggcctcgggacggatcattttcacaaaaaatggacaaccgttgggttggcaaaaacaataaattacttaatttaattttggggactcaaatgccttttaagacaccgccgatttgtttgtttgtccatcctctccttctgctaatgatgctgttgatcatcggttgtttccatgcgtttctttggccgactcgggcgatttaattgaggcaaatttcgggcccaatttcaaatttgaccctgccaatgccgaggtgtgtatttctgtgttgagcatagcctagtaaatttttatttcaggaattttcgaataccaaacaaagaaattgctgggatttagccgtttgtcacaatgaaatcacaatttctggcccacacaatttgattgtccgtcataaaggaagcggaaacggtatgctcctactgtatttacaggaaatttaaatatttgttaaaatttaaatttttcacaaaggttggcgttctgtgtttgcaaaatattccattttgcacaatgttgcaactgagtccattgacatgttttactttgaggtgaaggtcaaaaacatgaaaaggtaagggcagcttgtgctaattaagaaaaaaccctatatagatatttcacctatatatctctaggattaaattttggggatttaaacgataatttcttttttttgattactttcttacaaaatttgatttttataaatttaaaattttgtaacatccaaatcgaagctgcataatgccgaa

SEQ ID NO: 83964 - DNA, 995 bp, Heterodera glycines
atggcttccgcggatgagtatcttcacatcttccatttccttcatccaaaattgcttggcgttgatctcgctttacgctgcaacctttttgatgccattgttgacgcgcattttttgtcaagaattcggaccttgggcaccatggaaattcgccaagcaaccggagaaaacggagccgacgacatgcaaattctcaatggcactggggaattgctgcccattgctgacagaccagtgccccatcgtgtggttggattcgaaagcattatgatctcgtaagcacgaataaattaagaatttgacctacaaatatgtgtttttttttattttcttcagttacattagcccaactgtcgccacatttctgcaaaatttgggacatcttttcgcctcatgtgactcttatttgttgctcgaaattgttaatggacatgtgttggaatttgtcattcacgtccttttgccgctcatcaaacagaaagtttatcgcattgaattcgatcctaccggacagaatggtgacgcattccataaattacgacaatacgttcctggttttctcaacgaatgtccatctctccgtgtcgacttcgagaggtgaactgtccattttttggtttttataaattaattttatctcttttttttagctttttttgagtggtgcttcgtccgcagtcaatttcattgtgcttatgacgttaactcgtggttctgtcaagccgtttacgatcactaacgatgtcaccagggaggagttgaagttggaatatcgtaaggaccacggtctgttgcttgtccggtgcccaatttcgcgcgacaaagcaaaatggaaagcatatgaggatggggcgttggaaggagcgatgaaccgaaacactatttatgttttaaaaaattgcacaggcggctggtcagttttatgaagttttatgggacaccatcagcaaaaactttaaaacccttgtgcttaaaaatgtgtattttcttgaaaa

SEQ ID NO: 83965 - DNA, 1134 bp, Heterodera glycines
atgccgtccagcaaaatccatggacgccaagctgtgagcgggaccaacgacagaacaacaattcaaatgatacgggaccatcaaattcttaccgcaacttttcaaacagcccacatcgtggaagatatggacaaggacgtggtggcggcattttcaaccaaagacaaagaggccgaggaaattggagaggaccaaacaacatggctgaccgcagctggaatcaacgaccgtactgtactttttgtaagagaacaggtcacatggcatataattgctttcagagaaaaaaccaattttccccaaattcaggacccaatctaaatgccattcatgactcttccgaatttcaccaagatgccaatcgtcagacatcaaatgtcacattggacatcaatgaattgctcagagcattcagtgttatgaacacccaaggcccgtcttcaagaggtggaaatgaatctgcgtcaatgaatgtcattagcacgatgcctgctgatcatccaagaattgccgaagacgcttaccaaggaacaggtggaactcagggtaatccatcggaatcgaatgaccaacataaaatctcacaatgggaagggatcggaccaaaattatccaaatattttatgattctaacagcattcatgttacttattaccggtcttattaacaccactaccgctaatgctccaaagcaccccatggtatgtcaaatggtaaaagacggaatactttggaaaattcctaatttgtcaagctgcccaaagttctcattggattacatagaaaatccgaaaattaaatcacttcgattgtacactccaaatgttttcgaacatcaaaccccggcttggtcatgcagaaaaataagaaaatcaatcaggaaatatacaagtcttacaaatgttcccatttcagaaatgcttgaaccaattccgcttgaaattagttcagatgaatgctggcaaatgattcgccatcgtaagtgtaaattggggggtactgattgaagactcgagcttatggcacactgatttaaaaattgacaattcaccccgccattggttaattggcccatggaattgggaaactttttttattgatatttggttgctaaaaaattggccccgggaataa

SEQ ID NO: 83966 - DNA, 621 bp, Heterodera glycines
atggcggacatggacaaggaggattttgtcaacttggaaattgagccaactgcagaaacgtaagcaaaagtgacgcaattatatatagagattatggaggaaaaccaaataataaatcattcatttcatgggcacgactctctcttttccattgagataactgacgatgaatttaaagaattttcaaattaatttagtccctcgggccgcgaattcacatataaaacttttttaaaaaatccattaacgaattctccgctaaaatattgttcacaatcagcaacaactattaattatccatacacatttgtaaggatgctgtttggagatgaatgttgcaccagcagtaccgatcagtgtaagcaaccggaagccaccgaagaaatatttgtgagcatggcgaaaacgacagcaacacaaccacaagcagggcgaggaggacagccgagaacgactgattcgacgacaaacgctccgaagatgttcagctctaaattgacaaaaaaggcggatcattacaaatggcctcggggacagacggacaatggttgcgatcagaggaagaagctgatcggaaaaagtagcataaagaatgggtggaagaatgtgaaagcagcacca

SEQ ID NO: 83967 - DNA, 1354 bp, Heterodera glycines
atgccaaaatatgtgcaaaatatgtgccaaaccccgaaatatgtgcgatatgtttttatgtgcgaaaacgccaaaatatgtgtttttatgtttttataagtcgctctaaatcgaaaattgttcggagaaaatgctatttttgggcttctctcgccataattaagccgcaaaaaaaatatgttaaaacataaaaatcccagccctaattattacgaaaaacaacattcacttagtgatgtttaactttttttctgcatgttaaatccaccccaaattttgaatatcgatagagaaaaaaaatctacatagtgtaatacagccattttatattttatacactttttcatgagatatgttaagatttgtaataaaaaattattttgtgattcaatggccaaattaaagcgaaatataaaaagagaggcggtgaaacagcggtggcaaaagcaagaggagagaaaagcgcagacggccaaggcgatacaagctcgcctggccaagaaaagtgagttaagtgatttttaactcaaacatctttttttaatttcagacgctccaccttcgacgaacaaatgccacaacaggacgaagcagggccgtcaaattctgctgcatccgccgaagaagcgatggagcctccgccaccaactccaggaccagtgccaacgccagaaatggacgaggaaattttggaatttggcttttcgctgccatcgacatctgtcacaccaatcggcgattgtctccaggtgatttggacggattggagacggcagtcgaccagttcaaggcatttctcgatcaacaaccaatggtgcaaacacttctttcaaaaaagacaaaggcccatttgctgcttcaccactttgttccatttgcgcgccaacaccgatttttggggcttttggatgagcaggatggggccatatcatttttgagggctcaattttaaatgttgtgatttttcaggagatgaggcactgcattccgtgtggtggcgacttgagcaactttggaagacgatgccggacggtgtacaaatgcgccaacagctggagcatcatttcgtcccgaattggctgctggacaccgggagatttgacgaattgaagctggtgagttaacggaagggaatttaacatttatccaactaattaagcgggaggaggaacgacgggagcaagcggaggaagacaacgaatgaagaaagtgatcaagaagctgacgtcgatgtcgttgactgatcgaggatttatggtttttattttcattacaagcggtagataaaatttttaaaaatttgaaacaattttaaaatcattttggtcatttttccttttatttattcattaaa

SEQ ID NO: 83968 - DNA, 1619 bp, Heterodera glycines
atggacaaaacgctcgccgatattttggaaaaattgacgcaagcgatcaagcagcagagcgcaccgacatccaccgcaactcagccggcacaaaacatcactttgccggacattcacccattttcaacagaaaatgccgaagaatttgaagagtggttggagcgcttccaatttgcattggattgcgcggtggcaaatatggcggacgaagccaaagtcaaattgctgatgactaagctcaacccgtccgccttcggcgaatacaagcgctactgcctgccggaggaaatcaccaaatttgactttgcggacaccaaacttcgtctcatcaaattattttctcatcctccttcgttagcaatcgatcgctacgaatgcctgcgagtgtgcagagaggacggcgaacaattcgaaatttttgtgaaccgacttaaggcagccctccgcaaattccgtttttcggaattaaacgaagaggaattcaaatgcctggttcttcttacgtcgcttaagtcaccaagcgacgcaaaattacgccaacatatcctcgcgcgtctcacagcagagggcacaaagacgacaaaaacgtccaaattattcgacaaagtcgtcgaggacttaaatacacagctaaaaacggaggcggaagcaaaaattttggagcagccaaagcccaaaatcaacgcaattcagcatggcaaatcatcgccaaataagcaccaaaatcgcggaaacggtcgcccaaatcaaaaattcacgggcaaatcaaaggccaaaataccgccgagcaactgctatcgttgcggagaattgcattgggcccaggactgctcaaagaaggaaaatttttgtcgcaaatgtaatcgcagaggccacatcgatcggcaatgcgacaaaatccgagcatttcaccaaaataagggcacaaatttcaaaacaaatacggtgatactcccagcggcctacatcaattccgtccattcatcgaatctgcttaaagcaccgatcaatgtgaacggcacagcaattggtttcaccctggacagctgtgcggaaatcatcatcatcaatgaagatgattacaacgcaatgggccgaccgccaattcacatatgttcagaggaagcacgctttttcgacggaaagcggtgcaaattcatcggacgcgggactgccaccttcccaattcacggaattcagacaattcagccgttttatgttgccaaatcgggatcattgaatcttttgggcacaccggcaatggaagcgtttggatttctggaagaaatacggcgaatgatcagtcccgcccaaatcaatcaaatatcgtcaaatgatgcggccaaaatccaacaattcgtcgaaatattgccgcaaaaatatgagcaaatattctcagatggccttggcttctgttccaaaatgaaagccaatctgatgctcaaagaaggcgcaaatccaacgttcaagcgcgcccgtccagtgccatattcaacgctgccaataatcaatgcagaattggatcggttggagaaaatgaacgtcatcacaccagtcgagcacactgactggtcagccccaattttggtggtcaagaaagcgaacggaactgctcgtct

SEQ ID NO: 83969 - DNA, 1609 bp, Heterodera glycines
atggccaaaattcttggcaacattgaaaatgatggacaaattttggtcctccgttcggactcgcaaattttccattttattttgaagtatttggcaaattcaacggcagaagagagtgccaaccaaacaaaatttgtcattaaatacagcttttgttttttggcacaatttgttgaagaattattgaaaaaagcaatgaaagtgaatgaactgaaagaattgctaaacattgaattaattggggaggcaattgaaagttttgccgacaaaaaggagcaaaaatgtgccaacaaaaagtgagtgcaatttgacaaattggacaattaattaacctacgattttgcattaattattttcttaagcacgcaaaatgggattaacaaatatcttaatgaaagtatgatggattttgcccatttagcgcatgcaataaaaattgatttcactcataatggtaattgtttcttttattaagcattaaaatttcttaatatgccctatattaagcaaaaagtatcagcctaaaaatgctttcattcatttatgaaaatgtttaaattttgtcattagcgcggtgatttatatggaaatcattgtttttcccctgctggtctttgggatgccttaaatgcatgaaaagcatgcttataagcttcgtttgaagcttctaggatgtacttctatatccaaaaaattgggctttttgtcctcctaaaagtcatggaaattttccaaaaaaaacaaatcctttttataaaagtttcccgaaattatttgaatttattcttaaaattgataaaattatgtcataactaataaaaaaaggtggaaaatttcggttttaggtcattttttcgctaaaattggggaatgaattactcatgtattaataaaaatataatttaaaaattggtaaatgttataaattaaacaaaaatacctagttatttttggttttaatttatttaaaattttttattctaaatcacaccatattagccattttttgaaagtcttggtttgaaattttgccctcaatttggaaaagttatgtgcatatttttcagtttttggtgtttattttcgacatccctaattttgaattccgtttctgattattaatcagctatctcatttaaaatgtttttctaatttgaaaatttaccgaaaatgggggagggacaattcggacacataaaaaattctttattccatcagatttacaaaaaatcgttcccgatttattatttgaaatgggaaaaatgaaagaagagaaaaattggaattatgcagattaaatcaaaaggaaatgttggaatggaaactgatcgaaattgaactgatcaatgaagaaaaaatgggaaaatgggaagcaattgaaagtgcgagaaaggaatggaaagagaattttgatcgaacagtttttaatgaaaatggaagagaaaatggaaaaatagaagagaaaatggaacagctaatggaagagttgaagcatttacaaattgagaaaggaattggacaaaacaaaaataaaaacaagcaaaaggaggaggaaaaggagggaaaagagggcaaaaaagaaaaaggaaaaggcaaagttgaaaattga

SEQ ID NO: 83970 - DNA, 848 bp, Heterodera glycines
atgagcatgtttgaacttctgcaacgtcgattcaattgtatttgtatgttgaccagagacggggtccttgaaattctccgagtggttcaccacgtaatgtgtgtacagctccggcaatttgtcaatacccccgtacgaggcccaaccgtcgctcacaattgttgcacctgcgtgaatgtgttgctgaatcagtggtaacaaagtgtcgtcgtctcgtcgttccactgtcacaataaagcattttccactgccgcgttcaactccaccaaagtaccactattgttcgcccggcaattttccacggtgatatttgttaaaacggtctcgtcaaattaaagcaattctgataataaaaaacaaaaaaaataaaaaataatttgaccaaaaatgtggatacaaacgcaactagtaccgtatttccttaacaaattctttaaattctcgaacaaattcatgacggtgcctatcgacaacgggattcctcgcactccccctccgttgcataattgtaacccgatgaacctttttatataaatttattaatttaaagggaggtgaagccgttgaagctggcacagttcgaagacgattgtgaggattggagcgccggcggaagcagggggcgaaagaagaagaaggtcctgtgctgattgatttgtttccataatttcgtttttcggctcgatttcttttatcatactttatttatattaaaattttcacattttatttttgaaattcaaaattttttatttagatttctcggctaaaaagttgatcattaaattcgtcaaaaaagcaatataaatcccgttttaaatgaaaattattaacaagcacatattaaa

SEQ ID NO: 83971 - DNA, 404 bp, Heterodera glycines
atgcacgaaaaactgagaaacccaattttggacactttgacgcaactgcaaaatgccattggaaaagaaaaagaagcgaggtaaaaatggaaaaaataaaatataatttaataataaaaaagcaaaaataaaattaattaaaaatatatttaataataaaaaagcaaaacaaataattaagaaggtatcaaaaaatgaatacgatacagtcgaatggcagaattgaaaacgtggaatcaagcaaaaaatgtagtaatttggtcgtgatggccaacaaaacggggagcaaaatccgagaaaacaattggaaagaaaaaaactaaccaaatgaattggaattaaattttctagaagattttggcgttggagcgcaaaaaaaaaatgtaaaaaaatatataaataaa

SEQ ID NO: 83972 - DNA, 1954 bp, Heterodera glycines
atgtataaatatttcgataaacaatccttgaaattttctctttttttcttcgcatgttttatattgtgttacgactgtttttgggttgatatacggaagcaaggtaattaaaaaataaaaatgaaagttctaaaatactgaaaaataatttattaagatttaaaaagcctaacggagcctaaatcatattttatcaatcacttcggatacaactttcaaaaaggtatgaataattaataaatgtagtttataaattaaatcttattgaaagcaaaatgaatttaaggtaaaatttacgaaaaatttcgaaaaaatgaaattgaaaaactaaagcaaaagaaaaagcgaaaagaaatggacagtgaggaagtgaagaagcataatgaggaaaaggagaaggtgaagaaactgatggcagaatataagcgaaaggtgaacaaacaaatggaaaagcatgtcgaggaaatggagaaggacgaaaagctaaaggaagtgctgagggaaattgaagaagcgcaagcgaaacacccgggggagaagagaaaagcggcgaaatccatcacagagataaatgagaagcattgggacgaattataccagggggacattgagttgagcgtggaacaggcacagtatttgctggatactgtaacaaaacccgaaaacagagcgttgatgagagcgaagcgaggggcagccagcaatgctagaaaatttcccaatcacaaatggcctattcttgtcccattctcttttgacggctcaatttgtaagtttcaattaagagctgaatcaacatttaaatacctccgtgtttcctcgattattggcccctccattagaacccctactcccacttccattaaagccctcagaggggttgaaaagagaaccttcgggactcgaataaaagaaaatgtactagattatagaaataaataaacgatcaattttttaagccagcgaaatgaaagcgcatatatatgaagctgtaaaattatggaacgataacacatgcttgaatattgttgaggatgacgaagtttctcctagaatccaattcacaaatattaagggcatgggatgcctttcaaaagttggaatgcaatcctcggatacataccaagaagttaaacttgaatacccaaattgttaccaagtaattagtaaatcatttacaacaataatctttaatattttcaaaagcttggaacaattgcgcatgaaattggacacgctttgggattttttcatgagcatgagagatatgatagggattcctttgttacgttttacgctgataatgttgaccccaaaaattattacgctttcgaaaaagaaacgattgagatgacagacaattatcaagttccttatgaccttggctcagtgatgcactataacgcaagtaagcacaaatttaaaaaaacatgttttatgccgagacctattttgcagaaacattctcaatcaatggtgagtatacattggtgcctcgagtgggtgcttcgtatataaacacaattggacaagaatatggtcccagcctcagtgattatattgttataaacaaacattactgtggattagagtttctcccggatggatcaaccataaacacaggcatttacaaatttgtttattgtacattgtttttgtaattaagaagcgtgtcatgttacaatgaactgtgacaatgatgggttccagaacccggacacttgtacaacatgcatttgcccacagggttatatcggagcgaaatgccaagatgttgacattggtggttatgcccctgccagcattgcaaatacttgtgaagggaatattttatttgcaacatcaaattggcaatatgtaagcatatattagggtgcaccatttttacttttcactgatttccatgtcatggtcgctaaaagctttaatttggcgaacccaaagaatcaatgaa

SEQ ID NO: 83973 - DNA, 653 bp, Heterodera glycines
atgggtgcatttggggaaacacagagattagaacagcagcaaacagaggcaccactggagtacggtatgttcagcagagaagacaacattttgttttattaacctgcctctgatgtttttagattatgttgccgctctgatctcggttcatccggaaagcttaaaatcacagcaaaaaatggatatgcgttgatcagtctttactcctttagtgatatacagcgctttgatatacgcttcctgcagtattaacctaaaaactgttgttgtcccgagtactgtggctacttttcatcttgtaatatgtatatattttggcatttttataaatcacgaaaacaagaaagtctgaaaaacattgaaaaataacatctaaataggaaggaccccacttaaaattttatgcattgtaaaatgccagttaaaaacctaaatatttcgcgaaattaccttatattatcgcggacatcacctgtgcgaagagcagataatgcttgaattttctcaactcctttctcaatcgtttatggatgaattattaattcaaaatctatcaattaaataatttcagaaattaattaataaatggcctctgtgtgaattctctgatgattatcgtttaattattaggggcagcagactttttttttgaa

SEQ ID NO: 83974 - DNA, 506 bp, Heterodera glycines
atgaagtgcttacgcctgtaattctaacactttcttattttgtatatttctctaaagtaacaacgattttttctcagctgggatccaaaagtaacaattttggtgaaaacaattaataaaatcaaaaattttgagaattttcccggcgtcgcctattgcaatcgcttgtaattcttttttgcagaaaaatttgcctcataacgaaaatttaaaattagatactgttaaattaacgaaaaaaccgaattctgccgatcattgtccaagccacgaaaagtccaaagtagcaaaaacaccactaaatgtccaaaattctaaaaaagatagaatgatacaacaattttttattctgaataacttcaataattttaagtttaaaaaagacaaaaaattaataagtcgtaattttttttagttacaaattttttagatttttgcaaattattcaaattttcaggcaattagaggacctagtaaagtcgaactataccaaaaaaataatttag

SEQ ID NO: 83975 - DNA, 301 bp, Heterodera glycines
atggccatcaactttggcagtggcattttgccaaatccaaagtgtgaaatttgcgagacagaaataaagccaacggagaagctgatagttgagaagcatacgagtaaaaaataataaatttaaaattatttaaaataaatttccatattttagtgcacatttcgtgctttaaatgtgccttttgtgatgttaaactttcgatcggtgcatgtgcaatggaaccgaatttgttggagcgatttgggcctttgttcttctgtgctgatcacatgtgaaaaaataataatttatgccaaataaa

SEQ ID NO: 83976 - DNA, 104 bp, Heterodera glycines
aggcgagtcggctcggattttcagcgattggctggacgacctattgaaaatggacaaacggacgaaggaatcaatcattttatttgatgtgttttcaaaataaa

SEQ ID NO: 83977 - DNA, 284 bp, Heterodera glycines
atgacaaattccaacctgggtgagcacacatttcagataagcttcctatcattatttcttagaaacaactaataatctgttgaacagttatttcaaataaattcgaatatattagcttattatgcatcttcagtgtgcattctaaaataaaatcattttttgttctaattttatgatttatttgttttctgttgactaaatagtcagttcttatagcaaatattaattttagcttcaaatgagcattctgccttcaatttcgaagggaagtgaatttttttata

SEQ ID NO: 83978 - DNA, 298 bp, Heterodera glycines
aacaaaaagcggaaaatgtccgtgagcggaaaaaagggggaaagatggaaaaattaaaaatctgttctcattcgcttaactttttaatccgttgaacatcttctctctccgattaaaaattatttattaatttcgaattttcgcaccgtaataaatatttgtcaccgggacattgtttgaaggttacggtaggggaaaatttggtactaaaaatcgtttcaccgggaaacgggaattggtcctccggggacttttgaaaacaaaatctgtcaaggggttggcccaccggaaattaaaa

SEQ ID NO: 83979 - DNA, 1929 bp, Heterodera glycines
atgagatttttcagccgtgctaatgtttttaccaagcgtgaaattgctaagcaatacgtcagtgcattgaggcgtcaagacgcatcgatccaacaaatgcgcatcatttatcaggaaaaacatcgcaggacattgcatcaaatcatggagctcaggggaaaatgtgtgattcttcgctcaaaaacaaaaacaaatccattttttgttcagcgcatcttacgaaattgaacccgaacagggattctcagaagataaaacggattttggctatgcgacaataccttttgaaacggcataattgggatcgcattttggagagaaaattggcggatcagactgcaatggctgctgcgtctttccggcacaaaaaggttggcagatttagccgtatgaaattttattgcataaaagcacggaagagtacataaacgagattaacataatgctacgtaaaccgatttgtttttgacacaatcgattttgtatggtacgaataataataatatactatactattgcagtggatggaacaattggcttccccgccggacgatgagcaaagagacgttgaaatggccgttgctgaaatggtcaatttggtcgacgagtgcgcaaactcttcgcgcaatttaaacatcgaagaaatgcacactgcacgaagaaataatttcatgagttcggacgcattttgcccgcctttgccgaaatccgttgtggacattttggagcagttgcgaaagcattccgacgaagcaggcccactcagaaaaagtacttctcgggccatcgttcagcagaacaacaatttgactgatccgcatggctatctgtcaaattgtggcaccttttccatgccgaaaccatcgacatcgaaagcactcgtcgacaacaactcagtcgaagctaaaactgttgtacccgtttccattgatgatgtgagtttatggtttccacaaattgggaaatttgccgaaatcgaatttttaattttcatgaaattaagcttattgggtagttgaaggaattaccaatacaataccaaaaactcaatagaaaatgcggcgcaaaaattttgaattttccgaagggtcccccttttgtgtttactttttgataaaatttaaaagtgactactttacgtatagcgccgaaaatgcttttttcgaattttgcgctgtgtggagggttttctttgttgtatcccaggggcagcgctcccccctccgaatcagttctccaaaatttttctaaaaacttgtattttttagttttacatcttccttggcatttttcagcaagaaatctaaaacaccggttttaaaaatcattatttaaaatcatttaaaatatctttctaggatctcaaccctgatctgtttctgcgcatctcttatccaacattgatggacggtcaaaatcagcagttttctccgcaaaattcgaaagttcggcggtggcgtaaggtggacgaaaaagaggacgcttcgcaaacttgcgcacgaattaaccggccatgggacggcacgcgacacaaagggaccaaatttgctgggggagacttggagaacaacaacaacacaaacagcaccaacatctccaacaacaacacatccggaaaatacccgttgaaaatgcgaacaaacgcggggattatccacatgcttcaccctcagacggggaaaaggtcaagacgggagaacaacggccagaacaacgtgcatgccgacaacaacatgagttacggcacctaccagcagtatttgtccttgcaacgtctcattccgggtccccggtattcattggcgaaaacaatttcgaggacttgatttttcactttgttgatttcagttattgcttttgtatcccgttatgcataaattttacttattgatgcttgtttaaaagagagactaccaagttagcaataaa

SEQ ID NO: 83980 - DNA, 432 bp, Heterodera glycines
atggagaatgcgcatttcctaaaaatttcgagtggttttcacattgtcatatgtttctcatctatgtgtgttggtaaattacgcagcctcatatttgaatacccagctgaactcggacggcacttggctgtccgccttctttgtggagttccggcgacgcttcgtctctttgcttggcacttcgttcagcgcgttcagtccccacttggcgttcagtctgatgttcatggacagtgccagcatcatcggctgctccgtgcagcagcggcaggacgaacagcaggccgaaaatggtgagcgtcaaccgggagcaggacaaaatgtcgccgccgtaacgtcgccgggacataacgtcgccgcaaaaaagaattttcaaaattttaagaaaattgaaaagtattttagctttttgaaaatctaagtgttaataaa

SEQ ID NO: 83981 - DNA, 214 bp, Heterodera glycines
agtggccagtctgatcggacagccccaaattgagaacgttttggcatttacgtcgagggtaattttgtttaaaaacaattttttttccaatatttgtgtttttcctcgacgtttttaggcacggagcggcgcctgtacgcaaccgacgccgaacccgctcagtgtgctcgagttcatccacaacggagtgcacgcctgggttggaggggacatg

SEQ ID NO: 83982 - DNA, 1350 bp, Heterodera glycines
aaaaacttttaggggatacctgagaaaatgccaaaaaatgtcgtgagggtgtggggtttcacttcttggcttttcattcgtttttatgggcttaaatttattatattattatttttgcgacagatttgggaacagtggcgactgctccaccaaaatcggcagcagcgcgagacgcaatttccgcccgactcgcaaattgtgccggtcagtcattgccaacaaaatgattaattaattgcattaattttgatcattttgtgtttgcagtgcgctggctcccagaattacctgctcagtgcgacaatgttcccttttcaagaccccgtcgtgctcaaccgaggcatgtccaataattgtattcaatttatcacaattttgtgtttaattctttttatgcctcagctcgcccccccaccgccgtttcaaattttttcatagaaaattcgaagaaaaaaaaatttcaaaatttttccagcgattttttcaaaggggtgcaccgttttctaaatgttgttacaaacaagattattattttttttgcaaatatttctcattttgcccatttcgtcagtctgtcaatcacttaatttgctttttgtcccctgttccagctgggttgagcaactcctacacggacagtctgtacacttacgcgccgaggcccacctgccgtgccgcaggcgactgtcgttcgcggtaggaaacattcattccggttgaactttacatttgcagcgccccctcccctccaatattcaaaaaatgtaattttttaacaagccaaacacgaaatccgccattttcaatcaaatggcatttacatgagacatgcgtgaactttttaaatgatcatccgaaaaagtgaattaatgaatgccattgatcggaaaataataatgaattgaatttgtattaaaatttaccagaaaactttttttttgaaaaaaccacgacaccctcttcaatttcactctcttcctcagttacttgttctgtgacacgaccagcggccgtccgttgtgcacttcccggattaaacccggcggcaattgtgcctcatttgtgcaaaacggtaataataataattaattgtggctattaattttagtaaatttcgcacttgcaatgcaaatccctccccacaatatctcttccaaactccgatttttgaacgtttttactattttgtttttaccttttcagggataaattcaaattaaaaatcctcaattttttccaaattctatgataaatgtgctttacattacacctgctttttctgcagctgaccagccctgtttcgcctccacttgtgtgaatgggttttgccaagcggcgggcggtgccgcc

SEQ ID NO: 83983 - DNA, 1433 bp, Heterodera glycines
atgtgcgatcgactagcaaagatcaaaaggcgcactgaagagcttgccgaggagtaccacgtggagttggcgattcgggagaggcaaaagaaattgtttgaggaaaagggcgactcggtagaggcgcagctgatgaacgccgttgacgtgcacttgggactgcgggacctgaagaaaccgttgcaaaatccggagaatttctaccagatcatgttgcaggaaatgaagaatctgctggatggacaagtcgacgcctccaaattcgaggacacattgaggtgaggtcttttcttctgtagatgaacatcagcggaaacacatttgccaattcattgtcagaagcatgttcgacaccagagcatacgttttgttcacaatggacaaacttgtcaacacgttggttcgtcagctgcaaaactttgtcggcgactcggccagcggacaatgtgtcgaacagttcgagaaatatttcgaccagcgagtcaatgggtgcgaaagtgggcaacccgctgctcgtgtggacaaagactacagcgaagcgatggaaaaggtccgatagaccagggacctttggaactcgtccgcagtttcaggtgttgctcaatcagcactgcttcaaaatgttctttttcaatcgcgaccatccggtggtgaccatcgaactgattgacacggacgagacggaaagtgaggaggaggaagaggaagaagagagtgccaatgtggtggcactgcacaattggaagcattttctcaaggacgaggcaaaccatttgaatcggggctcaaaacactcgcatttgaagggttgcgacttggacgacgactcattgcctagaaaaagggaatggaagagcgaacagccaaaattcttggccagaaatgtgcgctatcgtcgtgccttggccaaattcctccagtgtaatttcgctagttcgtccgtggcaggccaaagtcccgccaaaaacaacagtgaagagccgaccaccaacaaaatgttgcatttctatgtcagcaatggcttcattctgattcctcaactgcgcaacgtgtctgatactgaaatgctttctgatacattaatccgaaagtgcagaaatagaaaggtggacttattggaaatatgaaatttaatgttatttcgttttttctttgtttagtcatttcggaagaaatccattgcaaatacaaagaaattcaacatttggctagacaaatttcacaaggatgacactgagcttagcgtatgttaaagtctcagatctggcgttctatcccactttaggccagatggatgaccaccggttgtacttctcttccttgtcaacaccatgaattcaaatttctccgtttcaatatttattcttcaaaaagtgtagacgaataagaagaatgtaaatcggatgctactgatcaaaaactttttaataaca

SEQ ID NO: 83984 - DNA, 519 bp, Heterodera glycines
atggctgagctggacaagcttggccaaagtgatggtgaagacggaggagttggtgttggagagaatagtggtgaagcgctcgacaaacgatcattgctactcagcgaaccggtgcagatcactgtgacctgtttaactccacctaccggggcgggccgaccgcgcttctacccgtatcagcattggggctacaatgaggcgcatcgcataaggatcagagattgggaagacaattattgtatgttccacgcgcttattggtgctcgagcgtaccacgaccctgtgctgttcaacgagtggatgttagctgatcaacagccacaacagcagaatttggcacgactgatgctgatgcaggatttttgtgaaaccaaagaagctttccgccgtcttatcatcaatcgagagttgatgtgttcctcagtgcaccgcctaatgcatgcagctggcgtacccgaaggccaacacgcatatggcatggaccatttgcaaaccgttcaacactattgggttcagtga

SEQ ID NO: 83985 - DNA, 857 bp, Heterodera glycines
gagtccaaaggccatttcgaaggccaggatttcgattggataatcatgtccatgtgcgcggacaacaaagatgtcgaaaaagaggaggaagagaaggccaagaaaaaggtagagaaagaggatggagaactgaaggaagagtcggaggatgacgatggagatgaaattcagctggttggggagacgaaatcgaccagcaccgaggccgtgaaaaaggcaaaaaagaattgacaagagtgctgagtaatgatgaacctatcttaaatgatattgatgttgcatttagcatagaaaaaacaattgttaaagaaatgtttgcacttgtaacagcctgacaaaaaaaaggcatagagaaattgccaaattatttgaaacactctgaaaaaaaaaatttgtttttcaccttaaataacagcacaatgaaaaggcgctgggactttcgttcaatgagcttttttgagcagcccagcccacctgaacagtcgtcggctttgtcaacaccacaacagcaactaacagatgacgataatgatgatgaacaccagcagggcgagggacgcgggactagagcggaaggcggcagccaatcgaccggaaacgacctttttcaacaggtctcacactcagtgcacagactggagcgcttttcggtgtcacgacacatcacagagtttgtgctgaatgccaacgttgaggaaccggacgaagtcttgcgcggtgcattccaaatccttatggaacgggcaatccaaaatgcagagcagcaaagtggccggaaagttctcaaaattggtgttacgctacagggaagaggtttgattggtcggctggtagcccttttattccttacctattaa

SEQ ID NO: 83986 - DNA, 944 bp, Heterodera glycines
atgccatcatcctcctccgcctcatcatcggcggcatcttcatcagcaacgacagcaacaacaacagcttcggtgttcttcgataccatcaacaacaacaacaggaagcagttggcacaacaatggatacgggtaaggacgagggaatggcggcggcgcggcgtggcaaatcagcgacaaatttttaaattcaaaaaaatatatataacaatgagaaaaagcgcttgaaaattttatttggcttgggacatacctacacatcaactgaactttttttattcagttgtcatccaacggttcgaagcatcgggaggatgagttggtacaagcgttgtggacactgcgcgaccagctcatcgagggcaccgtcggtgttgcgaggcatgccgaactgcccccgggggagccgccgacgaccacggcagcagcagccgcggtcccgagcagtaccagcggttcaaacaaactgaatctgatcatttataaataattgcctaattgatcttcaaaagttacaccaaacgcacacattttattttgtcacacataaaaatttgtccatgcgttttttttaaatttcattttgtttatttccttaattatggatttatgtatgtgttttgctttattcgtttttttaaaacgtggttcatcagtaaaccctgcatgaatcatctttttttttttgcaaatttccttgttttataaatgggtgagaagccgatgcttacaattagtttggcatccatatccccttattcctatttaggctagcttcctaaaatgaaaatggggatgtagtattgtataaggtgcttcaaactcgaactatagagcccggcattttgaagacggtttttgtctgattagggctgcacccggacaggatttccgggttaaaatcttgttattccggacccacggagtcgggtgcatttaataaa

SEQ ID NO: 83987 - DNA, 243 bp, Heterodera glycines; identical to SEQ ID NO: 71522

SEQ ID NO: 83988 - DNA, 191 bp, Heterodera glycines
atggtgttgacctccttgaaattgttggtccaatttttcggtgcattatcaattctgcaatgcaatcgcttgggttggccatcttttcgtggagtgtgcaaccatttggacaatgcttggcccgcagttgcatttggcccatcctcagcaattgcgtcggggaacagattaccagaatgtattgaattcag

SEQ ID NO: 83989 - DNA, 806 bp, Heterodera glycines
atggtttataaactgccaaaatcctgctttaaaccatcaaaaaatgtaagaaatttttttaaatttaacatatgaaaaagttagcagatttttgaacatatttttatttaattatttggcaaattcaaaataattttaattgttatttgaatataacaaaatttgccaatttttattattgtcttgtctaagttctaatattttattgttcccaatgtttaaatatatttattatattttaaattgtcaaataattttttaatttactttttcacttctttttgacaatcgatttacaatttctgtgtcaattcgttgaagtcatttgataattgggatgattcattatcattcgctcgtttatttctttagttttaagttttcttcataaaacaatcaactaaatgtgaacataaattcttaataattatttttatcattttttagacatttaaaaataattaatgcctttgacaaaatgaaagaagatttgaaaaatcagcagcaggtaaatacaaaaagattttcagaatctctcctttcttccgaaattttccttgcaaattaatatttaaatttcacaaaccttcattttctctaagacttttatcccccggggtattcgggatacctgttaattgtcatcaaatttattttttccaatctcaatttcccctcgctttgacagatacttcaaatcaatccaaaaaatcggtggaacccggaggattgtcacaatgagctgttccttttcaagcccaattttttgagggttgtttaccgaggaacaaaaaaatgtaaaatta

SEQ ID NO: 83990 - DNA, 222 bp, Heterodera glycines
atgatttatgtagggatacgattgacaaaactccaaaaccgagcgcatgaggtaaaaaatagggtaaaaaatactgcaaaagcaaaaaggggtaagtaagtaaaagatgtaagtgataagtagaaaaatttaaagggatgagcacaaagttttatttttgtaattaattatttaattgtaatatgatttaaaattataaagttttaggtttatatgatttaa

SEQ ID NO: 83991 - DNA, 1324 bp, Heterodera glycines
atgatgtttggatggaaattttgccctgttttgaccatgctcaactcggcctcaaattggcactgtttttgccccgttttgatttgctggtggacaaacatttcaatggtaaacgcgaattttttcaaatttcgataagttttttgtttttactttttttgtaaaagtgattgattttttggttacttaaactaatagtgttttaatggaatttagtagccccaaacctttcttggtttcaaaaaatggctgaaaattattattttcccaaaattcataattctttttgatttttttgttagagtgtcgggtttttttagggctttttgcttatgtaatttttggaatttgaaatgcataaaaacggtaacaccccaaaaaattgaaccttatgaatttaaaattggtctctaaaatcgcagaattttgaaaagtttcggtggcaaaatcataaattatttaagaaaaaatcaattacaattagctgaaaccttgctggattttaaattatcacgtaattatagaaactttaatttttagaaagtttttcattttaaaagataatttagcaattttttagtggaaaaccccataaagccagaaagacaaatatatttttactttttttcatttaaaagtaccaaatttttttgttttttgttactcatttttaaaaatttttttggattttaggagtttttccctttcttagcattgctcaacttggcccaaattagcactgctttcgatcggtttcgatgcgttggtggacaaatatttcaatggcaaaagcggattgctgcgcaagtttttttgcactgctttcgctcggttttgatgcgctggtggacaacatttcaatggcaaaagcggattgctgcgcaagtttttttttcacaaattaaccggtcaaatattttttatgctctaaattttttgattgcattcggcaattaaaaattgaaattttcaaaaatttgtattttcaaacctatgaaaatcaattattgtgaatttttgaaatctcaacattgttgtggtgatgctgtttccatcccgcaaattttttgtgagattaaaaaaattctctcaggaaactgctgtatttggccgattaaaatttttaaaattcatcgatttgaccatgatttgaataaaataagaaaaaattttcagatgcacatatatattaaattatggcaaagtgtacactaagtaaatagttttagtaacccaaatctgaggttacttaggaaataagtttcatacactttggcacgcataagctccacaatagtttttaagaagcctttactcttgatta

SEQ ID NO: 83992 - DNA, 4320 bp, Heterodera glycines
atgccttcaaaacaaaagaatttgagaaagaagatgaaagatgtgtatcggcgacaggcagagcgatctgtcagtcgggataactcacccgtctcagacgggagtgcagatgggaatggagaggcatcggcatctctccgaggtaccaccaccccaagcttaagtgctttacaaataagcacgccggcgtcttccattggaagtaaaaaaagaggcaggccctcgaaagccggagcgaagccaatcttggctacgcaagaaagggtgtctctcattgacacacctcgaactgcggtcactcaaagtgaccagggttcgccgtgcaaaaaaaggggaaaggtcgccgagtgtggccaacccatgttttccaatgaagctattgctttgacgcctgtttcgactcaaagtcgtggagggcgtcctgccaaaaaaattggaggcccaggccgaggcagactcactgattccatgagcaaaagctctgaaatggatatcaatcttgaaaatgccccaattccggcaccctcgcacattgtgtctgaaaaaattgacttcagcactgtgccaattaatttcgccacatcgcgaaatatggcctgtaaaatttggagatgggcagcaattggcctttatgagcgtgatggcgaaacagcacttggcccacgctctggcccaagattaattgagacctgttggaacaggccaaatgaatggctaaatgacagctttattgttgcctatttagcttacattgcaagcatttcacaacgaaaaacagtagttgtggattctttggcatcgagaactgatgtttctcgattttccaacgtgaagaattacactttcggctatgatccgaatgctgttcctgaagttgtgcttatgccgcttcacttcccaaatcattggactctcatcgtctacgatgttgcacatggtgcatacttccttgactcgctgcatatgagcagcttgagtgatgagagaatggcactcatccagtcaataattgctgagatagtgcccgggaatgcgtcattcgctgttgaatacgtgcagcaattgacaaagcaaaatgatggtaacagctgcgggtacttcgtgtgcctgtatgctgaatcctggctgatgaacaaccgtacatttgttctgccggatttgaacatcaattatgagaagaagcgcattttatggcacataaatgagctttatggctcagatattgtgccgtttcatccaagggaaggtgtttcaacatctttcgctgttgtgtctcatcacaatggggatgtagcgcaaacttcctccaaggtcataatgccaatggaagtggatgattcagcagtgcttccttcctcggaagatactgctgttcttgcgcaagcaccagtgatcggcgaaaatcaagctgacacccacggtgttgttgcggacacaattgtccagcaagaaccaattgcgcaggctgatgatgtaattttcatcagacctaagacgccaccaaggcgatcaatgcgcgttcaaaaaaggctttcagcttctgttagccgttcgccttcaccggcgccgaaacgccccccgccagcaaattcgatgggagtggcaacgccgatcacacggcgttgctctgcatttcacaaggggtggcaatgcgctgcagcagcagccaaacatttcccggaatattgtgactccgggaaactcggtgacaaaaaatgcgccgattgcggtgcacatctcttctcacatgaagacagtaccatttgctgccggaagggaagagttgtgctgccaatgcttaacccgcatcctgatgagctcaaacagctgattgtggggaataagcaatcccgtgaagggaaagaatttgtgcgacacatgtcgcgttataacaacctgttccaatttgcgagcgtttccactggcaacaaaccaagccctgctggcggtccgatggccgttattcttaacggagaattccatcgccgcataagcagcatgcaggctggtacaactcagattcctggctttggccagttgtacattctggacccagtcgaggctatggaacagcgtcgaaacaaccccaggtttactggggagaaaatcacaaacgaagatgagtttgtgcagggtcaccagctaaatgagcagactcttgagatcttagaacaaatgatccaagtgtatcatcctgctgcgcaggcatataagcaggcgcgtgagcagctcactgagcttctccaacaacaaactccggaagagcttcgcttctttcgcatgactttgttgaatgagcgcagggctccagctggtctgaaagacccaaaattgcacccacaccaaataatcaccccttctacgggtgaagggatgttcgctattcatgcggaccccactggtgctcctccgcccaaaggaatttgggtagagaacaaacaagggcaattaaatgaaattgctcctttcagtccgtggactgatagtcttacgtatccattaatcaagccaatgggcgatgatggatacacaactggcattaaatatgctaagccaccatcgcgtaagcgaaaaggtgctcagaatgcatctggcctatttgactcggaagccgagtcagataatgagtcgtgcgagactcagtcaattgcatcatctgatgctgggtcagtcgcaaattcagatgctgaatctgtagcatctgtttcatcgcagcaccggcggattgacaaatccaaacaatttatctccctgcgagattattgcaagtattatctcgcaataagggatgaaaatgtggagttgcaataccaccacatcctttcatgtggtggaggacttggtcagcgctggatccttgaccaggctgcaaaaattgattggcaaattgcaacatttttgcgtagacctgacatggacctgcggatcagcactccaaaaaatctgctgcagtatttggtcaaccaatacaacaggcagcaggcacggcaaaaccccaatgcccaacagaaaactgttgatgacattggcagtgttgttcggctttccgaacacaacgtaaattctctccaatattggaagaaaatgtatgaggattgcaacaccgtttttgcacggtgtcatgacgcgaaaaaggcgcgtctcttcatcacattcacgaacaacagggaatggcctgagttcaaagagaatatatataaaaacggtcaagtatttactgaccgttttgacatgtggatgcgtgtttggaccagcaaaatcgctgagttccgagaagaactttatgagaaaaagttctttggaacaatccttggttacggtgaatccatggagttccaaggccgaggaggcccacatgcccacattgtggcgcaaacagacctggacgcagttccatatgtcattcaggaatacatatgggcgcacattccatctttgcctgataaagatgacgacacgcccattgcaaaaatgcatcgcgaaatccgcgaaacaatacatatgcaactgcacagatgcagtgatagttggtgtggtcctagcgacccaatttacgggcggtgcaagaaggggttcccagccccttactcaaaatgtacgattttgcgcccggacaggcccgcaatgtatttccggccttcaccaactgatggtggtgcccaattagaggtaaacggcctgatatacgacaactcacatgtcgtgccgtataatccttatattctgctgcgttaccgagtacaccataatgtactgtttgcatatggtaacaaagcaaatattaaatacgcactcaagtacccttttaaagggccaggacattgttatgtcgagtgcaaacaagagtccggcaataaaatcggaattgatgagccggctcaatatgccaagatgaacttccgtggtgcaacggaagcatatgccattgttcattcactgccatttgccaaactttcacatcaggttgtcaaacttagcatccatatgcctaatcaacaaccgattgtgtacagggcttttcagctggtgagcaaagctcaacaaatccagcaaggcaaactgccagagacgcaatgttctgcctattggaaacaatggcaaaatgaatggaagcatgatccgaagctcaaggacatgctttttgaaaaagtccctgagcattttatatgggcgaaggacaaatggaacaaaaggaaatataacctaacaaagagaccaccgatcggtcgaattgtccctgttccacccaaggatccggaaaggttcgcgctctattcacttatgcgccactttcccggtgaccctgaccatcttaaaatg

SEQ ID NO: 83993 - DNA, 819 bp, Heterodera glycines
atgggcgactcgtacactgccaaatacgactttcgcaatccgttgtgctatcacgtccgtttttcatttttcccctttttgaccaattttagttcagaaaaggtgcatttgcccgccacagttcgatccccaatttgtgcttccgcccgctcccggtttcaacactcggctgccaatgaaatgtgacaaacgtaattctgatgagtaaaatttttgactcgttttttactgggcgaaaaatattaacataattaacttaacgatttattagttgctttccattcttcctttcaggagaactccaagtagtttttgctgccactccgtccaatttcgtaaacttgggtggtgccgcttatctgttctgttgtgtcaacttggaccctcgtacatttattcccaaagatggggtcgtttttgtccaaaatgatacaatccaacaccaaccgaccagcacaccatacgaaagtttctcacatgacatcgacacttacttttcggtaagaaatatgtgttttccttttagtttaaacgttttcttttttttcaaaggtgccgacttgttgggtgcttggcctaaacaacgcacaacttagggattccggctcttacaaatgcattgttcagcccacaaatgctcgatatcgcgttatcaatgcgaccatggaatttagcgtcaagggtatgttgatacaaaaaaagagagaattcaaaaaatactggcaattcattgctttattatagctctgtcagttaaccatcacaatagaagggtgcctcgatccgctcaaggaaaacgccgtaggctgttcaatgatt

SEQ ID NO: 83994 - DNA, 750 bp, Heterodera glycines
atggttgagaatatggccataaatttgttcaattcattgaaattggagcacataaaaagcgaagaggaaaaaaccaatgaaaatattttggaaaatgaaaggaaaattgccgaaatgaaacggtggcgaagtgcggaaaaagcaatgaaagagcggcttaaagtgttggtgaatgatgcgagcaaaaagtgccaaaaaatgcggaaaaggttggaccgatttttaaataaaattggcataaaatttgataaaatgtttgggaaaaacaaaaaaaatgaatttgacggggaagaaaatgacagcagaagagaggactttgtgggatgcatttactattatttgtactcattttcattgaatttgattagaaacattgggacaaaaaaggcaaatgccgccgataattgcgataattatgatacgaaacaatgccaaaatggggaaaaagatacggaaatggaaataaaaaatttgagaaaaatatacgaaaatttgcgtgaaaaaatgtggcaacaaattaaaattgtttatgcaaaggatgatttgaaaaagatgaatgatcagcttaacggtgaccagaatgccgatgatgatgatgaatttaaaaaatgtgcaaatattgttgatgaagacggagaagagccaatatttaatgaaggtgactcaattaaggaataattagcgaataattactttatggttaatgtctgttgtattggcaatagaataaccatatgatttatgtaaaaa

SEQ ID NO: 83995 - DNA, 76 bp, Heterodera glycines; identical to SEQ ID NO: 53797

SEQ ID NO: 83996 - DNA, 884 bp, Heterodera glycines
ataattgtttgagtaccccaaacggacacttgaaaaaatcgatttttttgttttcggggcagtccccccgaaccgatgcgcccagatttatggggagaccgaatccttcgggaatagcttccctatagcctgtactttaattctgcgttggatttttgctccccataattgtttgagtaccccaaacggacacttgaaaaaatcgatttttttgttttcggggcagtccccccgaaccgatgcgcccagatttatggggaggccgaatccttcgggaatagcttccctatagcctgtactttaattctgctttggatttttgctccccataattgtttgagtaccccaaacggacacttgaaaaaatcgatttttttgttttcggggcagtccccccgaaccgatgcgcccagatttatggggagaccgaatccttcgggaatagcttccctatagcctgtactttaattctgcgttggatttttgctccccataattgtttgagtaccccaaacggacacttgaaaaaatcgattttttgttttcggggcattccccccgaaccgattttatttgcaagttattttaggcactcagatgctttcactatcaaaaagggagatgaataaaaaatctaaaaatttttaattgctttttaaatatgcgaaaaattttaggcttaactttttttttataaactggtcagaagcgaaccagattttgcgagagcatcaaaaagacaaggaaaagcactgctatgatgctaactccagtaattctgaatttaaaattttttattaatttttaaagcttcactattttatttttttagcaaaatcaattcataaatattttttcagaaactgctctgaaacgcaccaaat

SEQ ID NO: 83997 - DNA, 249 bp, Heterodera glycines
attaaaaatttttagatttttattcatctccctttttgatagtgaaagcatctgagtgcctaaaataacttgtaaataaaattggtgcgtttcagagcagtttgtgaaaaaatatttatgaattaattttgctaaaaaaataaaatagtgaagcttaaaaattaataaaaaattttaaattcagaattactggagttagcatcatagcgaaggttttccttgtctttttgatgccctcgcaaaatctgg

SEQ ID NO: 83998 - DNA, 96 bp, Heterodera glycines
ctttcaaactatctttaatctaaaaaatacgaaattctagtgcgttaataactgaacagtgaattccgactgaaccagcactacgcttatatagat

SEQ ID NO: 83999 - DNA, 78 bp, Heterodera glycines
atgggtgctatttttgagaacattgctttgcatgactttgtcgtgaaagaagtgataaacagtttcccggacaaaaag

SEQ ID NO: 84000 - DNA, 935 bp, Heterodera glycines
atgggtcgaaatggatgccggattcgtgatcatcgaccccgaaaaactataaatcggtatttttttattcgaaaaaggaaaaaaaaatttatggggcgtaaaccatataagggcccagttccctaattctttccgttctttatttagtcttctttattaaacgaactcgtcatgtacatttcataggcttttcgttgattaaaaattttttggcgctatattaaaagtgggtctttttgaaaattttttaaaaaagtcatgaaaatacatttccgggggttttcggggccgctgatcacgaatatgacattcatttcgaccaatttcgaaccccggacccggatttatgatcagtaaattttcattgtaatttcaaatctctagacatatgtggtactcagaacttatgagacacatttatgataataacattatataggacacactatcctattttcctaatactgccccgatatgctggaaatggatagtgtgtctccttaatattgaattacataaatgtgtcttggcggcgcgaattcaatgttgaaaagtgaaaatttacgattttcaactttttgttcaaatccgggtccggggttcgaaattggtcgaaatgaatgtcatattcgtgatcagcggccccgaaaacccccggaaatgtattttcatgacttttttaaaaaattttcaaaaaggccaacttttacagtagcgccgaattatatatatatatatatataatatatatatgcctcctatgttcgcttccttcttttcgtccagaaaatggatgcgatatgaaaaaatattcgcataaatccgtaaatttgaggtcgattttgcgttgttcatttgtagaagggctgctaaacgatttactgaagaaaggagcacttagtggagaatatgaaaacatgtaactgaaaaataaa

SEQ ID NO: 84001 - DNA, 173 bp, Heterodera glycines
catgttttcatattctccactaagtgctcctttcttcagtaaatcgtttagcagcccttctacaaatgaacaacgcaaaatcgacctcaaatttacggatttatgcgaatattttttcatatcgcatccattttctggacgaaaagaaggaagcgaacataggaggcatatat

SEQ ID NO: 84002 - DNA, 638 bp, Heterodera glycines
atgtcgcattcccttcttaaacgccccttaaattctaactctcttaatcaaattccgcaaaaacgtcatttcctcaacgaagtgacttcaacaaatttggccattgacacacttgacgacgacccgtccatttctccagctgcccgtgtcatcatttcacaactaagcaatctcctcaaaatcgccgtctccctcgtcaacaattctgtctcagacattgactttcttgaccagctcggggttgagacccattctatagtcagctacagaatgggatggtacagcaaagaccgagcaagaaatggtgcctgccgtcccataaaagtcgtgctccccgcctcatcttttcagcgcacatgccttcaccaatggaacaaaaaatcattggaaattcgctgaacatcagggaattgctcactcaagaacaactgaaatcgagacgtgaacttcaagcgcagtgtgccgaaaagcgaaaagaaacatccgctgactggatcatctacaacggcatgcttgtgctccgaagcgaaatcaaaggaaggaggatgaacggagagaacttgagcgggccttttcctcacattgactctctgctgacacgctatcgaaaaaactcattcatgacagcaatgttctga

SEQ ID NO: 84003 - DNA, 894 bp, Heterodera glycines
atcttccaaataaaaatacataacacttcaccagataatattagtttcaaatttcttaaaacttttcacttaatcttagctaggcacctgacagatctgtttaacttatctttatgttcgggcaaccttccaaaaatctggaaaacttcattagttttgccactcttcaaaaatggagacaaaaatttagtaaacaattaccgtcctatatctattacttgttcctgttgccgaatttttgaacgcttaatagcaaaaaaactcactgaattcttacttaaaaacaatcttatctctgaacaccagttcggattcctaaaaagaagatcaacaaccctccaattaatctcctcactggaagactggtacaatgcaatacttagaaaccaaaaaattgatataatttatttagatcttcaaaaagcctttgatcaagtcccgcatgatcttttaatatacaaactcaaaaaacccggaataacaggcaacttattaaattggcttcgggattttcttcttggaagaacctttaaagtaagaataaatcaaaaattttcaaacgaatttcctgtcaaatcaggagtcccacaagggtcagttctaggacctattttatttttaattttcattaatgatttgcctgaagaaattccaaaagaaatctcaattaaactttttgcagatgatacaaaaatttatcattgctattcaaatgaatcccaacgtaaagttttagaaacagctctaatttcagtctttaattgggctgaaacatggggcttaaatttttcagtaaaaaaatcttccgtcttatatctaggtaaaaataacaaaaaaataccgtacacaattaaaaattcaactttccctgaatcaaaaattattagtgatcta

SEQ ID NO: 84004 - DNA, 1287 bp, Heterodera glycines
  unsure (1)..(1287): unsure at all n locations
atgtccgaagtggacaaggcacaattagctccgatgatccctaccacagttgttatattgggcatattcaattgtcggtacgtttaataatttattgacataattaaggctaacaattataatatgcatcaaaaattgtagatctatgtatataaaatttccaaattgagcgtaaaatttccaaaattccttccaaattaaaaaatggctaaatatggtattaaaaagcatttaagaattataaatataaagataatcataatcaaaaaattgaacattgccagtttttgctttttgaaataaatttagaaatttttagaaaattatttttttattatcttcgaaaattattattattattaaaccatataaatcttgaaatatgcaaaaggctacccgacatttgaggatttgacatttgaagatccgacatttgaggatatccccgaaaatcagtccgaaagtcacaaatagccatttttagtgcgtgttagacttctgtccacccctccctgaatcatttctggttgagctcctttttatttaattaaatggccaatttttatttagcaattaatattgccggacaatgggtggtattgcgcggaggagaacgcggtgaacgtgacgatggaagttgaaacgggcgcacattgtgatgtggacaaaataagtgttggaaactcgagttaataagcaacaaaatatttgtaaaaaaaggaaacgggaaaaagcacctaaagtcaaatttataaaaatataataattttattcaattaatatatggctaaattgcttttgtcccatttcaatgagctgcncaagagaaaaacaattgaaaaaatctaatttattctttgccaaattgtcacttgtcccttttcagagccaccaattcatttcagcgatgcaacagtttgaattgcttttacaaagtcaatgtcatcatcaatatttttatttttaattaatttcttaaaaaattggcctaagctcagattttatgtgttataaatcctgaaatatgtaataatatgtgctaaaaatgctcaaatatgtgctaaaaccccaaaaatgtcaaaatatgtgtatgcaaaaaaattggaaaaatcaaatttatttatgcataaaaatcaaaaaatttttattctttattaaaaagcattttttcagaaaaattttaagcaatatggacttgaatgataatgatactacataacataaaaaacatattgaaaatcttttcaggcgtttttagcaaaattaaaatttttaaaatataataaa

SEQ ID NO: 84005 - DNA, 1107 bp, Heterodera glycines
atgtccgtccgcaaatgtccgtccgcaaatgtccgtccgcaaatgtccgtccgcaaatgtccgtccgcaaaagtccgtccgcaaatgtccgtccgcaaatgtctggtagccatactgggtgggatttgccaattaatcgacacactctgtgggtatgaataaagatttcatactattaattttttcaaaaatttatttatcagttccgtccgatgtgttgactgttggtgaaatagatgctattttgtaccatttcctcccgaaccaaccaatgccgagcatacaaaacaatgaactgcaattccccactaacagacggtcaacttatgacggtacaatgagtatagtttttcaaaaattttgtaaaaattgcccaacgaaaaaactgccgattttatatttgaaaaattggattgataaaggtctcgagtcgcttgtcatgttttggtctcgaaaaatttccatctcgcaccatttgtagggcggggggttcaagaaatgacatgaaggaggttgcgtgacgggagaaaagagaaaattgtttttgactaatttttcaacaaatttcattaatatagcaaattttctgtggagacgccttggctagtctatgtacagtacgatacgattaataatttgcatggttggattccgttcacaaatttggtcgctgaccccctttccaaccccgcccttcccctccagaccaactattgcattccgaggccccaaaggttttctggagacggaatccgaccccaaaaatgtcgaaggaccccaaaaacgtcggaactccggaatcggaattccatgccatcccacaaattttggtcgacctacccctctagtgtaagtttcatgtctcgaacttcactaccaatacttccacggttgatgcctaaaattgctaaatgcacctttcagaccctaacaaagcccatggaatgttggcaatgaaaatcaaaatgtccgatttgctccttaacaacagcaaacatgtgagcagagcggtgtacatccaagcacttccatggagattagctgtacacaaaagcaaatacagcttgaggttttacgcgcaatacgatacgacgaaaatgaaaatga

SEQ ID NO: 84006 - DNA, 439 bp, Heterodera glycines
atgcccaggtatcctcaaacttgaggtgtcaaaccgctttgttataaaaataattaaggaagcatttcatcttacattgcgaagaaaattccaaaatatgcatcctccattatcaaagtaactattgaattttaaaaaataagacacaaagtacacatttttagattaattttagttttgaaagaggaagaaagaattgctcaagacaaagttaggacttatgagttggacccaacaagcggtttgaatttgcaacctaggcgaaggacatactataataatgatgtggccatacgcactcttgtcactagatttgatgcacttgcaaaccccgaaccagaccaaattgtgcatcacttaagagcccttcaatatcgcttagcatccaatggatttgacaatttaatccatgaataatgattttatattttatcgatta

SEQ ID NO: 84007 - DNA, 1880 bp, Heterodera glycines
atgtctgacaaccgaaacgaagcggagcaaaagatggcgaaagcaatgtaaaattaaaatgccatttttaaaatttcaattttaaattttgttttcctttttttcagcttcatttccgccgattgttggctttgtgtgtacgatctgctcccggcttcacaacttggccttggaattgcgatgatcagccaccgttttgacttttatgtggatgaacacttcaagactcgtcgctggactctgagatccatggcaattaaattcaaatccaaatcggatggaaccgtgggaatggatattgtcaattacgctggaaaagcattgccaattccgcaaaatccgctgccaaagaaaatcatcggattcaaagccatttcaatgaagtgaaattatgattcttttttttctggttgtaaaacaattccatcatttttcacagatacttcaacaacaatgccatcgcttttcccggcaattttcgccaactttttgccaaatgtccaattaatttgaccatcgatacattcaaggaccgcattttggagttctttttgcacaacatttggccaatgatcgcgagaaacatttgtgctatccaattgtccgacgaagttttccgccgtttgcgacttctcgtgccgtcaattctcgacgactgtccatcgcttcgcattatcaatgcctattatgacggtttcttcgccgaattccctgccaatgacaatgacaatgcttccaatggacaagccgtggccaaatggctgttcacttgccgtccggacaatgtgccaaaggtgttcaaatgctggttgtacatgaattgtcggaattggtcgtcaaggattgaaaacttcaaagcggtgtttatttggcatttttacggtctttggggttcgttgacaaaaaaaatactctggacgatattttggcaaaaatttttggcgcatttttaatttggcggcgtcaaaatgtcccgctccaaagtgatcccgccccgcgacactcttgattttcgtgccccctccccaactgtaaattgtcttttattaatcaatttttcactcattttaggcttttaccaatgcttcatctcccgtcaatttcatcgttttcattcgatttccgccaacttttactgagttcgttttgctcttcgatctgatcaacgaattgactcgggagcaattaacgttaaggatgacagatatcggccattttctgctgatccgttgtccaattgtccgagatgaaagcaaatggacaaaatgggagaaggaagcgattgaatggaattttattgaccagtggaatcggatcgacatttgagatgggtcagtagtgaatgaatgaataatgcttattcagatatccaaatttatttccgtttcgatttttaggcttcttggcgcaatgatcgacccaagtgatcagcaacggaagtgaatggatgatttgttaattgaattgtggagttggataatgaatttgagcccatttgacatttataaaattgttgtttttgttgctgtgatcgcaaatcgtgttgtatatatgtgtatgcctttaggataaatttaatgacatttctgaattcgtaattgactgtaaaaatgtttaagaaaagattttagaggaccgacattctgaatagagcccggagcaggaccggatcctgcgcaggattttgcaggatcccagtccgcaatcctgcattttttggaaaatgcaggattaatccggccggatccggtccgtcaaaaaattttgaattccaatcctgcaacaggatccgcaaatttgatttttgtgcgggatccggcaggatccgcatacattctttgaaaattttaaaagacggaatgccaaaatttttgaataaa

SEQ ID NO: 84008 - DNA, 873 bp, Heterodera glycines
atgatcaaaaatgtgatgaatcgtcgtcatggctcagcacattcaccaatggaaattggtaaattaaattaaaataaatatatttacaaaataaaacaattattctagcaaatgaaaagccgataaaagcaatagaaaagaatattattagaccaaaaattgaaataaatttggaaaatgaatttggtggacaaaacaccataattacaaacatttcgccaaatttcaaatgccctctcaacgaatatttgtctgctgttgttgattataacggcttttatttcaatgttccggcgaaaacaatcgaaaaaattgcaatgaatttgatttttgccgttttgtcctcacaaaaatggtcaataaaacatcagcaaaactctgatcagccgatttttgatggcattttgacatttgaccatttttcggtgattcgtcaaaatgaatttgaatttggcgccgaagaattggcgggaaatttgaaaattgaatttaacggaacgaaaaatattcaagacccacgggaaaggacacttccaccagaacagagaccaaaagagcagatgatttggctgaaagatgtggtgtttatgagtccagagcaaatcaaagtttgtcgttaaccacttaattacccatttaattacccaattaaataataccttagataaatgaattcaggataacagaaacacaacaacgggcaaagacttggtgtggttcgtcggattgctgctctaccgaatgttgttcgacaacaaacaccccatggacaattgtggagcaaagcgccgtttggacatggatttcatgcccaagatgtgcatctccaaattgaagcagttcaattgcatgtacaaaacgacgattttgtga

SEQ ID NO: 84009 - DNA, 864 bp, Heterodera glycines
atgcactcgcaggccgcatctgccctcgctcgtacaaacaatggactggaggcaactcatctgcattttatggtttttaatttactacgggcaaatttttaaaaatatatttagaaaggtctctgtcaccacccggcactctctgacttcatctgtggagtcaatgaaaacatcgacagacaggtggacgctgcccgatctgctcgccatttcattcacaagcgacacaaacgatacatcctccaggatgctgtcattatgagaattttggcggacgcgtcatacaacaacaacggtgaaattcgtgatctgatgacggcgctcggtctacaaattgaaggatatgcagcaaaattgaaagatttcgtgaattttgatgattcgattgttcgtattccgtgatgaattttttattgaatgtttaataaattcattcattttttatatttatatttgggtcctgggttaggaaatgggttaggtaaatgtcatattcgtactcagcgactccaaaaaccctaaattagatccgttttccgggtttttatgtgctttttagacttttggacatttcgtgttttttacccttatggacatttcgaggcttggacatttcgaggcttggacatttcgtggcttggacatttcgtggcttggtcagcgttggtaagcggaagggaaagtcagggagattcgaaacgggtcaactccgtctggccaactccatctcgccaactccgtctcgccaactccgtcttggggccaactccgtctggccaactccgtctcgccaactccgtcttggggccaactccgtctgagccaactccgtctcgccaactccgtctggccaactccgtctta

SEQ ID NO: 84010 - DNA, 553 bp, Heterodera glycines
gccggtggtgattttttgtgcgatgacatttgccgcgctgcggttgcacgcgtgtataccaactgtcttcagaacgacgtaatttagcgttgtgtggactcgccctcggcatttgaattcgccgtgctgatgttcacagcgccaaaattttacgtcaccatcggcattcaacaaatggaagacatacaggcagccttcatgttcgagttttttattttcgttgagatttaatttcagcattttccattttcgtagtgctaaaatattaatggtactttaaaatgttaggtcagacactattttaatgaataattcttgtcattaaaataaataagtagatttaacggatgagtttttgtgacattttttaatttcttaggggatgtattttaaaattcgttgaaaaatttcttatatattttttttatctgagacggagttggctccttaggcactaagacggagttggccagacggagttggcgagacggagttggctcagacggagttggccccaagacggagttggcgagacggagttggccagacggag

SEQ ID NO: 84011 - DNA, 1339 bp, Heterodera glycines
atgacttcggacaatcggacgctcactttgacgctgaccaatgaaagcattgttcacttttggattcaccccgtcacgccgggcgatgtcagtcaaacggaatgaccacagtacctttggaattgactgacaatttgttggatacggtgttaacctaaggctgatcagtggtgatcagcgatcgttaatttttatgatttgacttgggtttaaccaaaatttgagcgtactttctgcgttcttctgactgacagtttaagacattaattttggatttaaaatttgacgaatgaaaaaaatattccaaaaatgtgacatattcaagaaaaactgttgccatttttgtcttatttctcagattgccaaagtgtttttgtgcccttctgcaaacgatggcctccaacagcagcaacaacaggtggccgaatgtgccaaatattcaagcgatcggtggtacgaatttttcgaaattaacggcgcagcggcgggcgaatatttgctgcgatggacggagcacacgaaactgtcgttggtttatgtgtacgaaccgaaaacggtgggtcaatttggagaaattggaataaatgacaaaattgtacatatgaatcattcatgaacagcctttagggctaacagagagtcgaaatttccgaaactcttgagaagccctcttatctattgtctgatgttggcattttcggctttattaatttgttcgtcttcggcttttcaggttttagaggaaggcattcgcattattttcgtcaatgaaaatgccaaattgccctccctcgggggaagttaccatttccgggctccattcggtaatttgctctgagattaatttaaacaaattaatttatttataattttacttttgaggttggaccagcgacccgtcgggctttgtgaggtccaaagatgggcttttccatttgttttatcagcactatccccacgccaagcaatagtaaggaaagagttggttttctatttaattaaatttactccattcacaaatcagttatttgatccattggggccacgccgtcagcaaagatttggtcaattgggtccatttgccaattttcatgatcccaccaaatgtgttgcacttggacttcgaagttggctatttcgtcggttcggttgtcaatttgcccagtgatgattttggcattttttggacccaacgaattcgtaagtgtttttggaataactaattaggttaattatgtgatctgaccaacaacaacaactgttgattttagctcttgttcttcgagggactgaatcagaaaacccatggagagaaaatcaaaattttgtgtcaacaaaa

SEQ ID NO: 84012 - DNA, 1076 bp, Heterodera glycines
atgggggaaaagcgaagcggcaatggcaacattgaaactgcagggcattttgtgggaggacagccgggacagaatgtgcgaattgccaatgctaattgccttgggcgacccgctcgactcaaacacgaaatggctgctgtcgtacatgctggacaaggggtcgtacacaatgtgcgcgagagacgccgaaggaaggtgatggattagttggctcatctgtttaaagggggatctcaagatttgaaaaattcatcaaaccattcccgtaagataattaccgcatgaaattctcgatgttcaattaaaaatgagttggcagttaaaagccccattcccgaaagttcggtccccattaagcccatttcgatttccttgtcccaatttcaacacaacatctgctgatgctttctgccttttagagaacgtttgaatcctttgcttgttggacattttgacgggaaaaactttcaaaaactctttgaacaagaaatggactttgctcgtgcctcttttgcttatcaggtgtttttggcatttggattttccgatttttccactttttcccctttaagggtttctatgacaaacaatcggccagaaatttcctcatcggatggatctttgactacgacatgagaaccataacaaatgatgccttaatttctgttggcagagccggcattttatcgcttacagtgccgaaggcattttaattaacaaaaaatgaaatttaattgttttttaggaattggttttgtctgaaaatgaacaatttttgctggtcaaaccattgcccgaattaaattcccttcgtatggcaaagaaaccgcagaatttaaagtgaaaactaacaaattggcattaaaacaatgaaaactttaaagaaaaggccgaaaagtccatttggagatgggccaagtcgaacttttcttccaattcaaatgggcaaatgatggcaccgaagagaaattcgaattggacttaatgccaacgcatttaaaaggcgaaaaattggaattccgggttgaccacaacggcattgagctgaagaaaacctggtaattgtctttgattaa

SEQ ID NO: 84013 - DNA, 432 bp, Heterodera glycines
atggctagattaaggtaagcaatcactataaactgaaaatcatttattcattttttttgaaagatctaagttttttttacaaattgaactcagtcatttaaattcctttttcagtgtcaacttcaagtgtcagatttgcgtaaaaatggtcgagatctcgaagactacatgaccaagccataaattgtacgaaaagcatgcatttgatccgtttttgaatatgtactttttgaattattgagaaaatcttttttttatttcatagtttattaaaaaaatgttgctattctagagtatcgctataatgaatgaatccgaaggaatttttcgaggtcgaccatttcttaatgagttacagatccggtactgaagtggccaaatagctttgggactgaaccgtccaaccgataaaaacgcttgaatggtcagcaa

SEQ ID NO: 84014 - DNA, 816 bp, Heterodera glycines
atggatcgccttttgttggaaacggacgcgccgtacatgtacccgaatttggaggacaaaaaattgcgcaaagacattgacattcggcaacggatcagcaccgaagtcagtttgattgatgaccagcagcaacaaagcgacaattttgggatcagaaaatagggaaaaaacgaattaaaaaatggacagtcgcgggaaaactatttgaactaccaaataatcgagaatttggtgtccgggttggactcgattttttaggggggagttctcccacacttttcccctggctacgggcctgacggagagaacgagctgtttactgcccttgaaattagaaatcattagttctaatgattttaaaaaatttcccctatttttttgcataattttcaggcccttgccctgcacaaacactccgacttcaagcgcaacgagcccagctcgttggccgccatttgtgagctggttgctgccttcatggactgtccggcgcacgaattggccaatgcgacgacggcaaatgcgcagagagtgttcggcttggagttggaggacaaccaccaccagcagcaacaacaaggacaacagcagtgcaaccaacgacaacgaaaacgaaaatgacgagagttcaatggtgaactgatcggagcagaagggatggacgagtaatgaatgatggatgattaattattttaaaaaattgttcaaaaattttaaaggattttgatattgctctattccaaaaaattttatatttgcttttcgattttttgttgttgttgttgatgaattttctgttgtttatatgtcattaaa

SEQ ID NO: 84015 - DNA, 127 bp, Heterodera glycines
atgcttgtgatcagcgggtggcagacgctggtacaagggcgacaggacggagatgagtcagtctggtcaactgatcgctgtccaccgccgcggagcggatcttcacaagcaacaagggatcagcctg

SEQ ID NO: 84016 - DNA, 189 bp, Heterodera glycines
tgtcgcgactcacgtcacgagaaataaaatggaaatgataaattttataagcatgatgcaatttcattaaaaatggggaaaaccttaatttaattggaaatgttccccctcttcgtcgttctattcaaaaaatatttgtttgtttacattcaattcttattcatttctcacacaaaaatgtattaatca

SEQ ID NO: 84017 - DNA, 102 bp, Heterodera glycines; identical to SEQ ID NO: 51410

SEQ ID NO: 84018 - DNA, 244 bp, Heterodera glycines
tataaaaataaaagtgattttgggattcgggaccaaaggggtgtgaccatgatttttgagtggaaaatttttttcaccaaaaatctttcaaaaacatgtcattagggctattttatgacgctgatcacgaatacgtgatcatattttacttttgacatcgttcagacctcagaatccctgtgtgattggggattctgaggcatcattttgaggggggggggcaggttcggatccggacggtgta

SEQ ID NO: 84019 - DNA, 594 bp, Heterodera glycines
atggcttatggacgtctgggtcgtcctttcaatgttaatgtggccgcacatttctacgtccgtcaccgcattaaactccgacaccctttccttcactgtgctgttgagagctttccggaaggacaagaggatcgcttctatcctcttgaattatgcgaaatggaggatggttcatcggaaccagattggcttggtcgtattttcacagaaattcgtaacgacaactacacagaaaccatgagctctgcaaaccgagaagttttaacgccagaagacacgtcaatgtctcgtgaagggcgtgatgagtgcagtcaaaatatttcttacaccttatggtaattaattttttttcaaaattgtctcttctcttccttaattttgtacttttccagccaaaaagtactctttcctatccttaattttttcgaaaatgtgttttagatgatacttacactttctggtattgattaatattttcaaaattgtctcttctcttccttaattttgcacttttccagccaaaaagtacactttccaactcttaatttttttgcaattgtctctttgttttaattcaatttaatgttttttgta

SEQ ID NO: 84020 - DNA, 920 bp, Heterodera glycines
atgaccgacaaagaggctggattagtacatgcacctcgttggaagtaaagttttattttttaatattttattcaaattatttttagttaaatgcggcactagaggagggatatcgagtgacagagctgcttcgcgttctcgaataccacaaaagtgacaacaaactcttcaggccatacatgagcgagttcgttgttgaaaaactccatgcttctgggtttgatgagcaaatcaaaggcaattttgaggccgaagagcaatttattgcggaatgctgggaccaatttggaataaaaattgatcgaacaaaaatggttccgaacaagggaaagagatcattggcaaaattggctgtgaataatttatgtatgttttttttttcgttgtcctatgaaaatattataaacaaaaaatttagggggccgattttcacttcgaaattatggtctttcgcagacgctcatcacagatgacccatctgagcttggaaattacctggacaacaaaaagattgaaatcagcggccttgacatgctgacgccggaaagaattctgatcagttatcaattgaaaaaagattggatcaaagagcatccttgttcaaatgttgtgatttcactgttcacaacatcagcagcccgactacatttactgaaatcaatgcagaaagtggtcagaagtcccggctgcactcttttatacacgggtaaacatacaataattttctttattattctaaattttagacaccgattcattgtttcttgtacacccggaagactcaaacccacttcagacgggggtgcacttgggacaactcactgacgagttcccaaaggtaaaagaccaatataaatcgcgctgcattttttaaaatttagcattttcgtgttctcgattttggtcacatttcaccataa

SEQ ID NO: 84021 - DNA, 793 bp, Heterodera glycines
atgtcccaacagtaccaaccccaaaatttccaaccccaaaatttccaacaaccccaaaacttccaacaaccccaacacgtccaacagccgcaaatgcttattccccagcattacggatatattccggttgccccacaaccgcagcagcagccgcagagtgtgcagaatgtgctgccggcggcgaatggacaggcttaccagccggcacagccgttgatgcaaatggtggtgccacctaatgccgctcctccgatgcaacagccgtccggtgggggtcacgttcctcgtccggtccgccccaatgttgaacaaaatgccaatggcaatcaacagcaacaggttgcttataccccccttcctcattaccaaatttttctcccctttataaccatttttcccccaccttttttttctttccatacccactttttccaaacatttttcctttccccagcgccgaggcgcggctccttaccgccgcaacaaccgcaaccgcggtcaacagccggcaaacggcacaaatgcccaccagcccggcgccaaggctgtcccagcccgcgctccgactccgcgagtcgaacaactcctgaccgagttgttgggtgaagtgcacaacttcactggtcaattcgcgcacttcgctggtcaattctctcgcttcttcgcccatgtaaagaagaacaccatccccccgcctttgccaaacggtgatgacgaagaggaggaggaggaagaagaatcggaccaggaggagggggaggtcgaaaaggaaaacggacagaaggatgattga

SEQ ID NO: 84022 - DNA, 408 bp, Heterodera glycines
atgctgttttttggcttatctcgtcatagaagagcgtacaatcgcagaaaaaaacaaatgaataaagacgattcttctgacccattcaacgtgcccgaaaaattacagatgactaaacgtggagcaataaaattaattcttaggaaaaaacttactagtaatgatatgtaagaattcttttttttaataagctattcgaaatttggatacaggtggctcagattccgagaaaatgaaataggtgttatgctttttataacacctacccagaaaaatgctgcaagtcactgtaaagtgttggtttcagacggaaccttcgaattggcacctttgagtttccaacaaatttggacaatacatggattagttagttttgactatggattggttcttctgaatttaatttaa

SEQ ID NO: 84023 - DNA, 429 bp, Heterodera glycines
atggggagaagaaattttaatgggtttactagaattcatagtgattatgaaactgctgaagttaatgcacttacgaaaatatttggagcaaacaaggtctatggatgtatcgtacacttcattcgagctgtagttcatcacattaaatcaagttttcaaaatttattccgtgaatttaatgaacgaaaggatgtttggaaatgggtaaaatatacaaataatatacatatattctcatattttgttagattcgcagactttttgcccttccatttcttcgtaaagaagaaatgataaaaatgtggccaaatctgataaatttcagaaatgattttgagggggtgcttagagaggaaatggattcgtttgtagcttatatgaataatcaatggattaaaaaaattggacagggcaatctattttctttta

SEQ ID NO: 84024 - DNA, 482 bp, Heterodera glycines
atgattgatgaattggacaagaaaagcggaacagaatgcaaaaacaaagaagtgtattgtttttgtgtaccgttgcactttgatcaaataatcagaggaatgtgctgcgacagcaacaaaaagtgcgagtgttgtaagacggtaagcattctgttttaaacgaaaatcagcataaataaaataattatttatttgcaccccgagacccaaaagatttgggaccgtaaatttgtcatcaaaaatttaaaaattttctggatcagcagccacagcaatcggtgaaaaacatcccaaaacaaaaatttgtaaagtattttacaaaaattttcgtattcgaacatttttggtcatacctcgcgggtctttgacacttagccgcccgttttattaatattttcattgtatataatgtttttaggatccggaaataaaaaaaaggccacaggtaaaaatcgttgttgtttttctattaatttaaacca

SEQ ID NO: 84025 - DNA, 214 bp, Heterodera glycines
atgcgcagatcagtttgtgttttgtcggaaggatgggaggcatcggcttgttgccccaaaaattaccaacttgtggaccttgacgacagatatgacgaaagattaattcctttgggtctttgggtatgttttaatgtgaaatttgcgaaatcaataagtctattgaatttaatgatattcatcttgaaattttgcttttttaggtattttaaca

SEQ ID NO: 84026 - DNA, 1565 bp, Heterodera glycines
atggtggcggaccagcgaactgtggtggtggtcgaaaacacgacgacggaaccgaacaccgacatggacacagtgaacgatgtgagaaaaaaatggcaaaaatgggtttataaaaacttttggtttaattcagacccttcgacactaagaaaaaaagttcaatctttatatttttcgtcttctactagtaattactgttttttgttcgctttttatggcaatttgggatccggcagtgcctactagcgatgcttttatactacaaattttgttttttcaaaagtttctattttgtgtcaccagtaggatagctatttaaataaatttttcttttatcagatttcaatcgcaaaaaaacgattaaattttgagtgatttaatgaacaatgaatgaattgtaatttttaaaattagtataaatgtatatttccaaaaaaatcaccaatttttattagttttggtccatataaaaagttttattatttttactcatttttatcgtcattaaaatgtgcaaaaattttcgctttcagctgaaagagaagcgcaaagtgccgacctccaaggacaagctggtcgatcggaagcggttcaccatgtccgacctggtcaggtggaagccgaagacggagaacacgctgaagcgcaagtgggccgagcggcgccgacagctcaaggaggacaccgtcgatggggaggcgacggggcagccggaacaccaggaccagcagcaggtgagcagccgctcccctcggagcagttcattttacacccgcatccatcgacaaaaattctcgaaaattttaaattttttagttttctcattttttatttttcccaaaaaaaaactaaacacatatttcttcaaaaaaatttttgggaaatttagaagtaaaagaattcagtgtcgggaaggggaggagattttctaatccagaaaaaccaaggggcttcttcacacatttattattaattcttttgtaaattttccaaaaaaattgcaggcgttgccggcggtcaacgacggagggaccagtggaagtggtcagcatgactgtgtagtaccaactgcagcacaaccacaaaaacagggaccgagcagtgcaccgacagcagcggcgggaccacgggtgggttaatatctttaaaattagtcgccgcaatttccagaaaaaataaattttaattaaaaaaatttcgatgtgctaaaagcaccgcagggttccaattttcttatattcgccaaaattttggcgtaaaatggtcaaaattttgagaaattggctaaaatttcccgttttttcccatgccaaaaaaatttaggaaaattacactggcttgggccggtagagcgaacaaaaaaaaactccgcgtaaccctcccgaaattttattctgattatattacagttttgtcctactccgctaattttgttgcccctttctatcaactgttttgttcaggtgatgatcaacgaacgcggcgaaatggtggtcgacgaacagtcgcttgttgtcattgagaacccggagcagaacaccgcgggcatggagacagtgaacgat

SEQ ID NO: 84027 - DNA, 117 bp, Heterodera glycines
ttgcaccgagctgtccttgtccctgcagcagttgctggtgttgggcaacaattgcggccgcatcgcgtcgatggccagcagcagtcagcacggcattgtccagcgcggacagcgcct

SEQ ID NO: 84028 - DNA, 585 bp, Heterodera glycines
atggcattctgctcatatcccaaatatcttctcatcattttgctttggcaactgatttatgttgccatttccaatccaaccactgaagaattatccaaaaatgaaggtaaaatttaaaagcaaaatgattttggttaaaataaattttaaacatttcccgaataaatttttaaaaatcataaatagatggaggtggaaatgctgacgatatacaaatgttggtggaagaggcaattgatatggcacaaaatctttcaatgatagtttcgcccaaggcactcgtcggaaggtgattaaaatgaacaaatatatatatatgtatttatagcaaaattaatgaaattgaaaaattgagagaattgagagaaggctttcgaagtgctttaagtgttccaaattgaaactcatttcaaaaattaattaaaatagataacaatttaagaaaaaattaaaatattaaaatattttctttttattctcattaattaaattttcagaggtgacacggctgaaattgtcgcattttctcttttcccgtcgcctttcccgcgccaactttttgaacaagcgaaaagtgtgcagatg

SEQ ID NO: 84029 - DNA, 466 bp, Heterodera glycines
atgggggaattgaactttagaagaagaaaaaagaaatggaaggtataaccgctgagccagagacgcccatattggcttttcattctttgtgaatgacattaataaggcaaaaaggaaaagcttcatatctcggccagaagcttcatttagcaaaaataaaaaaattttataatacaaaaggggagggggggtaatctacctacattgtaagtttcattcggaagtcccaccgtcacttgggtacctctcctttgtaagaaatggaaaattttatcaaaaatttaagaaatttattttatttattttcttgacaagaattttttatttttaaaattatgtatctcattaccatttttagcacctattttgggtgtaccgacttttgcgccgcagacacttgcgccgcgacatttgcgcctcgacacttgcgccgccctacaaaatccatttgcaccgttctaagtaa

SEQ ID NO: 84030 - DNA, 1522 bp, Heterodera glycines
  unsure (1)..(1522): unsure at all n locations
atgatcaacaatcatcagcagcagcagcagagatcgaccaccacacaaagtttttgctcgtcgatggcagcggacggaagcggcgccgctgccgcggcgaccgcaagcgtttcggccgcaatggccgcgacttcctccaccgcctcgacggaagtgtccaccgatctcggacatgtatttgccaagaagaccttcggcaaacccacctattgccaccattgctgtgacaaaatttggggaatgctttcccaaggatttgcctgcgaaggtaattagtgggagagaagcactcgctggtgatgcccctcttcccaaagtgtgcaacttcgtttgccatgacaaatgcatgcgttcgattgtgtccaaatgcacgggcttacaattgcagctgatcaaaaatcccgtggcccacacttggactgatggccagcacattaagttggcctgacaaatgaggggatgcaattagaaatggcgtccgtcactttacttccttcagacgccacttctgctgtgtgtgccgtaaaaggacagaggacggcggactgtcctcggagtgtgagatgtgcaactgttatgtgcacgtcgactgtcaggtgaacttcgcccttcggcataaatcggcgcaactttcaaggatttggcgttggccgactgtcgcgaggcgtccacttacgtgccatcgttagacctcgtcactcacaaacagcagcaccacatgcgcgagggtaatttggcaagggacgccaagtgcgcggtatgcaggaaaggctgctacacggcggagtgcttctcgggcttccggtgtcagtggtgcaacctgagcgtgcactcgacctgcttccggcagcttcgctcccaatgcgacttcggcgtattgcgcaagattatgctgccccccaattcggtgaccatcccacgtgccgaactgcccatggacatgctgctcaacatccacacgggctccatcggcaatgagggaagtcgcaaagtgtcttccccgtcgagaatgacagcggacgagcgggagggatggcctggggcaggcggaccgggccgggaggaggacaaggagagcgaggactacctgctactgcgcatctacgacgggaacagctcgttgcgtaaccaaatcagtcggaccgcttccgtgccgaagacggcgtcggtggagcaaattcgggtaagggtgccatgccaaaagtgcaggggtcggtaatgaatgagaatgattaggtgcgattaatgaaaccattttcacaaaactgagtttgtccttgaatacaaagacgtaattgggtatacccaaagtcttgtccttgccaattgttacgcttcacatttgcaggacatcgcactgagacgtttccacatctgtgacaacagagacaattactacatcactcaggcgccgcacgagtcgggggacgaggaggaaatgctggaggacccaatcccgctgagaaacgtgaaaaagccggagggcaaatgcgcccaangtggccaagggcagagtcagccg

SEQ ID NO: 84031 - DNA, 936 bp, Heterodera glycines
atggcacgtaagtggacgcctcgcgacagtcggccaacgccaaatccttgaaagttgcgccgatttatgccgaagggcgaagttcacctgacagtcgacgtgcacataacagttgcacatctcacactccgaggacagtccgccgtcctctgtccttttacggcacacacagcagaagtggcgtctgaaggaagtaaagtgacggacgccatttctaattgcatcccctcatttgtcaggccaacttaatgtgctggccatcagtccaagtgtgggccacgggatttttgatcagctgcaattgtaagcccgtgcatttggacacaatcgaacgcatgcatttgtcatggcaaacgaagttgcacactttgggaagaggggcatcaccagcgagtgcttctctcccactaattaccttcgcaggcaaatccttgggaaagcattccccaaattttgtcacagcaatggtggcaataggtgggtttgccgaaggtcttcttggcaaatacatgtccgagatcggtggacacttccgtcgaggcggtggaggaagtcgcggccattgcggccgaaacgcttgcggtcgccgcggcagcggcgccgcttccgtccgctgccatcgacgagcaaaaactttgtgtggtggtcgatctctgctgctgctgctgatgattgttgatcatggcttatcaaatgaaactatcagaaataatttcagaggaagacgcaaagcaaacagaaggaacacaaaaagcggccatgggaggagggaccggcggaaaaagcgacggcgaagagctcaaagggcgaggaacggcacggagacgcagcgacggcacgggcggaggggacggagttggggaagaaaaaggaacggtggaagagaaaagacggggaagaagtgaagatgagcaaatttgggagtggtcggggaaa

SEQ ID NO: 84032 - DNA, 343 bp, Heterodera glycines
  unsure (1)..(343): unsure at all n locations
tccctttttcggtttatttttgtcactttatttgtccccaaaagcagaaaatgccgcgccaagtgctcgaattgtccgattacttcgctccattagctgccttaattatggtctttcatttgccgcttttcactttgcttttcatcccttccccccccaaagttcgctttggccatcctcgtcttctctttcttcgtgatcaatttcttttacatcaccgatcgggacgacttgacagtgttntgagaaagtgatcagccaatcaaaagaacatcatcgaatttgatcatgagtttttcagtttggtgccatttgcacctctgtttgggccccattcgatgtc

SEQ ID NO: 84033 - DNA, 574 bp, Heterodera glycines
atggcggccctgggcgatgccgaacgcgacgagcacccaattctgccaaaagtcgggcacgccgaacattggcaccaagaaaaagaagaaggcgaagctcagaatagtcagcaaccactgagcgattgcattgggttaaacaacgaaaaaaatggggaaacggaccacaacgaaaaggtaaggcacgaagaggaagtcattttgggccaaattagcgaagaatgccatggcggaaacggcacaaaggacgacgccgaggctaacgaaggacagacggagaaatagcggacggaggaggagaagcgcgagcagtagcagcagcacagccaacacgacggtcgccaccgaagcgtggaaagcgaccttctgcagaagcggaagtgagacggacgaagctgagctgcaactgactgacctggacgtgcttcctttcgggccagcacttccatttcgggtcggactcgtcgaagtccgcctcgtaatgacgaagctcggaagcggtcaattgctgctcatttttattcttctgctgatgacgtccattttttggagcttcttccatttaatgaataaa

SEQ ID NO: 84034 - DNA, 131 bp, Heterodera glycines
tttggtgcccatttgcacctctgtttgggcccccattcgatgtccgacatttaccgagggggaccacgggattatccgcagccccaaggaacggacaaggagatgaacagctgaaaagtcaaactatctga

SEQ ID NO: 84035 - DNA, 397 bp, Heterodera glycines
atggaagaagctccaaaaaatggacgtcatcagcagaagaataaaaatgagcagcaattgaccgcttccgagcttcgtcattacgaggcggacttcgacgagtccgacccgaaatggaagtgctggcccgaaaggaagcacgtccaggtcagtcagttgcagctcagcttcgtccgtctcacttccgcttctgcagaaggtcgctttccacgcttcggtggcgaccgtcgtgttggctgtgctgctgctactgctcgcgcttctcctcctccgtccgctatttctccgtctgtccttcgttagcctcggcgtcgtcctttgtgccgtttccgccatggcattcttcgctaatttggcccaaaatgacttcctcttcgtgccttaccttttcgttgtg

SEQ ID NO: 84036 - DNA, 942 bp, Heterodera glycines
atgaaaacttgcgttgtgtgcacatgtctcgtgtcaattgtttattcaatttacatgaattggtttccggagaggcgccctttccattgtctgattcagttgggctatttcgagccgatgacatccatcacgaaagtgtgacgaatgctcgcttttagcttaatcattttaattatatttaaattttaattaataactatttatttcttccagtatatcaccgcaacattgccggacgcggggctttatgacgcggttcaaatcgctgaattggcttccatttgcattccctttttcctctatggcataacagtgatcaaaatggtgcacgatcacaagaagaatccctccacaagcataagtatttctttttttattgcgtggttttttggttgcgaaattattcattaattaactaattaatgaccttcggtaaatcccggtgatatcccattaacggggggggggggatgctaaagagagccagcgaaggaagaatcgtcttgtgtgggtctgaacatggatgggtcttttgaaaagggtcacttctcgttctcgacccaagaaatctgagaagatttattgtattgtattattcattttaattaattttatttagtccaagttgcgactgtgatgccgcgcgggagccaatcgaacggagaggagcgtgccaaatttgtcaatttgatgcaggaacgcactcggctcttctccatgtgcttgctcagccaagtgccctactatttgtcccacgcgctttaccaatcgtcccgaatttttgagctcagcgaagacaccgttcaggtgaaaaaaattggcagaccaataaaattttgaaattttcagattttggccatcctttggcaacttctcggcacaatttttcatgtccaacagcccattctgatgctgttgctcagcaaggatttgcgctcatca

SEQ ID NO: 84037 - DNA, 1910 bp, Heterodera glycines
tccgatggtttgaacgtcttcgaacttggctctgagaatgactttgacggttggagacgaaaatcacaaggaacagaattcatacagtttccccttggtcagatcgcgttctccaagcccaacagcccgtcatggtccaattctacgccgattggtgcggcccgtgtcagaatttggcgccgagaattgaggccaaagtgaacggacagaacggagaagtgagttggccaggggagggcactttcttcgccatgaaatgttgtcagtcctccaattgttttttttaattttattttggttttttaggttttgttggcgaggattaatgtggacagttctctcggttttcttactgcacaattcgatgtgacttcggtgcccaccgttgtgagcatttccttacactttttaacattcactcattgcctcgaatgaatgtcgtctttttgtctgcataattgagcaccccttttaggtgtgtttccataacggagaggtcattcaccgctttgagggcgacgtcggtgagtaaaaaaactatgcatttattgtgttttaagtgattccattcattctccttttataaataaggagcctaaattaaaaaaaaaaatttaattttaatttctttcaattagagattcaaaaaattcatattaagatgattcatatttggacgaaataatcgcgcatttgaaggaaggagactcggaaaatgacaaagaaattatttgatggaataattgcttttattttataagtatttgttttaattggtgtttgttaacctaattaaaaattttgaatttcaattttaagtattaatctataattttatcgtaattgaagtttgtccatcacacaatataaattttccatctcaaattaatttaaaaatgtagtagtttgtgtcttcctaaatgggtatattaatatgtccagattagttttttaagtcagtgagtgattagcctttttactgattgattcgatcatacataaaaactgataatcacaaaacaattgggtgcatagttttcttttctcaattagtaattaattaagggatttgccattttaaagtgcacagccaccaaaagccattcgtaagacgcccgcccaatgccaacttttgcagaacttttcgaactcagcgcaacgggcaaatttttggcatttaattaaatgatgtttttccaattgtccctctgcagatgtcgtcctcgttgttctgttcgtatacgtcgtctacaaattgttcttcgctcgtcgccatattccgcctccccccgacgtgccgcaagtcgaaccgttggagaagcaggacatgacggtggagcagctgagacgctacgacggagtacaagacgaacacatttgcatggcaatctgtggaaaggttttcaatccttccatttttatcatttacaattgggttgccattttcagatttacgacgtgacaaagggaagggactattacggacccgagggggcgtacggaggtgagcgaaaaagcattggaaatggggcaaaataacaaaaagcaagttgatggcaaaatatcgtagagcttttcagcattggctgggcatgacgcaactcgtgcactgggcacgatggatgtcaagcaaatcaaagacgaatttgatgaccacgccggaattgacccatccgatttggaagaagcgaaagagtggcaacagcgcttgtcatgtaagtgggatggaaaggttttgcttcgacccctagggggggggggcgggaggtaaagcatcgatacgccggatgtgccgccattttttgaacaatttcatatttttctcaaaattccagtgaaatacccgttcgtcggccgacttttggctccgggtgagcaacacacggagtatgagactgttgcagaaaacc

SEQ ID NO: 84038 - DNA, 680 bp, Heterodera glycines
atggcattgccaaacaggcctccgtatcttccggataattgggataatgatgttgagatgagcggcttaatgtcttttttaaaggtaaggcgtcttttctttttttatactctttcttaaatttctcatcttaggctcgacatgtcaactcgacaaattatggtaaactaatgaggaattttgtaatttaaccatgctaattagttactaaaatttagatagggtcattgagttttggaagagagtgatttcaggcaagttctttgaacttggaataaggtttgccaattgtgtagcctataagcctattgtttagattattgtcgtcaccaaaagaattgcattttttcgttggatgaactcaaattgaaattcaaacgaggaacgcaacttccgagtccgttgccaaccgtcgtaatggaaatgcaaaagtatccaagaaaattgaatcaatcaaatttcttcaattcgttttgcagtgccggactcgttcaatcgaaggaggaactcgaaaagcagaatcagggctggctgcagtggagcatctctttgctgaagccgaacagttggcttccgggcctcgcgaatccaacggacgccggaagaaggcacccattcgaattggtgcacatccccacactaaaaggaattttttagactttcaaactgatcaattatga

SEQ ID NO: 84039 - DNA, 1247 bp, Heterodera glycines
acaatggaaatggcaaaccaattgaagctggtccaagtggcaactgtgctagggagaatctaatccgattaaactcccttaatccttacatgtaatttctttgtttatacttttttcgaaaatcgttaattattaatttggatttttaagaacgtgccctctgtgcaacggttatttggtcgaagcgaccacagttatcgactgcttgcatactttttgcaaatcatgtctgctcaaatattttgaaggtgggcagcatccaattaaaaactaattttcatcgttattgaatttttgcctttcagataacaatgattgtccaaagtgccataaccaaatccaccagtcccatccgtctcattatgtggcatttgatcggacaatgcaggacattgtgtacaaattggtgccgggcatgcaggcggaggagcagcgacggagggaacaggtccacccgcacggatttttgttttaattagagtgacttgggttacaattttcctggtttatcatggtctcctttttaaaaatgtctatccttattttttgcccaaataaattttcaaattccatttgccgttttgcagtgtaaaaagcgccaccaacaaatgaaggaggcgcgcgaaatgaatggacgagcagcggaaaaacataatcatcagaacatttcctcctcctcttcagccaccgccgtcataccgccgccaaatacaaacgatgaaaattcagcggagtgcgctgaacagcggaagagcgcaaatttggcaaccgcggctcctaaaactgagaaaatggacgaaaacggcgacaccaatggtttgtcggtgtatttggcagcagtattttacagaatttgtggccatttgcccgagttgggtcggtaagcgagcgaaaagatatttgactggcatttttaaagggaattgtgcgcatcgcgtgggtgtttgctgtgatgaacaggacgcaaccacggcacaccgaagggtatgttaatgcaaaatttatgtcaaatccgaaaaatttattttgcaattcttacaattcagcaagacgaaccagtgctgatcagactggttccgggttcaactctcagccccctcgaccgcccatttgtgcgtctttcggcattttccactgtcaacactgtgaaacgtcttcttgcctttttgttgctcaacgatatcacaaagtacaacgactttgatgttttttgtaaccgcgaactaatgggacgcgacttttccatg

SEQ ID NO: 84040 - DNA, 135 bp, Heterodera glycines
atgccaaagaaaaaggtaaaaaaaggcataataaaagtcaacgtaaaagcctcaaaccaagtggaaaatgtgttatttacagggctgcaaaaaatatgcacgaaaaatggccaaaatatacgcataaatatgcaa

SEQ ID NO: 84041 - DNA, 2145 bp, Heterodera glycines
atggcttacagggcaatgggacaacatgccaaatcattcacatccgccattttgaacataatggttagaaaattttttttttttaatttaaggttaaaaatattttgaattgaaatagtaattttataagattttataaatggcatttaaaatacaaatttttcttttaaatttaaatttcccactaaaacatttaaaaaaaaaaaccaatttttgagttatgaaattgcaaattttccctagaattttggcatttcaactgtttatttgctgttagctgcacgaattttgtccgagctgctgtcctcaatgttcccaaatgttgtacaacatcaaattggtctctgctcaatgatgccaattttggcactgcttcttttgcctgtcacatttttgaaatcgccacaagatttttggttggacaaaattttgaattgaattagagaccggacaactgggatcggaaggaacccgggtcgggataccgaccgaatcccgtttcccgatcaatcccgaagattttggaaaaacgatcgggacggaaccagcagaggtcaggatcccgaatttaatcccgcgggatgccaatcccgtccccggcctctactttgaataatatttttgtttatttttaaaattttcataggttggccgtcgttacggcaatggtcaccacaacattgtccgtgttgttgattgtttttggcacttttcttgaccaacctgaatgtgccccatatgcgcatcatccgccattcaattcgggctcctttttcctctcaattggcatatttttcttttcatttggtggtcacagtgtgttcccgacaattcaggcaattacaaaaattaatttaaaaaataattattagaatttaattgcattaaaaaaatgttttaactattttgcaaacaaaataattatttttcaatgtcaataaaagttgtttcaaccattttcagcacgatatgcgaaggccgaagaagttcactcgttcttcctttctcgcatttgccagtaataaattattattttttaaatgttttcaaaattatttttcattttttttcaaataaatattatatatttttttaccatttttagttgttgcttcaatgtatgtgccaatatcattttttggttattacgtttatggcgattcgttgcacgattcaatcattagctcaattcaaacgccttccattcaacaggtaaatgtgaaaaattaattgaatgaatcaactttaaatgttaaaaaaataaataaatttactattattgggatttcttgaatatttgatccagaattttctaaaattttcccggcggagtttaaaggcaccaccggatcccatttttttttttttttagaattttccaaggcctgaaaatagccaaattcggcgccgaaaatttatgtcaattacattgggaaacaaattttttgactcgaaaaacaaaaaaaaagccaaactttttttctggttatatatctgtttaattccgccatttttcatgtttaaataatttcgtaaaatttaaatgcattattattttgtcgaggtttgcttcttcatataggacatatatgaataaattttttatccaagttttgcaataaaattattaatttttaatttcaaattcattggcaccttattggctttccgttgttttctacattcaaaaattctgaggcttttttttacagttcgccaatttgtttattgcacttcactgtattctcacgctgaccgtggtgatcaatccgctgaatcaagaaattgaacatcttctcgacattccgcatcgtaaaaatccgtttaaatattttataattttttaaataaattttaagagtttggttggcaacgcattttggtcagaacatttgtgatgttttccgttgtttttgttggactcactgtgccaagttttgggccaattttgaacctcattggtggcacaactggtgaatatgaaaaaaaaattttttttaattattattttttaaaattttcagtggcactgacatcagcaattttgccatgcctttttgatttatatttgcattcatcggacaacaaaaaaggcgtgcaaaaattgggcggtgaccaacagcagaacaccactaattttaaacg

SEQ ID NO: 84042 - DNA, 1906 bp, Heterodera glycines
tctatgaatattgtttcgccaaccgccgctggtccaaaacttccaaaacacaagccaaagcttgggaaatttatctatttggtgggatttctttttatttcttaatataaattaaaatttggtatttataataaaatattcaaaacaaaacaaaaattaattttaatgtgccaattttctgctttcagctcgcttttattgctgtcattggtggttttttgtttggttatgacacaggtgaaaaaacattcttctatattgtaaaatatgataaattatattctaaatttcaggggacttaaattaaaacattaatttattttttaattgaacaattcaaattaaggcattgtctccgctgcgatgctttacgtgccaaaaaattcggacctgaagccgatgagcaacgcatggattgggcttattggtgaggaatttttgttttagaaaattaaatttttattatagtttcaattacgccgggaatggccggggttggagcactgcttgccggaaaagcatcagacatttttggcagaagaaaagtaaaattgtttaaatgatggaatttaaaaatagtagaaatttaattgattcacaaaatcttttatttaaatataaaacataaaaattattaattttcctttccagatgatcattctttccacaataattttcacatttggtgcaattgtatgtgcaattggtctaagcaaatggattttgttggccggacgaattttgttaggaatagcaattggtattatatcttaataatataataaaaaataatattcaatttgtagggtttgcctcaatgattgtcccaatttatgttagtgaatcctcaccagcgcatattcgaggtgtgttttgtattaattaaatttatttatttaattcttatattatttttaatatttttttaaattgtttttttaatatatttgaaatattaaacaaaaattgttaggtcgactgatcaccagcttccagctgatgatcacttttggcttagtagcagcaaatatttttgcgttcgcgttttcctacattgatccgttgaattggggctggaggtaatcatttcgttattgattaattatcatttaaatttaataaaaaatctttttttgactaatggtcggatttgctgcaattccgagtgttgtccaatttgttggcttttggtttctgcccgaaagcccccggtggctttatgagaacaaatcgcacaaggaatgtgaggaggtgttgagcaaaatttacaatggcgacacggcgtggattcaatttggtgtttaaaataaatttttaaaatttaatgtttaatttatagagctttctgagattcaaacagcgcatgaccaacaaagacaggatgcagcaatttatggtacattattcttggattaagctgatcgttattggttgggttctggcaattaacagaaagcttcggaaggcaatccgaaatttggcaaaaaaatagtccactggaaatttaaaaaattaatgccattttagcgctactttaaaagtggtatttttgaattttattaaaacaaaagagggggggggggtggcttttggtttattaatttttttgtgataatgtctaatcataaaaattgattctggaatttttgggggcccagatcacgaatctgctcttttaaccaattcctacttcctagcctaaattagaccaaaaaaccataaaacaataaggttgaattttcggaattttcgacttttgttcaagtacgggttagggaaaggttacgggcctaaaggcctaattaattatttaacagtatccaaaattatctaataaattttctaacaaataaatttaaattataagaatatttcaggctcaggaagcataatttggcgaattctg

SEQ ID NO: 84043 - DNA, 692 bp, Heterodera glycines
atggctctgaaaatgggacaggttaaggcggagtttgacttcgaagctcaaccgggcagcggagagcttaccataaaaactggtgaaattcttaccattcttaaggaggtaaataataaaaagtgtttgacttttaaaaagaaaatcaatccgttgcagggaattgaaggaggatgggtggaagggcgaaactccaagggcaaagtcggactgtttcccgcgagttacgtcaaaaagttccaagcagaaaacgccagcatttaccctcaattgtccatttcgaaggtgagtcggcggttttacttcgcgaactgtgagtgtcaaaatctaaaaccgtttttaacgttataatcgatttggtatttaaagtttcgttcttttttttgccatgcgctaaaaatgacctgaaaaatatgtggtatatttttagatttatttaatttaacatttttttaattagctgtaaatttctctattagataaaatagtatataaaaattgttttaagcgatttgagcactcaaagttcgcgatgtcccttgttagtcatttcattccatgagtaaaagggttcgggtctggcaaatttttgaagtttaaatgtaatttaccaaatgtcaaaattcctgatttttggtctcttggggagtgtgtttatatagagtataatctattttcataaagctattaaa

SEQ ID NO: 84044 - DNA, 703 bp, Heterodera glycines
atgatgaaaaagttcacagttgaggaggaaaagctcaacattgaaatgacctccggggcgattgtcgcctggcaagtgtttgagcctctggaataaggccatttgaaaattttagggatgggattaaaaatgttttttaaatctcaaattttcagttcattttcagtcctaaaattcaaatatttgcaaaatttgaatgcctaaaaaaatatttttcaaaattttcgatatcaaactgatcagtgtccctcctccgttttcaggcaaaatcggctcagtgacggtgtccacaattggggaggacgaggggggagctggaggggcgtgagctcagcgtgtcctactcactgaacgcacggaatgttgaaacagtgaaacatttataataatgaatgcataaattggacccagagatgggatctgatcgaattccggaccacccaatttttatgaaaatatcaattttaatgccaataattgttattaaaaaaaattaaaaaatgacatttgcttccattttaaaaacttgaaaaattgttattgttaattttttaagaaatttgacgctttaagaggtggaaaacagggaaatgaataacatttcaacaattcgtaatttttttttgaggccggatttctgactccgtcaactaccctcggctcttagtttttgagccattgtttcttattttgaaaaaataaa

SEQ ID NO: 84045 - DNA, 1660 bp, Heterodera glycines
atgtatcattttcttttcttaatttgcctcgccgcactgttcgccccccacggcgttttgtgccgtcataagcattttcaccaccgagtgccaatcatcgatttggacggtgccgaacaattagtgagtgccaacttaaaaagttctcaaaatttaaaaaatgccattaaattcgttcaggtgggcacaattcgtgaagacgatcgaacagtaaatgtgtctccaaagctgcgaatttgcaaggaacaggtcattataatttattaataaactttctggcaatttaccgtatccaattacatcgtttgaccattaccgtacccctaggccctgtctgtcattatgaggtcagctgggcggacgaagacgcatttggtggtgcgcaagtgccattcgaagtgcgcattttggacaccgtggacggaacggcccaaatccggcacaaagacggaacggaagcattggactgtgcggtgaaggcgcaatttgtcatccgactaagtgcggtgaaatgcggcgacgacgcggcaaaaagcgaagcgtaaggaaaaaaggaaagaaaagccatgaaattgttaattaattaatcgtttacctctgctgttcagagtggagctcaaaattgctgtgcaagatgttaacaatcactccccccaatttgatggtacggtaattccattgttacggtcattccatttgcatatattaacgatcggctgggggaagccctgccctctccaactccccaatttgcttgatcatatttgatcaattgtcgcttcaatttcgaattttccctccttttcagctccttggtattccttcgacgttgacgagggccaaactcatgccgaaattgcgcgactgtacgcccacgacaaggactgcggccacccgtacggcgaagtgtgccgttacgaattgaccaatacgctcgcggacagtcccttccgcatcgattcacgcggagtgctcagcgcacaacgaccgttaaaccgttctttggccgagtcgtatattttgacggtggtggcagaagactgcggaatggtgtgttgattaggcagtttaagaaggaagaccaattcatgaattaagcatgtgtttatactttttgataatatgatgcctaattagggttaattagggtaattaattttccaattcatccgtttcagctccgttcaaagtccgtgcttgtcactgtccacgtccgcccgcgttgcgttgatgcgctgcgctctaacggcacggcgcggggtgcgcgtcatgttgaacaaaacgatttgcgagggattgtcgtgtttcctgatgcggaagtaatgacttgggaggatgagcacatttcaaatctcacatttgccaggtgatcgcattcggcgccgcgggtgcggaatgccaagcggaagcggacctggagttggagcagatcggctcggagcatcaagtgaaggcggacgcactggcggagtgcgggctgagcagcgcggacgccgtggaactgttgccggaagaagaaggaatacggaaactccagccggacgggatgaagaagaagaaaaaggatgaagccgagaaagaggacgccgaagcggaagaggaggaggaagaagcggacagagacacggaagggaaagcggcattagacgggaagacataa

SEQ ID NO: 84046 - DNA, 551 bp, Heterodera glycines
atggacgagcaaaactcttctgaaccgctaaaaaaggtagttcaaaatgatagcacctactttgcataaattttcatttaaagatttttctacttaagatgtgctgctactgcaaaaacgtctgttctggggcgcaccagtgccgtaaatgctcaaagccgtgccatgcaattgctccttgctcatttttggctgaggacgatgagggattcggcgcaaaagtcacatgctgcagctgttggctcgacgatgacggtattatggaccaaaacgcgaacgccattgtgataaatgaagcaaccaataaagacaaagacgacgacgcgttcaaacaattcgtcaacacacaaacaatcgcagaggacaacgacaacaccgatgcattggcttcaccatcaacgcgcaaacgtcgcggctacaccatgaccaaaaatcgtcattttggacttcgccaagacgtcgtccattcacgccgccagccgacacttcaaagtggacgaaacaccgttcgggactggaaaaagcaggagacggcattgagaaaaacgtaa

SEQ ID NO: 84047 - DNA, 729 bp, Heterodera glycines
cgacctaacttctgaacaggcaatgctcgagttcgtccgacttttagacgtcgtctgtccatcatttcgcgcacaattagaaatcgaacgcaaagcgaagacaaatgagccgaatcaaaaagccaccattgacaatccatcaaaggattcgtgagtttcctctgggataaattccgatgttcaatcccattgataattaacggctttccaattaatgtttactctgtcactgtcttttgctttcctttcattcttccgtcaaagttcatttgcatttgtctgctgtggtcttaccgtattccttcccctccaaaatgtgtcggcggcacattctctcccccttttccatcgattcccctaattggcagcctttcgttgttctttctttcatctttcgttaatgatagtttttcctcagtgttcgttgattttcctgatcaattccactttctcccgcccaccccccccacccccactttttaattctttcccttttcagcaatggacagtccaaaaacgattgtcacctcaatgtcttagtggacagtgcgtccatccgagcgcaagaagttcttgaacaatttgaacagcaaaagtcttttttttgttcgataatgctcacttttttctttccttttcagacgacaaatccaagaggcacttaacaaacaaacttaccaccagtttttggcctatgctcaacaaacgcatccaggcgaaccgacaaag

SEQ ID NO: 84048 - DNA, 118 bp, Heterodera glycines
atggacgtcattgaatatgaatcgccgagagaacaaacagaaattagtgccaatttgctttccgattttggagtaactgctcagcaggcgtataaaatcgccgttactttttacaaaa

SEQ ID NO: 84049 - DNA, 422 bp, Heterodera glycines
atgggtgcacccggtatttgttgatctcagagccatctttgttctgacatttgaaataaattaacccaattcgaaataattatggcagtttgtcaaaaatttctaaaaaaaaaaatttttttgtcacaaaacttgaataaacgttttctgtggatttcaaggtcgcttatttgttagtacaaaagcttatatgaaactataaaaaaaacttattcaaaattaatcgtaatggattttcagggattcgtggccagagcaataccctagaaacatgtaacatgacctacaaatgtcaaatatttgacgatcgcctcacgcccgcgactgctcaatgcgcgtgcctttttgtccgccacccaacagtgaatgccacgccgtccggaaaagacccagagcaaatgttgaaagccaaaatgagctaa

SEQ ID NO: 84050 - DNA, 149 bp, Heterodera glycines
atggatcatgcacggacccaatcacttccatcgcaacaacgactttctgttaccggacgaaaaggcagcgatgttcagcgaaagaggagtttggtggagcacgcagaagcagctgggttcgacaaaaacacaatcattttgacagtaaa

SEQ ID NO: 84051 - DNA, 793 bp, Heterodera glycines
tggaagagaaagtggaaaaggaatagaaagtctaagcgaaagtggaacaggaacaggaagtggaagagaaagcggaacaggaatagaaagtggaagagaaagtggaaaaggaatagaaagtttaagagaaagtggaaaaggaacaggaagtggaagagaaagtggaaaaggaatagaaagtttaagagaaagtggaaaaggaatagaaagtttaagagaaagtggaaaaggaacaggaagtggaagagaaagtggaaaaggaatagaaagtttaagagaaagtggaaaaggaatagaaagtttaagagaaagtggaaaaggaatagaaagtttaagagaaagtggaaaaggaacaggaagtggaagagaaagtggaaaaggaatagaaagtttaagagaaagtggaaaaggaatagaaagtttaagagaaagtggaaaaggaatagaaagtttaagagaaagtggaagaggaacaggaagtggaagagaaagtggaagaggaacaggaagtggaagagaaagaggaagaggaacagaggaagaggaacagaaagtggaagaggaacagaaagtggaagagaaagtggaagaggaacagaaagtggatgagaaagagaaagtggaagagacagtggtagagaacgtggaagagcaacagaaagtggaagagaaaatggaagagacagaaagtggaagagaaagtggaagaggaacagaaagtggaagagaaaatggaagagacagaaagtggaagagaaagtggaaaaggaacagaaagtggaagagaaaatga

SEQ ID NO: 84052 - DNA, 669 bp, Heterodera glycines
atggctcgagaagacttcatttcacattctgataagaaaaaagccgttcaattttaccgttcttctgaaaaaggacaccggtcactttcatgtatgcggtcaaaatttcgatttatcaagagtgaatctgacctaaaaatgctccggaggtataatgaaatattttttctgtaaaatatagtattaagattcgaaaccaatcttaaaaaccaaatggaagcattaaagcaaattgacgacattgttaaagggcaatttgtggagaaaacggcattaaatttaagtttatctgatcaaatcctccgaaaataggcaatttccgcaaacaacactctcggggacaacaaaattgttaattttaaagcgtcaaaaaaatgggtcactgcttttaaaaaacgccatcgcatagtttcgagaaaggttaaaaataaataaaatagtccaaaaaataaattattttagatcacgaagttcatttcaatgttttggtcccagttttacgccctggagaacaatcattattgttggtggatagttggaatggttggaatgattttcgactcccggataatgttaaattaaaagtgaagcaaatcccaaaacatgcaactggaatatgccaaccattagatgtttacattttccggtagttttgttgccaaaaataaa

SEQ ID NO: 84053 - DNA, 2046 bp, Heterodera glycines
atggcgcgggaaaagcaacaacagcagcagaaaaagcaaaatgagctccgcaaagatatgacaatgttggatagagcgattgtggcagttgaaaatgcacgagacgcagcagcggaaaatggtgggcaaaaaaaaaatgggaaaaaattgggaaaaatattaattgtttattttttctaaaaattagagtagagcgggaccgggccgggaattcccggtcatccgaggtcccggtcccggatttttaaaagctcaggtcccggtcccggtcgcggtagggcaaccgggaaaaacaagcactggtaagaatgggggtctgacaaaggaaggtccccgggtgtccgtgggatttccgaatgaaatttggtgggtggatagagcacccatgggttcttaagaaaagtgtttttattttctgcgaaatgagtctgagtgccgagttatgacgtgccaaagttttttttattgcaataaattaaataaacatttgcactgttttgtgttgttcggtggtgcggaggttgtgctcctgccttccctttttgccctcgcaggttcgaatccctcatatgttaatttattttccccgttttatttttgattttatgcaaattaatggccattgaaatcaattccatcgggtcaaaaatttttattccttctttttcattcaattttattcattttcacacaaattgtaatcattaaaaaaatggttaaagcataaatataattcacaataagcacaccgtaataaaataaaacattcacaatttaatttctgacacatgtcattttttggcacttcaaagcagtatttaacgggatggcaaaaatttggcagaggctcgtccccgtaataacccgattttctccaggcaaaattaatccatcccatgaaaacgttctgcttgaaactgattatggattaacgattgtaatttaacaatgttatccctgtcgtgcaaatttattttcacatcataaatcattacaaattccgttatttttctcgtaaattgcttacaaattctaaaactattttttattttatttttggcaacaaaactaccggaaaatgtaaacatctaatggttggcatattccagttgcatgttttgggatttgcttcacttttaatttaacattatccgggagtcgaaaatcattccaaccattccaactatccaccaacaataatgattgttctccagggcgtaaaactgggaccaaaacattgaaatgaacttcgtgatctaaaataatttattttttggactattttatttatttttaacctttctcgaaactatgcgatggcgttttttaaaagcagtgacccatttttttgacgctttaaaattaacaattttgttgtccccgagagtgttgtttgcggaaattgcctattttcggaggatttgatcagataaacttaaatttaatgccgttttctccacaaattgccctttaacaatgtcgtcaatttgctttaatgcttccatttggtttttaagattggtttcgaatcttaatactatattttacagaaaaaatatttcattatacctccggagcatttttaggtcagattcactcttgataaatcgaaattttgaccgcatacatgaaagtgaccggtgtcctttttcagaagaacggtaaaattgaacggcttttttcttatcagaatgtgaaatgaagtcttctcgagccatttttttgtcggttgatgggaaaaaactcgatccactcgacttttcttaattgaaatattttaaatcttaaaaatttcagttcgttaggatttgtagatgttgaatactatccgaaacagtacggtcacatttacattttgccaaaacaatcggccttcagagtcacgtttgcaaggacaacaacacccgcagagcgtggctccgccgatcaccgtcacttttctgctgtttgtcactgccagctgattgtgaccggcgtacggagagtggagcacctcgacgagacttgacagaacatggagacgatggtcaacagaagcacttacag

SEQ ID NO: 84054 - DNA, 1714 bp, Heterodera glycines
atggcgatgctgacgatgtcgacgacaacgacgaccggtggtgatgcggaaccgaatcgacggcggcgcccgctgcgctttctgttctgggatgtggagtgtgcccaagtggcggacgaaaatgaagagggggacgagggagtgccggcgcgagtgctcaaacatgtgccgctgctggtgtgcgcggaggtgatctgtgagcggtgtgtggcggctggcgtggacctggagcgcgagccggaccgacgggcgcctggctgttgctgtggcggtgcggcttggcgagacggacaacaccgccagtggttgatgcgtgcgcgcgaggacgcgttcagcgacgacgacgacgacaacgcggacgggggacggcggtggcggcgaccgaacccgcgccgcttgcgtttcttccacgacgcggcgaacgggcgtacgcctatggcacagtttgcagactttgtgctccacgacgggcccgtgaatgtgcgcaccgtgatgctggctaacaacggggtacgggggtgtacaaaagcgtagttgaagaaaagctaccatatacgctttgtaggggcggtacgatgtgcatttgctgatggaggagctccagcggcgcggagtgcgcccccggcggctggtcgccaccgggctgcgcgtctacacgctggagctgggcggacgaaatcagcgcagcgtggtcgccaaggactcgctgaactttttcggctgtgccctgtccaagctgccggccatgttcgggctggacggcgtgccggacaagccgttcttcccctacaactacatcagggccgaaaacatggatgtggcgcatgtgggattgccgccggctgccgactacgacccggaccggatgcgcccggcggagcgcgacgcgttccagcgctggcatgctgaggagcaacagcgtcgacccaaccgactgttcgtgctgcgccgggagctgctccgctactgtgccaactacgtgcgcattctgcggcgcgcctgtctgcgcttccgccacgtggtcggcgagctgtcgggcggcgtggagccgttcctggccgcctccaccatcgccgggctggcgctggccatctaccggcaacaacatctgccccgtgatctgatggtgcacacgccggagggcggcttcctgcgcggacgacgcgcttccgccgcctcgcgccacttcttcgcgctgctggagagactgcgcccgcaatggcgcggtcgactgcgcactgcgcgctggtccatcggcgaagcgtgcgtggaggacgacgggtaccggctggacgcgctgctctaccgcccggtgccgctgcgcccgctcgtcatcgagttcaacgggtgcttctttcacggtaaggacgggggtggaggggctccttttccatttgcctcgtccaaggttgccccgagtgctacccgaggcgccatcaagtgttggcgggcggccaaaccgccgagtcgctgtgtgccaggacacggcagcgtgcctgggagctggagcagcaccacggcttcgcggtgcgcacggtgtgggagtgcgccttccagcggtggctgcgccgccagcccacccgagtgcggcgcctgtacacggatgtgtgccgggcggtgcccggcccgatggacctgcgccgggacgcgctgttcggcggccgagtggagccgttcgcgctccactacacgtgcacagagcgagaggaaatag

SEQ ID NO: 84055 - DNA, 812 bp, Heterodera glycines
  unsure (1)..(812): unsure at all n locations
atggaggnacttnaagnagaganagagaaantgaagcttattatggaaaanattgtgntgnaggngaaagttganaaaatggaagaggaaaaggganagtangaaaaggaattaatgggtaattanagtaagggaatantgtattttanagaataaagtaattttgagattntgnngannannaaatnaaaaatangnaaaatggtnagnagatggaattgataaagganaagnaaatggtaatgaangggagggaaaagnaaaaaatnagttaaataaaantgaaattggaaaatggatatngtatggatnagagnnaangaaaaatgaagaaaattgggnanntaaaatntttaaaangataaaatccggacaaattaggaattcatcattcaaagcttttaatgagttaagtttaaaaatctgaggatgaagtcgaaccgacgccatctgtgagagattgaaccagtcgaaaatccaaagaaattaaattatttttgaaaatttcaggggagggggttaaaacccaaaagtacctcactactcttttttgtcattttgagcgcctaagaactctataaaagtgctttcggatatttttggctctgtgccattgatacacatttagcttgaaattttggtttatgaaaaagcctcttttctttcgtgaaatttaaataatttaagaaattttcgagtgcacaacgccaatcgaatcgttgggattcgaatgcttgtcacaatgacattaaaatcagtgatgacaaaattttgacggtccttcaaaaggaggatatgggtaatttttatta

SEQ ID NO: 84056 - DNA, 957 bp, Heterodera glycines
atgttcttttacaaagtaaggggggggggggcagggggagtaattttcaaaaaaaaatcgaaaatttaagaaaaagacaacccagtcgaagacgaattctgaccagcagaagatgtgggaacagaagtttaaggaaggacaagcaaagctcactgaggtgggatcattttaggagcaattaataaccaattaattttcttttagactatttttgtcaaattctgtgaataagaaaactcgtgaccgttaaaatttaaaataatttttgaataatttttttcaaaaatttttattagaatttttttatcgatttttaaagattttgagccaaaaatggatagttgtcagtttttgaggaattttctaattaagaagaatggttcaggaggtgctagcataattggaaattttaatgaatttttttaattgccaaggaaaattttccatttctttccctccttcttttcatatacatactcaaagaatattgaacatttattttattaaaggccgaagcccagaatcaaaagttgaaaaatgacattgagaaaatgcaggcaaaattcgacgggaaagtagcgcaattggaaaagaatttggaggaattgcagaaaaatgtaatgatttgatttttcatttatttatttttaggtcatattagggtggggcggtaatagggatcggaaaccgattggggaatccatttctgttcaagtctaaatcagaattgaatttaaaaaagttgaaaaagaatcgggaaaaaagtatcaaagatattttctatatgtttattttttgaatttgaaaaattgaaggcacttttgaaaatttatttttttcagcaaaaggaactggtgacggaacataatgaattgaaggcaaaagttgacaaaatagaacagcaggaacaacagaagcagcagcaagaagacagcagtaagacacagacaaacgatg

SEQ ID NO: 84057 - DNA, 1140 bp, Heterodera glycines
taattaaatccattccttcgggggaccgtgctgggtgccgcggggtaagcagtgctggttcgtttcatcacggcaccgaaccttttggctagtcagcaatcgttgcttaacttgccagatcggacgggtgcgcatgattccactgttccaagcaccccaccaaaagcaaaacgatataaccaaaatataaggaaaaattttttaaaaaattttttctccatcttcctttttgatactaaagcatcagagtgctaaaattaagttgtaaataaaatttggtgcgctttagagcactttctgaaaaaaatatttatgaaacaaaaaaatcgattttttcaagtgtccgtttggggtactcaaacaattatggggagcaaaaatccaacgcagaattaaagtacaggctatagggaagctactcccgaaggattcggtctccccataaatctgggcgcatcggttcggggggactgccccgaaaacaaaaaaatcgattttttcaagtgtccgtttggggtactcaaacaattatggggagcaaaaatccaacgcagaattaaagtacaggctatagggaagctattcccgaaggattcggtctccccataaatctgggcgcatcggttcggggggactgccccgaaaacaaaaaaatcgattttttcaagtgtccgtttggggtactcaaacaattatggggagcaaaaatccaacgcagaattaaagtacaggctatagggaagctattcccgaaggattcggtctccccataaatctgggcgcatcggttcggggggactgccccgaaaacaaaaaaatcgattttttcaagtgtccgtttggggtactcaaacaattatggggagcaaaaatccaacgcagaattaaagtacaggctatagggaagctattccggaaggattcggtctccccataaatctgggcgcatcggttcagggggactgccccgaaaacccaaaaaaaaattttttggataaaaattatttaaatgaactgactagataatatttaaaataggttatttctcttcctttcagtatccctgcaaagtttggtgcgcttctgatcagtttctgaaaaaaaaaataagcctaaactttttggccagtttaaaaagga

SEQ ID NO: 84058 - DNA, 647 bp, Heterodera glycines
atgccaattgaaccatttgaattggtgaatgaacggaccaatgagaagctgacactgacggaggatgaagattacgatggtgaattcattggcggtggtgaagtcattaaagattggctgttgaaacggtgtccaattgttggggagacggcggcggttcagcagaagaagaaagacgaaaatttggaccatttgtgcggactctacttcaatcttcatggaaattgtattgggtgagcggaaaggaggcttatttttgaatagagcccggaggggatgatacagtagtgtcctctctcttacagtactttcccagaatcttggcagggccaggggttcctattaaacaggccttgtccctcctgttctcgtccatctcgaaaaccctggtcctcttgtccgaatttttttcaaaattccgtgctctacttttagctgttctcatccatttcaaattttgcttaatttaggccgctgtctccgccagatcaaagcgatgaaaaagtgttctcttttcccggacccagtgatcagcggaagaagaaaaagtgatcattttgggaaatgaccgatcatttttgagttgtgatgtattggattgattgatcatattttgtttggcacatttaatgctgatttgtgagtta

SEQ ID NO: 84059 - DNA, 935 bp, Heterodera glycines
gttaattccgtcttctttttcccctcttaaaaacggaaaatgacggccaatgagtcctttgccttggatatggcaaaagttgaattggtgcccatcagtccggtcattttgcgcgtttccttcatcatgtcactggcaatcctcggcaatgtgctgcttgtgtttgtcatccgtcgtggcaatgccgtggcacgacagcgtttgtcgccggtccaggcacggaaacggaaatccaattggctatttgcaatttgatggcactttcccctccctcgccttcagcttctcctcctccacacttgcactgctgacttgctcttcgctttggtcatttgccaatgcctttcctcgctttaccttcctttttgcttagctttctctcggcactcaaattgccattctcgccacttatccctattttcatggacctgatttggttggtatgcccaaacttagcccgtacgaccctttttaagttgtgccgttttgtgcgctaccttcaggcgttgccaatgtacgcgagtccgtgtgagtggggggggggggcaatgttcgcaatgtctttctcgctttatccgttaagttcttctggtggccataagcattgaccgttaccaagtgagtttagctcggttttcttccaaaattggcactttttggcgatctgtcggcccctcgcccattaccgtagtgaccgttaccgtcgtcccaattgccttgggattttcgcttggcttttggcccttctctgctccgtccctcaattgttcttctggcgcaaggattccctgagcaatttgtccctttttggagaggaccaaaagtgaaaccaaaacaacgaatttaccctttttatggtaattttttgatttagcgaaactccgatcagagaggagtgccacaccatctacagcatttacagtcagtgccatttc

SEQ ID NO: 84060 - DNA, 948 bp, Heterodera glycines
  unsure (1)..(948): unsure at all n locations
actgtgaatgccgccncacagggcttatctgcgcatggtggtcncgctctgtccaccagcccatgggaattgtcgccgggccggcacaaatttggcctccgcgtgaccatcccgggactcagtgccgagcagttttgaaagccaattcggctccatccgatacagcatcaaagtgcagcttgtcggcaacgcggagcatgtgaatagggccataattttattattggcaaattgatcgctgctcatttcttttccattttattgctcatttgtcagtgttcgctttcccccgcagtgttcggccgtcgaagtgttcccctttttggtgttggccaagtcctactttgacgacatcccacatgccatcaagcactttgactaccaagacgaaattgacttcaccgtctgtacgcttccgttcggcacagtctgccttcagatcagcttgccccgcaccggcttttgtttgggagaggttaagccagggaattcctgccatttgtggtaacgggaaaagtctcggagttgggctcggactggtctcaagcgtgacctggttcagtctcgaggaatcgtggtctttggtcctggtctattttctatgtttgggacaaaccccgcttttcgggaaaagtctcgataacaaataattagatcgatttccgagtataagggtaaacttcggcttcgttaaggtgatcagagcccatcttcacgtgagaaatgggacacggaaaacgctgaaagactgccgcctccaggcatttaaaagccatcatttaattttgtggctttaactcatttctgctggtaaatgcaccctttaagttggtactgaagacacaattcgaagcacggagccgatatgagcaggcaagcgaccaaaaactggtggagaatgtgatggactcgtacccattgggcaaagtgaaaggacgcaccgatttg

SEQ ID NO: 84061 - DNA, 885 bp, Heterodera glycines
atggccggaaatggaaatgaattaatgagaacggaggatgacgaaaattctgatgattttttgaatttgtttgaaaatttggaactgacgacttctgaaaaattggctagtctaagggaaattgagaaaatatttgcggacaccgcaccaccgccagctggtcaaacgccaattgaaaactcagttcttgggtttgtgttcatctcacaccccatattgtgggcactggtacaaccggacattttgggcgaacaaaatgagctattggaccggaaaagtttaagcttaaaatcggatcaattagtcttccaaagtacatcaagttatgtgacgactattacactggaccctaacaataactggccacatttcacacaaatttcgttgaattggaacaaacaatctctattaggaactcgggtcaaaacaattgatttgaagcaaatgacttctcctccaaaactgggacaatcagtgaatcaaattgtcccttcgagctgctgtggaataattagggaagtgatccaaaataaaatcacctcagacattatggccattgatgtctttttgtatggggaagaaactaatcagcgttttttcccccaccaaatcgattcaagcgtcaacctgacggagttagaagaaggcacacgggttcaaactacgggattttgggccaaaacttctgcaatggaatggccaacttcgagtgatggaattcgcgattggtggactgagcagatctatatagggacgaacttaaaaatatttggcgctgatgaacatgaagacattcatcaatggctccaaaatgaacaatttcgactatcataccgttacctatgtgccgccatggacttgcaacaatcaccaaaacgcagatga

SEQ ID NO: 84062 - DNA, 276 bp, Heterodera glycines
ccacaatatggggtgtgagatgaacacaaacccaagaactgagttttcaattggcgtttgaccagctggcggtggtgcggtgtccgcaaatattttctcaatttcccttagactagccaatttttcagaagtcgtcagttccaaattttcaaacaaattcaaaaaatcatcagaattttcgtcatcctccgttctcattaattcatttccatttccggccatattttctgtttcttgcccgcaggctaaggggataggagaattgttgggattaat

SEQ ID NO: 84063 - DNA, 304 bp, Heterodera glycines
atgcaaaaacctattccttcaaatcgccccaattcttctgtctccaaaacccttgcctgcgggcttgaaaaaattgtgaatttgagtggaaatgagccactctcggtgccggtgctggcggatcggagtgatccgctgggactcaagtcggtccaacccgacccggtgccaatggaaagtgccgaggctggcacaaaagaaatggaagtgatggaagtggatgaaatgagcggagaaaaagggaaaaagggagaaatgggtaaagaaaaggtgaaaagtggtggaattgaagaggaggaagaaa

SEQ ID NO: 84064 - DNA, 1319 bp, Heterodera glycines
atgaaaattgtcaattccaatggaaaaactttgccaaccccgcaaaatccgttgccgaataaagtgatggcattcagaagcatttcgatctagtaagaatgatttgtgatcaatgaccatcgtcatcatcataccttcgtttgattttcagcttcatcgaccaaaatgtgttcacttttctccaccgctttcaccgttttctggccacttgtgcaacagaattggccattgccactgaaaatgttcgaatttcggcattctttgtgctcaacatttggccgatgttcaacaacaccaccattctgatgcatttgaacacaatgaattttcatcaaatgcgcatgtttgcgccgtcaatgctcaacgattgtccatgccttcgcgttgtcactttctacgacggcatttccaccgaatttccgcccgacgacagtgccaatgcgacggatggccaagcggtggccaaatggctgttcacgcctcgtgccgacaatttgccgaagatgctcagaattgagaagacaacggtggatcaatggttggcatccgtggaacaaatcaaaacggtgagtagtccagtttaatacgttttttggtggtaaattctaatggagctcctccctctaattttcgaaaaaaaatttgttttcaaaagccttgaaaatcccaaaggttttcggtgttgctgtatccgacatccgtttcagccaattccgaaccccagacccaaattcaaacaaaaagtcaaaactcaaatcttcgttttttccatttttagtctaaaaataatttaaatgatcttttattgaagcaataatgacttctgcttcgtttctgtgtatttaaacaaaaaattgaacaaaaatgtgaaattcaaaatttgatttttgttcgaattcgagtccggagtccatgtcttttggaaacaaaaaaaaattttttgaaaaatggggggggggggggtaaactaccacacatattacccttccttttctttttaggcatttttcatcgcttcttctcccgttaatttcgtcatttctatcgacgttccgccgttgtcttcgctttcttccgccgttgtgccatttaaactgaccaacgcattcaccggggagaaattgacactgtcacaagaaaatgcggaagatggaaattgttttttgctcatccgttgtccactttctgcatgtgatgaggaaaaatgggagaaggaaatggaagcagaatttgatgctcgacagaacaaaattggcattttcattggctacggcggaatcgacaacgggtgaacaattaatttaaagatgctcaataaa

SEQ ID NO: 84065 - DNA, 457 bp, Heterodera glycines
atggcgaacaaattcaatgcggcgagttagacctaaaaacgtaaacaatatgggataaaaatttgaaacactataaacccgaatcaacggatgggaccgcttcttcagtgtcttcgtcgccgtcgtcggacgctgcgtcgtcaaaatttaatcaaaaaataatcatcttcaaaacgtcactcaattcacaaacacacattgcgatgcttaattgtcatttaataaaatgctgttaaactgaccctcaatgttcagtgtcggctccaattcgcctctccaccgctgttaaactgaccctcaatgttcagtgtcggctccaattcgcctctccaccgtcatttttgatgttgcacgtgtacgccccgctgtccttagcctaaattttaaagtcattttatgtcaacaatggcgtttttgaaccgctttagtcgacattggcggcttaataacaatagaa

SEQ ID NO: 84066 - DNA, 249 bp, Heterodera glycines
atggtcgcctttgcttcaaatacctttccggatctcaacaataaatttggttagatttattaaaaaccttattttattttttgctatatttgaatatggcccatttcagagcttgtccacatccccgtcgaattgcgtgatacattgatttgttgtattttgggagatttggtctgctgtttgtttttggatcggatgttgaattatctttttggtgatcagcgagttcgaaaaatgttgatgtattaa

SEQ ID NO: 84067 - DNA, 390 bp, Heterodera glycines
atggttactgtaattgcttggacgtaaaatttaaaaaaaaatcctttagtataagaaaaattttataattctactttaaatttgaaaattattttatttattttaatttttatattttgttcaacagattcgtggcaacaatcatttcaagggaattgaatttagttttttatcggcctcgggcaaaacgaagtatacgaacagaattacggcactcaggcaaatcaatgccacaaatgggttcggctttttggaatcaggagaccggattaatgtaatggtgcaaagcaaggatggcacaatgccaaaatcggcagtgaaagtgtttttcttaagcgaggcattggcgttcaacgaaatcagtgagtgatgaaaaaagtaaaaaattta

SEQ ID NO: 84068 - DNA, 675 bp, Heterodera glycines
atgtacaaattcgaattcatcgtcgtcaatagcacagcgttcaatgtgtccgttaatgaggtgcagaactgtgcctacagtacaccacttccgctatggacaattcaatacatttcggtatgaaatatttttacaatggaacttgagcaatttcctgcaaaattaacgaattttttgggaaatttcaaaatcaagtttttttttcataaataaacattacggtagaaattttttatacggtagaatatattttttacacttgaagctgaacaactttcgctgcaaaattcataattcttgcttaataagattttaatctctaattgtttaaaaaaaatttttttataaaattaaagttttaaatgtaaatttaaacaaatttatagtaatttcaaacaattgataattttttttttgtagataattattcaaaaaaaaaaattttgcaaaaaaaactttttggtaatttaaggtcgattatgctaaatggtcctttcatccgcccattatcacttgtaacccttcaattcgatgctttgagccaacatccaataattccaatatgtttatggcatttcccgagaagaaaggaaacaattgaataattgcgcacaaaaaaacaattataattattttattttactttatttataaaatttttactattttagaaaa

SEQ ID NO: 84069 - DNA, 694 bp, Heterodera glycines
atgcagaaggtggtcagatcaccgggctctgatctgctgtacactggtaagttaaactacaaaaaattttttgtgcacaaacatttattttagacactgacagcctcatcctcgtccacccggaggagcggtgcccactgaaaactggcccccatttgggccagttcaccgacgaatactccgaccacgacattgtggaattttgcagtggcggggcaaaacaagtgaattttcggctcattttgcggtaattaatgaaaattaacactctagtacggcctttgtctgcgacgcaagggcgcggaagagggagcccaattggaacatgtgctcaaagtgcgtgggctgacgctaaattatgatgtgatcaacaaccaggggatgcgctatgagaacttcaaagaggaggtggtccggtacgcgacaagtggtgaatacgagccgataatcatcacataccccaacttccttcgtccaaacatcagggagggaggtcgggtggtttccatgcctatgcaaaaatgttatcgcccgtttgtgggaaagggaatcatcggggccaatttcaatgtattggattttggacacacattgtaatttgtacattatctatcacacacacacacacatatgactgtttcttttgtacctcaaattgtgtacattttatgccattttattaaaatgtaataaa

SEQ ID NO: 84070 - DNA, 1908 bp, Heterodera glycines
atgcaaaatcagcctcccaagcatccctttttgttttccattgaccaaattctatcggtcccaagcaaaaagccgcgtcgcggctttctcatcaatgaattgcttggagaggtgcttcaagagggcggcggcagcagctcatcatcatcaaagtctgcaaaggaatacgtcaaaaagctggacagcaccgttgagcatgtgccccgcttccagtacagcaaagtcaagtcgcggttcagcattgaggatgtgccagcagcaaatcctgagggactcctggccggcatcttccagtactgccttgacgcagcgatggaggagagtcgtggacgtggaattgaacccacgcatctcggctgcatgatcagcagtccgttgctcaccggcggggacatccccatcccggttcgacaaatcaccgacaacaccgtaaacaccatcctcaaccaattcaccaaagtggctcagagcaagcagcagcaaaacgtcacactgtggggcgagccattcactgtggtggtgaccacagttgaccgtactggactgcccggccgaagggtgctgaagggcggtgctcgacgaagcctagcatctgtgcatcatagggtgacggaaacttgtttgattaaggtcgtgtcgcgccatcaaatcaaaactattcgatgacaatttgttttaagatttgcaatccggacgggcattgcctcttctacgccttgcaggcgacaatggtggccaaaacgtgcggttggccccgttgtagattttacgactacttgcacagtcggaggggacaacagggatgtctgaggcgggatgctttacaactgatgcagcaaattggtgtacggaccggtcggaacacttatgatgctgagatttgtgtgccgcgtgtggtcgaccactggaacaacacgcaacagcagcatcgatttgcagtgttcatctttggctcatcgggacaatacaagccgttgtacaaatacatcaacgatcattacgacactcccattgtgctctatttgaacaaccagcattttgatggtgtgcagaaattgcatggcttgtttggacaacactactgcctcgactgcgaaaagccttatgagcgtccgtcaaggcacctcaattcttgcaaggcgcgctgtatgctttgctcacgcgtcggaccagcattcccgtgtgtcccatcgggcggatttttccatcaatgcgcgggctgcaacaaaatgtttcgcaataacgggtgcctccaacaccatttggcatccaacttttgcgcccagtcaaagcagtgcaaggactgcggcgttatatgggccacacgagtacataacagagatgggagaaaagtaaacataaaaataaaataaaattttcatttcttgatggatttagggtcacaaatgccacgagacctattgtcagctgtgcaacacatttcacaatcccgagcgggggtgcttcattcagcccattgagccaaaggagcacgacccgtaccgcattgtggctttcgacttggaaaccatgcagcatcaaccagtggacccccagcagccagagaagagagagcaccagcccaacttcattgctgcccgagtcgcgtgccctaagtgcattgagagcggaaattggcggagggcaacagcgggctgccgattttgtggtccacatcgaactgtcgctttctgccagcgaccctttgaggacactcgtgtggacaaacgagtggtggcggacaacccactgcaggcgtttgtggattggctcatcttccaactaccagccaaatacgacacatacgcctactcacactttggcggacggttcgacatggttctggtctttcgcgagctattccggattgggttcaacccggagatgcttcgacgggtactcaattaa

SEQ ID NO: 84071 - DNA, 1036 bp, Heterodera glycines
ctcagttaaatcgacagccaaggcgccacctccagcttcggtttccgctgaattggctcctcgcgctcctctggcagactctccaccgcgttttgaagaaactgagcaacagaagcctacaactcctgcaaaaccttcagttaagacgacaattacggcgcctccggcgcaactaaaaagctcggcaacgcctcatcaacaaaaacagcaagtgcccgtaaaaccaccagctccagtttcgattcccgcaaagccgtcaggctctccacagcgttttgaaggaactgagcaacagaagcctacaacccctgcaaaaccttcagttaagacaacaattacggcgcctccggcgcaactaaaaagctcggcaacgcctcatcaacaaaaacagcaagtgcccgtaaaaccaccagctccagtttcgattcccgcaaagccgtcaggctctccacagcgttttgaaggaacggaacagaaacagcagccaccacccccgccaacatcagctgctttaacactagcagatttgaatttaccagaaaataccctcagcgttcaaatagaccctctctcatatgtacccaattccgtctcaattcaatatcttgagaacatggaacgattcaagctggtgttcaatgaggcgatcgtcagtcatgtgtccttctcaccgcagttgggctatgtgcttggctttgaaaaccctcaacatgtcgtgtcaaatgagctatcaaagtatccggtggatttgcgcggaggcatctcaagctttgctgtctactcgaaaggattgaccgaaaacatgataattggcaattcactgagttcgctgcttcgtgttgtgtctatcagcggtgccatcccttgggagtacaacgagaaaatttacgattcgcccatttttgctcgtgtgttaccacgggagatcaatgagattgagattgagctgcgcacaatggacaaaggccgtctcgtgccgttcgcctatgggacaacgatggtcgtgttgatatttaagaaagtgataaatttctaa

SEQ ID NO: 84072 - DNA, 129 bp, Heterodera glycines
tgccggtggctgcggcattgaccgccgcgctctcttcccccgccgtttccggcactttgtcctcgtcaaattgaccgtttggtggcccatcaatcagccgactctcaaaattatttattaattattgct

SEQ ID NO: 84073 - DNA, 1533 bp, Heterodera glycines
aaatttgtcgaacatttccaattcatttggctctcttcatttgccccccttttcctgccacttcccgtcaacgcggagacgaccaattccacggaactgaaacggttggaacgcacactgaccagtgaacatggcatggcgaaggcattggcactggtaaaaaaaataaaaaataaaatgattttgggtcccaaattttagacactttcacgccttttaccattcattgaaacgatggacgaatggttagggtttggcaaattgttgtacagaatagacaaacaacaaatcgacttggattcgccggatgagcagcacacgacgagggtcagctttaaaattttgaaatttttctgaattttctaggagaattaggtttttttttaattcgaaggagaagatgtatggctaaatttgaacgatttcttattggaattttgattcccactttttcaggcagttccgaccaaatttttacagttcataagcaatttctggacaaattatcgctcaaaaattgttggaaaatcgccaaaagtatcaacaatgaaggagtacaccatgttggtgattccgccggttggttttttaaaatggatttatttgtttgaatttcgtccccttgtcagtcacttagccatttgccttgggaatgtttgccaatttactgtcgcgcaccgttcgtctaccgtatcccgtgcttccatctgtttgaacatttgatggagcagacaaaaaatgttagttttccctcaatttttttttttttttgcccatttgattattcgcgttgactgcaattgaaaaagcacagattccgacatcggtggacgggcgcaactcctactacgtgctgaacccgggcggtgacttggagaagacgcaggaacgccttgccgcgttcatcaagcgtttccattggcgtggcattattggacaggtggaggaaatgatggatgcatttccccccggttttaagcaacagcctttttttaattttctaaatatctgaacgattttctagttaaaaaaaaaattattttttcattttttgctgcaggttccgtccagggaacagatgcgagcagtgctcaacgaacatgacctgttcctgtaagttcatgttcaaataaatgggtgcgcacacttcattacactcctttgctttttttctcgttttactttgaatattgaaaaaaaaataataattttaccgataaaaaatatctgagaaattagaatttccatccctttcctggattgtatatcaaccaacattattttttgtacacccattattccttccattgtttagttacatgggccatggcagtggcggtcgctattttggccgttcgttgatccgcgaaagtgagtgccgtgccgtctccgtgctgatgggctgctcctctgtccgtgttgtggacgaagggcccggcctggacgggcgctcgtccgtctacgaatacatgatcgcccgcgcgccatgtgtgatcggctgcctgtggatggtcactgacggcgaaattgacc

SEQ ID NO: 84074 - DNA, 374 bp, Heterodera glycines
atgcacgcgttttgcgctcgagctatttatcatcgggcttgtcaatccaaagcgaaacaacaaagatggtgttttgaacgaataaagggcataggttattttgaagaagtgtcaaagaacatgcagcaataagcctgcaaaatctaataagtggaaaatacatgagtatagaatttattttcagaaagtgtcaacagacttttgggaaaatatatttgcaatttatcaacaattttgagaagtgagttagaaatgataaacttcacgattcaaaccaattttcggtgctctaattaaccgcgataaaaacatccgaataattaaatagcttctgagataataaggtttatcataaaatttcatttaaaaataaa

SEQ ID NO: 84075 - DNA, 397 bp, Heterodera glycines
atgagaagtgagttagaattgataaacttcacgcgttcactcgagctattttcgttggtctaatcaatccaaagcgaaacaacaaagatggtgttttgaacgaataaagggcataggttattttgaagaagtgtcaaagaacatgcagcaataagcctgcaaaatctaataagtggaaaatacatgagtatagaatttattttcagaaagtgtcaacagacttttggaaaaatatatttgcaatttatcaacaattttgagaagtgagttagaaatgataaacttcacgattcaaaccaattttcgttgctctaattaaccgcgataaaaacattcgaatcaattaaatagcttctgagataataaggtttatcataaaatttcatttaaaaataaa

SEQ ID NO: 84076 - DNA, 234 bp, Heterodera glycines
ccatagccattccttcaaatagccataaccccctttccgacgctctttggttgtattctgccgaccccgcaagtttttatcagtgctttctttttgatgataaatgaggagccgatgaaaaggctcgagctgatggccaacccgagaccaatgtaaaaatcgacgagactcgcgccgtttcttacgtgtggcacggggctagcaaagtctgcggacgacggccgatcgccgccc

SEQ ID NO: 84077 - DNA, 340 bp, Heterodera glycines
  unsure (1)..(340): unsure at all n locations
tgttcattctttacgttgcgctcgttttgctgttcacttttgtgctcgtcgtttacgttgcgccccgttatggccacaccaacattttggtgtacatcgccgtctgttctttgatcggttctctgtcagtgatttcggtcaaagggttgggcttggccataaaagagagcataacgacggaggaacagttcaccaattggtccgtcctttgcgccttttccattcctcgccacttctcttttcaggctcacttggttttggctgttggctgtcctcggctgtatctcagaggcaattggtctatctcancaaatcattggacatttacaaaagatcgatg

SEQ ID NO: 84078 - DNA, 281 bp, Heterodera glycines
atgacttttttggtaagaaaaaataagatatttcttgaagtattgtattaaatctgccaggaaattgtatgtaaagtttgaaatgttgatatttttttctagagagcgacatttggcgaaaatacggatcaggatcaggactacggactaggcatccatacggactacagacttacggactaaaaacccggaaaacccttactccgtataagtccgtatgcaggaaaaatacggacccgtatacggatcagggttttttgaaaagttttttaatcaataaa

SEQ ID NO: 84079 - DNA, 1202 bp, Heterodera glycines
atgctccgtgtcgtgtccaaggaattggtttccaaggacatgacgggaaaatttcataaaatccaaggacaattaaaaattttatcatttttcgaggaacaggtgggtccggcggtgccgataggcgccgccggaaaatttttttgaaaattagagtgtaatttgttaacagattttcaccaaaaaaggtggattttgcgattttgagatgatggcgatgacaattttttattttcacaacccttcttcaaaatattgttaaaaattcaaaaatttctcaaatttcgttgaattttttaaaatttttccaaatgctgatttccaaggacgtccttggcatccaaggacattttttatttccaagaaagatagtcaaattccaaggacgtccttggcatccaaggacgaatgagaacctgtatctctttatcttccttttacagttttctttctcttctctttatttctctgtcatataatttttctctatttatctcactttatctctctctatttctatgtcatttctctctctcatctcctctctctctcatcctcccctcttatttgatcatttcattgtgtatttatttgtcgaagtggaaggattactttcaataggaaaatttttgggtaatagttcagatggtatgatacagtaacagtttccataaattttttaaattttaaaagtcaaatcaattttgaaccctgaacacgaattcgaacaaaagtcgagtttaaattttcgattgacgtttttcgtataaaacggcttaaaataatcttttttgcaggaagtgatcgccttcagtatgcttccgggtttttagtcctgtggtgattttggtggatggtggaaaatgcgttttttatgcttaatatatcggaactaatgcgcagaaaaaaggcatatgcttcaaaattcgttctctaataataattagagaccagggttgttccgggtcgagaaaaatatcgggtcgggtttcgggtcgggtcggccgaaaaatcatcgggtcgggtttcgggtttcgggtcgagaaaaaggccgggtttcgggtatcgggtcaattgacaaatttttaatttgtttaaaaatcaataagaaaaattataaattggtaaattccgatgcaaaaaaagaagcttctccaaattttctgcagttaaccgatttcttaaatcagtagacgatggaa

SEQ ID NO: 84080 - DNA, 1182 bp, Heterodera glycines
atggctggtcttgaccaatcatttctgtcaaaaggactcgtctacgatgtgatgggcacgcaaaattgtaattacgactacaatgtgaaagggtgcgcaatgggtccatccgccggaagagagggtttgttggaatagcatttttggtgaggaaggcaccgaattatgagccaaattggcaagcaaatgccaagtgctgaacatgagggcatagctgtggccaaagaacgaatgggccagatattctctcggaaaaaacggaaatttaaggcccacatgaagaggggatgccagaccctttaaaattagccacaattggttaattatcattaaaacagtgaccaattgtacgcggaaggaccaattcgaatgtccgttgtccgaggattgtgtgccgttgtcaaagcgatgcgatggcaattacgactgtgtgttggaggaggacgagcagaattgccgtcagtcaaagccaaaataaggtggcaactgattgagtttgtatttagcaatgtgcaaaccaacgcattttccatgtgttgtttctgaacaatgcattccggtgagtgggaaagagaagacaattgaggagagaagacaatttgccactgtttgatagcttggccaacgctgcaacggcatcaaagagtgtcaggacggaactgacgaattggagtgccaaagttggtcattcaagggaaacaaacagcgaactactgaccaaatgcaaaaccaatcacagattgtggagctggaaaattcttatgcaggaaatcgggcaaatgcatttcggcaaaggaacgctgcgatggatttgcgcattgtccgcacggtaattaaatgaacgattagtgaacgaatgtttgatgaagaatgattaatgatgatgaacaccaaaggtgaggatgaacaattgtgcaagaaagcacgaattgtccttgggccgcggatgttcgtttgcgaggttttcaaaaacattaataattatatttaaaaaatatatttctaaactacaactgataatcaccacaaatgttattttcagagtggcaaacatcaaatccctcaacaaaatgtgtgtgacggcgttgtgcactgtccagacgatgcatcggatgaaaaatattgccaagtcggaacagcgacagaaacaatgcgcaaaatgggagcaaggacaatgccaag

SEQ ID NO: 84081 - DNA, 2346 bp, Heterodera glycines
atgattaatgatgatgaacaccaaaggtgaggatgaacaattgtgcaagaaagcacgaattgtccttgggccgcggatgttcgtttgcgaggttttcaaaaacattaataattatgggcaatttaaaaaatatatttctaaactacaactgataatcaccacaaatgttcttttcagagtggcaaacatcaaatccctcagcaaaatgtgtgtgacggcgttgtgcactgtccagacgatgcatcggatgaaaaatattgccaagtcggaacagcgacagaaacaatgcgcaaaatgggagcaaggacaatgccaaggtgggaaggcatgttttcaatctcatttatgcaccaacgcggaaattaaacctcttaaatgtttatgactccgtaattaaagtaaaaggcaaattcgaaaaaactaatttggcagtccaaacgctcctccaaatcagctggccactcccgcaatccaactttcaaaaattgcgtttgatcagcctatcactgcacagcaacagcagatggagcaaataaatgccggaaaaagtgagccatgggttggcacaaacggcggaatgacgcaaactgatggtggaccaagtggcaaaccgccgcagaaagtccgttcaatttggtcaattaaaggcatgaaatgctttttagttttcactgagtacggcgaaccaaccgaacaaaattggcaatgttagggatgaaacatttccaacctcaaactttggaccgatgagaaatgcgatgaacgcgcagcaaatgatgggcatcagcaacgggacgaatcgactgatggtggaaatgccaaggcaacgaaagccgacggaaaacaaaagcatgcaaatgaaaacggaggacagcagcggggcaaagactttggtggagggccacttccaagcgggcgtttggaacggaagcgcactccaagcgcagcaccagcggaacaacccttacgcggacgaatggtatcagcaacggcagaacagtggcaccgaaggaaggcaatttcaacagcaaatcgggcaaaacaatttgatccaagaggaaggcgaccaattcgtaatgagaatgggaaagtaaggcatgggaaggaaaaaacacattcagaaatggctaacatttggtggccaattgccacaaccgcaacccgtggtcattacgagacaacagcaaattgagcagagaagggcaattaaggaggagatgggcggagaggacagaaaagggggcgccgagggggcaaacacggcgggaacggacagaacggcacaaccgcagcaaacagcgggcgaggaacagaaagcggcggaaagcggcagtgccggactaaccgcaacggaaacaacgaacgaaggcggcgaccagcagagggtgacgggggttccgctgatcactgtgggattgacaaaagccgaggagggcgccaaagaagtgagtgatggcgtaaaggaatggaaaagcatcggcactgactacgccttagaaaaatattttgaatcgaacaccgaccaatgcccaaaattcgacgattgataatcctttgcaaatgttattttcgattagcagttgtcgtcgcaaactctggccacggttggaggcgcggaggacgagctgaaaaaatcagcggaaacgaaagcaacggaaatggtggcagaaagtggtaagtgcgacaacgccggagaaaagacagacgaaggaacgactggggccacagaagaacagcaaaaggcacaatttgggacggaaatgcccgaattggaacagacaaaaacggaggtaatcccttaacaatgtcagatgaacaaaagggaaaagtgtgttcattgtcagcagaatgagcagcaacaaattgagagagacggcgggacggaacgccaaacggaaaagaaagaagaaaacgatgggacgaaagccaacccaacgggggaagagcagcagctgaacagccaactcacagcactgaaagggatcggcgaaatgggaggtcagagagtggaactgaacacgggagacgacagcgaggaacaagagcaacaagcgatactccggcgattgtacagcaaatacgggtcgaatgcgaggtaaaggcggacaatggcaaaagccatgccgatccaatttcgaggccgcgtttgtgcttctaacagggatttgcttcaacgagtggagaatttgctgttgttagccgaagatggaatatcggcaaaaaagacggtgaacgaacccaatgatagcggaaaaagccaaaaaatgaagagaaggcaagcggaggaggacaaagggctgatcagaaaatatttggagcaactcatggacagtgagacgggaagaa

SEQ ID NO: 84082 - DNA, 1165 bp, Heterodera glycines
atgaaagacattgccactgaagaaagtattggtaagcgacaattcagttttacaaattatcgtttttaaattcagcacagaggcggcttaacctaaaagcgaatttcatgcggcagctacaaattcggcgtggtgttcttcccagcgaaattcccccggttggagtcgccacaaacgcagtgcccacaatgggaagaaagtttcgaaaggtttgctgtgaaaacaaaaaaacattcggagagaagagtttgattttcccacagcctttggaaagtcgctttccaccagccaaaccccgttttggccttggaatgacagccgccgatttcgaagacaaaacggacaagtcgggccttttaaactttgcacggagtactcatttttcaatcattcatttagctgttcttcattagccaaagggccttcactgacagaaacaaatgccccaaaaggaaggaatgttcgtccaaaagtgcgtaggtccttccttaaccacgaaccttgcaaatccttattgcctaataggagtcatctggagtcaaaattcaggcaattaactgttacatcaatccgtcgcaatccgtctccacttggccaacttcgaatgacacggactccgatggacaaagtccctctccgacggttttcactcatcaccacttttgcgcgtttatttctgtttttcgtcagagttcggcttccgtcacgtctttcggttcttcgctgaccaccgccactgatcccctcgtcgcgcaacacgtggaccaaaatgggaccatctttttccccacttcctccactccgtcggaccatggacaaagttacgacgagacgccggcttcttcagtgctcactttcgacttgtcctctcacacttcctccgatcgtactctcacaaacaactcgcccctttccatgaacaacgaaactccgcgcccggtcttttccctttttcacgaagtccaatttctgcattcactcggccgtcgtctttctctgcattgcaacagtcggcaggacgagtctgttgcctccttttccaatgttttggcattaattcgctttttctaggggttctttcattttcaaacatcagatgctgaacaaaatgattgtgctaacccgaagcgaagcactcggcgaggagggaattcgcatatctcaa

SEQ ID NO: 84083 - DNA, 1983 bp, Heterodera glycines
atggaagccgcaattcatcaactcactgcggcaatccagcaattattgtcaaatcaaaatggtgcgccagccgcaaatgcgcatgcttcgccaacgcttccgcccatcgactgttttgagccatcggacgatagaagcatttccgattggttggaacgcttcaattttgccctcgactgtgcggcaccgcaactggcagacgaagcaaaggtcaagctgctcatgacgaagctgagtgaagtggctttcagccagtacagcaagtcatgtctgccgaagaaagtcatcgattttgactacagccaaacagaggagcgcctaaagattgccttcagccggccacaatctatttggattgatcgctatgaatgtctgagggcctcaaaaagcgaagatgaaagctttcgtccttttatcaacagacataagcgactcttgcgtgattttcagtttgaaaagctcaacgaagagcaattttcttgcctcatgcttttgacggcactgaaatcaccgaaggatgccgagctgagaaagcgaattctttcgaagcttgcagcggatggttacctggtcgagtatgatggagtcgtcgaagacctccaaatgtaccagtcgaccatcgctgaagcaaaggtcctcgaacaacaaccgatgggctcacgaaacttgatggcgaccaaattgaaggcaaaaaagaaacgaacgaactcggatctttcgtcgaatgcgagcagcatttcgacaggaacacggagcagcaatcgatcgcaacgcgtatgttggcgatgcggtttgagccattcgtcgaggaattgtcgacatgaaacaaccgtttgccgaaagtgcaagaagagtggccacttggaaaggatgtgtgccaagcaccaggcatggttgaagaagaatggaggaaaaaatgaaaaagcggcgaacaacgtccgcgttggaggagttttcctggttaaatctgagaaccagaggaagaatggaataatcgatgttccgattgatgtgaatggcaccaaagtggatttcattgctgatttaggcactgagggaactgttctttgtgaggacactgtgcgccaaatcagagctttgaaattgagccgttgtcaagaacgtgctcagtaccacgatggcacaactcgtccattcgttggcaaaggaaagacaactttttcgttcggagaccgctcatgctatggacatttctttgtttccaaagacggatccaagaatttgctcggattggacatgatggacagacttggattgtcggactccatcagaaatggtctgaaggacaaattccgaactgaggcttccaaagagaacggagcgagccaaaagaaaaagaagaaatcgtcagaaaagacggacgtggcaaaaagaagaatttcttcgctgtgggagcgaatgtgatcgccagcttgggtgatgagccatggcgtgccggacgtgtgatcagccgaaaagaaggcacttacgacgttcaatttttggacggcacgactggagaattcccggcaaaaggtgtacaaccgtacaagccggatgaagatgaaaatttgaattttcttcttgacgggtttggtctgaagagagcctcatccggtggatctatcgggaagcacggcagcgatggccgacgagatcaaacgaaagatgatcttcgagaagcttccgactgtggacacaaggcataagaacgccgatctgaggatgcggatgatggacggaggcccggcatttttcaaggggggagatgttagggttgggacccaattgtccggtgcccattttgaccctttgtttcatttgtatttcccttctcccttcgttatgtcacgcccacttctccgcccataaatacccgcgatgttgacccttccccatcattcttttgcttcttctccatttatttgttccctttgctcccaatcgatatttgaccccgttcgccctgtcccttctttttga

SEQ ID NO: 84084 - DNA, 758 bp, Heterodera glycines
ctccattcttcttcaaccatgcctggtgcttggcacacatcctttccaagtggccactcttcttgcactttcggcaaacggttgtttcatgtcgacaattcctcgacgaatggctcaaaccgcatcgccaacatacgcgttgcgatcgattgctgctccgtgttcctgtcgaaatgctgctcgcattcgacgaaagatccgagttcgttcgtttcttttttgccttcaatttggtcgccatcaagtttcgtgagcccatcggttgttgttcgaggacctttgcttcagcgatggtcgactggtacatttggaggtcttcgacgactccatcatactcgaccaggtaaccatccgctgcaagcttcgaaagaattcgctttctcagctcggcatccttcggtgatttcagtgccgtcaaaagcatgaggcaagaaaattgctcttcgttgagcttttcaaactgaaaatcacgcaagagtcgcttatgtctgttgataaaaggacgaaagctttcatcttcgctttttgaggccctcagacattcatagcgatcaatccaaatagattgtggccggctgaaggcaatctttaggcgctcctctgtttggctgtagtcaaaatcgatgactttcttcggcagacatgacttgctgtactggctgaaagccacttcactcagcttcgtcatgagcagcttgacctttgcttcgtctgccagttgcggtgccgcacagtcgagggcaaaattgaagcgttcc

SEQ ID NO: 84085 - DNA, 463 bp, Heterodera glycines
atgcctgtcgttgcggctgttgatctaattttggagaaccaaatgaattttgttaaaaaacgaagaaaacgaacccacgtgagtcaacaaaaccttccaatgttttgagtggaatccatctgagtgaatttaggatgaaactgatggaaaccacgctgacaagaccttattcttcagtgatccgaattcgcaaaatgacgagtaatattttgtttaaaactcaaattatttttatattttagatcaactgatgaagttttcttgaatgaaattgatctggaaaacccatctatccatgattttttcgttgcattggccgcacatttggataatctccttcaaaaccggaacgagaaaatcagtttccaagctgcgcaaattttcgacttggtttcttgcttttcaaagctttttacaagggttagtgatattttgttgtatttttttatattctttgaatgca

SEQ ID NO: 84086 - DNA, 930 bp, Heterodera glycines
atgatggacgtagcgcgggacaattttgagaaagttctcattgaaatggtacaaaacgctgagaataaaacagcactcaaaggaattcaatggatgggcgtaagatatccttttgaatttgtttatttttcacctttttaagaaatcaatcctctgctatttctccaaggacactgcaatttttgaatgttctgtgtgttttacagaatcatatgtctcgacggcatttcgatgcactgcaattcaacccctgaaagacgattctgaaaagcgacatttgttctgtttggactgtgttcgtggtcaagccgaagcatctgtgaatgaagctttgctttccgaagaggcgttgggtctgcgctgcatggcatcggaatgccgaaatccaatccttttcagtatttttaatgctaattgtaagtttggcaactgctttttcaccattagccgaaatcagcggatatctttcgcgtgcgcttcgtcgtcgactcgacgatcgcctcacaagtcaggccctttgctccgctgggctttctggcctcgagtactgcttgaagtgcgattttgcaatggttagttagcatgccttttccttagatgctgtgaacaatggctttttacttcctcaaattaatcctgctattctttatattaatatagtaattcgcatgaatgaattgaatttaaatcaaaaattcaagtattttgcagatcatggaagtcccaaaggaagtggacaaagtcttcaactgccagaaatgcggatattcattctgcaggttttaaaaattccaaataagatagtgctgtttcagactttgtgaggaggactggagcaaacactttgggttttcgtgtgacaaagtgaagctttaaagagggggaagcaaagcggagagaaaagtaagtgactatgggtgggagtcagaa

SEQ ID NO: 84087 - DNA, 1710 bp, Heterodera glycines
atgtatgaagattgcaacaccgtttttgcacggtgccatgacgcgaagaaagcgcgtctcttcattactttcacgaacaacagggaatggcctgagttcaaagagaatttacacaaaaacggtcaagtatttactgaccgttttgacatgtggatgcgtgtctggagcagcaaaatcgctgagttccgagaagaactttatgacaaaaagttcttcggaacaatccttggttacggtgaatcaatggagttccaaggccgaggaggcccacatgcccacattgtggcgcaaacagacctggacgcagttccatatgtcattcaggaatacatatgggcgcacattccatctttgcctgataaagatgacgacacgcccattgcaaaaatgcatcgcgaaatccgcgaaacaatgcatatgcaactgcacagatgcagtgacagttggtgtggtcctagcgacccaatttacgggcggtgcaagaaggggttcccagccccttactcaaaatgtacgattttgcgcccggacaggcccgcgatgtatttccggccttcaccatctgatggtggtgcccaattagaggtaaacggcctaatatacgacaactcacatgtcgtgccgtataatccttatattctgctgcgttaccgagtacaccataatgtactgtttgcatatggtaacaaagcaaatattaaatacgcactcaagtaccctttcaaagggccaggacattgttatgtcgagtgcaaagaagagtccggcaataaaattggaattgatgagccggctcaatatgccaagatgaacttccgtggtgcaacggaagcatatgccattgttcattcaatgccatttgcccgtctttcgcatcatgttgtcaaattggcaattcatttgccaaaccaacagcccattgtatatagggcattccagctggtgagcaaagctcaacaaatccagcaaggcgaactgccagaaacgcagtgttcagcctattggaaacaatggcaaaatgagtggaagaatgatccaaagtttaaggacattcttttcgaaaaagtcccagagcggttccgatgggcaaaggacaaatgggtcctgtacaaaaggcagcaaattaaaaggccacctatcggccgaattgttcctgtacccccatcggacccggaaaggttcgcgctctattcacttatgcgtcactttcctggagacccagaccatcttaagatggttaatgggttgctttgtacctcattcactgaggctgcaataatgcatggtcttcttgaagacgacaaaatttgggacaaaactctggcggaggcagctctgtcgcgctggccagatcagatgagatggctttttgtgagcatcctggtctatggccagccgagtaatgccatagaattgtggaacaagtacaaagaccaaatgtacaatccgcaaggcattattactctggcacagcataaagtagcagagcttgaagccctagccgacattgattggcggctgcacagctgctttaacttaagctgtgtgcattttagcctgccagacccgccaacttcaattgccaaaaatactgacgcggcaattgaaaagtttttctttggcgatgatgatttgaatttgcctccagggcaaccaaatcctcgtccacagccaaatacccctccgccacttaacagcgaccaacagaag

SEQ ID NO: 84088 - DNA, 846 bp, Heterodera glycines
atgtcggtccgcaaaagtcggtccgcaaaagtcggtccgcaaatgtcggtccgcaaaagtcggtctgcaaatgtcggtccgcaaaagtcggtccgcaaatgtcggtccgcaaaagtcggtccgcaaaagtcggtccgcaaatgtcggtccgcaaaagtcggtctgcaaatgtcggtccgcaaaagtcggtccgcaaatgtcggtccgcaaaagtcggtccgcaaatgtcggtccgcaaaagtcggtccgcaaatgtcggtccgcaaaagtcggtccgcaaatgtcggtccgcaaaagtcggtccgcaaaagtcggtccgcaaatgtcggtccgcaaatgtcggtccgcaaatgtcggtccgcaaatgtcggtccgcaaatgtcggtccgcaaaagtcggtccgcaaaagtcggtccgcaaatgtcggtccgcaaaagtcggtccgcaaatgtcggtccgcaaaagtcggtccgcaaatgtcggtccgcaaatatcggtccgcaaaagtcggtccgcaaatgtcggtccgcaaaagtcggtccgcaaatgtcggtccgcaaatgtcggtccgcaaaagtgggtccgcaaaaattcggtccgcaaatgtcggtccgcaaaagttggtccgcaaaagtcggtccgcaaatgtcggtccgcaaaagtcggtctgcaaatgtcggtccgcaaaagtcggtccgcaaatgtcggtccgcaaaagtcggtccgcaaaagtcggtccgcaaatgtcggtccgcaaaagtcggtctgcaaatgtcggtccgcaaaagtcggtccgcaaatgtcggtccgcaaatgtcggtccgcaaatgtcgcactacggtccca

SEQ ID NO: 84089 - DNA, 346 bp, Heterodera glycines
taaaaaaataatttttaaaattaaaattcttgccacgaaaatacctttttgagaaaatttttttcatttcttaggagtgctttttgaaattttttttgtcgattcttaggggtgtattttttgaaaaaatttttaggtcgattcttaggggtgtattttttggttttattgcatttttgttaaagaattttccaaaaaatgtcgaaatagtgacaaaacgccaaaatagtgatttttaactattttagtgacgaagtcgccaaaatagtgatttctagtgaccgataatgacatcagaatcgaaaatttttaatgcagaaatgcgttttttgagctcctttcttca

SEQ ID NO: 84090 - DNA, 443 bp, Heterodera glycines
atgattgtgaaaaccgactatagcaaaacattgaaaatcacggacattggcaatgcttacacgccaaatgaggagccattggcacaaattgtccattggcattgggacgaaaaaggggcacaacggatcgttgatgtaagaaatttaacgaaaattatcaaaattaaataaaatgattaacaaaaattattttaagacccatacactcaacaagggtagtgaacataattgcggcatctataccaatgcttcatcatttgttgtccgaattcacaaaaagcgggagaaaaagtccaatgaaacgtaaagtgttaaaattttatctaaatagttaaaaaatttcggttcgtattctatcgtttgtctctgtcgtctgaattgtcttgtccgatcacaattaacaaaacccttaggttttattcgatcgaaatgataaatcacaa

SEQ ID NO: 84091 - DNA, 1045 bp, Heterodera glycines
atgaccgcagcggcaaaactcagccgtttcttccgccgtttggtgcacgtccgacagatggactttgaattcgctgcttggcaaatgctttacctgctggtcaatccgcaaaaggtgtacaggaatttcatgtacagaaaaagtttgttgtccctctcaattaatttctaatttcgttcagaagccaaagatcaatgggcccgcgatgaccccgcctttctcctccttttggcactttctctgctcggctcgagtgttctgtttgcattagcgctcaatttgtccttttcttcgttttgcgcctttttcctttgggttgtgttcatcgattgcatcggaattggcattgccattgcaaccgcactttggtcgctattttgcgatatttactctccgatttcacatatttttgtgtccctccctttttaggttcatttcaaatcgctttttgcgtcggacgagggattgcgacgtggtcgagtgggcctattgcttcgatgtccatttgaatgcttttttcccgttgctcattcttctccacgtcattttacctttgcttttctacggtccctcttttttttctttttttgaacaaaatattttttaggattggttgattaccaaaattttctcgcccgcttttttggcaattccatttggtgcattgccaccatttattataattacattactttcctcggctataccggttgtattttaatgatcaattgaaatatatttaacaatgtttgttttcagcacttcccacgctgaaaaacacgcaattcttcctctacccaatcactttccttttcattttcttcgttgccgccacaagcgccggttggaacgtttcgatcaccgcgatggacttttaccatttccgagtaacgaacgcagaccttagaggatgacatggagagagagaaagaggaagcaaaatagacgaaggaccatccccaacttaaaaccaacccaagtcattgtccgttccaaaagagtgcataaatatattccatagacaaaaacaacgtgttcaaataaa

SEQ ID NO: 84092 - DNA, 1064 bp, Heterodera glycines
atgacaacaaacaatggtgcaaaaaaaggtacttttcgaagcacttttgtccatcgacctgaaggagtgcgaaagcgtttacccgtcggaaacggcgcgtaattacggaatcgaaatcaaagtgagtgccgaagggctcgttttgtgctttcggcaatggtctgtgcttttttgtgtgattttgtctttccacaaattcatttatgtttcctatcggtttaagactcccggcatcctgactcgtggatcatcgctctgcagcagaacctgcacattcaattcattcggactatccacttttgtgtaaaataaagcccccatttccaacaataagacctgaattttaaactttatctgtgcttattttcactccgttcgtatttttaggtgaaacgcataagtacggtcggttggctatcaaggacattactccgctgatcactcgtctggacactcattggcgttgcgacacggaacatgagcgaaaggaagtgctcagagaatgtttggccgcaacggcggtcgtatctctcttcaattggttgaatggacaagcgcattgtcttggttagtttggcatttaaaatgtgcgtcaagattttcggaattacacatttttaggacacactcaatacacagaaattgtcgccccgttgagttcccaattgatactttctgacggcttgcaattgttttatttcgctctcggtcaactcaacactcttgcaattaacattgatgttgaaggtgaatggacagaacctatcaaactaatgaatttgtccatgtcgaaattgtttttaggcttcaataatcagcggtccaatttttgttgtgttaatggacccttcaaactgtacgatgaattcgatccggcaacggtttgttagcatctttaaaatttattcattatttaccaaaaaacagaacaccgtccgacacgtcgacccttcggatggcctttcgaaggacggactgaatcccctcgtgttgcaccgaatcctccaaatgtgtgttgtttaattgtgagtgatacaacatttctccttttttgtttgaataaa

SEQ ID NO: 84093 - DNA, 1463 bp, Heterodera glycines
agttatccgtacactttccaattttgtgtgttatgccaaaagaatgtccacagcagtaagaatcgcttcctcccaccgccttcaccgaattttcgtccaatttaggcaaattgccctgtcacattcgccagtgccatgtcggcaaaccgatgttccaatgtccggtgtgcgatttcacttcgacttactcgaaaaacaatgtgaaaagtcacatggtttcgcttcacggattggcggtaacattctccaaagaacaatccttcagcagatacagccaatttaagggggatcccatcagttacatggaccaatacgcaacacaagtggaggagttcatgaagcagtgcttcccaaatgtccggggtcggtatgatacattaaaacctcaaacttgaggggtcatttcatttgactggacgaattatgtccattctttttaatgaccctcaatttttaaggccgtggacgtcctcttcacgggcgacagtcaccgaatgccaaaaaccaattgaccatcacttcgactgttgtgagttcgacacggccgaagccaactgttgcgccagggaacggaaccatcgctccgatggcattcggtcagtcgcaaagccaacagagacatttctctcctccgttggcggggccttcgccgcagcaacggatcggcggacgaccgcaaaaggcgaccacaaaaagcacaaattgtcaacaaacggcggacggacagccgacggtgagaaaggcaaagagagaagggaaagaatgaacgaacaaaccgttacaattcgtcgctttctttcgttcattttgcaatttgaaatctgtccatttcccttttcagatggccattggtcgtacggattccctttgccttccccccttctccaccaattcaactgcaaacgatgccaacactttgcttccattcggtgtcactgatttttatggagcagccatgggaatgctgaagacgacgcagggccacagaacgcccacatcactgctgtccagcagagacggcggtggggcagaaggaaatttgcccaattttggcaggggaagcggcgcgtcgtttgggccgatccttcagagggacagcgggtcgacttttggatttatttccgattttattttttgcctttcattcattccattatttaaggtttctgtccgccttcaatcccttcctttatctgcaacaaatcaacaatttgttcgccgttaattctgtgaatccgaacgcacattcgcagcaaatggccatggaaacattgggaggcggcgaagaacggaacaaaatggaggtgaacggaagcgaccaaaatgacgtcaatttttaaatttgggtttcgttgtcttagactgaaatggacgtgtcagttggagaagaatcgcctcatcagcaacggtttctggaagaatgtctgaatttgagtcaaatttctgaaggagatgagtaaaga

SEQ ID NO: 84094 - DNA, 846 bp, Heterodera glycines
atggaacgaacgtttcggaaaggaaggaatggaacggacggaggagaacggaaacaacgcagacaagggtttgacgaggaggacgaagacacaacaacaaaacaacaaaacaacaacaagcacaaacagcggaagatggaggaagaaggagaggagaaagatgagaggaagaaggaggaaaagggaggagcaggaagagggaagagaaaaaagaagagaagggaggaggaaaaggagaaagaagagaagggaggagaggaatcgaagcaagagtagaagggagggggaagaggaagaggaagaagtggaaaagcgagtcaacctgtcggtttccgaggatagatgatgatgttgttgttgaagatgctaatccattaaacaacaacatgtcccccgaggggtggcaacggcagagggtaaagattattctctttcttttcactatttctctgtctcctcttttcttctctctctcatcttttctccacttctctctccctctctctcgctctctctgtttgatctttcgcctatttcccgccccctcccccgaccgattaagcatcgttgttgttttgttgttgttatttgtgttgagagttgggggcggaggcggaggagggtcaatggaaaactgagaattatttttggaaaacggccgatttttttttttgaatttaaagtagttttttatgtagataatcagttgaaaatttataaattctttcgatatgattttcatcaatttttattgccttccctccacaatttggaccttaacttttaactccatttgtacgggaaactgaaaaattggtgaaggtagtgcaaaataccataaataaa

SEQ ID NO: 84095 - DNA, 885 bp, Heterodera glycines
atggcacttttttctccccttttctgttcttcatttttacttttatcattctgcttttcaatttgtgcttttttgcctcaaataagcgaagttgaaaatgaaattgccgaatttattcaccgtaaccctttggccattgaccaccgtatcgcactcgtccaactcattttcgaacaccaaaccgaactgattttggccaatgaacaaatctcattcccaaagaacatctctttagacgatctggcatttccctatgaaatgcttgtcagcaaaataacaagtgaaaattttgaagagttggcacagaatttgcggaaaaatgcactcaaattggcaaaagaaagcactgggaaattccattttctcactgaaaatcacttttatggccaatttatcaattatttggcaaaaattgcccaacttaaagtggaagaagcactgaagaagcgacgggagaatgacaatttggacgaattatcggagaaggaaacgaatgacttttcggagggatggaaatcattacaaatgtttgtcgaaatgtattcatttggctcggaactgttcatgcaattagcggccaattacggcggaaaatttcccaagaaaacgcgaaaaacaatgaagcaattagtggtcaaaaaaataccgcaaatggacgaattgtgccaacaatttgtcgactatttccaggccaaattcatgaaaagcatcccacaaaagctgagcatgtaatggtggaattaatatttttgtaactttccctatgaataataaatacacttttggccaattcagtgagccgatgaacgctcaaaaaatcatcgaccaaaatgacaccgcaacggcatgggccaattggttccgcgaaattggcgacattaccca

SEQ ID NO: 84096 - DNA, 493 bp, Heterodera glycines
atgccgcgacacattgcaattgtaatggacggaaatcggcgttttgctcgcacccaaaactgcgcaactccgatggaaggacattcggccggatttgtgcagctgacaaaggttttttttactgtttttatttatttggttaattgactgaatgaactatttccttaacgcgaaaattaaggcgttaatttgttttacggtactaaattttgtttttttcacattcaatacaaatcgcataaaaattaagattttggctctaaaaagatgagtgcttttttgaatcaaacaggacacttgactgcctaaaatctaactccaaaatcgcaaattcctaatttttttttggcattttgctctattattcctcgaaatttccttttccgatttctttcatttctcattttgtttttttcaggttttggattggtgcaatgaattgggcgttgaggaggtgggaatttctattctccaatttatggaaacgaattga

SEQ ID NO: 84097 - DNA, 294 bp, Heterodera glycines
atgtcaaacaatgaaaatgaaaatgtgatgaatggagaagccgtgggaggggtggaaatcaaagtggaggccaaagaagaagtgaacacggaaccgcaggaggacgcggaggaggcgaaaagtgagcggaaaatggcagaaatgcgcttaattgttttgattggaacaattatgacaaattcggaaaaaattgggaagttttcagttccccagttcagcaaagagcaaatggaacgttcggtgatgtgttgcacaaacgaaggcgaaattgtcaacgtacatttgggcttttga

SEQ ID NO: 84098 - DNA, 1620 bp, Heterodera glycines; identical to SEQ ID NO: 19369
  unsure (1)..(1620): unsure at all n locations

SEQ ID NO: 84099 - DNA, 1082 bp, Heterodera glycines
agccgcgcgcggtcgtccaatgcgccagcgaagcgtccgcgcggttttcttccgtttgtgcgcttttgcacgcgttcgctgtcaggtgcggatacaaaattagagaggggatttttttttgtaaattgccctctaatgatccaaaatgcctcaaaactttttgccattcaaatggtcgctgtggcattccgccccctttttatcgaagtattggcatttgtgaaaaaataattaattaattacagtatctttctttaacagttatcgtctgaacatgcaaattatactgatcgaagaacgcttggacagtgcgcataaaagggacaaagcggcagaatttgtgatggaaaaagcgaagaaagagggcgaaaaggcgccaatccatccgtttaaaatgagcggacattgtgacggagaggccgtagaaaaggaggaggaggagtacggtagcaaacaggtggaataccgtagtttagcaatatgtaagcgacatagaagaaaatttaggagagatagtctaacaatggaagtatgtgcattaatgaaggtttatgggcaggcacagtattaaataattgtggaggagttacggtagtataagtaaaacaagacgcatagatactgtatttgaattcatttgcctggactacagtattatcctgcccaatcagctgatcccttgtgctccgtacgctcgtctgttgctcttcggcacgccctctgccattcaaagtgcgcaattggctcagctccgtgcgctcgtccccggcgcgcaactggccgtggccaactgtcggcctggcctggacacggacgaagcggtggaggaggaaattgttgccctgggggctagccatctggtatttgtccatggggcaggtgagacggggaaatggcatttcaaagaaaatgaattatggcacgacgatttgccagacggagaaacgcgcgacgtgtgggaagcgggcggaccggcgaatttgcgggagaatgtgcgcgtcaacctgttcaggtaaagacctgggtgaatccatttaaattttgtgcattttctgcccgcgggttctctccaacatttgtga

SEQ ID NO: 84100 - DNA, 4868 bp, Heterodera glycines
atggatttgaaaggagttattgcacttggggaaaagaaagttcggttgggtgaaatttggacaagcatagtatcagtgataggcacagaaccaccaaaactaccgagagtaattttaccaaaaaatgacacgtttgaaccacggacggaaaatattcttaatgcgagaattgatgaaatttttccaactggacaaaatttcttggtaaggggtatacagcatcagtaccctgggattatcattggaaggacattggttgccccaggcgcgaccaaagaagtgataataagacttatgaatgcgggaaacgcaccaattaaaatttacgggaactcacatttggcagatttggagccattacaaattaatgcattacctggcgatgagattgcggctaaagattttattccacctgaaactcggtggagtgaaaatttgcctaaattacccgtaaatgacatgaatcggcctccttcagaaagaatagatttggaagagaccagactaagtgaaaaggcacagcgagaattaaagcaaattgtggacaaatattccgatgcatttgtcggtgatgacgggaaaattggtcgttacaatggtccaattgttcacaaaatcgatttgacgcccggggcgttaccattccattttagaccttatcggtaccccccagagactcagaaagaaattgagagacaaattaaaatgatgcttgaccagaatattattcgtgagtcggaatccgagttcgcttctcctattgtgatggtcccgaaagcggacaaaaaatcatggagatttgcggttgattacagggcgttaaataaaatgaccaaaaagagagtttttcatcttccaaatattcaagagcttttggatttaatgggagccaaaaaatattacacatgcatggacatgcagcaagggtttatgcaaatccccatggcaaaggaggacattgaaaagacagcttttatttctcatttgggcatttatgaatttatcacgatgccttttggtttaacggcagcaccggacacatttcagagggtaatgaattcgttgagaagacgattgacagcagcaatgttaatttatttggacgacataatcattgggagtgaaacggaggaaattcatttggtagacattgagaattttttgagacttttaaaggaagtcggattgaaactgaaaattgagaaatgccattggggaaaagctgagattcgttacctcgggtttttgttaagtgagaaaggcgtccgaatggacccgaggcaggtacaagtagttcaaaattttcgggcccccaaaagtctaacagaattaaaatcattgctgggggctttaacatatttccggcgatttttgagaaattttgcgcatatcgcacgtccattacagactctaactcaggataaattcgaaggaaaaattgaagaaaattggggaccagagcaagaaaatgcgttaaaaattttgaaggaaatgttgaccacagcaccagttttgcaatcgccaaggtttgggagaccattcacaattgaatgtgatgcgtcaaagaaggcaattggagctgtacttctccaagaaaaggggcctgtcgcgtttgtttcccgcgcattaaatcggcatgagactaattacccatcgattgagcgagaagctttggcagtagtctattcagtgaaagaattttcaccttatattgtgggatcaggaataagtaagatcatcacagattgtagtgctctgacgggaataatgaaagcgaaggagttgaaatgaagactagaaaagtatcagattactttgcaaagtttcgacattgagataatctttcgtcctggaaagaaaaataaggcggcagactttttatcaaggtataatgttccgggaattgacagtggaggagaggaggaaataaatagccaaaataagaaaattctgagtaccgaggataaggcggaaaagcaaactaaggaaaatgaacagataggagtacaagaagaggcaatttctttaaaggaaataattgaagcacagagaaaagtgaaggaattggcaaaaatttattacattttaaaaacgggcaaattccctgagaatgttttaaaatggaagagagtcattcaagattatgacttagtaaatggcgcgatttactataagagaggtaaaagtaactcagaaaaaccgaaattggtcataccatactcgttaagggagaaaattttccatttaattcatgatcagggacattttgggtttgataagacttggcctgagattaaaagcagattttattgggttggaatgaaggatgatgtgagtttgttgaccgaaacatgcgagggttgtcagaaaaggaaagtccaacccggacaggcaaaagcggcaccaaatattccgataaaaccgacagaaggaccttttcagcgagtacattgtgatattatgggcccactgaaaaaaacaaaaaatgaaaattcttacattcttttggcaatcgacagcttttcaaaatggattatgacaaaggccatttccgatcagaaggcagagactattgcaaattcatttgtcgagatggtcatacatcagcatggaaccccagaaatcgttgtcacagaccaagggagacaatttacgtctcaattgtttgaaaatttgagcaagatttacggttttgagcacaatatgagtacggcatatcatcaacagagtaatgggttagcagagggatcaatgcgaatcgtggctaacataatttctcagagcattaacgaaggaggagataattgggatgagattttgcaaggggcaatttttgcttataacacctcgattaatacggcaacaaaaaattcaccattttttgttattcatttgcgtaatcctcgtttaccgacggatcaattgttaaaattgccctcttctgacgaacttttgtctgatgtgtcggtctatacccgtacacatgtggaaaaggcagcgaaagcttgggaaatcgtgagaactgagattgtgaaagcacaggaaagaaataaagagggaaatgatgccataaggagggccacagaaagagaattcgaaattggggatttagttttggttaaaaaggaagtgatgaaacataaatttgatcagaagtggatgggaccattgaggtgtgttggaattgagacagagcgaaaaaatttgattttacagaccttagatggaaagggaaaatttaaaagagtacatcaagaaaaagtgaagaaattccatggtccagcaactttacctttgcgagaggcagatgaaccgataaattgggaaaaatatgtagatgatccaaatttggaacaggaagaagcagaagaaagtgaagaggaaggattcgagattgtcttaagtaaagagaaagcaatgagtgaggaaatgattggcaagagcaaaaaattttcaaaatttagttttgaaagcagtgaagaggaggagaatggtagtactattgcttttgtccaaaatcaggaagatataagtgacgatgagggtcccgaaattttctttgagaacagaaattttgtgtttgaaaatgatgagacaccaactttgttagacattgtgttgaatggtacaatagttacggcatgcacagggtggttaaatcccaccataattccccttacttcgtcagttcctgaaaaccaagttgatgagaattgggaaatttataggaaccaagagggcgagagatacgtgatgtgttggatttttggtgaaaattttgaaatgcatattagcagtataactgacagaatcgttttgggcatggaagttcaatttctttttgcggaaaaatggtcattaaaaacagaaaatgaacgggaatcatattgggaaataatttcgggaataaatggagtaatgtacgaaataaaccggattccagaaattttcataagtgaaaaagaaaattatgacgaccaaaacgagttcagaatgggtataaatatcataaatagcgggcgaaatgaagaaatgggagaaatggagaataatgataagcaatttttagacaaagtggaaaatatgaacaaaaaaggcagattaaacgagtccagcaaattaaatggagttacttacgagagccattctttttttaaaacaattgatcatacagaaatggaactcttgacaaaagacgaagagcacgttctcaaatcactggaaaaatcgctacaatcgcagttgttagcggttcggaaaagtttggctgaaagtgaggggtcgaaaatgccggtggaggacgaagaccaagtagcaccactaatggacgagtggagagaaaaggaagaaaaggaggaaaagaaggaaaagaaggaagagaaaggaatgaaggaaaacaaaaaggaggaaaagaaggagaagagggaagtgcctaggaaaaaggcggaggaagaaaaacgaagcgcaagtgcggtgacggtcggagaagaagtcgtgtcaatcgtggactctacagaagaacgggaacaggaacgagaacaggaattgttcctaaacccgaaggtaacaagtgagcgcatggctttttgggaatcaacgctgtataatcaggcaaaaaaagacgtggcagaaatgagagagatgaaccgaaagacgggtcaagtaggagtcacagtaagctccaaaaagcgagtttggagtgagctggagcctccggcgttacccgatgagccaagttcgaaatttggcgaaaaaatgcgtcgatgcgcagagatggaccaaaacacgaaggaagcacgtgtggtgatggacacgctcctcgtaatccgagaaaaggagcgcgaactgagcgatcaggcccagaaagg

SEQ ID NO: 84101 - DNA, 717 bp, Heterodera glycines
atgtcgcctcgaactgaaagtccgtttggatttacaagtttccaaatatgggttatccgagccttttttcaaaaatcatgaaccccgtctagccctaaatttaatccgttttcacaggcggccatttgtgcttatttggcactgctccaaacgtacgttgcttttgttgaacaaattggggccggcatcgaatttgtgctggtgacattggaagcactgctccaactgttcacaatgatcactttttccacgaaccgatcaactgcttctgctgctgtccaagcgcataattcatagtgccgtcatttctcaagtccaagaatttctctgggtcgaaattttcagggactcaaaaaccttgagccccaaacccaagactgaaaattttcttaaacccaagacaacaaagaactctaacttacggaaacattcccggatcgagaattttataggactcaaaaacggcgaaaaccctaaaccccaaagatagcagagcactttaacttcaaggcctgctgagcccgagtctttgccaggaggaaaaagaccgagcaacacttaatccccaaaattggaacctgaaattttctagacccgagactgatgagatctcataatattgatgttcccaaaacaaacaaaaaccaatataaaatcttttttcattaaaaatgatatataatggcatcgtgaaagtgttcaattgtgaataataaa

SEQ ID NO: 84102 - DNA, 539 bp, Heterodera glycines
atggtcgtccaatctgacaaaattgtgagaaattttgaaaattttatttttttaattaattttttttagctttcatccgttccgcttgaattgttgcttcgtgtcaactcaaaattctccattcttttttgtttgcttacatatgcattgttcatttataaaagttagaattttcaaaaaaaaatttggaaatttccaaaaatttacagttttttcgctaccctacccgctccatgtgctgctcagtgaagcgttcattgtcatcttgtttggcccgattgaggcattccgaatttcttcgggttgttttattggaggggagcggaataatttggcgactgaaattttcaaaaaaattttaaaaaatggaaaaaccgaaaattcgaaaagtatttaaaaacaaataagcgttggaatattttcagggtaagttagtcctgtaccggggagtatctctattaaatttggagtgattgtgatcatttttttatgtttatttttgtgttcaattttccttaccccattaatggttaaataaa

SEQ ID NO: 84103 - DNA, 2919 bp, Heterodera glycines
atgacgtgtaatccactttgggaagagatttctgagaatttgtttcatgagcaagtgtcaagtgatagaccagatttagttgtgagagttttcaatttgaaagtgaaagcacttatgaatgagataaacaaagtaaagatttttggagaagttattgcatggatgtatccggtagagaaccaaggaaggggactaccacacattcatttgcttttgacattggcagaacaagacaaattggtaaatggtgaagatgttgagaagaaaggaattagtgcaagaataccagacaaggaattagaagttgaattgtttgcgttggtgaaaagatttatgatccatggcccatgtggtgatttaaacccaaattgcccatgcatggaagattttgttgacaagaatggaataagaggaaggaaatgctcaaagggatacccgaaagcatttcaagaagagacaattgttcttgaaaatggtttggctttgtatgcaagaccaaatgatggaagaacagttgaagtatttgcaaatggaagaagacatggtttagacaacagatgggttgttccacacaacttatacctgttgaaaatgttcaagtgtcacattaatcttgaaaaggttaacagtgttaattcagtaaagtatttgcataagtatgtgcataagccaccagacagagcacgattggaattagaagagaaaaatgaccatgatgaagttaaagagtttattgacgcgaggtatgtttgcccgcaagaagcagtgtggagaattttagaattgcctatgtacgaccgaagtcattgtattatgtctttgactgtacatttgcaaggcgaacagatttgttattttgacgagaatatggaagaagaagaaattcgagaaagaatttcgaatggatcagagttaatggcatattttgaattgaataaggaaagtgaattggcaaagactttgttttatcatcagatacctgagaagttttgttttaagaaaggtaaatggaccgcgagaaagacatattttaacacaattggtcgaatggtgaaggtgtcaccggctgagccggagcgataccacctgaggctgttgttgttaaatgtgaagggagcatgctcctacgacgatttgaaatcagtaattgatatgaatggcattgtaaaagtatgtgaaactttttcagcctcatgtttagaaagaggactgattagaaatgatgaagaatggaaaaaagctttagaagaggcagagagttttgaaatgccatggaaattgagagaattctttgcactgattttagtacactgcaatccggccaaaccggaggagctttggaatatgtttaaagactctttgtctgaagatttttgcaggagttttagaaaagaattggcttatgctaaagcttataaagagataacactgagcattatgaaggctggaaaaacgcttgccgattttccaaccatggaacagataaatgttgatgatgatgttgagcaagtatttgatttagctgaagaattggatttgggacaaagagaatatgctttgatgtatgccgaacagagagaaatttgtgatgaaattttgcatagaatatggaatcctgtaaatgaacccgcgttctactttcttagtggaccgggtggaactggaaagacgcatgtgaacaagacaattgtacatatgctgagaggacagaagaagaaagtttgtacaatggcttttactggcattgcagcaactttgctgcctgctggaagaacattgcacaatagatttggactgactttggatatgagtaattcgagtattagtccgagatcaaaggcttggcaagaattgaaaactacagatttgttcatttgtgatgaagcgcctatgataaataagcgcgcaatgagaactttggatgagaaattgaaagagataatgaataatggaattgcatttggtggcaaagtcatgctttggacgggagactttcgtcaaacccttccaattcagaaacatgccacgagagctgaagtggttaattcaaccttaaagagaagtgagtattggagattggctaaaagatacaaattgacgaagaatatgagagctcttgaaactgagcaagaatttgcaaaagatttgttagaaattggaagtggaaaatggaatagtgaaaatgatgagataattttgtccgagaattgtattagctatggtgatttagcagaagagatttttgcaaattgtattgcttctgagaattggaatgaaatggccaaaagtgccattttagcaccgaaaaatgttgatgttagtgaaatgaataatagagttttagaaatgttgcctggtgaagaagttgtgtataccagtatagacttagctcaagatgagaatagacaaagagcagatgactatttggatgagtatttgaatgctttgaacccttcagggtttccccgacataagttgagattgaagaaaaatgctattgttttgttaatgcggaatttgaatatagaaatgggactttgcaacggttcgagaatgaaggtagaagaaatgcatccaaatttgatcatgtgtaagattttgactggagacaaggcaggtcagactgtgtacattcctcggatcacgctttgctgttctgaagattacccttttgacctgcataggcaccaattcccgttggtgttagcttttgcaatgacaattaataaggcccaaggccaaacccttgagcaagttggcatagatttgagaaaagatgtgtttagccatggtcaattgtatgtggctctttcgagagcaagagcttggaataagttgagaattagattagatgatggcaatttagagagaaaggtgaagaatgttgtgtacagagagttattagataacagtgattag

SEQ ID NO: 84104 - DNA, 430 bp, Heterodera glycines
atgagtttgctgcctccagttgtggcactaatgaggttggtgaaacaaatgggtgattagcagatggcaaagcgatgccgccgccgctgccacctgctgctgatgaagtggccgatgaggaggacacattgttgacctaatcattttgggagataaaaaaattaggggaaattaattctctattaagctaaaccaccggagtgctaaattgtatattctagtcccaaaacatttttaagtatttaatataggtaggtattagagttcgacatttttaaaaaagcctggacctggttttcctggacaaaaatccaggaaatttcaggtccaggaaaaatccaggcacctcgggacctggatccaggcctggacctgggggttttttgaaatttgttttttaaaaagcaaaacaatgtttgaaaaaaagcaa

SEQ ID NO: 84105 - DNA, 823 bp, Heterodera glycines
aattaaaccaagtttgttcaatgaacgaacatttgcgcgcagaaaatgcgcggctcattcagcaacaggttgattataattagcatgctcttaagggccaagggatattgaacacttagggctatcgaaggataccaaatgtatccaatttggccaattatgctaccaaaactggcccgagccccctgttggttagggcccaatcgtgccagtccaacacctaaccccccgtccgaaactggatttcctggacaaaatttaagaattaattattttaagtgaccgatgttttttttcaagttttcaaaaaaatgattaaatagatttaaaacacattattattattattgtaaaattagatattttttctaggtttataagcatttaattgctttttttcaaacattgttttgctttttaaaaaacaaatttcaaaaaacccccaggtccaggcctggatccaggtcccgaggtgcctggatttttcctggacctgaaatttcctggatttttgtccaggaaaaccaggtccaggcttttttaaaaatgtcgaactctaatacctacctatattaaatacttaaaaatgttttgggactagaatatacaatttagcactccggtggtttagcttaatagagaattaatttcccctaatttttttatctcccaaaatgattaggtcaacaatgtgtcctcctcatcggccacttcatcagcagcaggtggcagcggcggcggcatcgctttgccatctgctaatcacccatttgtttcaccaacctcattagtgccacaactggaggcagcaaactcattttgg

SEQ ID NO: 84106 - DNA, 645 bp, Heterodera glycines
atgaagaaatgcgccaaagatggaaaattttgggcagaaaagatgcttctcgcctacaggacaaccccgaattcagcactcaacggactttcgcccgatcaattgttcttcggtcgaaggcttcgaactcagctgtctctcgtccatccgaaggaagaacaagccgaagtcattgacccagccaaaatccgcaaatcacaagctgattatgcgcgaaaaatggcccgtcaatttgatcaacaccacggatcaaaatcggttgagtttttgccaaaagatcccgttttgcttttgaatttcaacagtggaaagagattttggctaaatggaacgatcatcgaaagattggaaaagtccccgacgtatcgtgtccacgtcccggctctcggaagaaacgtccaccggcacgcaaaccaactgcgacgccgttatcctcttgaggaggacggtaatgatacggtaaggatcccaccccaggctcaagaagagcaagaccgggacccatcgccgatccgcgagcctcctccgcaaccggcaccaattcgacggactcaggcaaagcgacgatctccgagtcctcctttggccccgcgtcgatcgcaacgccaacggaaagcgccgatccgcttctcgccaaacccttga

SEQ ID NO: 84107 - DNA, 598 bp, Heterodera glycines
atgtttttggactataacttttttctttgtcatccaaatcaaagattattggtatcattcgaaagcccttcaaatgctctattagcctgcaaaaatccaaaaaattctgtcaattttgaacaaattatggccaaaaaggttggaaaatttggttttttgaatttttctggccataacttttctgaaccttaacgaaatttttcgaaattttgcaggctaatagaagacacttagggctttcgaatgataccaacaatgtcggatttggttgacaaagaaaaaagttatagccaaaaaaccgctggggtccaaacgtgccggggcccaactgacgggttccgtcaaattattaacgtcagaaatttttgagaatcggcgaattgaaattttaattaaatttgtgccgatcagcattgacggggaaattttcaatttttaaattaaattaataatagatgcggaaaatttgcgttaggctgactgaaaaattttgaaattttttggaggcaaaaaatgaaaatcttttgaaggtttgttaaaatggcacgcatatttaaaaattttcaattttcaggctatggcattctcttatcgcaaa

SEQ ID NO: 84108 - DNA, 642 bp, Heterodera glycines
atgggaaaagtcgatgagagcacacgcgaagcgttggaggaacaatttcaagtaaaaattgtcggttgcatattttcaaaaattttcagtcgttttacacttcggttctggcgtatttggacaaatggcatcgcattgaccgatttcctgaaaagttgcaatgggttgcgctggcataccgcaaaattccccacgacgatgcattggctctggctcgacaaattgcgcccgagttaacaaatgatttgtttgacgatgttaacgaagcaaaccaaatattgaattctttcccaaatgatgaatttcaaaaattaacccccgaacagaagtggaagaagctgtttgaagcagatttgcagatttgcctaatctgctcaagctggtcagcgtcgtactttccgtgcctgtctcgaatgcatttgtggagagggtattctctttgtgcggatcgcaatggactgataaacgaaatcttttgcaagtcgaaacagtcaaggcgttggtccaaaccaaagtcaattacgatctttcttgcccacaaatgtaccaaatgctcatttccaatcacaaattgtcagagaaaataggcggatgggaaaaatacttatgatgatcaattttaattgtttttacgctaataaa

SEQ ID NO: 84109 - DNA, 109 bp, Heterodera glycines
gcactgcggagggcgacgcgttggatcagttggggctgcgtcactactgctgcctttggatgttgttgtcgcacgtggacctgatcgaaaagctgcccagcaagcgcac

SEQ ID NO: 84110 - DNA, 1368 bp, Heterodera glycines
atggatttaattcttgctaccgattggataaacaacgcttatcccgaaatggaccagcaggaccataataaggaaacgacaaaaaaggaccagcaggaccataacaatgaaacgccgaaaaaagaccaggaggatgaggaggagacgaaggagcctagctggatcagcctcattgacgaagagcagaagcaggacccgttcaccccaatttatgatgagccgccaagagcaagtattcagtttttttttttttttttttttaaacaaattggttaatttaggtaccccaaagacttgtgcttgtgcagaacgcccgcgcccgatcccgctcgtcgagcacttatgcaagcgcttcaactgtagcgcgcatgagctgcacgtgttgttccgaaacttggagaagcgccgagacattgtcgagcacttgcgctctgctcaactgcggaccgcccacctgcgcccttttgttcgaaatttcccggtgcgctgtaacgacctctccattctcgacgcccactcagtcccggcctaccgcggcttcttgggaattacggtactttttggcaatttggtggacataattaaagattttaggtacgaatgcattactacataaaacatggaatccgtttgcatcatccaaacttgccgtgtgtcgtagaatttggaggcggtgatcacaaaacctttttcccgcttgaaattctcactattatgttttagatgtttttcaatatttaattgttgttgtttttaaaataaatttgttgcgtaaaatttttgtccattttaatttagatgaaaatttctaactgtactgttatttttaaaataaattccttgaacacgcaacagtttttggctattgcacaacgtggaattaatacagaatataatccacgccgtttccacgcaatcatcatgcgaatccgatatggagcaaaaactgtggctgcactcatatttcaatcggcacgtgtcgtcctcactggagttccacaccctgatcaagcccaaaagtttgcagcaagggttctacgacgaattgaatacacgcaatgcagaacgatgacaatctatgagctacgtgtggtcaacattgttggagttttaacgtttgaccaaagaattcgagtggagaaactacaacaatctctgggtggcatctatgatcctacgatcttcccagcccttcggtgcaaattagataatggagccacgtgtctcatttacatttccggaaaagttattcttactggggtgaaaaatgtagaaaatttaaaaaattcatttgattacttgtctaaaattgttcctaattattttcggtaaattttattttctcgtaacaaaaaaaaaacgaataaa

SEQ ID NO: 84111 - DNA, 549 bp, Heterodera glycines
aaataacagtacagttagaaattttcatctaaattaaaatggacaaaaattttacgcaacaaatttattttaaaaacaacaacaattaaatattgaaaaacatctaaaacataatagtgagaatttcaagcgggaaaaaggttttgtgatcaccgcctccaaattctacgacacacggcaagtttggatgatgcaaacggattccatgttttatgtagtaatgcattcgtacctaaaatctttaattatgtccaccaaattgccaaaaagtaccgtaattcccaagaagccgcggtaggccgggactgagtgggcgtcgagaatggagaggtcgttacagcgcaccgggaaatttcgaacaaaagggcgcaggtgggcggtccgcagttgagcagagcgcaagtgctcgacaatgtctcggcgcttctccaagtttcggaacaacacgtgcagctcatgcgcgctacagttgaagcgcttgcataagtgctcgacgagcgggatcgggcgcgggcgttctgcacaagcacaagtctttggggtacctaa

SEQ ID NO: 84112 - DNA, 1833 bp, Heterodera glycines
atgcaacatacaaagcgctatttgttggtccccgaagagatttatcagagtttggcaacactgtcaccgtctgacggttcaccaattgggctggtccgtgccagaattaaacaaataaaaaatgatgacgccataaatgaggcggaaagagcagtcaaatatgagcaggaaattaagcgtctcaacaagctcaaaaaggacgaggatgaacgccctgtcggtgttaaattagaaaatttgagtgatgtggttgacgccatgccaaaaccattcaacattaaaagaccgattgttgtagctacgcgtcgccatctcaaggttgggcgtgcgcgaaaagaaaatgttgaacaattagaagatgatgatgatgatgaagatgattatgaaactccacgcgcgtcgagtacaaataaacgtcaacccacacaaatggaaatcttaaatttaatttataaaaacgcccaatctcttggggtgtcggaggaaggacaggtcttgagagcgggtggacggccatttataaccagcagtgtcgatgatattgttagtcacctgctgaataaggacaagcgtggccaaaaagagccaacagcattcaaagaatttattgaaagggcaaagcagaatcgacaattaagtaggtatttatttcccgagggccaatccggcaaaggaatttataaaagcactttacttaagtttaaaccatccctatggatttgaaaaaatttcgtttgctcgagttcttgtacaaggacttaagttcgcctgtctcattcacgagcgttgaaccgcttctgaaagaggcgcgtaaaagtcaaccaaaaattaatagaattgatgtccaaaattatttagctacccaacgtacatacacactgcatcgccaggcaaaacggcgctaccgccgtttgccaaccttggcacccggcttgcatactgaatggcaggccgatttggctatttttgaccgaattactaaacaaaatcgtggctacaagtacttgctagtctgtattgatacccttagccgacaggtgtttgtcgaacccgtaaagaccaagacgagcgctaacatgatcaatgcctttgaacatatattcaaaaggtctaaatatattccttggaaggtgttaacggatcagggaaaggaattcactgcccgcgcagtgcaacagtttttccgcacaaaagacgttgaacacttttgtatgctcacttctccccaatttcatgccggaatggctgagcgtgcgaatcggagcatcaaagagcgactttatcgctactttacggagcataacacgtacaagtggataggtgttgtgcaagaccttgtttacgcaattaaccactcgcaaaattcgagcattggaatgtgcccagcagacgtgaactttaaaaacgcagaagcattgagacaaaaattacatgatgcagctgcaaatgttctccgacaccagccaaaataccgtgtgggggatcgtgtgcgcattgaaaagtataagcacgtgttccaaaagggttacctcccacgcttcagcaatgaactcttcacggtggtagaggtacactctgagcgttcaccagttgtctatcggttgcgtgatgacaataatgaaattattagtggttggttttacgcaaatgatttatgcaaaacgctagaaaacaaacagcaaaaaatgtatgaaattgaaaaaatattaaagaaaaagaggcagaacggtgtaaaatatgcacttgtgaaatggaaaggttacgatactcgcttcaatagttggattcccgcacactcaattagcgaaaaatctatataaaaagcagttttta

SEQ ID NO: 84113 - DNA, 215 bp, Heterodera glycines
gtacgatttctggaccgttgaatatcgtgagtaagttgatgcgtacgcacgcatctaccgtaaaaccttaatctaccatagtcatgtagacaacgtaggcatcaagaataaatatgtgttgatggacgtacgcatttctggagcattgaatatcgtgagtatgtggatgcgtacgcacgcatctaccgtaaaacattaatctaccgtagtcatgt

SEQ ID NO: 84114 - DNA, 1255 bp, Heterodera glycines
  unsure (1)..(1255): unsure at all n locations
atggctacttatgtttatttttcgctgtcttcctttctctctttcttccgtaagtttctctctctctctctcacacactatttcactttttctctcttactttttctatctaactatttctttctccttctctctctctctctctcttatcccactctttcactccctcactttttctctcgctctctccccacattttgtcattaagataaaattattattattatttctttgaaattaaacaggatttccttattttattaagtaaaataatgatttattcagttttttaatcagaaaaaaaatcatttaaatgccccaaaaaatgaattgccatttaattgaagaaaaattaaataaaatcatttcgagacgacaaaaatgaaattatttccgctactattattaattatattatttttaattgtcaaaattggagcagaaaagaaaaagttacagcaaaagtcatttggcgaaatatttggagaaaaatggcagaaaaaaaaagaagaaaaacgaaatgaactcaaaaaaagagaaataattggaaaatattataaaataaaagaaaaaataaagcaaaaagggagaaaatattcaacaaaagaatgggataaaattaatttgaaaattgcaaaaaaattggggacaaatcgaacgaaaatttataaatggatcaaagaattttgtcttcaaaaaaataaatgtcataaatcaaaaagtgatgaagaaaaattagaaattgtgcaaaaattcattgaaatgacaaaagaatataggcaaaaaagaaaatattcaagaaaagaatggaaccaaaattatgccgaaatttgtaagaaaattggagttagccaattcataattgataaatggaagaaacaatttggcattagcaagaaaagaataacggagaaagaaaaaatggaaaaaatgaatatttattggcaaacaaaaatagaaaatccgaaaatgagtgataatgcaattgcgaaaactgtgaacacttctcatcagaatatttttaattggaagaaacaatttggagaagaaataaacgaggaatgaaaaagggataattanatttgtttcagaagatagctgaagaagagtgatttttcattatgcttttcaatttaaatattcttttgngtgccttttttaattaattaaatagctttcggtttgtcctaattnagatcgntttaatttnntatttatgttnngccctgattttgtaaaaaacaaagacaataaa

SEQ ID NO: 84115 - DNA, 593 bp, Heterodera glycines
atgaaaccaaatctcatttttaacccggtctgtccatgcctggttgtggttgaaacggtgctggtcgaagtggacgatgtaggggttgtgctgctggaagtgctggtggtactgcttgactccgtcgttgagcttggtgttgtgcttgtagttgtactcgtcgttgagcttggtgttgtacttgtactggtacttgtgctggtacttgttgacgttgacgtggatgtggatgtggacgtgctgctagtggtcgaacttgttgaactcgtcgatgttgtttcttccgatgatgaatcacacaaaatctttgaagacatattggctaccaagaaaattattacaagaatagcaattggaagcggaatagaggaaaccatttttatcaaatagaaaatttattggaaaattgaatatcttaaattttaaaatttagattaatttatcttttttaatttatataaaccaatcttttcaatttataagtttttgaaataattatattaatttaatttaaaaatatttattgaatgtgaaatattaaagattatagcacgttcttttatagtgacattatttcgtagtatgtaaataaa

SEQ ID NO: 84116 - DNA, 1618 bp, Heterodera glycines
atgggtccgttgggcccaggaggaatgggcccaggaggagcaatggggccgatgggtccaggaggaatgggcccaggaggagcaatggggccgatgggcccaggaggaatgggcccaggaggtgcaatgggacaattgagtccaggaggaatgggcccaggaggagcaatggggccgatgggcccaggaggaatgggcccaggaggtgcaatgggacaattgagtcctggaggagcaatgggaccgatgggcccaggaggagcaatgggacaattgagtcctggaggagcaatggggccaatacaaacatgcatatgttcaccaagtgaatttctttactatcgttgtccttcgatatgctcatttagttttgcaagatgcgtgctgttcctcccctcctcccgtttcgccttcatatgacgatggtccaatgtgtttgtgtacccctgctgctggtaagttcttcaattattagttgtgaagtcaataaaaagcgtcgcaatcagatgcgtgctgtatggaaagtcaaagggcaccgcaaattggcgcagaagcaagggcacttcaggcattgacaatcagttgcatttgcacgccggtgcagagaagcgactgctgcccaccgccccctccgatgggacaacagtttaatccgccgatgggacaacagttcagtccccctacccctccgatgggacaacagtttaatccgccgatgggacaacagttcagtccccctacccctccgatgggacaacagtttaatccgccgatgggacaacagttcagtccccctacccctccgatgggacaacagtttaatccgccgatgggacaacagttcagtccccctacccctccgccccctccgatgggacaacagtttaatccgcctccctttccgccacccccttccggcaatcagcccgtctgtgtttgcactcccgccgcttcagtgcagcaggatgcttgctgtgctcttccccaacaactccaagcagctccgctcctcccgctacctccaattcctcagcaaaatttcccacgttcttctccgcctgttggcggttttgcaacaggcggaccattcacaccgcaacttcaagcgtaagagaaatagcttcataaaaaattcgctggactcaaaccatgggatggacacaaactcggctcggaaacattaaaaaaccgaccgagacataaaatcaatttatagaaaaaaaaacaaaaattaaacttttatttatttttaagttttgctgtcgaaacaaactatcgaaattctaacagcaccagattaagtgctcctccgatttccgggattggtttcggtgcgtcttctgctgacggaagtcaatctccgccaattggctatgccggaaagactcagccgtgtttatgtgtgcccactcaattgggtggaggagggcaaatgccattgtgttgccagcaaaaaagcaaacaaaagagggacaggaggttcagagaaagaggagaggagagagagagaatgggaaaagaggaggagcagacggacgagcgggaaagcagtgcagcaaagagagagggaggagaaagagaggaggcagagaaacaaacaacgaaaaggccaatataa

SEQ ID NO: 84117 - DNA, 84 bp, Heterodera glycines
gccattgaatttgcacaattcgccaccgccggcattgtcctctccgcctttgcgcttcccttcgtcctcgcccacgccggagtg

SEQ ID NO: 84118 - DNA, 237 bp, Heterodera glycines
atggtaatcggccaaaacacgtataaagcaaagcgaaatgcttccaacctgaagcgaaatttcatccttggtgagttcagcttaattcgcaaaatgtacttaaaccctcagttgcagcccattgtttgttgaaaccttcaatttcttcaaagcttccaactccgcatttgtctgcttccttttgactaatgggaagagattatttccgtccattatatagaaacaaaatttgaaaca

SEQ ID NO: 84119 - DNA, 289 bp, Heterodera glycines
gtacagatttattgtttcaaattttgtttctatataatggacggaaataatctcttcccattagtcaaaaggaagcagacaaatgcggagttggaagctttgaagaaattgaaggtttcaacaaacaatgggctgcaactgagggtttaagtacattttgcgaattaagctgaactcaccaaggatgaaatttcgcttcaggttggaagcatttcgctttgctttatacgtgttttggccgattaccatcgtttggatcttcaatagtccattcttccaacaaaaatcg

SEQ ID NO: 84120 - DNA, 677 bp, Heterodera glycines
tgaaaaaaatatttatgaaacaaaaaaatcgattttttcaagtgtccgtttggggtactcaaacatttatggggagcaaaaatccaacgcagaattaaagtacaggctatagggaagctattcccgaaggattcggtctccccataaatctgggcgcatcggttcggggggactgccccgaaaacaaaaaaatcgattttttcaagtgtccgtttggggtactcaaacaattatggggagcaaaaatccaacgcagaattaaagtacaggctatagggaagctattccggaaggattcggtctccccataaatctgggcgcatcggttcggggggactgccccgaaaacaaaaaaatcgattttttcaagtgtccgtttggggtactcaaacaattatggggagcaaaaatccaacgcagaattaaagtacaggctatagggaagctattcccgaaggattcggtctccccataaatctgggcgcatcggttcggggggactgccccgaaaacaaaaaaatcgattttttcaagtgtccgtttggggtactcaaacaattatggggagcaaaaatccaacgcagaattaaagtacaggctatagggaagctattcccgaaggattcggtctccccataaatctgggcgcatcggttcggggggactgccccgaaaac

SEQ ID NO: 84121 - DNA, 625 bp, Heterodera glycines
atggttcacaaccctaaagtgatggagaagatacaggaggagttggaccaaactgttgaaaaagagcagcaaatttgttgggaagaccgactcaaattaccgtacacatcggctgcagttaatgtgaggcttagttcaaatgttctctatcggcttgtaaatataaaaatagttataaatttaaaagtgcatgaaattttattttaaaaataatccaaaaaatcattaaaagacaataaaattagcaacatttatgatagattgttttgataatttgtcaaaaaaaatttcaaagtttctttgaccgcgatgggcttttacccaatgccaacgaatgtttggtttgcaggaggtgctcagagtgggcaatgttgtggcccaggactttccgcatcggatgatgcgcgacacactcgtggacaattggacattgcctcggggacagccaatcgttgcacaaatttcggttgtgctaatggacccagaggtgataaatagaaatgaataaaaattgaattttatttagtgatcggaaaatatgttttagatgacggaaataatctatcattaccgttactattttaactggaacattaaaaaatggcataaaacattaaaaattaaa

SEQ ID NO: 84122 - DNA, 711 bp, Heterodera glycines
atgctcaaaacggacgaactgatcccattcgcattgggaaagcgccaatgcttgggcgaatcacttgcgcgcatggaaatgtttctgtttttcgccaacattttgaatcggtacaaagtgagtgatttctgagcgattttttaattgggttaagtggttcgggtggaaattcaccacatttattctccaaattgatcaaattcccactgagctctatagtataaagataattttattcttaaaaattttgctttttagatattgttttgtatttttttagctttggtttctttcgagcaatttcatttctttttttcactgactaagcaaattttcccaattttttaccatttcaatcggttcaataacagacttttggcatttacactcctcatgactattttatgcttgtcggagctcattatagtagaataggaatatttaacactcattattctgcttttgtcagctctccgctgggcaccaaatgccatcgttggagcgtcggatgggcattcccgtgctgtgcccaaagttcacgtgtcgcgttgagaagcgatgcacggaatagaaacaaacaatttgaaaatgtttttaattatccgatgctgattgactcattttaaacaaaaattaaagttttattttaacattttttccattgagctgcacagaaaattatgccattggtgatagacactaaataatgaa

SEQ ID NO: 84123 - DNA, 481 bp, Heterodera glycines
atgaggccattcagcatttgcctgcttcttctcccgctcattttgcttcttctccaacgttcgactgccattcgaccgtatccgatcgatcaacacggtagaattggtgaaaatgatggctacggtcgttatggttatggtaattcggctgtaatgccccgtggtgagtcgaaggacaaaaagtgcataatttgctaaatttttgactaaatcaactcataacttttctcagacgcaaccaaattatttttcaaattatcgatttaaaaaagtgatcagcaaaaaaaaagttaatgtttgatcatgatgagaattagagtttgcaaatttttttgtttagatttttgtaaaaattcgtcaatacgattggagggtagcattgaaagaatatagaatttctcatttttttaaaaattatgattgagtcaattaagttttcctgaactacaagtcttctttttgtcttaaaatagacaataaa

SEQ ID NO: 84124 - DNA, 85 bp, Heterodera glycines
tttggttgcgtctgagaaaagttatgagttgatttagtcaaaaatttagcaaattatgcactttttgtccttcgactcaccacgg

SEQ ID NO: 84125 - DNA, 495 bp, Heterodera glycines
atggaaaagtgcgaaaaattgacggatggaaaaacggatgaggatgaagcacgaaggaaagcagatgccaaaatgaaacaatttgaagcgaaaatggaaatgattggcaaaatgttcgtttaagcagtttcttttttgaatgcccattcaacaaaaaacatttatttgtaatttgtttcaattattttaaatcatttaattgatgacaaatcacttgaaagtagagaccggacaagagggtcggtcgaacggtttcggttaaaaaccgaaaccgaaaaaaaccgaaaaactcaaaaagttctcggtcgaacggtttcggttaaataaccgaaaaaaaccgaaaccgaaaatcgaaaaataccgaaaaaaaccgaccggtccgatctctacttgaaagcattgaaatattccaccaacattttaaaatttacagctttagttccgggttcattgaacactattccattttaaaagctcaaaatttctcctaattaa

SEQ ID NO: 84126 - DNA, 831 bp, Heterodera glycines
atgtgctcgcttatgcattcgaaaatgcgggaaagtatggcgcaattataattaaaaataaattaattataaaattttaaatttattcagtccaaccaccggtgttgtggcccccaacccttgcctacgcccttgctatcggcaccagggctgggaccgcgccgacaatgcgcgatccgcggtcgcggcaaaatggccgcgccaaagtgggtggttcccaatgggagccccccccccatactattcagtcccatcgcaaattttgtatatgcaggattttaactaatttaaacaaaattgagtattgaaatgcttggaggcatttatagcaattaccaaatggatagatgatactttgttgtattgtctatttttattttattttttaattttctgtaaaaaatgttgatatttaatcaactgagacgcagttggccttttactactaagacgcagttggcccgtttcgtattttggcgctagttaaaaagtcaccacttttgaaaattttttcaaacattttttttcatgcaatttttttgtttgtttattttcaatcatcctcagctaattttggataaacatttaactctcaattttagtcaaggttaaaatattaagaaaaaatttaaaaattgaaataaaattaaatgataaaacaattaaatatcttcagctagctatcgatttttttttcaaaatttttggcttttattattacttaaatttgtaattaattatatacaattttgttcagaactgctggacggaatcacttggtcttcaaagacttgactgattccaacaattttaaatatattttctttttta

SEQ ID NO: 84127 - DNA, 965 bp, Heterodera glycines
atgtcgtcaaatggcatcatcacaattgtggcgctattccttgtgttgtttggcactcacataacaacacaaattggggcaatgaatcgtcatcgccagcagcgctcacttggccatccgtttacggtggataagcagcagcatacggtaggagacaaagtcagtcagtcaattagaaacaattaagcgtaaaactaattgatccatccggattagaaaggaaaattaattttaaatataaatcttttttgattttaattggttttgcgaaagttttcgtttttttttgtcccattttcatataatccgttgaagggattagcaaaagttgcctctgtctgatgtcatcatcaccatgtgactttaaaatttagcggaagtttaattttaagacaatgggaattaattagtgaaataaactgagaatgacgtcaattaagaaagggaaaacaaaaattgattaaaaaaattcaaaactaattaatttatgaatattttaatttgttattcatttaatttgcacttttataggcacagaacgaaaatttggtcggcgcttatttgtctcggggaatgttcagctgtggcgccaaatatgttggcacattgcaaagactgaaaagaatcattgaggtaaaaaggaggcggaaaatgacagaaatttgaaaacaaaatgccaaataaatttaaaatatttaaaatataatttaaaatgttattgaatataaaggaagtgcatgccgactattcggaatgccaaaaatcgatgaagcaaatggacgaggacgagcaaatggcattcggaaaagggcacggcacagagcgatttgcggtgattgacgaactgatcaattgagcccaggggggcaatttgtggcaaaatcacaaaattcgaagcataaccatttgaaaaacattgaaatgatttttcattgtttgtgataaagcgaaacagcaatttgtta

SEQ ID NO: 84128 - DNA, 879 bp, Heterodera glycines
atgcgccaatattccgctcacattaatgcattcttttttgggttagtcattttttaaattttaaacttttatttttcaaatttcccccgcttttcctccctcagttcgcttttcctcttcattttgccgtccgtcgtgcgcactttggcggatgaaaatgaacgatttgccagcagcaaaataatgagacgagggccaacaattgcaatggttttacagcgacaaaaacaacaaaaaagtgaggcggaagaaatggcaccggccgacgttgacgatgacgaaaatggggcaggaggaagaggaggaggagagggaagaggacggcacgtgccaatagaggaggaagacgacggggcagcagaaagtggacaacaaatacagtgccaatttcacgccaacgaagagttacatggtgagaaaatgggaaggggacaagtggacacaaaagtggacaattggaagttaccgtacatttgcgccccagacatttgcgactatgtccaaaatcggattcaaacttcagtttttcaatctctgatagcgtaaacagctttaaataagcgatagtagacaatggaaaaaagaaggactaaatgaaaaaaaatacggaacaaaagagtaaaaacagtgcaaattgattgtcaaacgaagagctctgcaaggtgagaaaatggacaaattcgagataaaagtggggacataatgaccaaaagagggacatttggacaacggaaaaaaacgagtgacaaaatggcaaaaaaatggaatatttgtccaataaggccaaattgactatgaaagaaggctaaaaaatatggactattaaaagtcacaaaaatggacaatggatcaaactggatgaaaagcggactaaataaa

SEQ ID NO: 84129 - DNA, 499 bp, Heterodera glycines
  unsure (1)..(499): unsure at all n locations
atgtgtgccaagcaccaggcatggttgaagaagaatggaggaaagaatgaaaaagcggcgaacaacgtccgcgttggaggagttttcctgggtaaatctgagaaccagaggaagaatggaataatcgatgtaccgattgatgtgaatgggcacaaagtggatttcattgctgatttaggcactgagggaactgttctttgtgaggacactgtgcgccaaatcggagctttgaaattgagccgttgtcaagaacgtgctcagtaccacgatggcacaattcgtccattcgttggcaaaggaaagacaactttttcgttcggagaccgctcatgctatggacatttctttgtttccaaagacggatccaagaatttgctcggattggacatgatggacagacttggattgtcggactccatcagagatggtctgaaggacaaattccgaactgaggctagtagttacacatcactttttcaccggattncggtagccaagg

SEQ ID NO: 84130 - DNA, 739 bp, Heterodera glycines
ctccattcttcttcaaccatgcctggtgcttggcacacatcctttccaagtggccactcttcttgcactttcggcaaacggttgtttcatgtcgacaattcctcgacgaatggctcaaaccgcatcgccacatacgcgttgcgatcgattgctgctgcgtgttcctgtcgaaatgctgctctcattcgacgaatgatccgagttcgttcgtttcttttttgccttcaatttggtcgccatcaagtttcgtgagcccatcggttgttgttcgaggacctttgcttcagcgatggtcgactggtacatttggaggtcttcgacgactccatcatactcgaccaggtcaccatccgctgcaagcttcgaaagaattcgctttctcagctcggcatccttcggtgatttcagtgccgtcaaaagcatgaggcaagaaaattgctcttcgttgagcttttcaaatcgcttatgtctgttgataaaaggacgaaagctttcatcttcgcttttcgaggccctcagacattcatagcgatcaatccaaatggattgtggccggctgaaggcaatctttaggcgctcctctgtttggctgtagtcaaaatcgatgactttcttcggcagacatgacttgctgtactggctgaaagccacttcactcagcttcgtcatgagcagcttgacctttgcttcgtctgccagttgcggtgccgcacagtcgagggcaaaattgaagcgttcc

SEQ ID NO: 84131 - DNA, 777 bp, Heterodera glycines
atgggcgacgcaatccaacaactcactgcggcaatccagcaattattggcaaatcaaaatggtgcgccagccgcaaatgcgcatgctttgccaacgcttccgaccatcgactgttttgagccatcggacgatagaagcatttccgattggttggaacgcttcaattttgccctcgactgtgcggcaccgcaactggcagacgaagcaaaggtcaagctgctcatgacgaagctgagtgaagtggctttcagccagtacagcaagtcatgtctgccgaagaaagtcatcgattttgactacagccaaacagaggagcgcctaaagattgccttcagccggccacaatccatttggattgatcgctatgaatgtctgagggcctcgaaaagcgaagatgaaagctttcgtccttttatcaacagacataagcgatttgaaaagctcaacgaagagcaattttcttgcctcatgcttttgacggcactgaaatcaccgaaggatgccgagctgagaaagcgaattctttcgaagcttgcagcggatggtgacctggtcgagtatgatggagtcgtcgaagacctccaaatgtaccagtcgaccatcgctgaagcaaaggtcctcgaacaacaaccgatgggctcacgaaacttgatggcgaccaaattgaaggcaaaaaagaaacgaacgaactcggatcattcgtcgaatgagagcagcatttcgacaggaacacgcagcagcaatcgatcgcaacgcgtatgtggcgatgcggtttga

SEQ ID NO: 84132 - DNA, 360 bp, Heterodera glycines
atgaattttttgtatcttggtgggtactgctgattttgggcttgtttaacctcattgtattacatatttgattgacattttgttttcattcagtccgttttttaatttataggcattgctggaaatgcgcaatttttcaatacgcagcagaaggaggaagaagaagaagctgatcagaaagaagatgaagaaaacggcgatggaaaagaaagcatcactcaagggatttaaggcacataaatgttgtaccaatattttgattaaagtccgttttttaattttgaatttagttcctttaatttacaattgatttatccgtttatgagcaaatttgggcttgggatgtaagacaaaatgcca

SEQ ID NO: 84133 - DNA, 228 bp, Heterodera glycines
atgtccgatcaaatccgttgtttaattcaatcgggagttggatctgatcattatgcaattacgagtgacggttggtctaagccgacactgtcaccacaattacaaaggttgataattattttttaataatgtttaatcattttaattgtaatttcagtgtcactgttcattggattgataaaagtttctctcgccacgatgccgtacttttgttagtaaaattacgaa

SEQ ID NO: 84134 - DNA, 346 bp, Heterodera glycines
atgtcatttgttttgcataattcgcctgtaatcacttcatttttccaatttgtcccctcaaattctctccgcgccgtgccattttttatattccaaaagcatccatcgcattttggtcggccgattggaatgattggagttgcgcccgaatgctttcgatcgcttcttccaaatcctccaatgtccgctggtcgtcctcccttatggtcgggtcggtgtcctgctgaatttgctggcgaagttggtctgcacgttgctgaagctcttggagttgctgttcgatttgctaaattaacaaaatgataactcatacaaaggaccaaaaaatagtaaattaataatttta

SEQ ID NO: 84135 - DNA, 992 bp, Heterodera glycines
agaatggcaaacaaattattgaacatttgaggaagaatgaaaaagagcagaaaattagcaccattagcggatttaatgggacattggccgaattcttggcacaaaagtcgggatcagaaactgaagcgcagaaattgtttctttccgttaaaaatttatttcgagtgatgtcccatcaattggatgccgagggaaaagcggaagaaggaaaagatggcataagatatggagaagaagcagaagaacgaaccgagggcaaagggtgtgacaaaaagcatggggacaatgggaagggtcagatcaaagaggaaaatgccaatgccaataatagggagagaaaagcctatgccaatgatggagacaaggatggcgttttaagacgaagaaaagtgagaaaggtgaaggatgaagtgcaaaccagagaaataaacaaagaacgaagtgtaagagtcggcgacaaaaaacaaaacaaagccaaactggggaaagagaagacgaaaaccaaaaaagtggacgacaacggcatggaaaagggtgaaaatgaagcggcaaatgtgcaaaaaataatcaaaaaaacactggcaacgaatgccgtgccaatgccaagcgatttgctccaattgctcatgcaattgtggccaaatgtgctgcttttgggtgccgaaggtgggccagccgatacgtcggcagcaaatgatggcaaaacgtcgccacgagggcaccgacgcagaaaacggagccagcaagccgaaattgaaaagacggcagatgtactgctcgccatcctcagtttggcagtcgctttcgttttgctcaacattttcacaattactttaggcttttttgagtcatggccttccatttttgcacttaccattgcagggatctgttgttataaactcatgaaaaccgacttctaccacgggcgtgtctataaagctttgatttggctaaacaatcgcaatcgaatcggtggctatcagttccactaa

SEQ ID NO: 84136 - DNA, 2092 bp, Heterodera glycines
aactgttgccaaactgcacgcggacgggcacaaagtgctcattttctcacaggtcctccgccgatggcatttcgctggccctttcattactacaatatttttaacaactatgagagtaggagggttcgaaaaaattaggaaatccacatattttttcttggactgtgggagacctggaatgcatgaaaaatttgtttttttttggtttaaagtttctaggatgtagttctatttccatttttgtccatattttgacatttttccagaaaacctgtaattttctctgtaaattttttgaatttaattattattttttgttgattttagttaaaaattggaaatttttgcttttacagaaaattaatattttagctgtttgtttttttttcttataaaataatggggttttggttttcatttagcgaatttgatgaaattccaggaaatttattatatccatatttttgcaattttatattcattaaatttgtaaaaatttaagatggtccgtgtgcttgatctgctcgaggaatacctgtccatcaaagggtatctccgtaattagaaaattgataaaaaaaaattaaaaataaataaattctcgattaaagctacccattcgaacgcattgacggcaatatacgcggcaatgatcgccaagcagcaattgatcgcttttcgaggccacaaagctatgatcgttttgtgtttttgttgtgcacccgagcgggcggtttgggcataaatttggtgaataattataatttattattatttttttttaatatattttaatcatcttttgatttgaatttttttttttgaaaatcttgtttttttgagatctctgatcatgaatctggcactattttaaccaagtccaacttcctaatctaaatttgaacaaaaaacaacataaaacgagaaatttgaattttcgatcttggttcaaattcggcttacaaattagagattataaattggtccaaatggatgtaatatttgtgctcattgtcagtgactaaaaaaaaacccctagaacaaattttcatgaattattattatcacaaaaaaaaattatataacctaataaaattcaaaatatacgactttttaactagcgccaaaaaatctcaagaaattaataaaattaaaaatatttttgtttaaatttttttatgtggctttaattaatcccattcatttgcctgccgatcattatacaatatttatcctccactcttccactgtgatcagacatctgcggacaccgttgtgctgtttgacagtgattggaacccgcaaaatgatttgcaagcgcaggcgcgatgtcaccgcattgggcagacaaaacccgtgaaaatttatcggctgatcaccgccaacagttacgagcgcgagatgttcgacaaggccagcctgaagttgggcctggacaaggccgtcctccaatccatgttgcacaacaacaagggcgaaagcacacagcaaatgtcacgccaaggtgtgaaaaaagaggcaaaagcagatgaagccacccccagtgcatgacaaatatcgtcgagacataatgtcgcagggacaaaacgtcgtcgagacataatgtcgctggacaaaacgtcatcgcaaaaaaatattttcttttaaccctagcctaaatcaaaatttttctataaatcagaaatttttgtaaacagaaacatcgaggttttcaaaaaacttctttttttctgcgatcttttgtcccggagacattttgtccattggcgttttgatcatggtggcgattgtgttatcctgatcaggggctgacttttgctaataatttctttgaaaatgatccgggttttattttctttttttaatcccccccccctcttttccaacacagaggtggaagatttactgcgcaagggcgcctacggtgccatcatggacgacaacgagggcaccaagttcagcgaagaggacattgacaccattttgttgcgccgtacacaaaccattcggctggagccgggcgtgaagggctcaacatttgccaaggcgtctttcacatcgtcacacaatcgggaggacataaacattcagg

SEQ ID NO: 84137 - DNA, 785 bp, Heterodera glycines
aggaagcgtacgctttgtcacaagaggccaacatcagcttagagcaaatcatcaaacggtacaccaaatgccgtaatcagttccttgaacgtgtcgccgaccaaatcagcgaccaactacaacaggtgacacccaatttagatgttaaatgattggatggatgccgaaaaaacttcttttttcgtccacgcataccaatttctattacatttcggtagaattcgaactttttttaattttcaggatcattctgacagcactgacgacatcagcaccaacaaacatgagcggaaaaagcgtccgattgtgttcatttcgccacagttgcgcaaacgggtcaaaatacaacaacaattggcggaagcggactcggccaacgacggcgacgacgacagtgaacaaaagcaacaaaaaggtaaagacagaaaatggcttaatgattcaatttacattttttcggcagaatataatttttatgtaaaataaatttaattgacaattttgtggggcattagaaaattagttttcacccttacaatttgataaaaattggccaaatttattggtaaaataaattaaagtaatttattggtaaaataaattaaagttcgttgtttctatcagaaaaaagtccatttaccattcccggcggtgctgaagacgacgaaatgacagatgtccattctcaactggagcagaaacaacaacagcagaagcagcagcaggaaacagaagcaaaaaaaagtgatgggacaacaaaaacggaggacattccaagcagctag

SEQ ID NO: 84138 - DNA, 156 bp, Heterodera glycines
atggtcttctcccacgacgaatggtttgtccaatgtgtgcccgccctgggcgaacagcttgacaaacttttgctcctgtcccaacaccagcgggaagaggaaggaaactcatgcctccaacaacgacggaatacggacgacgacggggagtgtcat

SEQ ID NO: 84139 - DNA, 945 bp, Heterodera glycines
atgaagcaacttcaaaaatgcccaccccagatcaataacctaacaaattcccaggtctcaacgaactcgccgagtattgccaaaggaggaggaacgacttccaaaggcgacagcaaaacggacaagccaaaggacaagaaagaagcaacatcaaaaggcggcagcagcaccaccaataacgcgccgaatgccatggtagatgaagcaacttcaaaaggcggcagagcatcaataacctaacaaattcccaggtctcaacgaacgcgccgagtattgccaaaggaggaggaacgacttccaaaggcgacagcaaaacggacaagccaaaggacaagaaagaagcaacatcaaaaggcggcagcagcaccaccaataacgcgccgaatgccatggtagatgaagcaacttcaaaaatgcggcagagcatcaataacctaacaaattcccaggtctcaacgaacgcgccgagtattgccaaaggaggaggaacgacttccaaaggcgacagcaaaacggacaagccaaaggacaagaaagaagcaacatcaaaaggcggcagcagcaccaccaataacgcgccgaatgccatggtagatgaagcaacttcaaaaggcggcagagcatcaataacctaacaaattcccaggtctcaacgaacgcgccgagtattgccaaaggaggaggaacgacttccaaaggcggcagcaaaacggacaagtcgaacgcacaagaagaaggaccagcatctgaaggcggcagcagtaccaagaacgcgccgaatgcccaggtagatgaagcaacttcaaaaggcggcagagcatcaataacccaacaaatttccaggtcacagcgaacgcgcctgcccaaggagaaggaccatcttctgaaggcggcagcaccaagaagccaatcaaagacaaatcagagtatatgagtcaaccataa

SEQ ID NO: 84140 - DNA, 1033 bp, Heterodera glycines
atgacggctcttggtctacaggtcgaaggatacgcaggaaaattgaaggactacgaaaacaccgaagattcgatcgtgcatatcccttaaaattgttcatttccatgtttttttaactctttttgttatgcttgttttttcctgaaatttttattatttggtatttgattacacgattccgataaattttgataacttaaagtcttgaaaaacttttttttcgacttttcgctaattttatttggcgggatttcgactcattttggctgtggcgggatttcgacgcagcgggattttgacagcgcaccggagttaacccatagtggtactatctcttcctttctttttttctttgtaatttctctcactttggcgtactatctcttcattttaattatgtaaaaaacaacattttacttttcgcatcaattagaatttatttgcaaaaataaagcaaactgtacaattgtttttgattaaaggcgataaatattttagggaatttaatgggcaaaaaaaaaagaattttaacatcagcaaaccggtgcaaatacggtgggaaaagagagaggaaaggcgagcgcaaacggccggccaaggcgatgcaagcccgatgggtcaaggaaagtgagtttttccatttgtttcataaaatctctaatttttccaatttttaccttctccccagcccgaccccgatgcagaaatgccgcaacaaaccaaagaagggccgtcgacatcagtagaatcggtagaggacacctccgaacaactgccaacaacacctacacccatgacgccgcaggaattggacgtgccgtcggtggagatggtggacaccgatgtgccattcccttcaacacctgccgacgctgaccaacaagccgaacccgtgccgtcagcatccacggcacgctgtgagcttatggcgacaccatcaactctgtgcctacctcaaattcactccggcactgatgaggcaccaaggatcgacggcgacattcacttgtccgctttgcgcagctcggagtga

SEQ ID NO: 84141 - DNA, 1732 bp, Heterodera glycines
atgttattcttattccctttgccccttattttgcttttgctcgtggccattgttttggtcagccagtgctgcggcggttgtgtgaaaaaggtgtgttcagaaaagaactttcgttttatcaatttaaaaatcccttttccctttttgcagaaaggcgacagcaaaacggacaagccaaaggcccaggaagaaggaacttcaaaaggcggcagcatcaacaccaagaacgcgccaaacgctcaaatggacaagctgaaagcccaggaagaaggaacttcaaaaggcggcagcagcagcaccaagaacgcgccgaatgccatggtagatgaagcaacttcaaaaggcggcagagcatcaataacctaacaaattcccaggtctcaacgaacgcgccgagtattgccaaaggaggaggaacgacttccaaaggcgacagcaaaacggacaagccaaaggacaagaaagaagcaacatcaaaaggcggcagcagcaccaccaataacgcgccgaatgcgatggtagatgaagcaacttcaaaaatgcggcagagcatcaataacctaacaaattcccaggtctcaacgaacgcgcctgctcaaagaggagcaatgacttccaaaggcggcagcaaaacggacaagtcgaacgcacaagaagaaggaccagcatctgaaggcggcagcagtaccaagaacgcgccgaatgcccaggtagatgcagcaacttcaaaaggcggcagagcatcaataacccaacaaatttccaggtcacagcgaacgcgcctgcccaaggagaaggaccatcttctgaaggcggcagcaccaagaagccaatcacagacaaatcagattatatgaggcaaccataaactttcttggaaaatgatcctgtatttatgttatttgttgtgataagttataattgatcccgtattatgttattgttgatcatttatgattgatccgtattatgtatttattgttcattgtgattgagatttttgtggctttttgagaaattttgaggcttttggggaaaatcctcagaatcttttaaattttgataaattggcataatgtttggtaattatttaatttgaattttggtttttaatagagtatcaaacggaatttcactcaaatttagccagaaaattacaatttttttcgaaaatccacaaaattatgaattttttaaatgaaaatctgctaaaaatatggtcaaaattctcaattttcccccctccggcggtgcctatcggaaccgccggaccctaaaaatcctttttatttttttttcaattttactcaaaattgcaaaatttggccattttgtggacaaatctgttaacaaatcacattaaaaattacaaaaattttcacggcggcgcctatcggcaccgccggcccctcaattccccaagttttttggaagaagcgttgcaaaaaaaatcaacttcgatttttcatgctcagaatctcacaaaatgcttatttcgaacaaaaaaaattactcaaatcgataaatcctgcattttccaaaaatgcaggattgcggactgggatcctgcaaaatcctgcgcaggatccggtcctgctccgggctcattctctccgattctcgtcatccgatctcggccttttccgctttcctccctccccacactctctcgtcacttcttcacctgactctatcttctcacacagcagcagcagaaacaaaatataataaa

SEQ ID NO: 84142 - DNA, 1348 bp, Heterodera glycines
atggccgaacgaagcggaggaggaggagggagaaaagcgggacaagcaacagatggtcacgctggccaagaccaccattcagttgagtccatcgtgggaaagggacggcacaaaaatggcggagaacggcatggacagggacacgacggtgaggggataaagcatgggaggagggggaagagtgagcgaaaagcagcatttaaaggggataaattactgtaaagagggggtacggtaagaggatgaaaagggaaggaggaaaagccgagtaagcaaggcatcatcccttcagcagaagttcaacattagcaacaacaccaacagttgcacaatgccaacacctttcattgttggcaaaagtcggacgattccattgaaaaacggatggaatacgacaaaagcaattgagaagactgatcagtcgaaaagcgaagacagagggaacgaaggtgatcggaattgaccatttgtgggcgggggagagagaaaaaagagatattggtggaggagcggttaaaaatggtcttaaagcccaaacatttgctagttgctgtgaaagctttcacctgagctactgtagcagtactgtaaaagcaaaaacattttgcggtatctttccgacaatataatttctccttttcgactcatccagtgagcgtctctttgcaagttgtccgggaacacaatgtgaccatttcggcatcgtgctgttttggtggtgtcgctgagaaaaaattcccgccactttttgcgacaacgacggcacaccgcggaatgccattgtcattttgtagaaatgaaaaaggcagcaaaagcgtcaacagaacgccaatgggggcggaagtgcgggcgaatggcgccgccggtgacgtggtgagaaaattggaactccgaatggtcgacattgagctggaagagggggaggacgaagaggacggcatggaggaggagaagcgcaaatggcgacggagggaatggcacgacggaatgagtgggaagagagtgagtgctttccgaagttcgaagtttcggactctcgcttatttgaaaatctaatccaaaaatttgttctaattttggcaaatttatttgtcagagtcggcaagaagaagaagacaaaggcggagcagcaccaactgcagcacaacccaaacagacaacgacggggtggacacaattcaaacggaacagagagcagcagcaaagagagaggagggaggacggaggtgaaaaaaaggggcggtggtttgggcatgctttgattagctatgcccgagagtctcgagtcaattaaacctaacctgactttttgcgtctcgactcgagagtgccccccgccgggcagcca

SEQ ID NO: 84143 - DNA, 1406 bp, Heterodera glycines
  unsure (1)..(1406): unsure at all n locations
atggatagaacaattggagaatttgacaattgcactgacacaatcaaagcaaagaaaacgacgactggggaatacggtaagggtaactgtaagaacggaaccaagaccaaataaattcgagagaaaaccgacaaataaaacattttgaggccaagaaatcacagcgaaccgagtcgaaactctagaatgtatgtacaaaaagattggggaatggtctcttccatggcaccgactgatctttgcccccccccccccatcttcagcagctgcgtcgttcaccaatgccaaaacggtggtccgcgagaatcgcaattacgacttgcaaagcgtcgactgctggcgacggtggtcatcgcttcgccgaatgccaacgacggcaaatgccgcaaaaggaggaggaggagggactttgccagcaaagaaaagggaggcgaagcggacggaggagagtcaaaatgacggagaagaagaagatgaagcattgcgcagagatgagtggggccgactgattgtggttggttggagacggatgaccaaatgtgtgggggggggggggggacgggggagactttcccggcttaaccgaatcgagcctcttactaatttcagatggggtcccgaatgtaaatatttacttggatcttttgtcgctaatagccactttttttgcctaggatcgaagagagtggcgtcaattcttagcggaacagcgaacgcccagcagccgacgcgtggagagccgaattcgtttgctcgacgcatgcaacgacagcaacaacaacagcgagacggacgacggattagagcagtaccggtatagactaatggcgttcgcaaccgaaaatttctcgagactcaagaccaaaaaccgggacttttctcagtcgagatcctgggtcagctctcgttcgaaccgaggaagtccgggttttaccttgggattcagactcaacaaccaagctaattctccatctcgagtcgatcgggtttttaaggtttcagtctcgggctaaattctcggccttaaaaaaggaacccatacacttatcgaaacaccaaattgttggcatttaacagaaaaattggcacacgcaaaaagccaatggtcgtagttcttgacggaggagggaaagaagggcagcagcagcaaaagttggcatacgatgaagacaaaaaactgctgaggagcgcgacgatgaacaacggcaattgtaatggcaacggaaggacgacgacgacggcacttttaatgagaatgaaaaaagaaaacggcgacaaaaagtggagacaacggaaggaggacgaagaaatttgggagggataaaagggatgagagagaagcagaagcggaaataatgatatgataaatgataaggggagaanagcgatgggaaaatttaaaaata

SEQ ID NO: 84144 - DNA, 1235 bp, Heterodera glycines
atgcagattactattcgggggtggagagatagtacacaacttggagaggaagtgcggagaagggaagagagaaaggtagagacaacgaaaacactctgtccctttcttctcttcccttggccacccatcggctcgagtgcaaagggaaaaggatgagaagaaaagcaatgaagaataaaaaatttatttaaataaaaataaaaatttacagtataccaaaaaatgcacgaaaaataaacagccaatacacttgggtttttgcgcgaaaaaaaagtgtgaaaaccagggacagtcgaccacctgccccagaaaatgcgcgaaaaaacagccaatacccttgggtttttgcggtaaaaaaggtgaaaaccggggaccgtcgaggtgtgaaaacccggccaccgtcgaggtgtgaaatttcacaccttgacggcgacggataccgtggactcactactaattatattataataatttctttcttttttttatatttgaatccaattaatttcttttctgttatttatgcttgtctttttatctcatgtcttcatactctccttcctcttcttctccaggcaccggtggtgcttacatttaatattgcatgtctataaaatataaatttaacttagttttttcttcaatattattactttggttaattattatctttttattaaaactttttttttcaattgccaacagtaaaaaatgttgatcaatttttattattttaatttttttaatgatatttcagaagttagcattgatttattcaagtgactgaaataattggctcttatttctgccgaaagtattattattattattattattgctaaattaaatgagtatttaagtgaatattttttacaaattttaaagtggacccgattatattttcaattattgattcaagaattgaattattttagcaaaattatttaatattttattaattaagcgcttaaattatttttcaaaaattcttgttcatgcctgtgtagtatttcttcttgaaacattccactctattgaaatctggatttgtttttattttttctattcataattttagaaatatacataattattgtatcaatgagttatttgtttaagaatttttaaaaatttattaagtttatttgtaaatgacttattaatcatttttttttaattttagctcattacccatttcaacaagcattgactgtgaaaagaaaattgttttcaaa

SEQ ID NO: 84145 - DNA, 1167 bp, Heterodera glycines
  unsure (1)..(1167): unsure at all n locations
atgccggagaagagacaagggaaaaccaaaaaggaccccagatctcccaataaaaagatgcggaaacacataataacggcatcaaacaaaaattcgccaacatttnacttaggtaagcaaaatggcatactttnaaaccggttaaaactcggtttaactgaattcttccaaaaaatgccgaaataactcaactgaggtttcgatgcatgtatttttttgataccaatattgtgcagattgaccgtcatttgacaaagttacgaaataaatggggatgtcgtaaacatatgacaattattgtacattaaaatttgtttacgtattaacaaataaggtcatttaaaaataaatttatatgtagaataaaaagctcaaaaatgtatcaaaatcttttaaatataaaaattaaaaattaacattttataaaataatattattattttttatcaaatttaataacttacctattcggactttgtcctagcacctttttatgttgaactattatcacaagatttaaaaagttttcaccatctattgtttgcgtacgttctttactgagatttggatgcctcggttgcttgatttttgattttcaattaattaattttaatagatattattttttttactataaatgaaaaacatatatcttgaatctttttttactttatctgttcttacattaattttgaatacctttagttgaaaagcattttattagctttacacgttttctataatggtacattttttcttttttcaataaaagacgctcttttaataggcaaatttaatttttttattgttaaaaaataaatcttttaaattattttctttattttattttagttgattcttttgggaatattttcattgtattgaactattcgatgcattgatttatattgccataatttttattgtaatttggatttattaaatttaatatttttagtattttttatttaaatcaaattttaataattatttctaatagatcgtatatgtaatttatagtttcttttttgcatagttcttgacacttgccttccaacacggcagcaattcttaattattcttgtttgtgctctttcaatttaaaatttattattgtaattgatcgatttttttatatattggttaagttaaatttataataataaa

SEQ ID NO: 84146 - DNA, 1502 bp, Heterodera glycines
  unsure (1)..(1502): unsure at all n locations
atgacggacaaatgcattaatagagaattngataatgttatgtttgatggtgtttggaatgatacaactgccggagggtcaattcgatttggagcaggtagaaaaaattcaagcaaaaataagaatttacaaataagggaaattagcaatntaaagaatcttcagtcttgcactaagttaaaaaccagaaatacatttgcccttcgttccaactaaagttttgtatgggttggtttttgtactacaaagtcttataagcagtttagaattaagtgtaatttcaattgttaatctttttaaaaccgggtaaaattgttattcaaattgattataataaagtattaaattgaggttagaaaattgtatatacaccagggctgggcgcaattgcggattacgaaattgcgagttacggatttttgggatttttctgcaattttgatctgtaatttgacttggattatttttcgagacgatttcttgtaagattatttttataaaaataaatttttattttatttaaagggatggctacctgtatttcgattgtctcaaattcaatttcattttttctccagtattccaaattggattatttctgaattttcttcaaaatttttttgtaaattttcagaaggatttatttttttcttcttctgaatttttggtccaaattatctggattttttaaaatttcccatcaattaatattcctggtccagcttgggacccaattttttcaatttttaaaatttggctattcagttctttaactgatttggttgcccaaaattgtatcgtcgggcttatccattaccaaagccaataacaatatgcataaatccaattataaagctcagaacttcaaaaatttttacaaaagtgacccaattcaaaaaattgaattttttagacccaaaattataatttctttgtataattgaaataaaaaataaagaaaatgtttcccgaaaatccatttttttatttttattaattcaatttaaaaatttgtttttcaaaaattatgacaaaaattgattttgaaaattacggattgcggattacgggaaattgcggggttttggacccccataattgctgattacggatttccgtaattgaaaatccagttgcgcctagccctgagccacactatagcctcataagttaatgtgatagtaaatcgtgacggaataaaattttaaaataataatttatcatcataacaaatttcggcattacagttttaattttagaaaatttcacaagaaaccctcaatattggataaaagttgctggtgacaacccaaacaaaagcgtgattctgatcatttcgttgatgcaaaagtatcaacgagaagaacgccggccaaactacgcagctggtttcaacattttcaaaatggtagttaacataaaaatgggtttagacaactaattctatatatggaagcattcttttaaataataataatattatttaaaattaaaaaaaatga

SEQ ID NO: 84147 - DNA, 766 bp, Heterodera glycines
atgacaaatttttatattattctttttaaatttatctttttccgacaaatgaatataagcaacaaagaaaatattcaagaaaagaatggcgccaaaaatatgccgaaatttgcaagaaaatcggagttagccgtagaacaattgacaaatgtaagaaacaattgtgataataaattttcattcttaaaagtgtacgaattttttttaattaaaaagcaagaattgattgttgagatattttatttaaatttgcataaaattttattttattaatttttaattggcataaatatctaaaaaacaaattaattaattaaatcctatcaaattttccgtgagttttgccttaattcttttttgtattgacaacagtacaatattaatgtcaattagtttatgcgagagtcgttgatataatattatgaactgaaattacaatttttcaaaaaaataaatttaaaaaaaaaccagaaagttcttcaagtggcagcaaattaagcgaaacttatgagaaaatttaattagcctaatttatgattagaaaattgaaaaaaaagttgcaattagcctaaaaataatcacgaagaaaggaaaaattaaaaaattgaaaatttattttcaacaaaataggaattccaaaatgaatgatcagaaaattgaaaaaatgattaatacttgtgcatgaacatttgagatggaaagccaaatgagagaagaaattattcattcttaggagacattaaattttgattaatattttaataaa

SEQ ID NO: 84148 - DNA, 513 bp, Heterodera glycines
atgcccatcatcatttatttttcattaaattttcaacttgtgtttctgcttttcaatattgatatacaaggatgggattggcttctgtattacaacaaactctcaccttttccaattattttaccgtccgctttaaatccaatcgtatcattttgcaccatcaatgcttaccgtatcaaatttgtttcgaatataaaatgtttcggtatgtgataattagttgactgtttgattttcatttatttaattgtttttaatttatgttgattatttaggaaaaagcatgaagcgtttgtttcgcatgaaaattggtgatcaaaatgcggtttcaaatattcagatgcagcaacattagtagcaacaaaatcattgttttcacaaaatgcaattttaatttcgtatttatcctggcattgattttcaagaatttgggcgatgcgaaaaaaactcagttttgggataagaaaaacctaatatttaattatgcgattcactaatttatataataataaa

SEQ ID NO: 84149 - DNA, 374 bp, Heterodera glycines
atgttcatttgcttttttccacctgctgatcacgcaatattggacgacaaatctgtcgcggaaattttgggcataaatctcgacgaccaaattattttggctgcatatgcaattaatgtaacggtaaatcaataaaatttaaaaattcgtttttttaatttaggatatccatttggctttaagtttatattaccttgtcattataagcacttttgcttatatcataatgtttggactagcatattgtatcaaaaaattcttggacatgaaaaccaaatggtaattaatttaaaattattttttattttaatttttgtgtttgaagcgtttcatcttcttctgaaatagccaaaaagatgattgatgtgaataaa

SEQ ID NO: 84150 - DNA, 385 bp, Heterodera glycines
atgcgtccgattatttggccatctccgctcgaccattgtccacctccaatcgcattgtcgggccgcacttttgcgaaacgaattgtactcgcagaggacgatgtaattaacaaatgatcaaaatttaaattcagtaacaaacaaattgattgtagggaagagagacaaaacgcaatgaatttgcgatttgaaaagggcaaaaaattggcggacgaactgccggcactttttttgcattctgcagaagtaaagacatttaaaatatttttttttatttatttaaattttttttagtttgatgctggtaaggaatgcgtgaagaatttgagcggaggaatttatgtgcaatttgttgggcaagaagaaacactaacgcacagaaaaa

SEQ ID NO: 84151 - DNA, 1184 bp, Heterodera glycines
  unsure (1)..(1184): unsure at all n locations
agcacanttctgttactactcaacttcttgaagtggtggatgatttcagttttgctttagaaaatagaaaatcaattgatgtaattttttttgatttagctaaagcattcgacacggttccacataaccggctaatatctaagctccaaaacattggtataaataattccttattaaaatggattcagaattacttagaaaaccgaaagtttttcgtcaaaatcgggtctgatttctctgacgaatatccctgtctcagtggtgtgccgcaaggctcaatattgggaccactgttatttcttatttacatttacgatttaccaaaattctgcgaaactgaaaatgttaaaattaaactatttgccgatgatcttaaggcctatcatgttctttcaaatatttccttttctccactccaaaattttattaacaaatttaatcaatactgtaaatttaacggccttaaaatcgcttcaaataaatgtttaactttacatttaggacacaaaaatcaaaaaataaattattttattgatgactttcaaattcctaaaaatcccggaaacgaaccagtcagagaccttggcatttattttactaatgatttgaaatgggcacaacatattgacattatctcgaaaaaagcattacgatctgctttcgctatactaaagtcaatcaaaactcgtgatacgaaaatacttgtaaatttgtttaatatttattgcagaccaattttagaatttggatctccaattttcaatccttatttaaaaaaggatattgaaaaactggagaatgttcaaaaaacttttttgagagtaatatttagacgtaacaattatgctgctgattaacctaattatgctgaattgttaaacatttatgatcaaaagtcgcttgagagtcgtaggttaaaaatagacttaaaactttttcatgaaataattttaggtaaaataaatttacaaaataatgaatccttttctttttccaaaaacattgtaaaaaatgaatacactataagaacagcttattgctcaaccaatgctagatacaattcgttctttattcgaacctctcgtctctatagacttttacctaaagagacgagattactaaatccaaatgagtttgccaaacttcttgaaagatctgatcttaatttgttgatttctttgcca

SEQ ID NO: 84152 - DNA, 733 bp, Heterodera glycines
atgcaccatcaaattcatcgccgacagcgccaaaatggcactaatgaggcggctaatttattaattaacgcagtccaagcaaatgaatgtttacgcctaactgacactaatgaggcggaaacgatactactaattgacgcaatcaaagaaaatggcactgtaccactgaagccaccggcacaacctgccaaagccatgcactttgtggtcatttcagcggtgtacagtacaaaaagcaaactgtaaatgccgtggccaaactgtaaatgctttggctgacgattggtctcgcattccgtcattaaatacttaaaaaaaaatgaaaagcataataatgaatacaaaaaatgcatgcgaaatgcgtcggttgtggaaaaacggattcttatatgaattaggggcttaaaaatgcctgaaaatccagcaattactaatctttccataaatctaattatactaattaaaaaagaaaagctgctaatttgttttaagttactctgacaatcaaatcgttttgttggttgatgcacaatttgatgatgcaattgtgcaacaaatttttgttgctaaaacgtccaatgggacaaatgagcaacaaacaaattttacactgcataaagcttcaagacgtactgacgtatgcttatggagttcttatatgtctgtgtttgattcggttgatcaaccagaaatgcttcaagttggccaagccgaaaatatggcacaaattgag

SEQ ID NO: 84153 - DNA, 1499 bp, Heterodera glycines
  unsure (1)..(1499): unsure at all n locations
atggtcagcaaacaatgtaaggtaatttaaatgtatgaaaattgttcaaacatcaaattaatttacacccggcaattgatatgaaaagatagcacaaagattctctcccgtaatacctatgggtcattcattcttatcaaaatgcattcctcctcatcttctgaagagggggaaatccacgaaccccagcaaaatattcaggctcaagagcaaaatcacgaccttgacaattatgaaaaacgtttctttcttggtgaacctatccgtcaaaaaacacataggcatgggcggtcgacccccgccntaaaaaatgtacggccaattaagtcgggacacttttagtctgtatagtcagttggcatcaaaatagaatgtattttgaatattttgaatttaaactaactttttgcgaaagaattggcaaaattatggcctttcggtgccattttgagctttttttcgcggttgacggtaaattcataaaaaataaacataattaagccattaattatttcattaagttcaattaaaattgaattttcttacactacttttaaggtgaagcggtcgtacgataagaagcgctttgaagttggcacttgttttagtccacttttctttgccgaacattggcaattggttgtgttgaccatcgaaatttatcgccattttggcagtgctcttcaaatcatttatttaatgagcgcaatcgaaggcattttcgatattttaaaggtggatgggttacgaattaattaacattaattaattcattatttatttgtttaattattattatttaatttattagctgtatcaagcagccgatgttgtccaaattgagcattggtattcaattcaaatcgaaggggaaaagtacaagggccttgcacagaccataaacacgaatcaagactggaggaatcaaatatcggcgcataccgattgtctgataaaatatggggtaaatttaactaattaaaacggacgggagaacaattattggaatttaattttgataaaatgcaaaaagaaaattataaaatttgtgaaattcttaaataatcactaattgcctaaatgtcctaaagaatgcagccgaatttctgattattggagacattgacgatgttttggtgccaaaccatggcttttattatgacgaattcattcgaaatgatttgcaaaatgccgccgctttgttgtacgaccgcttttatgttgatacaacgaccagtgggtgccatgggccaaggccttaaatttgaaaaaatggccaaaaatcagcttaaaatttttcaagcagtaaaaagcggaggattggaaaggatttgtgctgttcgagtccgagatttaccgagactttttttacaaaattttttgttcacttaaaatctttaaaaaacaaatctttgaaggttttcctcacaaatttttgctttccttatttcaccttcgtctatttaatacccatataaaaatgtacgaaaactcgttaa

SEQ ID NO: 84154 - DNA, 402 bp, Heterodera glycines
atgcgacttgtgcaagtccacctttgccgacatgacaatgttgaacagcgagaagcgctccgggtccctagcttaagggcaatgatttgtgagtgagttcgtgaccaaagcgggagccaaaaataattaaaagaagatttttaaaaaatacgagcatcggtggtggtgggccccaaaagaacgagctaagtcttaatttactctcagcagctgcgcggaacttttcaacccgtaccaatttcattaccatttaaaaaattaattaaagataaatattaaaaaattttaaagtgcgggcaccggttgggtgaccactggatatcgacacgaagatgccggaaacgaaatcggactaatttaatttgttgtatcttagagaaaagaaggatttgttcaaataaa

SEQ ID NO: 84155 - DNA, 652 bp, Heterodera glycines
atgcgaaatttgaaagtttggattttcgaccttctgtacaaattgggctctgggtttagtaattggtcgaaatgtacgccaggtgattgatcattgatcagcgaccccgaaaccccctgctggaaacatattttcatgatttttaaaatcaaaattatttttccctaaagggataacatcggcagtaattaccatttcctcaattaaatgcttttcaatattcaaatttagaaataatttccttgaataaaatatatatattacatttaaattgctctctcatgcaaattctgaatgttacggatgattgggttgtcggagtgatccgtcgcctcatcgaagtgacccatcggataataacccatgagaaaatgcaacgattttacaccgattttatccattggctctgttttgcactccgttggatgaacgccaaaaactcagtgctcaacaaaaaattaaaattttccacattaatcggcacatttttctgtgtttatgttgtccaacaattgctgcccataattttcccaattcgtccgccgcctgcgcctgtttttaagccgatcacccgcgatgtgatcatttatgccaccttttcatacaaaaacagcaccaggtacatatctctttagacggacaattttcggta

SEQ ID NO: 84156 - DNA, 1348 bp, Heterodera glycines
  unsure (1)..(1348): unsure at all n locations
atgcactcaaattttcaaattttttttcaaaaaatttcacttgggaaaattcctggttggtcccagtcccggacaaaaatcgaggtcccggtcccgacttttctggtcccggtaagtcccgtttccggtttttgtcaaaattcccggtcacgtgcaactctaataattaccttttttgctaacttgctatttaaataggtaaaaaaaaatctcaaaataggtattaaataggtacaaaaattccaaaataggtaaataaaaatttttattaacgattttttagtggaaaaaagcaaacaaagagggaaaattttggttctacatatctctttgtaaacgaaattttaaatatattaatattttcttagatactattgacattttaaattaaaaattttgtcaatagaaaaaataaataaattttgggataaatttttgagaaatttttccaattcttagggtgcatttttgaaaatttttttggtcgattcttatgggtatattttttgattttattgcatttttgttaagaattttttgaaaatccttaaaataggtaatcaaaatgccgaaataggtataaaaataggtacctaggtaataggtagaaaaatcccgaaataggtaaaaataggtattataaaagtgggtgtagaagctccaaaccaagctaaaaactcgttttttatgcttatctcaacgttacaagtgcgcaaaaattttaggtatttaactaaaaatcgcatccctatttattacaatttccaaaaaattttccggcggcgcttatcggcaccgccggaccttcattttaccttaatttttgaaattttaaccacaaaatgggtagaatttgtcattttttatctgagaaaaagatcgaaccggaaaatgcagattttttttgcatcacaacctcaaaagctattggtaaaattttttttttaaatttcgcttttcgcattttcgcatattttggcttttcgcatttcgcttttttttcatttcgcatttttcagtttcgcaaatttcgcttttcgcatttcgctttttatttttcaatttggcccatccctggtgtatagtaaggcaattaaaaaaaaattaanaaatgttcagcaatttttgctgcgttttcaatctttattgtttaaaaatcaaaattcgtttgtatttggcaattgtcacatttatttctgcgttgcatggatgtattgtcagtttgggtttgcttaatagtggaaacttacatggtgacctaatgatcacttgttgcttcattgactttttcatggtgtaatttaaaaaatatataaaggcgaagcacgaaaaagtgcaagtgatcaaa

SEQ ID NO: 84157 - DNA, 1470 bp, Heterodera glycines
ttggatttgcaacgacgtttggatggacattttgcccagttttgaccatgcccaactcggcctcaaattggcacttctttcgccacgtttcgatgcgttggtggacaaacatttcgatggcaaaagcgaattgacaatttggagatcaatcgaaattcgtcgcaaggacaaaggaccagaaccgaaactatctgtgcggatggatgacaaatttgtgccatttccgttgccggaccgtccgttgcccagcaaaatccgttttaaatgccttcagattgagtaattaaaaaccagagagctatgacaataaaagcatttatttcattttcagttacatcgatcactccgtcatcgcttttcttcgttcaaatcaccaaattttcgacaaaagaggcaccaatttacacttgcggattcaatcatcacacaccacggaaggccagcggatttgggacatttttggtcgtgaaatttggccaattttttcggcaaatattcgccatttgtgcttttcccgtggtgatcatttggactatttgcttcgtcaaatttcgccgacaattctcatcgatcttaaccaattggtttcaatccattcatttggtctgttgccctctgcgtttggtggtgattttgatgggccaaatgcaacaattactgctggccaagcattgtccaaatggttgcactctccgagaaaagatggccaacccaagcaattgcgttgcgataattactacgaacaaacgaacactgattggatcgacaatttcaaggaggtgtggtccgggggggggggggggggacaaaacgtagccgcaaaattttattttaattaaaaaaattatttaaaatttagttatctagcctaaatcaaaaaaaaatagataaattcgaaaaaaattattaagaaaattcaaggaaatgtaaaaaagtcgtttttttatttttctggaaattcagaaaattagtttttatacgagacggcgacgttttaggggtgtacccggtctgtggatggcattctgagttattttctgaaacccgaccccaaaaaagttataaatcgaaaatttctgaaaaattccgaattttatcaaaaatttcggaaatcggaattcagtgccatccctggtgtggccataattcgacaaatgactgattgttgttttccaatcaaattgtttagcattttcttcgtgccaatgccatttcttacgtcagttacgaaattcatttttctgttcgtgcgccgtcaatgccaatggtgccattcgaattggtgaacgaatggacaaaggaaaagctgacattggccaaagcaaagaaaaatgaatggggcatcggttggataatgaaacgatgcaaaattattggggagacagcggcggtcaattgggaagacggaaattgggacaacaattgtaacaatgtgttaatttggcttaatagtgacactaattgcattgg

SEQ ID NO: 84158 - DNA, 126 bp, Heterodera glycines
ttttgaaacaaaaggggggacccttttgttttgcaaaatttttttaagataaaaaaccatgataattttttatccggggttttaaaggtcgctaatcacgaatctgacatgtatttttactaattt

SEQ ID NO: 84159 - DNA, 360 bp, Heterodera glycines
atgtccttctctccaaactcgaattgggacaacgactttttcaccgggcagcaacagcggaacaacaacaacagcaacaatggcgcaacggcgaatagcagcaacagttcctccctcgggtggtgtgttcgtggtaagacatccgaaccaatatacctcatataaaattttttttgttttaattagagcgaatctctcttctcctcctgctcatgcttttggtcaacatggcccattttctgatgatgttcatcgtgctgctgaacagacgttgattcaaggacgatgaaaaaattttattatttttcacaattgtgatcatttttttgagatctctttttttttgatcgcttctctaaa

SEQ ID NO: 84160 - DNA, 1499 bp, Heterodera glycines
gttttcccattttattatgcccattttaattggccttggcagccctttgctcggttattaatatttaaataatttgttaatatatttttttacgtaaagatatttcggcaaatgttgggtcagaattattggacaaatatggcctcaaagaaaacggagctgtgctaattgaccagcaaaacatggacaaatttatgccactgtagcaaaatccaattaaacactttgtctccattaaaaaggcatttaagcgaggacgaaattctcaatttggactctgtcatttttttacccggcggatcagcacttaacacaattcgcgtgttccaatgggttttgaacggaatcaatgggcaaaaaaaagtttaatgatgcgattaatcacttaattagctcatagtttcataaggctgatcgtgcaatatttttcggttcggttggcgatgattccgaagcggaaatgctactcgagaagaccgttgagacgggtgtcgaagcgaaattccaacggattgagggggttcggaccgggaaatgcttctcactgattaatgccacaaatcggtcaattaattaattttattaattttaattgtatttttcccaattttagttcgctttgcgcttgccttggcgctgcttctcttttctctttggattttttgcatttgcccgaaaatgcgaaattaatcgatacagcaaaatttttttattcatctgtgattcaaaaaataaaataaaactaatataattaaaattattaaggcccatttttttacggtttgccccgaggcaattaaacatttggccacaaaagcaaatgaattggagaggccttttttattcaatttgagtgccgattatattcctggaaaattcaaaaaggaattgaacgaaattatgccatttgtggacattctttttggcaagttttcatttatcaaataacaaaattaactgataaacttttttgttttatgtttaaatttaatagtttcccccaatttagctaatgaaatggaagcatttgcttatgcaaaggcaaatgaactcaacccaactgatcatttgcatcaaattgcattgcttttgacagaaattaaaaggaataaataattaataattatttggataagcaattgtttttcttttttgttttaggccaacagaggaaaacggggggcgaattgtgctgattacacgaggggaaaagccgctaattgggcacaaaatgggacaataaagaatttcctgtcatttttgtggataaaattgtggacacaaatggggcgggcgacgcattttgcggaggtttctttttgcgctgaattttgaatgtttaatcattgaatgggcaatttaaaggctttttggcagcattcgcctgtgacttttcgctggaaaagtgcgtgaaattcgcactgtccgcggctgccataattgtacagaattgcgggtgcactttcccggaagaatgggtcggcgaatgccgggagcga

SEQ ID NO: 84161 - DNA, 449 bp, Heterodera glycines
atgcccattaaacactgtgtcatttcgctttcgctatttgtgccattgcaaatgcaaaattcggaagtacaaatcggcatgttcgtccgctgctggctccattttttgactgtttttgtttttgcgtctcaagaaatagtgatagaccaccaaagtgatgatggcatgggcgaagagaagccaaaatggaaaatgtaataattactattttaattaattaattcagaaaatcgcaccaaagtgattgtttcgtacgtgcgaatgtacaccaaaatgccaaattgttcacgtttgattcgaatataacccgaaaggatgttgaaaatggagaagaaaatggtgtaggagaagtccaacgggaaaatgatacgcatggtcaaaatgttttcatttgtttgatagtttctgctcagtgaatagtcctgcactttgttggagctttggaggga

SEQ ID NO: 84162 - DNA, 496 bp, Heterodera glycines
atgtccactccaaagcaggaaaataaatttccaaaaaaacccgaattttgcaaaaccgagcaaggtatgtatacctattttattaattattttaataatattttcaaactattcagacgatgatgaagttgatacggacccttctcctgaagaagttgagaaatggacgccggagcaagtgattgaatgggaccagcgttgctatggaaaaatgcctgccgaagaagagatttggcaagaattcctcgacaacggagaagcgaacgtaaataacttctttttttgtctttcgataattattttattaaaactaggttatacgtgaatttttcggtggaaaaggtgccatggaagttgagaagagccttcgtgaatacgccaagaagaaagaaaagagggatgaaattttgatgagaaagcgaaaagaatacgaacaaaagatgggaaataagaaggacgaaaattaatttcgcaacattgtatcaaaattcggata

SEQ ID NO: 84163 - DNA, 391 bp, Heterodera glycines
atgcttcaaaacgaggattcctgcatgaacgaaccaaaagaaattccaccaaacgtcccaataactcaatcctggaaactttttcgcccaaaatacatgttgacttaccgcttgtgcgattgtaagttatttatttaaacttcaatatgttaaatttgtggcttaagtctgtctttcggcactttggaacaacaaaaacaaattcaagactaacgaagaacgatcagtgatcagttttgaactctgtgagaagtgtacgatcgacaattgccgagcaaccgacattttggccccattcaaaccaaagaaataaacttgatgagacttataatttcgcatctaactcatatccttcaattaataatatcattatatttgttattaattttta

SEQ ID NO: 84164 - DNA, 2130 bp, Heterodera glycines
atgcggcttgaactttcagtggcagacaccgaagcgccgagcatcatgggattggattggatcatccctttcgagcgtgccacccaacagccaattgccacgactttggagcagcagtcgcccattgtcaacagtgtgcaaccaacaaatgatccggtcaaattggaagggcaaatcaaggcttccttcccgaaggtgtttcaacctggcctcggacattgtgtgaagacgaaggccacgctgcatttgaagcaaaatgtgaagccagtgttctgccgtgcgcgacctgtgccgcatggagtccaagcagcagtcgacgaagaattggaccgacttttggactcgggagtgctgaagcccattgatttttcgcgctgggcagctcccgttttggcagttcgtaagaaaagtggtaatgtgcggatttgcattgacttttctacgggactaaacgatgcgctggagttgaacaggcatccccttccgcggaccgaagacatttttcatgctctgcgtggagccaaagtgttttcgcagcttgatttgcgtgatgcttatctgcaggtcgaactggacgaaagttcaaagcagttagtcggcatcaacacgcaccacggactttttcaatatcagcgtcttccttttggcataaaatcggccccgtctatttttcagaaagcgatggaccaattgacgtccggtattccaggcgtgtttgcctatttggacgacatcatcattgcttcggccgatcactcgcagcatgttgctgctctcattgaactcttttcccgaattcaggactatggatttcgagttcaattggacaagtgccactttttgaaggctgaattgaagtttctcggacacgttgtctcgtccgatggtctgaagcccgatcccgctcgatccgatgccatccgtaatatgccgtcaccgcatgacattggcactttgcgctctttcctgggtgcgctcaactattacggtcggtttgacaaggaaatgcgcaatttgcgtacacctttggatctgcttttgaagaaggacactccttggttttggggtcctgatcagcagaaggcttttgatcaggccaaacaggttcttcaattggatttgttgctgacgcagtatgatccgagtttgccgatcattgtcgctgcggatgccagccaatgtggaatcggagccacgatcagccatgtgtttccaaacggagtggagcgcgtcatcgagcacgccagtcgaacgctcactcccgctgaacgaaattacgcccaaattgaacgtgaagctttgtctctgattttcgcggttcaaaaatttcacaggatgatttacggtcgtaattttactctgttaacggatcataagcctctcttggctatattcggtaataaaaatgggatcccgatctacacggcttcccgattgcagcgttgggccctaattttgtccaattacgattttacaataaaatatgttaaatctgcaaattttggacaggccgacgttttgtctcgattgatttctgagcaccggacagacgaagaagtcattgtcgcccacacatcggacaacgacgtggacagcactgaagaagtcgaatatgctcttcttgtcaacttggagcagctgccagtcgatgcaaaagaagtgagcgaactgacgacttcggacgatttgttgcagcaggtggcacaattcgtacgttccgggtggccaaacaaatgcccagctaatgaattaatgcctttctattcgagacgtgatacgctcaccctcgtgggcggttcaattttgacaggaaaccgagtcattgttcctgcgccgcttcgtcaacgtgtactcaagacgttgcactttgctcatcctggcattgtgcgaatgaaggcgctggctcgcaaccatgtcttttggcccggtcttgacagtgacattgaggcaatggtaaagcattgtgcggaatgtcaattcgccgccaaaatgccgccgaaagcgccacttcgaccatggccaattcctggtgaagtttttggacgtgtccatattgaaattgcaggaatgcgataacatttatctcagctagtgtgataaacttttataatacacattaactaaaattta

SEQ ID NO: 84165 - DNA, 1318 bp, Heterodera glycines
atgcctttcctgaccgaccgttgcccaacaaagttcggtttgaggaccttcggattacgtaattcaaaatgataaaaaaaatccaaacatttttaaaataaaagtattcccttttcaggtacatcgaccataccgtcatctcatttctacgttccaatcagaaagtgtttgacaaacccaccgatttgtgcttacgcattgtcgaagtgatgccgatcgtttggaatgttttggtccatgaaatttggcccatttttgcgccaaacatttgccgcttgacattttttggtggtgctcatctgaccaatttgcgtcatcacatctcgccaacaattctctgcgatctgaagcggctgatttcgatcaattccggtgatctgttccccgcggtgatcggtgacgatgtgccaaacacaactgctggccaagcattgtcaaaatggttacacactccgacaaaaaatggacagccgaagcaattgtgttgcaaagattacaattcattacggaacagtggatgggtcaacgacttcaaggaggtcgtcgtcgatacagcaaatattttggatttactgcagtttatacgactataaaaaaagagacgaccataaaataatttggaaaaatttaaagcaccataacactttcaagaagcatccaaattaaacattattgacatcattcggtagccccaagagttctctgtctactaagcttggaaaaaattcactcaagattcaaaaatttatgatcaaagctttttgaaaaccgattttttgatgtttctggctataattttttttaaataacgaaataattgaaattttgctgaaactgttaaggctatcaaatgctgccaagaatgtttaattttgataattttgaagaagttatagtgctttaaaattgtcaaattattttactgtcggtcttttttattgtcgtttaaactgtaatagagccatttgatcactgatcatatcagaaattgcatttttcatttcttcatttcattttgcttaggaatttcttcgtgccaccaccaccactcgtgccagttacgccattcgttttgtgctccgtgtcgcaacgccaattgtgccatttgaagtggtgaacgaactaactagggaaaagctgactttggagacggaaaacgatgggcattataatgctaattggctgttgaagcgatgtccaattaatggggacgagacggtgccgggggcggttcaacgagcaaaacgaaagacgaacgaaaatttggcccgatttgtgcgatgtccgcttttggttgtattgtgtcgagttgcgttgg

SEQ ID NO: 84166 - DNA, 1063 bp, Heterodera glycines
atgaggcgaaagaagtgccattttgaagccaagtcgaagacggtcaaaaaatggcataatgtccaaccaaacatcagtacaaagccaactgaaattattgaaaattatttacggtaagaaaatgaaattccaaattttttaatgcaaaaattttctcacattttccttaaacgccgctccattttgctacacaaagattagttaatttgtgtatggtatttgtaaatttgtgaattttttagacaaatattttattttataccgtaaaatcgaagaaatttggaagaaatgcgaaaaagcacaaaaatgaaacgaatcatttttgcctataaaatggcctttttcttcttcctcccctttcattcattcgctcataatttccccccgatcattttattgccgtaatgtcttcaagaattccgtacgtttttctttttatatcatatagcatttcattaagaaaaatttggccagggttgccaagattgaaattttcagtgaatttcataattttatttgagtaccgcatcagtcggccccactaaaacttcaaaataaaactaaatttcacatttggctttcctggccttggcactttcctttgctttcccattccattcattattcattttatttcccaaattcgttttcagttggtacgccgtgtctcttctgctgttggttggctgtggcaccattctttggttcttttggaacaacgtcaaaaaacgacgacgccccaacaaaaaagaaatgtaaaaaacaaaaataaatatataaaaatcaaaaaattccctttttcagcttcatctccgccgactgttggctcgaagtgttcgctttacttccgccttctcagcttggccttggaatcgctctgatcagtcgccgatttgaccgccgcgtggacgaacatttcaaaacacgcaaatggatattggacaaagaattgcgaattcaggagaaaaagcgatggtttggcgaggaagcaaatggaaattgtcgatgccaacggagaaaagccgattgccgaatcccacaaattccgttgcccaacgaagtc

SEQ ID NO: 84167 - DNA, 927 bp, Heterodera glycines
atgcgaataatgcgaaaggcgaaatgcgaaaagcgaaacctcggcccatcccttgtaaatacatatgtacgaaaaatttgccaaaattttggattttttttgaggatttccaaaaatttaatttaaaaaatcctcaaaacatgtaagaaaaaaatgaaaaatgttagaaaaaattccaaaataagtaccaaatatgtataaaatcacgaaatgtgtaaaataaaaattccgaatatgtaaaaatatataaataaaagtcccgatttttgttcgcaaacacaaaaaagaaagtgtttttcctaccattcagagcatggagaagtcaggaaaaaatatgtatttaaattaaattgaaatgcttagagtgcttttaaatgacacgaaaatgtggttgtttttttttttgaaattgacagaattatgcacaaaaaaccaagacagttgaagggactcaaaaaatttgaatggaattaaagtgcaatgaattcgttttttcagttttcctcgacgccgcttctccctggccgcgtggtcagcagcagaaatgaattaattaatcaattgattgatgtaatttgtgatcgaaatgattttggcactttggaatttcacattggaaattaggagaaactgggccataaattgggaaaataatacccaaatttggctggaaaagcatgaagaaaagtgcgaaaatgattgaaaaataataattcaaatattcgctttaattaaaaacgataagtaaaaacagtcatttaaattttgcattttttgttttcaaatccaaaaataagcacaaatcttagaaatatgcacacttggccactctgcgataacaccaaaaatagaaaacttcttttcaatttactttcttagaggaaaatgccaattgctctaacataattgaagaaaaatgatggaaaa

SEQ ID NO: 84168 - DNA, 212 bp, Heterodera glycines
atgattttttccgctttattttttctgaaggcgccaattgtaccggcggtaggcgtcgcccctgaatataaaagtaagttggcccgatttcttaacaaaattgcatcaaaatttataaatttttagtttgattttcacatttattaagcacaaaagaccggcggacgggatcgatcgggatcccgctcgattttctcgggatcccgcggtga

SEQ ID NO: 84169 - DNA, 909 bp, Heterodera glycines
cgaagaatccttcaaaatcaaccgcgaattggagaattatcggggcagcattgtgcacgggacgtcggttcagcaattcaacgacatcatcgaccaacttctggttgtgccagttttcttttctccttaatctattctttttaagaatgaattatctcgtgccgctgacgaccgtgacaaactcatcgcctctcatcgcgaatacgtcggccatttgcagttgacccattcggccgcgcaggaaatgaaagacagacggtgcagtcaaaagcattacttacattagcttccttcaataacccatcttatagaattaaacagctcgagcagagcttagaccaaatccaacaaaaattgatggcttcgttcaaacacgaacagttgcacctcgtcaagaacaatgtggagggcaatggccatgcaaagggaggcgagggagagcagaaacatccgatggagcaccaccaccagcaggaaggcatcggttctgcagctggggactccgctggaggcgttgcgacggttgcccatccttcgaacctttcgtctgcctcctctcaaatggaaaatttgcgtcccgccggaactgtcgtccgtcacatttatccaattggccaaaatccgtctcaaagtcagcgcgttagaggggccgtgagcagtatgactgaaggcggcgacggcactggccaaatgccacacgcaacgcaatacggcctcaacagtccgtatgacgacgagtacgacgacgagctggaggatgacgaagaggtggcatttgggttgattttgaaacgaaaatgtgaaaaaatttttaattgtaaccctgttttctctctccaggatttcgagtatgacgagggggacagtgcggacattgatgacgatttgggtgcccaagtgaccatttga

SEQ ID NO: 84170 - DNA, 161 bp, Heterodera glycines
ggtcgatgttggggcaattgggtaggaaaatgggcgaagagacggcacaaaatgccggaggcattgtcctttgggccaatctttcgggacaggtaagtgcaagtaaattgtgggcggggtggcaaatggagcggcaaaaatgggacaaatgaaggggagag

SEQ ID NO: 84171 - DNA, 664 bp, Heterodera glycines
tcactggcgaaatcactcactggcgaattcactcactggcgaattcactcactggcgaattcactcactggcgaaatcactcactggcgaaatcactcactggcgaaatcactcactggcgaaatcactcactggcgaaatcactcactggcgaaatcactcactggcgaaatcactcactggcgaaatcactcactggcgaaatcactcactggcgaattcactcactggcgaattcactcactggcgaattcactcactggcgaaatcactcactggcgaaatcactcactggcgaaatcactcactggcgaaatcactcactggcgaaatcactcactggcgaaatcactcactggcgaaatcactcactggcgaaatcactcactggcgaaatcactcactggcgaattcactcactggcgaattcactcactggcgaattcactcactggcgaaatcactcactggcgaaatcactcactggcgaaatcactcactggcgaaatcactcactggcgaattcactcactggcgaattcactcactggcgaattcactcactggcgaattcactcactggcgaattcactcactggcgaattcactcactggcgaattcactcactggcgaattcactcactggcgaaatcacctgggcaa

SEQ ID NO: 84172 - DNA, 1468 bp, Heterodera glycines
atgcatttgttgttcacttatgccaattacaacgaatccccgccagaaatgatcaattctcaggtaaaaaattctcaaaaacaaagactgattttttgaccattctttgaaggttattcgggtgattctcaaacacattcacgggccaaacggacgcgaagcatcgaaaatactcaaaattgtgacggatcagtggaattccatttcatacaattatttgattcaaaatgaggtggtctccctttctcttttttatgtatatgatcttaaatggcccatttgattttaagaagaatgccacggcattgcgaaagcccgaatttgagttgcattttgaaaggacttttgcgaaggaaagtgctgaaatgggaacagcgaagaatgaaaggctaacgaaaaacagagtaaaacaattcaaaactgtgccagtttccctttactctgaacttttgaaggttcgcgatagacttatctctgttctttcggcgtccggacatcgtgcccgatcacccaaacattcttcggttcgttttcgtttcctttgcaattcgatctgatctcacagattaattctttcaatttctcatttatcctttcagatgcttttctcccattcttccagtgacattcaccaaagagtgcgggagacaacagttttggcagcaaaaagctcggcaatctgtcagaatggtgcttcaatgttgccctcacccgactccgctgacactgctcacccttccgcttggtcccaacagcaaccgtccgatgagatgggagtgtcgggagggatcggctttgatcgcatgtcgagtccaaacagtttgatgagtgccgttgtgggaggcaataacagcggggcgaatagtggcggcgaattggcatcattacgaaccaccgattcgttcccgcgagtgttcaaagagttcgacttcctcgaggctgaacacgactccgtctcggagtccactgagtcttgcttcaattggttgtccacaatgagaacagcgcgttgtggagtctgtcgcgaggatacggacggacagaacggaacgaaccaagaccaggaggaggatgtgccggatgaagacgacttttacattgacgaagaggaggacgagatggaccaccaaagtgcattggctgcgaacagagcgtgcatcggcaactttggctcgtcgccgcgtacaatgaccggttcgcgccattcgatgggcagcaacaatggcaaaagttgtcggaatggcgtcgcaatgggtggaggagaaaagaaagggacagcaaatgcaggaggaacagtgatcaaacgacctccgagcaaaagtgactgattatttacgaatcaatttaaaaattgaaattccagtgagcgattcaaatgatgtctcatcggacacaacgccagtccaattgtcacggcacagcgacgaagaggaggaggaggacgaagacgaagaagccgaaagagaca

SEQ ID NO: 84173 - DNA, 1809 bp, Heterodera glycines; identical to SEQ ID NO: 19452
  unsure (1)..(1809): unsure at all n locations

SEQ ID NO: 84174 - DNA, 1123 bp, Heterodera glycines
atggaatttctgcagcgcagcggactgacaaaagcagcagccgaatcggtgaaaggggcggaggaggagaagaaaaagccgaattgtgatcagaaaaaggagcaaagtcgaaagaggaaagggtaatggaaagaaggaaaagccaaaattcattcaattaaatttaagagaattcagtgggcaattaacgcaggcgaaaacgatcaaaagggatacggacgaaccgacggaatgccaacggacagaaattaaaaaagcaaaagttgaagagccaacaacagcaaaaatgaacccaacggcacaattgccaaggccgaagccaatggtaaacgaagcgaagcaccaaccgaaatggcattgactttcagttgccctttggccctttcgaaccttcgccaaacggcgccccaccgaacgccttcttctgcaggccacaacagtcgaacttggttagacttgccctgatattatgtgtaacactttacttcttcagtctttttggccccctccgatggctttgatctcttcgcttatcggtcgaccccctcccaatcatctcccccctcctcttccccctcctcttccgtctcctctttcccctcctcttccgccgtcttcgctctcttcgcagcattttgtcgcaacttcgtccgcttcgtttcccgtgccctcttccaaaagtgccaatgttgcgccattgccaaaagtgcgccattctgttcagtctattttgggcgtctctcaaaaaggcaaaaacatttttatattcccgatttgttcgcttaattaatggcaattttccttttcagaaaacattggcaatatgtcttcaaccgtgccaaattcaaatgtgctcaaagaaaatgccaactttggaccaacaaatgtttttcggccatttcactcgaacactatctcctcttcgcccaaagcattcaaacctgtgcttcagcagcgacaaaatttcaacaatttttgatggtatgttgtgccaatgccattcatcattcgctgctgacctttgcccatttctcttcggattggcatcgctttcccttcccttccctccctatacattttcccttcctcccctccgctttttccgtccgttgagtgaaataaa

SEQ ID NO: 84175 - DNA, 1010 bp, Heterodera glycines
ccaccaacattccaatcactggggactcaatccaccaacattccaatcaacgggactcaacccaccaacattccaatcattgggactcaatccaccagcattccaatcactgggactcaatccaccagcatttcaatcactgggactcaatccttctacatttcaattactgggactcaatccaccaacattccaatcaacggggactcaatccaccagcatttcaatcactgggactcaatccaccaacatttcaatcactgggactcaacccaccaacatttcaatcactgggactcaacccaccagcatttcaatcaacgggactcaatccaccagcatttcaatcactgggactcaattcacctgcatttcaatcactgggactcaatccaccaacattccaatcaacgggactcaatccaccagcatttcaatcactgggactcaatccaccaacatttcaatcactgggactcaacccaccaacatttcaatcactgggactcaacccaccagcatttcaatcaacgggactcaatccaccagcattcaatcactgggactcaattcttctgcatttcaattactgggactcaatccaccaacatttcaatcactgggactcaacccaccaacatttcaatcactgggactcaacccaccaacattccaatcaacgggactcaatccaccagcatttcaatcactgggactcaatccaccaacatttcaatcactgggactcaacccaccaacatttcaatcactgggactcaacccaccaacattccaatcaacgggactcaatccaccagcatttcaatcactgggactcaatccaccaacatttcaatcactgggactcaacccaccaacatttcaatcactgggactcaacccaccagcatttcaatcaacgggactcaatccaccagcattcaatcactgggactcaattcttctgcatttcaattactgggactcaatccaccaacatttcaatcact

SEQ ID NO: 84176 - DNA, 1127 bp, Heterodera glycines
atgatacatcatccgaatgctgcttatccagacacggcgattatcacaaagcacaaagtgccatcgacagtctcatgttgaaaaaagaccgattttcagttcatctcggagcccatcgcaatgcaatttcagcgcgacatttccgacttccttttccatgaagaaaatttcttcaatcattcaattgttacttatggggtcggtggtagcattgaactcgaagatggacaacgagtaaacgtcttttcaatggtcagaaacagagaaaaatggcgccggactttcaaaatgcattagtaattgttaaagcaccttgattggaagtcttacggaccgtacgcagcaaacaacaaacaagtgaaaagcgagaagcagattatgagtggagaacggaataaagagggttacggtaggcaaattgaaacggtaaaaattaagtcaaaataatgttaaaataaactgaaaggtcgtgcgcaaaacatcgaacaactgcttgaaaacgacaaattcaaaaaattcaacgacctttccgaggaacaaccgttcatcgtcgcaggtgacttcaacagtccttcccatttggattggatcgaagaaacaaagtgaaactttccattaattcgtcccttaaattgaattcattccaagagaaaaccatggcggatggactttcgaatggcctgccaccaaattattgacggacaaaggatttgtggactcataccgttccgttaaccctgacttagtgaaaaacccaggtatttttaacaatccaagagtcggttttaaaatgaaaagaacaggagagacttggtcgacagtgcaaaaatcggctggtcccgaatgggactggacgattcccgaaccgcaggacagaatcgacttcattttcttcaagcctaacaaattctttcggcccatccgttctgagatttatgcaggcaaaaactcactacgcccaatccctgatcagtgggaaaacgattggccatccgatcactacgcggtgatcacagaatttgagataagcgaaaggaacggaactacgcaaaatgagagcaaacagagaaatgacattaatggcaaaattgtactgaatgggagatgttgtggaaacaatggaaaat

SEQ ID NO: 84177 - DNA, 671 bp, Heterodera glycines
atggccgcgtctgaacgaatgatggacggggatgagaaatcggtcggggaaggacgaagtactgaccgggcgtgtcgcggaaataatgtgtggtaatttctcttacgccgcccttttctttttgttggcattggtacgctgaagcaaataaaaataatttcagcattgcttattgtcttaccaaacaaagggacaaaatgaaaataattggagtaaatcaattgccaaaaagtgagcgacgcctttagcaatctcggcccatccgcaaatgtacaacagcgctaaagggaaaagggcaaatgccaccgataatgaattgtttttgttttttggcacaaacttcgcaaattatctcacggattcttggcatttctccgccattcgtcgccatttgttcagccaaatccctctccaattcttggatcaattggtttagcattttcgcatttaaattcatcctccgattgtcaaactttttaagatctttctttggcataaaattgtctttgtcttcttcgatggtcacctaatcttttaattttagttcggttagcgaattcgacttttgtctaatatccaaaatggctttccgcccgacaaccactcaccaaatctttcattacattgcctttatgatgagctgtcaccaaatctataattatcataataaa

SEQ ID NO: 84178 - DNA, 208 bp, Heterodera glycines
atgccattggacacatttgctaaaccccaccataactcatacggatatcacaattatggcactttttatggccccatcgacgagaatgattcattcaatgtttttgtcgagctgtcaccgtctttgtttggcatcggcgacgtgatcggctgcggcatgaacttggaaacgcgacaaatcattttcacgctcaacggaaagcgtttga

SEQ ID NO: 84179 - DNA, 870 bp, Heterodera glycines
atgtcggccaatcataaagtacactactattacctttggcttgatcagtagggaagcaatttttagtgaaaaaacttttctttttttttgctcaattgttttgaagaaaggagctcaaaaaacgcatttctgcgttaaaattttttgattctgacactatttcgacattttttgaaaaatttgtcagcaaaaatgcaataaaaacggaaaatacaccaataaaaatcgactccaaaatttcagaaaaatatacccctaagaaacgactgaaaatttaaaaaaaaaatacactcctatgaaatgtaaaaattttctcaaaaatttttcccccgaatttttttttttgacaaaatttttaatttaaaaagttaaaatatttgctagaagaattttataagggaaatttacctcattggcaactgaactagtgaaaaaaaaatagttttgttcaatttttggctgaaaattatgtcacttattcgtcactattttggcatttttagcgtgccaccccaatccccgggacattgccatttaattcccaatcaaaatttttgccatttttacaggtacagccaagtttcgcttggtctgtccacccgcgattttccactaacccgtaaatggcttccaacttatggccaaacgtacgcatatgtgttcagaaaaaaactagctggtttttggggccacaatgttgagggaagtgtgccggatcagggcaatcgtcggatcgctgttgcaaatgcgtcattttacacgggcgacgtggtcggctgtggcgtcaatttggcaactcgccaaatcatttacacgctcaacggaaaacgtttgagtctgtctgtctaaccaatcggttaaatcaataaa

SEQ ID NO: 84180 - DNA, 296 bp, Heterodera glycines
cgacacttgcggcgacgacacttgcggcgccgacacttgcggcgacgacacttgcggcgccgacacttgcggcgacgacacttgcggcgccgacacttgcggcgacgacacttgcggcgccgacacttgcggcgccgacacttgcggcgacgacacttgcggcgccgacacttgcggcgccgacacttgcggcgacgacacttgcggcgccgacacttgcggcgccgacacttgcggcgacgacacttgcggcgcccagtcaaaaggacatttgcggcggcgcaaaattcaacgac

SEQ ID NO: 84181 - DNA, 507 bp, Heterodera glycines
atgcacttgcaagtcaaaagaagattcagcaggtgattttatgaattttgatataaataacacattaaaatataaattatttataattattaaataagataattatatgcttttgcaaattgcttcatttctccgcagattctcgcaaagcccgggatggtggaacgctttttcccgcacccaaatgaagcggacaaagtggcggcaattcgcaaaacattcaccggattgtatcgcgtccagacatttgcggacggacatttgcggacggacatttgcggacggacttttgcggacggacttttgcggacggacttttgcggacggacatttgcggaaggtttctgaattaaaaaaaattatttttttagaaaaaaaatttggaagagtgggcctcgtcagtatggtctcttccggttaaaaagcaactaattacgtgtgtttcggcccaaccgtagacacaataacttaaaaagcgcacaccaacaaacaaaaaaagcaaagcaa

SEQ ID NO: 84182 - DNA, 255 bp, Heterodera glycines
atgccattttttattttttccatttttcttttgtttaacggagggctagcaattaacacatctaaaaatcgcgctttaatatattttggagggtacgaatatcgtcaaaaggggacgagtgtcgatgggcaaacccaattttggcaatgtacacaaaagaattgtccaggaagagcacatggtcctatcggcactttggatattacacgtattgtgtctgaacataaccatccccaagtttcttctcagaatact

SEQ ID NO: 84183 - DNA, 802 bp, Heterodera glycines
atgccgacaagctatcattcaagttataatattccaaaaatttattattttaagtaatttgcaagaatatatcttactcttcaattattttattcttaatgaattgttcggttattaatctttttatttttttgatgaatgaaataaggttttttgtaattttgaaacatttttaatatttttcaatataattaatatatcttctttagctctttttaaatttagacccctcggtgtctcacattttttctttaatatacagaatttaattatatatgctcgagcgatttatctcaattttaattccgttaaaaggtattaattatagactaattaacattaaaagaattgaatttgtctttgattaattcaaatatatttttattatttgaactgttcattcccattttattttaaaagatggattattaatgcatatcctctaaattatgttctcccaaaataatacataaatcacgagattaaatttatatttctctcctttcaaagttcaaatttttgttgttctaaataatatgaattaatcagttttattgcttatttcaatcgttaatcgttctagaccaatctacatatgatattaaatcgctttaaatgcatttcttttttaaaacaattctatattaattgttcgcttcttgcgtaagacattcttttatattcgtttctttatgcataagaatttattctttattaaaaaatatttatttattaaatataaattcaaattcaaacacacattcaagtaaaataccaaaaaatatgcaaacaaacaaataaa

SEQ ID NO: 84184 - DNA, 1083 bp, Heterodera glycines
atgttagaacggttctacaatgacccaaaatcccctgctgcgtttgccggtgtcgaccgattgtggttggaagccaaaaaggaacttggaaataaaattcgtaaaaatgatgtaaaacattatctggaggggcatcgcacctacacattgatgaggccaagacgcataaattttccgcgcgctagaacaacggctgccggttttatgaccgactgtcaagtcgatttggctgactttcaaaccctttctcgacacaacaggggaaatcggtatttaatggtagtaattgatgttctttcgaagcggatttttgtgacacctcttcgtaccaagaaggctgatgacatggtagacggctttaaagaagtgttttcaacgatgccaatgaaaccacacagaattttctccgacaagggtacagaattcagaaatcagaagctgaaaaaactttttgatgaagaggaagttgagaaatatgagagcacacattctgagaagaaagcagcattagccgagcgcgcaatacgacaaatcaaaaatcgtgtgtatcgctactttgcccaaacaaaaactctcaattgggtggacgtaattgatcaaattgttaatggtattaataaatcaccgagccgggtgcatggaatgcgacctattgacgtgaactttaaaaattcacaacaaatatgggaaaaaatgtttggagatgatcagcatatggccctttttggaaagcccagaaaacgagccagatttgtccctggtcagacggtaagaatgagcatagcaaaaggtcaattcgagaaaggttatatacccaattacggcgacgaaattctcgaagttgatgccgtcaaacgccacatgaaaccaatgagatataagctacgtgattcaaagggggagaaatttaaaggatttttctacccggaagaattggcacccgtacgtaaggatgccgagacgacttacagaattgagagagtttttcggaaacggaaaatgcctgacgggacgacagaagtactcgtaaaatttattggataccctgaaagggaatggattcatgagacccaacttgtataa

SEQ ID NO: 84185 - DNA, 633 bp, Heterodera glycines
atgaaaatttttaaattttctccgagggaagtaaaaaaacagagaatgcggctaaggtaagcaaatgaatggcatcgaaacgatcccttcggcgttagtccgtcggtgaatctatgaactctgatcagtgtgattgatcactccccatttccttttcattgtcagtcacttcagcaaagcacatccattgcctttgcacgcatttccacccaaattcatcagattaaacagctccgaaatgcaaaaattttccgtcattagtttcaccgaaaactgaaggtttggtgaatattgttatggtaccgttatctttataagaaagaattatcaaaacaatgctccaaaattgaaatcatttgcaaaatctatcattaacaaatcatttctttttcataattttttccagtggcatcatttggtgccaccgaatactctcagagcaacaattttacattaatatgcaaaaaaatggcttccacaatgatgcttttaaaaatttgtccatatttggtcattttacacatatttcatcgtttttgttcatataaatccagtccctatattaattatgacttttataattgttgaaattttaacttgaaaattttcattttttatttctttcataataaa

SEQ ID NO: 84186 - DNA, 921 bp, Heterodera glycines
atggcctgtacctgtacaaaagtacaggaaaaatacaggttgccaaaaatttgcctgtacctgtacctggatccaggaaaaattcaggcctggatccaggtacaggtcgatctctaacaattagaaaacaattttaatttaattaattagttggagaaataattcttttaaattttgttgaattgtaacggttctgattaatttctaagaaagtatttaactttcacaatcagaattgaccacacccctccattttcccattttcatttgtctcttctcatcatcaacaacggtgggtggtatgaagaagtacggaaaagtacaagtgatcaaaggaaaagcaaagtaattatttaatttaaatttattaataatatattatttaaagtttaatttgctaatatatattatattggctacacaattaaaaattataaacagaaaaggtaaattaatatgacaaaaaaaatataaaaaaatctttcattcatttaaagaattcatttaaatattttttaatcgctacataagtaaaactttataatatgtaaccatatcaaaaaatcggtgagattttatttttatgtatttaaattaaataatttttaaataattattttgcttttacttcgatcacttgcactttcgtacttttgtctcagcacgatcaacaacatttggatagaaaagcgttgttctgtccgtcgttgtccttgttttcatccaccgaatttgaactttttggtgccggtggaatcagacaaccgctgatcatattgaagacggaagcaacgtgaaagtcttcacgaaagagacgaacggcacgctaaaagaaggcctctgatcagattatgaaactaatgtaatcttccgaaattcccacaattatatttattttatactaactcggctttaaataaa

SEQ ID NO: 84187 - DNA, 655 bp, Heterodera glycines
atgatttatgcagccattgctataactgccatcaccgtcatttttggagttccgtttatgattttcattgcttgcgtggcctgtcgttcgtctagaaactcgaggagattggttgaatcgttggagcaaagggcgcagcagagacgcgaggcggaaagaatagatggaactgctgctttaagaaatgtattagaaatgcgagcatattcacggaagtattaattgtgaatgagaaaagacgcctcacatttctatttggatgcggaatttgaattttaaaattccaaaccaaggcgtagcacgattttttttcaaattttcaggattttctttgaaatgaaaatttgaaatcctttggtggcttgtattcatatttggacttttgcggtttaggccccccgaaaaaccataaaggggactcttttggctttcaatagagctcggtattttggaaaaagcctgtacctgtatttcccaattggcctgtacctgtattttttggaacttcttttaaaaatcaaacaaaggtttgaaaaaatcaattaattgcttaggaacatcttaaaatatctaatttactataattatgtctctttaaatatatttgatcatttttgaaaaattgaaaaaaacatcgatcacttgaaataataaa

SEQ ID NO: 84188 - DNA, 225 bp, Heterodera glycines
ttttaaaacttcgaaaattttcaaaatttttcgagctaggcctaaaaaacggtttttgggtttttgaattttaagaatttttaacgaattttcccgggaaaacgaagaccacttccaaaacatagtttttcgagctctatcgaatggtattttttttgaaaaaatttcgatttttttccggaaatagaaaaaatttttggcctaagcgggacatttgagtcccgg

SEQ ID NO: 84189 - DNA, 396 bp, Heterodera glycines
atgcaccaaagcgacacgggaagttcgactcctggagactctcctgtcgaccgaattgagatcactggtccaatgagtcttgccgaatttgtagaaacgatcgaggctgaattccccgaacaaattcttctcaaggttgtgactttttcatttatttataattctcattttaatatgaagttgtatgctgattttcgtggccataatttgaaaatgcctgtcgaagttgacgaaccggatgatccgcaattcgaccgtttcgatggtcaggggcatctgctgtaagctttgtttaggtgtctaatatgaagatttattgatttaagggtggaggacatcgtgtttgatatgatacacaaaacgaaaagggaccatcaccacgatatcccgtttaag

SEQ ID NO: 84190 - DNA, 285 bp, Heterodera glycines
tgaattattacacttattttggatttgtttcttcagttgagcctcccgttgatgtgctgctggcggagacggactgccaggccgaggtggccaagctggtcgaggaacggggcggtttggccgtgtccagcgaatgggtcattcaggttggttctttccattattttaagccatggttttcccggaaacacgaaaagccattccattttaaaggccatcgtcactggttcgctgcccgacctgggcgagcccggaggcgagaagttccgctacgattttgtttag

SEQ ID NO: 84191 - DNA, 1390 bp, Heterodera glycines
atggttaagaattccagttttccctcggcggcacctatcggcactgcatgacaccttttctttcttaaaaacgctcaaaataacaaaattcgatattaagttgcaccaatttcaaaatttttcccgacggcgcctatcgccaccaccgccccctgttcccagaaagttttcggaaaagcgcgccgcaaaaaactaaccctttttattgattttttaataaggggttttgagggcaaattaaaggtctactaaagtcataaaaatttatttcaagcaaacaaattttcaattatgctagccactgttgcttgcctttgacttttggtcaatggtattgactctcttttcagatagtcaataagaattaatttaaatatttaatttatttaaattaaatttattttattggatttcccaatacttcaattatatttcacactttattagtgaattttgatcgaacaaatatatttattaatgaactattgaacgataaaaaaatggtgattttacaatggtttaaatacggcaattttacataggcgggctgacagaaatttaaatgtaaacaatgctgactaataaaaaggcttaaaatcacaaaggttatgaatttggcgtaaaattattttaaacagatgaatcataaaattttaaattttcgtcgctaaggatgaaattagcgacaaatggtttagaaaaatatttcaaacaaaaaatttctagatttgaattttttaatttccggtgggcgcgaaacaatacggggcggggagggagggcgaggaaacgaatgcatccattttgaaaatggtttggttttgttaagtaaaaaaagttttgaaaaattttcggaggaaatgttacactttaaaattattaaagaaataaaagaatcaaattattaaaaaaaaaactcaacaataattgggctctgaatttacagatttacaccttttaatgacaatttaagttggtcgtgtcttctttaaggtcgttaaacaagaccttttttgtttaaaattgaaaaaattacgtcatagattagggttaccaaacatgaaaaagcattgttacaacactaataaatttaggtaaagatttttattcccacaatcaaaaagtacagagttcaatttagtacaatagaaattgattgttttaaattaaaaaagatgaaagatatacaatacaataattactaatttaatattaaaaggaaaaataaattattaaaaggattaaaaataaattattaaaaaaaattcaggggattttggggcttcggatttgcacactttttgcttccatcatcttcaattcttaattaagctgatcaccaaattcggaagaattcacgagcactaaactcaattaaatatattaatta

SEQ ID NO: 84192 - DNA, 1329 bp, Heterodera glycines
atggagctgatcagagagtttgatgaaatgaaaaaagaaaaaatttatggctttaattatgacggaagaaaaagagcaaaaattgaaaaggaaattatgcataatttggggattagtcgtagggaaataaaacaatggaaaaatgaatttggtaaaaataaatttaaaaagagaaaaaaaagaagattaaattttgttgattaaatgatacatgtttaaaaaataacgcaaaaaatataattttgtgctttaagaggtacacacctcagttgggccggcactttgggccccagcatgcttttcactataactttctataacttttttctttattatcaaaatccaacatttttggcatcattcgaatgcttaacatgtttagaagactttttctaagctattgcttcgcgattagacaattaccaaaaaagttatacatgaaaattgcgaaaaagtcgaaattttgggtttttcataataaaaattttttccaggcttgaaatcttttcgctttttgtaaggctaatagagcatgtgaagagctttcggatgacaccaagattattggatttggattacaaataaaaagctatagtggaaaaacacgttggggccgaactgtgagggccgaatcgtgacggccgaactgagcgagtccgcttttttcagttgctattccatgtgtggcgaatcgcaaaaaaattgtgacgacattttttgcaattgcttaagcgtaattattctttttaattaaaaatatttggaattttaagtacagtttgcccaaaaaataataataattttaagcgacgcacacaattcagcgagtgtggaccattggccaattcgttttgttattccgtccaatgggctggcaaaaaagcattcgacgcagcgcaggtagaaagaagcaaaatgcaaaacataaaatttaaatacattaacattttaatttaaatcgagcttctaattcatttttgtgcatcttaaagtggaaatgttggattttataaaattaaaatgattatttaaaattattatttaaaaatcaatacaaaatcactatatttattttaaaaaatgaaaggattcacatcttttaaaattactataatttgaaatgttttcaaaaaaatatattttttcgtattaattaatagggatgggaattagatgtaagaaaaatagcaaaaaaatatgtataaaaatatttaaaaaaatttttctgattttttggacaaaaattcctagaaagtacaataccaaatagggcaaaaatgccataaaaacggcataatactgttagaataatgtttaatacataataaa

SEQ ID NO: 84193 - DNA, 607 bp, Heterodera glycines
atggcatggtatatagagaattggtgtgatgagtcaaggtataccacgaatgtccgatgtggctgtatggaagataaaacatgcaatgttttaactgatttattactaaaacgaaaaaaattgctgaatgtttgggctttcgaattttgccactccatcaggcggacagagactttcttgtacaaacaatgggcacaggtatcaatgaattatgtccaaatgtaattctacaaaaaaaaaataccggattttttttttttaatttttcaatagataattgcatttggactgctcatcgcccaccgtcaactcgtcacattagtacgcatgaaaaaactgaacttggacgcgccagatttcaacacaattgtggtaaataataaaaaaaattctaaattttcaacaaaaaaaaacaactaaaaatttcagaatctaattgaatgtcataaaacgaatctcatgcaaggtgatcaccaagtcagttttggtcaaaacctcgcgataaattaactaccatgtatttctttaggtgccaatatgtctgccaaaaattaacctaaagttgagtgaattatttatttttttgtatgaaaaaatttaaattaaa

SEQ ID NO: 84194 - DNA, 225 bp, Heterodera glycines
tacggcgcccccacaaagtgtccaagccacgaaatgtccaaaagagtaaaaacccacgaaatgtccaaaatttttcaaaatttataaaaacaaaatgagtctaatttaggatttttagggtttcggggtcgctgaatacgaatataccctttatattaccccttgcctaaccttaggcccatctgaataataaaaaactcaaattcgagacttggacatttgtgg

SEQ ID NO: 84195 - DNA, 2190 bp, Heterodera glycines
atgtgccacaaaattttgctgtttattttggttattagccttaacattggatacggaggcggatgggaattcctcgactctattggaagttttattgcaaatgtgagtggaaattgacgaaaagccaaaataacaccgttaaagtgcagaaaatggaaaaaatttttggcactaaatttttatttaagttggaattcaaattttcaaaccaatgaaaatgaaaaaaatttagacacataagccaaaaacagaatgccgaaaaccgaaaacatttatatgcaacctttttttctggcaaaatgaaattacagtagtagcgatcgctgacccacaaatgtccaagtctcgaatttgagttttttattattcagatgggcctaaggttaggcaaggggtaatataaagggtatattcgtattcagcgaccccgaaaccctaaaaatcctaaattagactcattttgtttttataaattttgaaaaattttggacatttcgtgggtttttactcttttggacatttcgtggcttggacactttgtgggggcgccgtagcgatagacaccgcctggaaaaagaagaaatttcaaacaaataaaactgatttttgttaaaatagttcgaaaagcaaaggtcaaataaatgaattgggtggcattaattagcaaatgacactaattagctgcaaattgcactaattagctgcaaattgcactaattaataacctgcgctaattagtttcaaatggaatggtacttctttgtagcgaatgacaatgacactaatttgctgcaaacatcactaattagtaacctgcgctaattagtgccaaaaggaactaattaattgtgaatgacactaattaatataaattgcactaattagtcgcaaatataattaatcaggtggcactaatttggtgcatgtctgtcctcgtttttgcagacagcaaaatcgatttgggacaatggccatgtggttgttgaaacgttggaaaaagtggtcaatgttgttgccgcaatgagcagcgttgtttatgtgcacacaatgcccctcggaatgatcatgcatttggtggaacaaattcagtacccgaacgctaccaatgagccatttgcttgcggtgcagccggtgccagtgaggtgagatcaattagcactaattgctcgagtcgccgaaaattttccgaaaaaacgcgagactttaccccgagaccgtgaccaagaactcgactcgagattcgatcagacttaagaccggggcatgacaaaactcaattccgagactcgagaccgagcttcgaccccgagacacgagaccgagaccaaaaaaaaaatccgagttttctcgagttgaaaaccgaccactagactcgtggcctaggctcgatcccgagacttaacaccgtgaggctagaggccaagacagataatttgacaccgggactcgaggccgggggctcggccccgagactgagactccgaaacttaattttgccttgctgcgttttaaagaaaaaagattgcaagcttcttcgcttctaaacttggtatggggtatgggcggaattaggggcaaacggaggaccttttttttgttgaaaattttactaaattttcttaaacaatcgcataaaatttccaaaaaattttaccgatgttaccctatctgtagtcattgcccgacctccattttaacaaattttgaaaatatgacaccaaaatggacgaattggtaaatctttgcgaaaaaaacggctaaaaattcctgtttttttttctcttcgacactaaaaattttgcaaaaattaatggcaaaaaattttttcgcgttccctcctcccaaaaaatttttctggttacgagcctgtacttgtctatgcaaaaattttttggcttttcttaaggtgatggcgaaagagctcgtcgcaaacagtttgggttgcctgcaaatgagaagcaagttgtttattggcaaaaatattaaatttaaattattattattattattattattattatctccatcctttaatataaatttgttttattttattttttctttattaataatttgtttatttcaaggcaattttcaaatttataaggacgttcctcaccgaattcccgagcttcccatctctgatccctaaattttttgggtcttctccccgctgggtcgtttcgtaa

SEQ ID NO: 84196 - DNA, 1246 bp, Heterodera glycines
atggttaaatttttatttttcaaaagaaaaagtttctcaaaattccatttgaaacttataaattttcgaccaaaattttttaattgaatttttgccaatcttatttaatgcggggtccaaagtttgttgctttttcagattaaatttggttttgaaaggcttgaaaaaggataattaatttttaaagccaattttactaaaaaataaaatcccaattttataaggaagacataattggtacataaaagaaaaagaaaacccgttaaatttgaactaaaaaatctaattcaaatccgaattccatgggctttaaaattgtaaaaataatattaaaaaaacaataaataaatatttttgatgccctccacagcactaaaaatgggcaagcctcggcacggaaaatgaaatgagtggcaaaatgaccccgcggggaacagagggcaatcaataagaaagccattcactcgcccccattagcaaatgagggtagccaagaagacgctcattaatggcaaatgataacttggacaattgatggacgggatggcattgtgccaaataaggaaggcattttcgggacgggtagaaaatttataaaaaatatatgtaaaaatggaaaaaatgtttagaaatataccaattgtttttatacagtaaacgatttctacaaaaaagtgatttttttgttttgttttatattttacattattttcataattgcatccataaacatttgttaaaacgacttaaaatggttcagcggtgggaacaaatcgttgctaattatgaaaatgtgccagcaaatgggattagagggatatgtttaagtgcaaatccctctattttgatcataatttgcgtcaaattttttgctgaatttgagcagcaagcagaaaattgtcgtcgatatctctgcaattttgtatcatttaagaaccaatgtcaaattgggtgatcagtgatctcaaaactcattttttgagaaattttaacctatgttaaattgaatttagccaatattttttaaattatttcagtcacgactaattgatagaaaaccgtctaactttcagcaaaaagataaatctgaataatcataatccttggtcacgagcccggtttttaaagttaatttctttatttttgaacgattggatttacacaaaatatttccgtgcgtttgcgccaactgtgaaattgttccattgcgaagcacaacgccaagaaaattaacgggacaaataaa

SEQ ID NO: 84197 - DNA, 886 bp, Heterodera glycines
atgtctgatcacacgcaagaagaagaaatgccaaaactgaagaaaaggtaaatgccgaattattagtgaggaataatttcttccatctctgaagatatgaaattttcttttgtaatacagtaagaatctgtcaaataccgtattactctcaatttgttttattaacagaatatcacttctcttaattgaaaatcatgactgaaaccaaaactttttaatgaattttaataagtttaaaaagtttaaaaaatgtatgtttgaaaaagtgacaaattttaagtttttaaatgcgcgaatcgcggaatttttaaatatttttgcttcacttttcgttccaaaaattcttccgccttttaccgtacctttttacagtacacatttgtttgtatttgccacctttttcaggtgctttctctgcaacgatgtgctgttcaatgtgttcactttggttagtaataagttcattcttggcacgcgattagctcttgtcaatggccaatttaatacgattgtggacaaattgttgttgcgtaaaagccgagaatggtcacttggcattttggaattgcgatgtgccgaacagcagcagggggaaggaaaagtgccacaaatttacaaggaattcgtttggaatttgatgaatcatatgccaccgtgtagagaatacgctcaaatcttgaaggaagtgccaattgcgacagtgccggtccatcaaagtgttaccggcttccaaggcctgacaattcggttggaaacacttgcatttttggctaaaatggatttgctaataaaacaatagaccacaaattggaaagtaccgggcccttggacattactgagcttggacaattggccgtgacggaccgaacgttgattaattataata

SEQ ID NO: 84198 - DNA, 1222 bp, Heterodera glycines
gtgttgatgagtgtcccgattatggaatgaattcggctagtgacgacgaacgtcggcattttctgcgccgttattttgtccattttggccaaccaattggggaagagtgtgaaatggacaaaatgttgtgcaaaattcggcactttgaagcggtacattcataagcacaacaaaaatagtgtaactgttcattgtttttttccttttcgatatttcccatttactctaacggtctgatcattagctctctcgttgcattatactcactctaaccgtctgaccatgacctctcctccccctttccctctctctctctctcactgtctctctccgccttgtctctctctgtctccctctgtctgtctgtctctctatctcggtgtctatcgtttactttaacgtctgatcctgtactcttttcattaccaaacatctgatcatacattttctcattggcatacccatctaacgtctggccatgtactctctcgttgcattatattcactctaacgtctggcccttgtgttctctcatggcgccccctgttttttaattacttttaatgctttttctatcactttacaggcagcccattttttctggactctgtgggccatccatcaggcagcaaaatccgcgattcaatttgattacatgctttacgcgatcacacgccatcgttactgcactcagcttatgacctcattaggcattgctaaaaataattagcacaaaagcacaacattaattgatttttgggtaaatttttattgggtctgtccttaagaaaaaccaaattacgcatccttaatcggtcttaaaaagttttatatgtatatttttcacgttgtctatactttatcaactctcttaatctgcacttaaaaattataattgaccgtatctttctttatctgttcttcctgtgcttaaaaactgtttaattgctcctattatttatttattttttaaacctgtccttaaatgttgtttatttgcccttaaaaatgacattgatttgctcttacattgaccttttaatcaagctggaaaattaaaaatcacgacaaatttctgtaaaacaagacactcgaaaattttattttgaagttattgaacaaaaaaaaaaaaattcaaaaacccggccgtttgattacggtactaccgtatacccttcgctttatgggtgtttaaccttttttattttatcttaccatacaa

SEQ ID NO: 84199 - DNA, 867 bp, Heterodera glycines
cattcaatcactgggactcaactctccagcattcaatcactgggactcaacccaccaacattccaatcaacgggactcaactctccagcattcaatcactgggactcaactctccagcattcaatcactgggactcaactctccagcattcaatcactgggactcaacccaccaacattccaatcaacgggactcaactctccagcattcaatcactgggactcaacccaccaacattccaatcaacgggactcaaccctccagcatttcaatcactgggactcaactctccagcattcaatcactgggactcaactctccagcattcaatcactgggactcaacccaccaacattccaatcaacgggactcaactctccagcattcaatcactgggactcaacccaccaacattccaatcaacgggactcaactctccagcatttcaatcactgggactcaaccctccagcattcaatcactgggactcaactctccagcattcaatcactgggactcaacccaccaacattccaatcaacgggactcaactctccagcatttcaatcactgggactcaacccaccaacattccaatcaacgggactcaaccctccagcattcaatcactgggactcaactctccagcattcaatcactgggactcaaccctccaacattccaatcactgggactcaacccaccagcatttcaatcaatgggactcaacccaccaacattccaatcaacaggactcaaccctccagcattcaatcactgggactcaacccaccagcattccaatcccactatttcaccgggactcaatgggactcaacccaccagcattccaatcactggcactaa

SEQ ID NO: 84200 - DNA, 659 bp, Heterodera glycines
aaattaggtagataattaaatgtacttcaaatttttaaatagttaatcccttcaagaaataattaattaaattaaatttatttttaaaaattaagaaaattgatttcctttattccttcctttttttaatttcaatttaaattccctcggggaaaaacggactcaaatttaaattgtgatgccgctggaatttattattaaaatgagtagattatattaaatttaactttaaataattttcaaacatttaatccttataagaaaagaattcattaattttaaattttttaattaaaaatatagtgtcctttattccttttcaatatttcaattccccgagggattgaatttaattggcaaaatgaaatgccaaaagggttttttaaatttattcattcaagaaattaaagctgagaaattaattttaaaaaagttttttgccctcacaatttttaaataattcagagaacttaagatcgattttcaaattttttaaaaatttatttgaaatacaaaaatcccttattgctcggactaatctttgaattgataatctaatgaattatgaataaaaaaacaatatttctattccattcataagagtgactctctctctttttttttattattttggcgttgtgttacgctgaaaatccgtc

SEQ ID NO: 84201 - DNA, 324 bp, Heterodera glycines
atggcgtcggatggccaagcgttggccaaatggctgttcactgcccatccggacaatgtgccaaaggttttcgaatgctcgtggggcaggaataataaggacgacggggattggccgttcaaaattgctgacttcaaagcggtaaacttatcattaattaatgatgtcactcaacgaaatttcgtcactttctttaatcgtgcgaggatttttaagggcgaaaataaggacgaaaagctttcaaatttaggggtatacttttttaaattgttctttttattatgaaaataatttcagattaaggcaggcaattttattcactga

SEQ ID NO: 84202 - DNA, 1502 bp, Heterodera glycines
atgagcatttcggtgggtggggggtgccattggtttcagggcggcggttggcggtgccgttggcacaccgcgacggcagagccgaagcggcggaggtgcgggcattgcatacggcggacgccggtgccgcattacaattggaactttgcggcggcggtgccgacttcaacaaccgggactcggcactgggcagcgatgtgagtaatttcattttttgtgccgttttttgttttgttttggaaattgagtgtttctggcggtgccgagggcatccacaggaaaatttttgaaaatttcttactcaatttgtctgatgtgctctcactcacaatcagcacttgtggtcaacaaaatatatcattcattttttacttttttaatttcgtcaaaaaaattattcatttttcagaacccaaccagcagaagtggcaccatccgttgtcggcatctccaaattgacccggacaccggacgatgtcggacatgctcataccggtgagcagaatgaacagagggtcatctggggaacagtacgtccccccctcccgaaatttttttttcaaacagtaatttaaggaaaattaaagaaaaggcatcttgaaaatatcagcgatttcttctttcaaaactttatgatgaatttaattttttttttttaattttctaaaatattaaaattttcctattgatttattgtttttccaactttgttagaaacaaatttctctgatctttttcaaaagaaaaacatttgataatttgatttaaataaataaaaataatatttctctccgttccagcccaacaagttcaacccgtacagcaacagcaactgccactctgatggactcgggtcgtccggtggcggtggtggcctcaacgcgtgcgctccaacctcattctgttcgttttgaggtaggtgtttatgtatgtggtggttggtgctgcacaccaatgttttaattttaaaaaattaatccattttcatggaaaattttcaatgattttttaaattttttttggcggattgttggtgggcgattttcatcatttcccagccgaaatgaaaaataatattttgagtcaattggcgtcgaccgtttttcttcccttttttgcatttgccttttcatttgcttttatttgtccattttttacatattttttatcatttcgtttattttcatatatatttatttgtttattcattctttcatttgtttgtcttaaacagatgggttcatcaacaaattgtgctgataaaatcattttttgtcatttacccctcctccgtcgaatgatttctctttaattgaatcaaaatttacaaatatatatacctaatcctattttattttccttattatttgcactctctctccccaaaatgctttataaaaatcccttttcattcaattttaggtaattagggtaaaagccggggggatcgccgccagtcaaacggtgataaaaaaaatcacaatttcaccgataaaatttta

SEQ ID NO: 84203 - DNA, 775 bp, Heterodera glycines
aaagttcgtcgacaatgaatattcctccgaaatcgttcaatttggctccgattgctgagcaggaagggtgtgatctcgaccagtccgtgtcctcgtcgtctttcactaatcatcaacagattgggcaagcgcgaagaccccatcccaggggtatgccaaggatgattcggctgagacggaagcggcgggatgatcctttcggcacgctaattcaatcgaccaagaaaatgcgacttaacgaccagtggaattcttcggaggggcaagcctctggcgtagaagggactacgacaattgcgaaaaactttgcaatgattggggagagagcgccgagtggaagccataacattagcaaaatggatggtgtgctgttcacggaagacgaggaagacgaattgttgttttattatggcggacaggacgaggaggacgactcagacgcggacggatacgacgacgaatcggactcaaacgcggaagaatactacaaaaatgactacccggacgaagagaacggcaaatttatcagtttcgcggacggagtgcgcaccaacgaatatgaaaacgactcgacaagtggggacgacaatttcggtgagtttaatattcaaatagtagagagatgaatgatttacaaacagatcattacggtgacgaagcaacaaaatatggccatttttgttacgaggacgacaaagaggaagacgaagacccgttcagtttcggcaaaatgatttcggcacaaaagaagggcagcgaggacgacagtgattga

SEQ ID NO: 84204 - DNA, 182 bp, Heterodera glycines
tagtctatcatcaatttatattgtcaaaaagaacatagataataatcgccggtttgccgtgtcaacatcgttcgatgtgttcttttgtcccgtctcttcgctctctcagatcactgctgctgacactgcacgtgctgtgccccgcccggccccgtcggcacttcgtcgtcgctgctgtcgtc

SEQ ID NO: 84205 - DNA, 429 bp, Heterodera glycines
gcgctggtaatcatgaagatcttttcgaaatgctcaatgggggcggcatgccctcctttatgggcggcggaggcgggttgttccagcaaatgtttagcgggggaaggcagcggtcgcgcaagggggagacgacggttcagcctttacaagtttcgttggaagacctgtacaaagggaagaatacaaaattgcaattgacgaagaaagtgctgtgcaaaacgtgcaacgggtgagagggcgggcgaaatgcggattattcatttaaatccataaaatgtggtgctaaatttttcagaattggtggaaaacaaggctcggttcggaaatgtgaccgttgtcagggaagcggaaaggtctttcgcacgcgtcagattgggcctggaatgatccaacagatggcggcgcgatgtgatcaatgctcgggtgaag

SEQ ID NO: 84206 - DNA, 1287 bp, Heterodera glycines
atggtcggattcgtttccggcacttccaatacagcagacattgcctctcgaggagcaaaagcaacggaattgttggacaacaatctatggcaatttgggccaaattggctaactctcaaagaagaggaatggccaatggatcaaataatatttgatccggaagtcgaacgacacacagtcatcgacgaactgccaataatggaaatgacactgccaacgatggagcatccaccgcaaaaggcactcatcgatgaaaatcgcttctcgtctttcatcaaacttaaaaggactatggcattagtccttcgcttccttcagccgagaaaagcggagcccaaaaagggcaatttgaaggaaaaattggaagcaattccgccaacaactgctgaagaattgctaaaagcagagcaaattttaatcaaaaatgctcaacaacggcacccagccgatcctcaactggtacaaaatttacaattgtacgaggacgaaaggggaattttgagaagcaaaggaagaattcaaaaaggggacatcgcagaaaccgccaaggacccaatcttcctgccatgcaaagctgaattaacggccctcctcatccggcatattcacgacaaactccatgccggcgccaacaatgttttgtccgaaataaggcaaaacttttgggtctctcaggcccgacggaccatcagacatgtccttcaaaacggaaggagccgacacttttgtcacacctgccataagttcaaaacaaaaccattcggtcaggtgacaatgcctcctcttccccaatttcgcgttgatggacacacaagtcgaccatttctcaacattggccttgactacttcggtccaatgcttacaaaaagcaatggaaaaaagatgaaagtatggggatgcatcttcacttgcgccgtcactcgtggcattcacatcgaactggtgaatgacctgacagcagaagccttccttaacgcactatcacgattctgtgccaggaggaaggtccccaaattgattgtctccgacaacgctaagactttcaaactcggctcaaaagcggcacaacaaatttgtcagacaccgaatgccgcgcagctcttcaatcagccaacagtacaaaaatcagtggcagacaaaggaatcaaatggagattcaacattgaaagagcaccatggaccggaggattcttcgaaaaaatggttcatttggtcaaggagcccttacgcaaaacgttgggcaaaaaattggtcgactacgaacaattgatgacgactctcatcgaa

SEQ ID NO: 84207 - DNA, 360 bp, Heterodera glycines
atgaatggacaacgaaaagataatcaaacggagaatgagcttgtatgtaatttactttgggtccccgtcattaaatcttaaatcgacacattttgtaccactccgatgggggggggcggttctcagttaattaaaagataaaaatccaaatgataaaaaagtgagaggggtgaaaaactatttaaaaaaagaaattttaaaattcagaaggaatccgtggcaagggtggaaaaaatggaagaatttgcaaacaaattcaatttcgacgaataattacaattatttatttgcggacagttaattaattttgcaaaacataaatgaaatttcatttcaatttataatgaatagttccgctga

SEQ ID NO: 84208 - DNA, 2792 bp, Heterodera glycines
atggctcgccttttgaagacccgacttcaaactgcgactgatcagctggaggagctgttgtcgcacgaccaccccgccgcaactcaacaaatgaatatcggcgaactcaccctgcgcattcatctcatagatgatgacctggacaaaatcagcaaagtggtcgccgaaataaaaagcataagcgcagaatggactcaaatcatcagcaaaataccacaaaaagaccaagacgcggccatcaacgactacgacaaccatgttgcgcttcttcaagttgcggacaaagtgaaaagctccggaacacgcgcaagacaattcaaaacaagccaaatcagcttggcgtcggcaaaggcgacattggaagctgcgcaactccagcaacaaaacgcggggggagcgccggccgctcaagcagccggagcacaaacaacagggcgcgtccaataccaagtggaaatcgccaaaataagaccacagattttctctggtggcaaatgcgaatggcaatcttggtggccggtatacaatttggcaatacacacggatccatcaaagccaaagtttctgaaaatggctgacttgatgtctttgcttaagggcgaagcaaaagacatcgtttatgggctgcaactgaccgacgccgactacgacttggcaatcaaagcattggccgagaagtacgacgacaacagccacatgattcgcgagttgcatcgacaactcatctcgctgaaagcgagtcagtcattcgaggacgacagaaagttgctcatcgacgtgcaacgcatcactcgaatgctgaaaaacaacgcgcaagacataaatgcgccaacaatttggctgaccttggaacaaaaggtcacaaaaccagttttgcgccaactgcaagaagcaaaggcaaaagctggagtggactgggacacggaaaagttcctctcatcattcaaggatctcgtcatcgccgaagaagcaattgaagagatctacaaccaatctcaccaaagaagggaaattggcaaaaaacccagaatggtcgaaaaaacaccattcaaaaagttccaaacaacaatacagacaacggtggagcaaaaagcaaaaattgctccaaaaaatgggacttttgggcaacaaaagaagggagtcaagaagccacaacgcgatgacaaagcaaaggcaaccccttcttgccgtctctgcagccaaagccattggacgtcaggctgtagctgtttcagggatgccaaatccagagaggaaaaggcaaaggagctaaaattgtgcctcaaatgccttggcatcaaccactcatcaaatgagtgtacagcaaaaatcagaaattgctggtactgcaacaaatgggggcacaaccgagtgttctgtccacaacaatttggggtgaggaagcaatttcctcccacggtgcaacatgcatcaatccagcagttcaacgcaaccgcaaaggaaaacaacagcagtacaaaacgaacggcatcagagatgtatacaacccggaaaacccaaaactttccaaaaaagttttggtattcttcgacagcggatctgaacgctcctacgtcgaaaaggcactggcctcatttctcaaactggaagccaaaaatccagcagagataaccctgaccgggtttgcaggtgtcgacttaggcacctacaccatgcacatgacaaaattgtgcatgaaaacagcgatgggagagaaaacaatcgagccggagataacgactcgggtgctgcgtgagatggctcacgtcgaattcgccgatctgtacgactctgattttgaagcaacgcaactgcaacgccaaacagagtcactgcagccactggtcctaattggcactgactactttgccgattttgacatcaaaacagagaagcgactcccatcaggcttttgggttggcaactcaaaagtgggcagattaattttcggcaaaggaaacctttcaaagccaaagatggcgaaaaaggtcacttcaaccgccatctctcaagaggcagtggaagtgcagcttcaaaacgacgacgacggactgaattcaatggtcaaacagttctttgacctcgaagctgctggtatggccgatgctgcccatccaaccgaaaatgagcaatggttggaccatttcaataaggagctccacttcaacatggaagagaaacgctacgaagtcgcgcttccatggaacaacagggctgaagagctacagcccaattatggattggcacgaggaagactggacaacaatttgaaaaagctggacaaagaaaagttccaactttacgatcagatcatccaagagcaactcagcaaaggcattgtggaaatggtgccggatcctaaggcatggactggcaaactgcactatttaccgcaccaagcggtaataaaggatgatcatcaaacgacaaagttaaggatcgtctacgatgggtctgcccacaccaaggacactccctcactcaaccaatgcctcgacaaaggaccacagttgctgaacgatctgatcggcatcgtcatgcggtgccgcatgtccgaaattttgatttgcgcggacatcgaaaaagcgtttttgcaaatcctaataaaagaagaggactgtgatgcactacgctttttgtgggtcaacactgacgggcaagtcaggacctaccgcttccgtcgcgtgccatttggactgataagcagccccgcgcacttatcagtaacgctcaagccctcggccaaacggatcatccaatggccaaggacatcgcgcaaaacttgtatgtag

SEQ ID NO: 84209 - DNA, 539 bp, Heterodera glycines
atggttcctttattttctatttttatttcattattattgtcacattttggcattgctgcacctataattggaattcgggaaagtattttcgatgcaaatgtaatttattcatatttcataccgagtagaactaataccgatcgctattgcattcaaaaccatttgactaaaaaataattttttcaaaaatgtgcactaaaataattaaaatttggacaattaagttccaactaggcgcatcagcgccgagaacgctggtgtcgcgcctagttggacggaccatccggcgccggcacagtttcactctgtcctgaatttaaatgcgaacgaactaattttaatttcctaatttttaataaatttagctgaatgctgaatatgttatgctcataaacaccaactctggctcagattcagctgtatacaaactcagctcaacagaagcacaacaattaccgcattttacaaggaatgaagaaagcaattttcaaaatgcatatccgatgactaattttatgattggcattatgtttggttga

SEQ ID NO: 84210 - DNA, 726 bp, Heterodera glycines
atgtccggtggacaaaacgcaccgaaatcagtgcagggcatgccgactgagaaagtgtttggagattggcatgaacaaagacggtgagaaaagtgggggaaaattgggggaattttgattaacggacaaaaaatttatatttattttttaaaatgaattaataaacatttaaaatgggttttggtcctttagtaaaatgaggaaaataaatcataaattgagcaagaaaatttaatttacttatccttaattgttgaactatttttgtacaattagaaattctctataaattataataatttcccaactaacatgtgccccgttggcttagtggcagagcgtctgtctagtaaacagaagatcgctggttcgattccagcacggggcattcaattattttttgaattttaaattaattaaatttgttttttaatttcgcagcgtttcctttttatatttttaatctgtttttagctttttccatttttttaatattcccttctttcttgtcattttcttcttcgcttcagctgttcaacacgaacgtggcccccgcacttcgacgcttcgccgtcagttggcgttcggactcagccagcagttggcccaacgtcaccaccagcggatgttggccaattctgcggccgtcaaaaaatcgctgcgtcttccgccgccgacgacggcaatggcacattcctcacggcacaaaggccgtcctcgtgccgg

SEQ ID NO: 84211 - DNA, 673 bp, Heterodera glycines
atgtatggagtattctgccgaagggacgcaggaatgcgaactggtgtactgtcactacgtaagagaggaggactttgtgcggatgagcaaagagctcaatatcaccagcttataaggagagtgaatggtgtggaaaagcctataatgaaatgcaatgccaacataaagaaaataatggcaacataatgccaaaatagttttttataagattgatagtggaaaatcgccatccttcgctacaatgtctgataccgaggagacaaagtacgaaatgcgcaagaacgaggcgctatcggtgccattctctactcagacccagcggaagtggcacgagacggaatagagccgggtagaatgagccgaattcattcattcactccttaatactttctatcccttccccccagggcacactttcccttccgccgtttggatggtatgccaatgccaatgccaatttgatttggttctcacttgtccttttcagccaattggcggtgttcagcgcggctcactgaaggaattgaacggcgatccgttgactccgttgctgcccgcccgtgccgatttcttcaaagaacgcactttggaagaggtgatcccacccaatcaatcactgatcaatcgatcaatgcctttccataacattcattctcaaattctcaacttctaa

SEQ ID NO: 84212 - DNA, 93 bp, Heterodera glycines
  unsure (1)..(93): unsure at all n locations
atgcctgcaaatatatttcgaggtgccgaccctatggaagtgtttgataanattatcacaaatgaggccccgccaaaggcacgagttggacat

SEQ ID NO: 84213 - DNA, 2265 bp, Heterodera glycines
caatttttccaaatctgagcacttcggaggaaatgagtgttctgattgccagaattgctgagctgaatcgagtgaacacaattgaaccatcaatcgcaagcagatcggatgtgttagggcaagacagaaacggtaggaaatatttaatttttctggatactgtaataatccaaaaaattctaagtcaatgatgatgggacgaccagcttttctaacggtaacaacagaacaacaacaatcggcggtgagaaagttttattttttcgtttaattttttttaataataatttgttaaaagttaatttctgaagttcaattaaatgcaatttgaggagaatcattgcttcataaattataataattttttttaaaagacaagatgatctaataatgaaattacgtaaaatttatttatttttaattttcagacagaagaaaaatgacgaaattgttcatgttgacggtagtgaacattacggtaacagtggcactgatcggcttcattgcggtggtttaaatttagaataattccttcttcaaatatacgttatattcaataaagaatcggactgagaatgcacgaatcaccgcattggaggaacagcaaaagaaagatgaaaattttgttgacgttttgaaagaccgatttggaaagggtaaaaatgaaaatttaatttataaattttaatattttaatttatttttttgcagagcttttaaaagctgtgcatccggacattcgcaagaaaattgctgaggtggaaaagaacaaataggtttaaaaaataaataaaacgaaaatcagtttagaacttttcgaacccaaaacacaacttttgggatgtcaataccagtcacactgatctcgaaatctttggctcgggatctctgaaagtgcattacaaaggcgatggaagcggtaagtggattgatttctgattaagtactaaggatgtgtgcaattaaggttttccggaactaaaaaatctcccgaattacgagcgggttacggattttcgcaatttatttttgtccattgagctggtttggcaaaactctttatttggaataagttttttgggcttttactgaattatatttaaaaaaatacaatgtggaatgaattttatttatttattttttaatacaaataatttttagtaataaatattttatagaaaataacattaaggtcgtcgctctgtcttcgctaaacacccaattttgttctctgaatccggcattttttattttgaaatcaaaattaaaaactgcaaaaggtagcactaccatatgaaacatatgaaaatggttgatttttattttcaaattcagtctttgctcaattggactcgccaccaaagcgatgccattggacggaagtgttggccaaaattcggacagttgcgcatatcaaagcgatggccaattttgggccaatgggtcaacgaattttggaatgccaaacttttctcaaggcgatttcgtcggttgtggcattaatttggccactcgtcgggtcattttcacaaagaatggccaacctttgagttgcttattttattttaaattatttatatttcaattattttaagatacttctgatttattcctttcgccttcttttgattttccattgtttccgttcatttctttaaacaattctggcgatttgattgagacaaattttggaccaaaattcaaattcgaccccgcaaaagtccagcagcaggtgaaaatgagagaacagaataattataaattatttatttaaagtaaattttaagttaattctcaaatttccacgacaaaattattgggatgtcaatgcttgtaatgagaatctccaaatcattggcaacaaaagtctgaccgtccattttcacaaaaatatttctggtattttcactaaaaataatttataaattctattttttcttaaaaaaaggtttttattccgtcttcgctaaacattctattttgttgaacaaggatttgtccaaatatttttactacgaaatttcggtcaaaaatatgaaaaagtaagagatttatttttattttttttgaatatcaaatttagctgaacttatgaaagtagattatttaatttttcatttttcagttggatcaccttcggatttgccgttaaacagcagtcaaaatttgaatcaataattcaaaatggcacttatgcgtatcaaagtagaggctatttatggattaacggagaagaaaagagaataatttcccaatattcgtacg

SEQ ID NO: 84214 - DNA, 1091 bp, Heterodera glycines
atggaagcggaagacgatgaaagcgacgacaacgacgcggaaaacaactacatgctcggctacgatgaggagggagagaaaccgcgctctgtgacgacctatgcatacgcacacgcaggtaaataaattttaacaaaaataaaaggaaaatttatcgatttttaagggtcacgttacgatcacgtgctgatctacggcgagatgctgcgcatgggtgtgcgtcccgaactcgtgcgccaggggaatcacctgctggagatgaaggcccgcaagagaggagcaatcactaccaccatcttccgggacaggtaaaaagtgtaaaataacataaataatcgattatttttcagttacaaactgatccccatcaagctggcctcctttgtgaagacgttcggcttggaaatcgagggagtggacaacaaaaagtacttcccacacaagttcaacaaggtaaaatttaaaaaaaaaaaaaaatcaataaataaataaaatcaaaaaaaaaaaaaattaaggcggcaaattatggtgttgtgctggacactcttccgccgcttgaggactactaccctggcgggcacttccctgaggagcgcaagaagttggagcagtggtacgaggagaaccgcaacacgccctttgacctccgtgaggtcattgcggactactgtaaagcaggtaaaaatcgggaaaatcttgaaaaaaatatgcaattttcttcagatgtccaaattctcgcccatggaatggtcaaaatgcgggagttgttcgccgctgcaacgagccaggagctgaccgactccatcaccatcccgtccgcctgcatgaagttcttcgtggtcttgtcgcacgtcggcaaagagagggtggccatcatcccccaccttggctacgagaagcgtgggaagcagagtgccatcgcacgaaaatacctcaagtggcgtgccgaggaagagatgcgcgacaacggatggactcttcgccatgtggaaagccctggcggcgagtacaaacatggcaacttcctcttggacggcatgctcgagaggatcggcgaggacaagaatttggccatcgaagtgaacgggtaa

SEQ ID NO: 84215 - DNA, 236 bp, Heterodera glycines
atgcactacggacttcaagccggaccccgaactcctgcgcttcagacatcaggtaaataaaacacaaaatatacgaaaattaggtatttctttcaggtgaacttctgctacgcgcacgtcacttgcacggaatgcattgcaaagggcatctgggaccagccactggaccggagctgcggaatctgtggaatgacgagaaccttcgcataggcgccgttcgagttctacgatactga

SEQ ID NO: 84216 - DNA, 1565 bp, Heterodera glycines
atgcaaacattgaccaccgccagctgttcgtcatcgtttgctgctgaccaggcgtgccaattgttggccaagggcaccgcactgacacccgacgaattcattgcccttttgaagacagtgactgcggacgatgtgaaaaaggtgaacccaattttccaattggatttcattacaaccgctaaatttgtagcactacgtcccccccccccgagaatgtataaaaaaaactttgatttttttcttgaaaaatttctatgttagtaaaaaaatttaaaaatttctcggggaaaacgatgcgggggaggaaacgagctgctcccctaaaaaatagggttcaattttccatttgaatttttcaaatttcatcttttaaggctgcttcccaactttgcgccaaattgtccatgtcagcgtacggaaaagtggaccaagtgccttacctggaccagctttaaatgtgacggacgaaaattttaatgagtgattgaaaagggtcgcgccgaaagagaggcatatatataaaaataggaattgcattcttctgctaatatgtagtgtttcatttttttgtgtgtgttcccgattctttgttatgtgcagtaaaatctgaattaagcgaattgttttcattttcacggttttttttcgcgtattttaaacaattttttttcttattttccgattgtttgttttttaagcaattaacaaaactttttgcatttgtaatgttggttggacgtgagccggaattcatcaaattggagtcgttgctgagctcggcactcggtgcccgcgctgattgtgacgctgctgctgctgctgatgatgagccaaaaccgttggccgtttacatttgcggaccgccggggaccggcaaaacggccacagttggggcggtggtcaaaaaattggagagcgcacacaaggtgaggttttgttggacattatactgcacttgcttttgtgcatttcaaagatttaatatgactcttgcagttcactcgaccgtaaaaaagacactataatttgacaattttaagcgtaatttcaaagaatctatgtttcaaaaaaagagccaaaaatgttcggaaaccattttttctaagttttcttgtcctaacttttttttgaaacagttaaattctttggaattttgcaggcttgagctcttggagctatccaaatgatgcaatgaattctagaaaaagttttatagtgaaaattgtctaattttttattttatagccgtgtaaattgcaataaactttatcacaacgacgtattttgattagaaaatggcaccgtttctgcattttttgccaatttgaattacaaaattacagtttgagtttcaaaaacaattttgagtggcgaaaaatacggacacaattccttgaaatttaagtttcacttcgtttctgtcaactgctactccacacagtcatcgtccagtttggcaaaggaagtgctctccaaattgggccacaacgacgtgacggcgaacagagcgaatcggaaactgggcgaagtgttcgacagcaccaaaaagccaatgtataattcaa

SEQ ID NO: 84217 - DNA, 1505 bp, Heterodera glycines
atgttagaagggtcagggaaccccacattggtcccagtcatcgaacgactagaaaagttagaaaagttggtggaatggctaattgcgggcgagaatcggtatgggaatcgatttgctgacccccagcatatctcatcctcaccatcggcacacacttccaacaacggcactcaactccaatggggtcaaccgccgcccttcgctgggaatggcgccgtttcacggatgataaccgatgcaatcatcaactccgagcagcttaaggagaaggccaaccgagcagtcattgaaaaattgccggaggcaatcgacgaacgggcgctggtggagcaaattgccgatgaatgcggtgtcaaggacaaactgtcgccggacattcatcgccacccaaggacgcggactgatggaggggtaaaaagggaccgaattttaaaagtgccatttacggacaaatattcgcgcgataaattcatttataatttccgtaatgctgtgaaaaaattgcccaatgtgccccaacacatcaaagttcgcagagatatgactcaaagcgagctcaaaatattatactccctccggcaacaagcctatcaggccaatattgccgcaggtgagtataagtattttgtggttgacttggagatcagatctctgagagagtcccgcccactcagaactcgctagggacacgcgagcaaaccaaacaaaaaaattggaaaaatggtagaaaataatccctggatttcttgccttttaataaatgcccgatcaatagcaaataaaatatctgacttagaatacatagtcaaaaaatatgaccccactataattctgatcaatgagacctggttaaactccagaaatacggtagaagcggaacttacgataaatggccaatatcaaattgtttttgcaaaccgaactgaaaaaaagggcggaggatcggcaattctattaaaaaccttgatcccttatcagacacttttctctgggacaaaattccaaagtgaaattatacacattaaattacttttaaaaaaaccaacacaaattataaatatatatcgtccaccaaattgtaacgttcagaatactaaaaagctactcaaattcatttcggaccaaagcgattctgaaaataccatattctggtggtgattttaatatcccaaatatattatgggatgaaaataaagtaaaaaaaataaatgataaggcgtctaattctctaattgagtttatgcaccaaagacaattgatacagcatgttaaggaaccaaccagagaaaaagcaattttagatttagtaattactagtgaattagaattaattaatgaattgacagttctagaaaatttttcaacttccgatcacaaaatggtcggattaaaataaaagtaaaattcagtcgtaataattctaatgtttatagagattttaaaaatataaatttttcgaaattaagtcaagcgttacttgaaaatcgaattgatttatcaataaa

SEQ ID NO: 84218 - DNA, 434 bp, Heterodera glycines
atgggcgaacagaatgacagtgagtgcaaaataataatgaataaaataaattcaaaattttaagaatgttctaaaataaatatattatagaaaatcgaaaaagtaaccaaagacagggtcattttttgacaaattatgttaacaaatcgcattaaaaattacaaattttcccgacggcgcctatcggcaccgccggcccccctttcttcccccaaaagtcttggaaaaaacgcgccgcgaaaaaagcggtgttgaaagcaaaaaaaaaaaaaaaggttaatcaatttacatggcggacccagacccccttgtcttgcaaaaaatctgaattttagtgttctttatcctgaatttgaaaaagaaggctggtcaacctgtacatatacttctgaaaaattctaatgctaaaaaacaagcactcgcgtgaaaattga

SEQ ID NO: 84219 - DNA, 693 bp, Heterodera glycines
atggacgagttgcagaaatgcccaaaacagaaagtgaagagtgcgcgagggaagggactgttgtgtgccattgaattggacaacggtaagtcggaaaaagaaaggacaacagagagagagaagagtaagagagcgagagagagaaagagaagaggggcagacagacagacagagagagggcgagaaagggaagggggaaggaagagagagtaagcggagagagaggatagaagagagagagagagaacggagaggaaaggataaagagggagagagagagagcatgtctgtgtgcatttttcaaaattaccctgacgaagaatcagtattccgggaaacctctgacagaatccggtcattttctgggctctacaaaaaaataaaatgtggaaaatttgaggcattgacgcttggcaaatgtgccttcgtctaatggacaacggagtattggcaaaacaaacgcacgaacacacaattcgatttgctccgccattggttggttggattgaaaaccaaaaattaataatattccatcataattttaattatttttcaggtaattaatgaaaaggacacacgaacagtggccaaaatcatcggacggacattaaatgcattcgattgattgtgaaaattgtgacactaatacatatccaccagggatgtgccgagccagacaaaatccgattccga

SEQ ID NO: 84220 - DNA, 365 bp, Heterodera glycines
atggaaatcggcggctctctcgaagatgaacctatgaggaggagaaggagaagaagagggcaacaacaacaacaacaaaataataacgatgacgaagacgatgatgatgataatgatggtaacgaggagggagacgacgatcacggtcatgatgctgataatgaggaagaagaagaagttggaacaaatcggtcggtcagactttgctttttcgacgctgaaacgtcccaagatttaccacttcaactgcgtacaaaggttgtacagaaacatgttccgatgctcattattgccgaaattatctgcgaagcgtgtataaatgaaggaatttcggttcattctggtgttggacaatacgcaaatgg

SEQ ID NO: 84221 - DNA, 700 bp, Heterodera glycines
atgtatcggcagtaccgtatattttgcccaattacagtatgcttgttccctcgttttgagagtggataccgtaagattggaaatagaccaattcaaacaatttattacattttaagcaatagctaagcagttgaacaattcacaaaaactcgaaaatcgggccaattttgttcgtttttttgtccgaacttttttttggcgagttgtataatagcttagcaattggcttacaaattaatatcagcttctaattgttgaaatgcttcaaatgattctaaggttttgaaaattggtcaagtaggaaaggtgttatggtgccccaaaaaaagttggttggtgccgaattttcagtgcaaattttctccaattttcctgtgccaatttttcatattatgtgttatattggaattgtgccaaatacatatttcaatgattatttaaatttaaagttttaaattttattttagaaattttaaaagattttattttagttgcccattcgccaccaaaattatgctgttttcccgcgattctttccatgtgcaccaatcgttccgtgtcaatgaattgttgtcttcttcgtcctcttcctcagcttcttccatcactcacaaatccggcacaatttttgatcaagcccagcaaattgccaatgccattcagagacagcaaaaacaacagcaaagaattgcgcatttaa

SEQ ID NO: 84222 - DNA, 1164 bp, Heterodera glycines
atggctcggttggtgaatgatgctgatttgctgatgatgatgatgataatggttggtggtatgtataatgatgatgattaattcaacaagtttgtacggaaatgaaaaactggggatcggattatttataaagataatgcgatttttaataccctacttcgatttcttgaaaaatttttttactaatttctaatgacttacattttaccatgaatacctcttattgttaggcatgaattttcacaaattttcaaaaattttgcggttacaatttcaaaaggatttaaatgtttgccttttggcattttgtttgaaatggccggaggcacaaaaaatttgttcttttaaattgttttacacatcagaattttttaaaaacttagaaattatttcctttttcaatttttttagatgttaagcaccaaagatgaaaatttgcttgacgaaaatcaaaaaagcacaaaaattcaacgattacgaaagtaataaaaaatataattaacaaaaaaatttttatttaatttttagctttgaaattcggccaattcttccttcttcacttcacacagaacacattgaactcactgaagcggttgtgcttaacgttacaaacaaaagttgagtttagtttctcgaacagtgcaattttttgcataaaaatgctttaatggacggttaattgagtcaatttttgttgaaatttttgtgccaaatttttcatgatttttttgaaattttctgaaaagttttgtttctgtaattatttctttttgcatgtttatcaaatattaaatgttcaaaaaaaattaatatgcaaaagaaaaattgcatgcagtaaggtggaattgaaccctgacgcccaaaaacagaaattttaccgactaagccaccgattttaaccaaaaatttttaaattttcaattgctttagcttcttctctacactgttgcgcattttgcccccattgccggcccaatttgagcatttgaagcgcgtcaatggcaccgaattgttggtcagtgttagccaaaatggcgacgacggcacaattggcaccgccgaacggacggcgattggccaactgattggcggggagccaacattcatcggacggcacattccatgccgaaagcctcagagtcggcaccagttggagatgtacag

SEQ ID NO: 84223 - DNA, 621 bp, Heterodera glycines
atggcaaaaatcttgtcattttttgcgcaagaccggtacaaattcctagcttttcccggttttggtttatttggaggatcaagattatcataaacgatttaaataaatttgtaatgctaattgtaagcatatgaccagggcccggatttttaggttttcacctttttttttttgcggatagcatatggtgagataaacgcaaaaaacacattttcttcgatcaattttcgatttcgagtgactttttagcaactatttaggtacctatttcggggtttttagcgcctaaaaatccgggccctgcaatgaccattcaaatacatcgataaaatagaatcactgagtgatttttctgtattttttcatgtttaataaacatttaaacaagtttcaatttagaattaaataatttttgttaaaattttaaaaaattttagaaatggagactgggggattatttttcaacctcctcagaaaggggggggggtaattggagactgcgggattaatagagactgggcgataattagagaatatacggtatataagagagactgttctaatcaggagagagtgctagagaaaaattggcgtactatttttcttggcaatgtgtactaa

SEQ ID NO: 84224 - DNA, 383 bp, Heterodera glycines
atgacactgagccccaacttgaaatatgccacacacatcatctttttcatctcgtggattttgtttgtcgaaatcctttacggcgtaatcccgtttcttgacaatgcaaaaagtgccgtggcattttccatcgacgaatcattcagcccaattgaaaggtgattggaaaaacaaatttattagctccaattgaaattttggcttattgcagttttcacgggactagctggtttcggagcgagcccaagtttttggttacaagttttttcttggccaaccaaatccaacaatcttggtatcattcgatagccctaagtgtcctctattagtatgcaaaattgcgaaaaatttcgttaaggttcaaaaaagttacggccagaaga

SEQ ID NO: 84225 - DNA, 1898 bp, Heterodera glycines
gtatggcgttgtgaacacatttctactttacgtactccgtttcctgtctttgctagtacgttttgcgcaacattttttgctgtttggcattttgcggttttggctttttaccctaactggacaaatttttcattttttttttcaaatttttctggggttggatgccttatttagcccagaaaaaaatttacaggaataatttctgttcattatgagcgggtggctcccaaatgtttttggctatttttaaaatttttccggtacgccctgacgccttttatctcaggtttttttagaaatttttaaaattatcattaggcctatgaattgttttttcaaaattttcacgggctgctttcctctccccccgggtcccaaacccgtaaaatttgtgccatttttctctctttttaaattattttttcaatttttgccccccttttttgcccaggtgcttccccagtgcatttgcaactcgttgggtctgattttgttcaacagtttcaaggaccgcatcaagctgaagaccacgccgttgttggcgccgttcatttgcttccgcgtggtcaccaagggcgactacccggacctggtcaaggtcttcgcattatccagcaaaattttacaaaaatttgtcgggaaaataggcacatcttaaatttggggaaaaatcgttgaaaaacaaaatggaattttacaaataaatttaaaatgagtcggtgggctggacaaatgtgcgccgccatgggccaaattttttttttttttttggctataatttcttttaatttgtccgaattgaaccatttttggtattatttgatcgcccatatattctcctaaacggctttttattgtcaaaatcgaaaagttttttttttgaaaaaaaattttcattcgaaaaatgtttattgttagcaaaattagaaaaagcaaaaatgcattctattttttgagccaattattcaaacaacagaatgagtgcttaagctatcaggaaaatttttcaaaaatatattttttactgaaacattctaattgtaagtttgaaaacttaaacagaaaaatgaagttcatccccctccaccctctccaacaacggttttcaatttttcaacccctctctcgcaaaaaaaaaaatttaaaaattttctaattcagcccctcccctcatccatcacacacacaaaaaagattttgtgtttttttttgcaggtaaacctggagaagaacttgcaaatgtgctacgaggcgggcctggagagcttcatcttcgaggtggtcacggacaaggccatccatttgccccactgcagcaaccgcgtgcgcgaaattgtcgtcccccacgcgtacaagtgggttttgttgttggttgtttgggttggtggacttcctcacaatcaatcccccccccccccccccctccgagaattttttttttaatttctaaaaattacctagaaattttttaagaaaaaaccttaggaaattttttataagaaaatttcaagaaaaattttttttttttttttcgacgattttttcaaacttttatgatgagttactaagttttccttaaaaactttcctaagattcgctgaaaacaattaaaaaaaaatgttttcttaacaaatttctaggttagagaaatttattaaaaattattaatttaacttaaaaattttttgatttggaagaaaaatgggttggttttgaaaaacgaccaaaaaaaaagactaaaaaagcgtgtatttcgcccataatataaaatttggaacacaattttaaatggtcgctgaaaaattttcaaaaaaatatatttttttttcttgaatcccctaataaaattttcgagaggaacataggcagtggcatttatttttttttttttgttatta

SEQ ID NO: 84226 - DNA, 694 bp, Heterodera glycines
atgcttctacttcagacaaatgggtaataataaattatgaaattactttactaattgctgctaattatgccattttcagttggcgtgcccgcgagcgtgcaattgaattggccgactcggacgaatcgatcgaattgcagaacattggccaacggaaaacggacattcgaacaccgacagaacgaatgtctgctcttcgtcaaatgatgtaaaaagggatgggaatggcatggacaaaatggccataataatgaaaaatgattatttaaaaatctattaaaaataaaaatgatttagcgaacgcggcttttccgattggaatgcttacaaacagaagcatggcaagtcataaggaattggaaaataaacgagataaaaattaagggaaagcatacgcggaccaagaagtggagaacgaacggatgctgacttatttgaggttagctgaaaatactaaattaatttgaaattgaaatacccaatatttatagcgccaaacagttcattgacaagcacaacgaggcgtacaaagagggcaaagtggtccttccgagtgggagagactcatattgccgacctggtcagaaatcccgaactgttgttcgaatttccccctctgtttcagcccttttccgaataccaaaagctgaacggattccgtcgtttgatgggcgacagtttgcgccgcaatgcg

SEQ ID NO: 84227 - DNA, 132 bp, Heterodera glycines
atgattaattgtaaatcgtcactttctttgctttgcattttgcgcgactaccagcagcagcagaattattttcattcagcgttaagcgatccgactactgtagagactctcgggactgtagtcagtactacg

SEQ ID NO: 84228 - DNA, 345 bp, Heterodera glycines
  unsure (1)..(345): unsure at all n locations
ggcccttttcccgaatttggcnccaattattcctcgccatatttcactcgcaccgccacttattccttcccgaatcattaccattggcaaaacgaccgtttctacagtgccttctttcgcgcgtcttaccgtagtactgactacagtcccgagagtctctacagtagtcggatcgcttaacgctgaatgaaaataattctgctgctgctggtagtcgcgcaaaatgcaaagcaaagaaagtgacgatttacaattaatcatttttactgaaatgataaaacaattcactaacatgatatacgaattgtgtaggttttttgaatgtttaaaaaataaacacattta

SEQ ID NO: 84229 - DNA, 353 bp, Heterodera glycines
atggccgatgtttttgccaattggtacttttggatttttaaggttcgcttttcattttttgggtcatcgaaaacctttcttgttttcccatggaattccaattaccaaatgttttttagcatttgcctttgccttatctgatcagagtgatggactgttttctcgtggaaggtgactaatttcgcttaattattaacacattgcaattttaaaagacaacaatttttactttggtcagatggaaggattttttatgaatttcgtgggatttattcctcataaaattcggggaatgctttgatgtgccttcgcttctcaaaatttttactaaattttcacccaaaaatgaatca

SEQ ID NO: 84230 - DNA, 1126 bp, Heterodera glycines
ttggatttgcaacgacgtttggatggacattttcccatcctttgaccgtcctcaacttggcctcaaattggcacttctttcgccacgtttcaatgcgttggtggacaaacatttcaatggcaaaagcgaattgacaatttggagatcaatcgaaattcgtcgcaaggacaaaggaccagaaccgaaactatctgtgtggttggatgacaaatttgtgccatttccattgcccgaccgtccgttgcccagcaaaatccgttttaagaatcttcagattgagtaattcggaatcagagatttatggcaataaaagcattcatcccatttttaggtacattgatcactccgtcatcgcttttcttcgttcaaatcaccaaattttcgacaaaagaggcaccaatttacatttgtggattccatcatcacactctacgaatggccagccgattttggacattttttgtcgtgaaatttggcccattttttcgacaaacattcgctgtttgggctttaccaatggtgttgatttggacaatttgcgtcgtctcatttcaccgacaattctcaccgatctcaaccaattgaattcaatcaattccggtgatttgtcgcccgctgcgtttggtggtgattttgatgggccaaatgcaacaatttctgctggccaagcattgtccaaatggttgcactctccgagaaacgatggacaacccaagcgattgcgttgcgataattactacgaacaaacgaacactgattggatcaacaatttcaaggaggtgtggcccaacattttcaacaaatcactgatttttgattgcctatatttttgttttcaaattgtttagcattttctccgtgccaatgccatttcttccgtcagttaccaaattcatttttcttttcgcgtgccgtcaatgcaaatggtgccgtttgaattggtgaacgaatggacaaaggaaaagctgacattgaccaaagaaaacgaaaatgacttggagaattggataatgaagcgatgcaaaattggagaggccgcggatgttcagcttcagaaagatgaaaattggggcaacaattggaacactgtgatcatttggcttgatagtgacactaattgcattgg

SEQ ID NO: 84231 - DNA, 1072 bp, Heterodera glycines
atgtctgacgattttaatcggctgatgtcgtcaaattccattcacaacatcacacaagagacggacacttgtgacattgagccgtggattgaagactgggtcagttttggaaaatttaaattctttttaaattttaaaatcagagtttttcaagcaatttgtcagatttttttaatgaaaaaagcatgggattaaattggataaaaataaaaaaattacaaatgtatcaactaaagcaatgctcacttttgttgtaataaagataatgtcgtgggaattgctcagccagcccaatacgctaaacccacagaataagaagcggagaacacaacaattcttgaaattttaattggctaatcaaaaaatgcctgaaatactcccgttgaaatggatgcattttggctcaaaatttccaaaaatttataaataaaaaacaaaattattttaattcttcatatctttcgatagtactaaatattctctattatcctgccaaaatacaaaaaaatctcgttaattttccaaaaactaatgacaaacaatgttagaaaaacctgcatttttgagttcctctggccataacttttttttggaagctaacggaatttttttgaaaatttgctggctaatagtgaattcttagagctatccaatatcaattgcaaatttgctgctttttattccctatttaggcattaatttggattaaaaaaaatcatccatttttagcatgaaactccaaaggcacgttcccacacgacgccgtcggaattttaccaatgcatgagcaacaacagcacaagaattgaacttgtatgcccaacatttgaatttggcgctgcttttttcaatttggcattttgtattatcccccaaggaaaagccgaagcagcagcagaaaagcaccagcggaggcggcacttctctgctgtttcgccgaatgtcctcaaatgacattgatgacagccactttttgtgagattttaaatctcgctcgaaactgatcggggcttaattatgtagttaattatacacgattagcatttcaattttctttaaaaaattccacaaa

SEQ ID NO: 84232 - DNA, 2138 bp, Heterodera glycines
atgggcacggaacatgacgatgacgatggtgaaaaaggggtgcaacaattgttggaacagttcgtcgccgagggcgccgtccaattgggccaattcacgctgaagagtggccaactgtcgccaatttacgtggacctgcgtgtgctcgtctcggtgccgaaaattatggcatggatttttttaaaattttttactattttaaaattgttttgctaatacggcgtgaaaacactaaaaaaaattttaggattttaatcacataaatcacatatagtcaatcaaatcgtgtccaaaaatggggtccgaattctccggctcttcgcccctctgctgggacccaacccaacctccacctgcatattcaagaaaattcacatttgctgttgtttctcgcattttcattttgttgaatttcagtaaataattttagggaaaatttcgatttttatcccaaatttctgttggatttttaatttacctaaacaaaatgcatataaaaaatcactcttctcactcaacagaaagaagctgctcgctgtctgtgctcggccattgaactcgctcagctcgactttgattacgtggttggcgtcccgtttggggccattatgttggccacagtgagttgctttctgacccctcggaaaatatgaaattttcaattcaaaaattagggacgattttccgtaaattggaggcccaatttttgttagaatttgctgaactcgaaaatttttaatttattgtccaaatatatctcaaaaatcgacattttaggataaattaacactcataaaattctccaccattttttagttggtctccgcctcgttggacaagccgatgttgttgaagcgcaaggaggccaagacgtacggcaaaaagcagttgatcgaaggccgtttcgaggcgggccaaaggttcgaacggcggcgacggtgcccaaattaggctagcaaaaaatttttaaaccggatttcatatttttacaaagttttcacgcttattcccctcccacctgaccgtccgtcatccctggcctcggagttgaattagttttttaaatgctcaaaataaaaaaacttcccacccttttcggtttgaaagggtaattaggaaatttttaagaaaaaatttgtttgaaaattttacagcgatttctatgcaaatttttgagaaaaactattttgaaaaaggcgctttaaaaaaattgtaggttgaaattttctcataaatttctaaggtttttctagatttgcaaaaaaaaaaatagaaatttttccggggggggggagggacatggtgacgcacccaatttaggcagttttccaaaaattccagcgcactgatcatcgaggacgtggtcacctccggtgccagcgtgttggagacggtggccgccctccgtgcggttgggctgcgctgtgtgcacgtcttttgcgtgttggaccgccagcagggcggtgagcagcgactgggccgggaggcggacattgttttacggaggtgggggccaaaggggagggggttttctaaaaatttacacaattttttcatgttttttttaatatttgggagggttcgccaatcctgaagaacgggtgtccctaatttttaacttttttttaaatcttgggctcaaaaccagtttttagggggtttcgaggctgctgattacgtatcttaactctgatttgcccaattccgaaccccggaccttaattcgaacaaaaaaatgagtttttttcaagaatggattttttgaggtaaaagcttctaaaaaaatatttatttttttatttctttcaatttgttttcctttttttgtaagcatttgccgttttgtgactcggtttcctttatatatgaatttttaattatcaaaatttctcttttaaacaaatttttccgggtttggacaaaattttttccatttttcaaattaaattgaatattttttcagtttgctttccatgggttcgctgttggactttttggagcagtgcgggaccattgacgcgggcaaaaagacgcaaattgttcaccaacttcaaaacccgatctttgacgacagcgccacgcatttgcaggagcaaaaaacggagaaaaatgaaggtcaaacggaaatgtttttttaa

SEQ ID NO: 84233 - DNA, 989 bp, Heterodera glycines
atggaaattgtcgatgccaattcgaagcgtttgccaatccctcagattccgttgcccaacaaagtcatcggattcaaacggattacgttctcgtaagaatggcgatacattgaaatattttgatcactttttcttatttcagttacttcgaccacaatgtgctcacatttctcggccgttttcaccgctttttcgcttcatctccaacatatttgacaattgtcactgaaaatgttcgcattttggcgttcgttctgtccaccaattggccactgctccgcaattgcattcgtctgctttatttgccgaacttcgcttttcgccgaatgcgtcaattggcacccgccattctcaatgattatccatcgcttcgttttgtcatgttcagtggcgatgacattctgcccgaatttccgcccgatgacagtgccatggcgacggatggtcaagcggtggtcaaatggctgttttcgtctcgtccggacggtgtgccgaaggtgctaaagtacaacgtgaatttatcagcgaatgaatggtcgtcaagaattgaacaattcaaagcggtgactgatgaaatttttaaccatgtgcaattcttttttgtgactttttggcccatttttaggcattttccattgcttcttctcgtgttggcttctccattttctttcaatgttcgccgttaacgccatttttgatgaccaacgaattgactggggagcaattggcattgtcaaaatgtagtagtgagcaacgctttgtgctcacccgttgtccaattgcgcagaatgagagagagaaacaatggaaggaattgcttatggatgaccagtggaaccaaatttacattggcattggagaccacggaatcgacaatgggtgaacaaaaaatgattccgatttaaatcgtttcattttttttgttttagtcttctcgacgcttcccctgggccgagtggtcagcagcagaaatgaatgaattaattaaa

SEQ ID NO: 84234 - DNA, 2451 bp, Heterodera glycines
atttttaaagctaacaataagcatatctcaattatccgatggcaaaggaaattaaatttctataaaaatttaacaggagttaatttattagaaaatccatcaaaaaataatcggcttctcctcgacctattcaaacagctgacagtttgccaagttctttttaaaggaggcactgaagcaagagcccagctgtgaggttgaacccgcagaaaaggacgacgtggcatgcattttgtacacaagcggaaccacgggaagaccaaaaggtacaaatattctttaggttttttctagagtagaccgggatctggtactgaaagacgggacaactgagttcctaagtcccggtttttcaacccgaaaaggtcccggtccaggttttgcccaaaattcctggtcccgctctactctagttttttctaatgcaaaaatcccagaatttttcttattcagtaaaaaaaaattacgtattttttcaaaagatgtccaaaaaattcctagagaaaaaatgttatctaaaaataaatctaaaaaaactataaacattgccaatatgtgcaaaatccaattatacaaaaaaattccaaattttaacaattgaaaaggtgccatggtcactcacggcggtttggtggccaatgccgagacgtgcactgacatttggcacttcagcgaaaatgagtgaacagaatgccaaaattttatttaataaattaaattattttaaaaaatacagtattaatttgcacgttttgcccttctaccacatccacggcctgttcatcagcttcaactgcacgctaatgtccaagtcgagttgcattttcttgcccaaattcgacgtggacgaaacaattgcgtatttgcccaaatcgaccgcgatgatgggcgtgccgacattttacgcgtcggatttttttaaaatttttttttagtattttttctagacacatttagaaaaaagtaaatgctttttcatcatttttaaaaatttcccaaaacttgcggtttatctcccgtgtaaaaaatttttcgagggacaattggttaattttttgattggtttttgcccatttttagtcggatggtcgaacacgcgggactgaatcgggccgcggtgaaaaacatgcgcgtgttcatcagcggctccgcgcaactaacgccccaagtgtttgagaaattcgagacgatgaccggcatgcgcattttggaacgctatgggtgaatttactaaaattttaaaataatgcgtgtgcttaatttatacatatgacagaatgacggaaacattggtgtccacatcgaacccgtacgagccgattaatgccagaacttcgggctcagttggccaaccagtgaagggggttcaggtaaatgttgacaaaagcagaaaaaatgacaattttcaatttaatttcaaatttaaaggcccgaataaacgtggacggagtcattgaggtgaaaagtccgagtctgttcaacgggtatctgaacctgccggagaagaccaagcaggaattcacagcggacggcttcttcatcaccggcgacatgggcgaaattgaccaaaacggtgaagtttatttattattatattaaattttattatttttgaattaattaataatggagaaagaaatgaatttagttaatgtatgaggagaaaataccaatgaaaattcgtaaaaagttaatgaattttttaaaacgattgaatgtttaagtgcctttgtcacaccccaaagttttggaaaattaaaaaaattatttaaggatttaaagtataaatttctgttgactttttctgctcccataaatgatttgttcgtgtaattataaaacttaattgtttgtttgttttttaattaggcttcgtttggatcaaagggcgccaaaaggatttgatcattacggggggactgaatgtttacccgccggaagtggaggacgtggtgaccaacattttcggcgaaaagctgaaggaatgcgcaattattggtgagaaataaattattattaatttcgtaaaaattcttttttaaatttaaatccaaatttattaatttccttaactttttactaactcagaaaaagtacatttgttttctaaatgccaatttaaatgagtaaaatcatttttttattttcattttactaattatgccgtatttccgaattctgtcgttggcattctcttccttaaaaggtgttccgcaccccgactttggcgaggcggtcgtcgccgtctgcgaaccttccgatgccttcgcagaaaagctcagcggcgttgcgcaccaattgacggacgatgagaagagtgccttccgtcaaacattggcaccctacaaaattccaaaggctgtccaatatatgccgttgccacgcaatcaccttggtcaatcacaataatatttaataaattagatggacatttgagattggactaggtcc

SEQ ID NO: 84235 - DNA, 1279 bp, Heterodera glycines
atgttgaatgcttcggatgtgttcgagtcgatgttccgttttgatggcgaaaacgcaaaggaaaaaagtaaaaaaaaaaattggaaaatcctttcaaaataaaaaaaaattaacgagcatctcaacacttttggcacattgttcggctgagcagtgaaaagccatttggccaatgtttgtccatccgacgccatggcactatcatccgtcggaaattcagtgaagatatcgccggcatataaacagacaaagcgaagtgatggacattcgcagaaacggcggaaataatccgtaaacgcaatgccataaatgtttttaactacataaaaatgaatagaaaggactgattgaatttatttatagtcagtcgtcaattttacgatataatgattgatgcatttgaatccgatgactttgcgtggcaattgaatttgcggaattggcaatcgtttccaatagttattggcaatttccattttgttggtgccattttctccaatgttgggccaaattcgaataaattccaatgtccatttgcgcgtcttgaagtttatatccatatttttgacatccctactaatgattgtgacttagatttaaatggattaaaagctagagtttaagacaggagaggccaaactaactaaagaataacaattggtcacctatttacatacctaacataagaaaaaagagaaaagatcctgagaaattagcaacgatttaaataattaatttaatttcaaaatgaaatgaaaattgctcaattttaagtatcgcttgctaccccataaattgtttataaattattaatcgcgaatttaatgccaatctttccttctcaatgtggctgcttataccttaatttttcctacagcattttgtgttatttggcatatgatttgaacgaatcgctttcaatcctcctctgccattgttaagtgtgtgttttttaatcacttgtacaattacaaattttgcccattttttggcttcactttatgcaattcatctgtcgttgattcggcgctgatcagccaggcgacttatcatcactgatcactgatcgaaggatcaagttttttggtgagagggcaccgaaaatgagcgtcgtttttttgatttcatttacgaattaattatttttaaatttgttataaatcatctaccgatcatcctaattgctgcattttatcacaaagtaatatgatattaaaaactaattgttcataagttatttttattaaatgaaataattacatttaaaattaccttttca

SEQ ID NO: 84236 - DNA, 1118 bp, Heterodera glycines
cgatgcttcttcttcgctctgtccctcttctgtccgcttgcctttccttctttggcttccttttgccgcctcccattggtgcataaaaagagcaaatttcggcaaaaaacactttcattcccaatttcttagtcggcctgcaatgcaagcagtaccccgagctggagccggggacaaagttcagcaccgaaccaaaggaagtggactgtgaagggaaaaacgacatctgcacggtcacgaactgcaaggacgggtcgaatggtcgacaaaaattaaaataataaatttgaatataattttaaattgctttttttgagtcgccatcccatggtacacacacggcgactgtgacattgagagtcgctttagctgcgacaaattgggcgcacaatgcacggccaaaggtggcactttttgttgccacacatgcaaagaagacctgtgcaatacggaggacatttggtaaaaaagtgaagtgaccaattaatgtattaccgagaaaaacagtcgaaaatgccattgtgaccggcaaccgaacatttatttatgtggggaaagggtaattttaaatggaacgaaagttaatgatcagcaattagtgagaatgggaggaagctgaccgcttacgtcatccaatcttttttgaccgttttaatgtaaaaattgaataattagtaatgcattcattcttaataaaccgagagcataaggaatataaattcgagatgtttccaaactatttttgagtcctaacaccgctgcgatgcgtgccggacagcaggtgatcgcacttgtggtgccgttgttggtcgctgtgtttgcgatccatgccgccaaaagtttaattaccttattttgtactaattgaatttttgtcccttttcatcgaagtcggcttttgagaatggacattggacgacgcttttgctgcgcaagaacaaacagtgccaaaattttgagaaagtaccaaaaaaatgtgaccaatttttaagggtttaataattattacaatttatatatgtatcatttatgttatttattgattattatttttgtaaaaagtgtttattttttgcataccttaagaattgtaaattaaaaggtttcactcatttgca

SEQ ID NO: 84237 - DNA, 683 bp, Heterodera glycines
atggcattttcgactgtttttctcggtaatacattaattggtcacttcacttttttaccaaatgtcctccgtattgcacaggtcttctttgcatgtgtggcaacaaaaagtgccacctttggccgtgcattgtgcgcccaatttgtcgcagctaaagcgactctcaatgtcacagtcgccgtgtgtgtaccatgggatggcgactcaaaaaaagcaatttaaaattatattcaaatttattattttaatttttgtcgaccattcgacccgtccttgcagttcgtgaccgtgcagatgtcgtttttcccttcacagtccacttcctttggttcggtgctgaactttgtccccggctccagctcggggtactgcttgcattgcaggccgactaagaaattgggaatgaaagtgttttttgccgaaatttgctctttttatgcaccaatgggaggcggcaaaaggaagccaaagaaggaaaggcaagcggacagaagagggacagagcgaagaagaagcatcgtaatcggcggacaagcaaaagattggaatggggggagtggctttgaactgtctaaatgaattaaattaagcgattaatatgcttaacactcgtcagatggcaattggtgaggggaataagcatttttattcctttccgtatgatcacgatgcattttaataaa

SEQ ID NO: 84238 - DNA, 2211 bp, Heterodera glycines
aattagaagagaaaaatgatcatgatgaagttaaagagtttattgatgcgcggtatgtttgcccacaagaagcagtttggagaatttttgaattgcctatatatgatagaagccattgtattatgtctttgcctgtacacctacaaggtgaacatatttgttattttgacgagaatatggaagaagagattcgtgaaagaattgcgaatggttctgagttgatggcatattttgaattgaataagacaaatgttttggcaaaaaatttattttatcaccagatacctgaaaagttttgttttaagaaaggaaaatggacagagagaaagacatattttaacacaattggccgaatggtgaaggtgtcaccggctgagccggaacgataccacctgaggctgttgttgttaaatgtgaagggagcatgctcctatgatgatttgaaatcagtttttgatactaatggcaatgcaaaagtttgtgaaactttttcagccgcatgtttagaaagaggtttgattagaaatgatgaagagtggaaaagagcattagaagaagcagagagttttgagatgccatggaaattgagagagttttttgcattgattttagtccattgcaatccggccaaaccggaagagctttggaatatgtttaaagactcattgtctgaagattttagcaggaattttagaaaagaagtagcttatgctaaagcttatagagaaattgcacttagcattattaagactggaaaaacgcttgccgattttccaaccatggaacagataaatgttgatgatgatgttgaacaagtgtttgacctagccgaagaattggatttgggacaaagaagttatgctttgatgtatgatgaacaaaggaagattagtgatgaaattttgcatagagtatggaatcctataaatgaacctgcgttctactttcttagtggaccgggtggaactggaaagacacatgtgaacaagacaattgtacatatgctgagaggacagaagaaaaaagtttgtacaatggcttttactggcatcgcagcaactttgctgcctgctgggagaacattgcacaatagatttggactgactttggatatgagtaattagagtattagtccaagctcaaaagcttggcaagaattgaaagaaacagatttgtttatttgtgatgaagcgcctatgataaataagcgcgcaatgagaactttggatgagaaattgaaagagataatgaataatggaattgcatttggtggtaaagttatgctttggacgggagactttcgtcaaacccttccaattcagaaacatgccacgagagctgagatggttagttcgaccataaagagaagtgagtactggaggttggctaaaagatataaattgacgaagaatatgagagctcttgcaacagagcaagaatttgcgagagatttgttagagattggcagtggaaaatggaataatgaaaatgatgagataattttgcccgagaattgtattagcaatggcgatttagcagaagagatttttggtcaatgcattgtcttagaaaattggaatgaaatggccagaagtgccattttagcaccgaagaatgttgatgttagtgaaatgaacaatagagttttggatatgttgcctggagaagaagttgtgtatacgagcatagacttagctcaagatgagaatagacaaagagcagatgattatttggatgagtatttgaatgctttgaacccttcggggtttccgcggcataagttgagactgaagaaaaatgctattgttttgttaatgcgtaatttgaatatagaaatgggtctttgtaatggtgcgagaatgaaagtcgagcaattgcaaccaaatttggttgtgtgtcagattttgactggagacaaggcaggtcagactgtgtacattcctcggatcacgctttgctgttctgaagattacccttttgacctgcataggcaccaattcccgttggtgttagcttttgcaattacaattaataaggctcaaggtcaaacccttgagcaagttggaattgatctgaggaaagatgtgtttagccatggacaattgtatgtggctctttcgagagcaagggcttggaataagttgagaattagattagatgatggaaatttagagagaaaggtaaagaaatgttgtgtacagagagttatta

SEQ ID NO: 84239 - DNA, 854 bp, Heterodera glycines
ctacattgaccattccgtcattgaatttctccgttcaaacaagcacatttgggacagaagtggcaccaaattggagttgactgtgtattcatacaaaactaatgatgtccagcagatttgggatgctttgaccagtgaaatttggccaatttttgcaacaaacattcgcaatttgggctttaccagtgccaatggtttggacaattttcgtcgccacacttcaccgacaattctcaccgatctcaatcatctgaattcaatcaattccaattttctgttgcctgatgcaattgctgatgatggaccggatgcaactgctggccaagtgttgtccaaatggctgcacattccaacaactgatggtcaaccaaagcgattgtattgccatggttattatgatgaatcaaatttggaatggatcaacaatttgaaggaggtggccggtcatattttgactgatttgattgccttcgatttgcgttttctttttgtttaggcatttccccgtgccacttcttccgccagtttcattattcgaattgatcgtgagagagcaatgtcaaatgctgagccatttgaattggagaacgaacgaaccaaggaaaagctgacattggagaaagagccacgttctgctggttattggctgttgaagcgatgcccaattagtgaaaaggcggcggcgattcaatttgaaaattgggatgccaatttgaacaaaatcaaatttcatttgtggggtgacatcaacaaattcattgggtgagcagcgacagcaatttttgattttgtcgaaaaaatatattaattttaggccattatcgccaccaacggaagaaaaagcggacgaatga

SEQ ID NO: 84240 - DNA, 247 bp, Heterodera glycines
atgcatttcattttgtccaatactgtgatcactgatcagtcacttcttcaggctgatcgtgagtgatcaaaactgtagcaccaccctatgtgatttttggctgtgctaacaattgttcatcatggtaaaaaatgcacccaaataatatgattaatcatatacataatatatatacagactatcctattaccatttacagtagtttagcactaaaaatgttaatgtgattgaatgttgtctttttcaa

SEQ ID NO: 84241 - DNA, 348 bp, Heterodera glycines
accgacggctgggccgagatggtcaaggagcacccgcgactcgtcaccgaggtggtcgccgccatgtcccaggagcagtcgcgcctctgtgagtgttgttttgttggcattggcattggtggtgtccctcctccgccctgctccaaatcgtcggcttctcctcctcctccgcatcatcagcaatttccgattgttgacggtggtggtggtgaacacccaattgctgctgttcccggtggtgttctcaacacatttttgttgtccattttctacgcgtttttcattttgttttgctttttccacgccctgttcaccaccctgtggcacaaatttggcggtgttgcttaa

SEQ ID NO: 84242 - DNA, 603 bp, Heterodera glycines
aaaacaaaatgaaaaacgcgtagaaaatggacaacaaaaatgtgttgagaacaccaccgggaacagcagcaattgggtgttcaccaccaccaccgtcaacaatcggaaattgctgatgatgcggaggaggaggagaagccgacgatttggagcagggcggaggagggacaccaccaatgccaatgccaacaaaacaacactcacagaggcgcgactgctcctgggacatggcggcgaccacctcggtgacgagtcgcgggtgctccttgaccatctcggcccagccgtcggtctaaaaattttaaagaaatccatgggaaattggaaaggtgctaggtcgttatttaaaaaaccatcattatgattttatgagccccggggtcgtttgggccccaacccaaaaatagaaaaaggtacttttttaaaaattaagattctaaaaactaagcctgagggatccctcgccacttgtacactttctgtcgtcttctccgctagatgggaaggaagaattaagtgctcgacagaactcaattgacattcggatcagtgaaaacggaaacggcgacgggcgaacaattaaaaaatgcttaatcattttat

SEQ ID NO: 84243 - DNA, 1636 bp, Heterodera glycines
atgtccaactctaacatttatacaaccttcagaaacccaaattattatttttttgctttaaatcaacagccacccgaggacactgacatggctgatctgtgcggaactccgatgcgcccatcggacagctggttggtagacgaactaatataaattcatcggaaatttaattttttgggagttgaaaattgcaaaatttcacattgactcccctgggtcccccagaatttgtatgaaaactgaaattttaacatgtccaattcactcccaatcctaagctgcacatggttattgaaaatttatctaggtattcgggatctttatggaacgtgaaattggcccgaatttgcggaaaatttcacgaaaatcccataaaaaaaattttccgatgctttcattgcgaaactgtctaaatttttttttcggtttccatggactaattgcataacattttcaggtcctccacggaagttcgaagtctccaacacactcacgtgtgtaagttttaccaacaaaaaaggaaaatatctaggtatttcgaaaataaatccaaattttttagggaccatcaagggcttcggtcaatgcgaagtgcgctacttggaaacgtccgtccgcatcaaagactcggtttgccatcactcttcatccttcgtacatctcgacttcacaaatcattcaaaaaatctatgttttctttttcgccaattaaaatatcggaaacctcggaatttaatcggcagcggctcgtcctccagttctctcaaccattctcaaccatcaaattttcttctctaatttttcgggtgtatcttcggtggcccggaccagtattagtgttcagaacggaaccgggacgggatttacggtgtaaaattccaatttcggaacccggattcaggggaaaaatctcgttacgggccccgcttccgtctagactttcaccctctatttctgagtggcgccgaaattccgatctccgacattttcggggatcggcacggccgatttctcaattttttttgggccttatctcccattttccagtgtacaatatcgcatgttacttctccattttcttttacagcacacgtcaagcggttgctcgtcccagtccaattcgttggttggcggcagtgccggcggcggactgatgggcggcggtgccgcggcagcggctgccgctgcggcggacaacgcgaactatttgcagttcaaaatacgtctccatccccagggcaacaaggagtcgaacaaggacttctgcttctttcaggttcatttccaaacaaaaattttcaaaaaaaaacaaatttttttttgaaaaattagtttttggtatttaaaaaaaataccgcgggaagcgatgccaggagtaaatgaagtgcgcctggaggggctcctcgtacatatccagtgagtgagccaaggggatatatttaatcctccacacacttcgttttctcaggtctccctctccacccattgaaaaaaatttttttttttttttttgaaaaatttactcgtaggaaaaccgcgttcaaatttaagaatttgttattctaaatgaaataatacctaattgtacatgtacgctcttttctgcttaaagttgaaatttttttgtttaaataaa

SEQ ID NO: 84244 - DNA, 665 bp, Heterodera glycines
atgtcaaatgctgagccatttgaattggtgaacgaacgaaccaaggaaaagctgacattggagaaagagccacgttataatgttgttaatttgttgttgaagcgatacccaattgatgaaaaggcggcgattcaatgggaaaacgacgaaaaattggacgacaaattgaactatgtgcaaattgagctgatgcgtggcagtcgttccattgggtgagcagcaacaaccaacggaatttgattttgttaaaaatgtaaacacttaattttaggccattgtctccaccgtcaacagaagaaaaagcgggtcaaagcaaccaaaatctcgtctgagtgcgcggaagtgaattaattatatttgagaaatggtcgacgatctcacaaattacaaatggatttgatgcttattttctctcaaaaatgcttttgttgcttcttcaacatttgcttgttttattagaatttttgttcaatatacttgagaaatggtcgatcatttttgagttggtcaattggaatttggataaatttttatcggaggccccaaaactcaaaattgctcaaaaccattttattggttttcttagtcggtgatttgataattggccggaatagagatgccagccagattcatgatcagaatggttacgcgttgtaagcattaaa

SEQ ID NO: 84245 - DNA, 120 bp, Heterodera glycines
atgctaacaactagagatcgacctggacctggatccaggcctggatttttcctggatccaggtccaggccatttttcggcaacctggatttttcctggacctggattttcctggattttt

SEQ ID NO: 84246 - DNA, 499 bp, Heterodera glycines
atgaaaggtcggacgaatatgccgcttgaagcagtgctggcacttgtccatatggtcaaggctcgccagcaagaattacgcaatcacacgaaggtggggggggggggatggcacaaattcaacaaaaaaagcattaatttataatattacatttattttcataattaatataattatttcatttaattttcattattattttgtgttaaaaatattatttaattaatttaattttaaaacattaatttattataattaaagttgtacgggtctgggaattttggaaaaaccgggacttgccaggagggccagaaaggccgggagtcccggcccgggactggcgcctgaattttcaaccgggacggggtaccgggataaagtgggaattttacaaggaaaaaatccaaaatttaaatttaatattttttaggtgaaatattataaaattaaactttcctattgtttttcatttcataaaagctcaaaaattaataattta

SEQ ID NO: 84247 - DNA, 699 bp, Heterodera glycines
gtgctcggtgatgctcagaattggcccgtcgcttttgccttctccggccttcccgcttttattctttgctgtgtgctcccattttgtcccgaaagtcccaaagtaagcttattcattaaattatattttttttcctaattacctccttcccctttcatttaagttcactttgttgtcccgtcgcgaccgcgtcggcacattggacacattggcacggctggtcaatgttcacgagggacagaccatgttcgaagcattgcaacgcgaaggacagagcacacaaacattgacagtggcggacggagtgagtgatttgaggggaaaagcgaaaggaatgcactgattgatcgaacactgataaagcctctttcgcagaacatcgatcagtccagcgcaatgtctgccgcctcaatctgccgactttttcgatcgacggaacttcggatggcatttctgatcagcatgtgggtgatggttgcccaacagatgaccggttgtgctgccgtttttgcctattccaccgatatgtttctgaatgccggattggaaccgtaagaaatgcaaaaaaaaaatgggaagaggcattagaatttatatttcaggtcaatcgcgcgttacagcactttggcaatcggaattatgtactttctattcgcttgcagctccgttttcttcatcgaacgaaaaggtcgagtttaa

SEQ ID NO: 84248 - DNA, 1195 bp, Heterodera glycines
atgaagcgagttatggcagatcaaataaaaaatacaaaaaaggcattttccagtgtaaattttgaaatagcgcgcaaaaatttacgccaaatgcgctatttggcgttatgagtaattttgtctaacactgggcttgacccatagtgctcgctctctcttctctctctcctactctctctcttacgctcttttctctgtgtctcctccctctgtttaaatttatatttgtcgttttttctgtgttctcttccttttaatttggtccgttttgattttttaacttccgtttcgtacacaaatctctgttgactttaatcttctgaataaatttgtacataaaaatggttcttttttaacagcaaaatcacttctgatgtctttaaataattcaaatttgttggggaaacggaaggtggcgttgaatgagcgcagaaaaatttacatccaacgcgactacagccaagcattagttgtgaaattcagcacagactttcctgaagagctcgaacattacgtaaatgtttaacagtttggcccttcgtttgattggttattttcagattgacagggatatttggctgaattttgtcactgatctcaaccaaatttacgcggaggcggagaaactgacggcgattgcttacctcgagaacattctcggcctggtgacatgccatctttccatgctgtgcttcaaatcattgtggaagcggaagttggaggaagcgcaggcacttttatacgaaaccaaccaacagaactttgtcaggaacggagtctacgtttgcaaccccttggagaaggggttcagagtggtaggtcttacaaacaaatacaaaaacttgtttgaatattagtaaatttttaaaactttaaattgtcgaattataaaattattctatttatattttttggaacattaatagtattagtataggggagcagttcgtttacctcaccccgccacgaatcaaaattcttttttgtaggatttggcgtggagtttatttttcaatttgatgtccagctgatttaattttggaaaatctttgtgcaatattttgaaaaagtaaaattttgggactgtatttggtaagccaagatttagtttttcttccagttattttatctctgcgtaattttatttttattttaggcgctacttacaaaatggccacttttgaattttattaaa

SEQ ID NO: 84249 - DNA, 243 bp, Heterodera glycines
ccccacaaagtgtccaagccacgaaatgtccaaaagagtaaaaacccacgaaatgtccaaaatttttcaaaatttataaaaacaaaatgagtttaatttaggatttttagggttttcggggtcgctgaatacgaatataccctttatattaccccttgcctaaccttaggcccatctgaataataaaaaactcaaattcgagacttggacatttcgtgggctggacattttgtgggtcagcgg

SEQ ID NO: 84250 - DNA, 927 bp, Heterodera glycines
atgcatcttctgaccaattctataagcagccaatgttttattttcttgcacatttcaggtattttttttgaaatcccataaaatgcattgttttaaaattgtttgattttaatttttagtcattttgtgccacgaaattcttccgttctttcctccatccttttcgctgcaaatggcacccaattagaggaccgtccaattgaaaatattcattcatacagtaattaacacttttttaatttaaataatttatttttaaaaatatattttctaggagattttgtcctattgaatggtacaacaattggctaccaagaacaaattgaacatgtagcatttgaaacgatcggcggtaattagtgatcgaaaagtcgcttaattgatttttcggattaattacgttgaaaaaattaatatttttattttaaaataaaattattccttttaaggcaatcgtgtgttggtactgatcaatccaaaagcaaatcccatcaaagtgtccgtggtcgatggccaacggcggtggaccattccgatgagtgccgagtcaattgtcagtgccatttggaaagcaaaataaatccaaaacgcaatataacttgattatttgtaatttaaatgtatttaaattatcaaattttattttttatatttggccataaaattcttttacaacaattagcaattcgtataaaaatgctaattaattaaacaagtgaattaattagtgagctgatgaggttagaaatatatgtaatataaatgaataagcaaacataagacgtggaaaaagtgttaattaggcataaacaattaatattagaaatttttgatcgagagaacggcacttggaaaaataattaatgaacttaaaataagagggcaccattaattagttgaaaattaatgctaaaataggtgaataaa

SEQ ID NO: 84251 - DNA, 287 bp, Heterodera glycines
atgtgccgtgcgctgatcgcccatggtgtcaacatcgaattggggacggactctggcgaatcgacgctgctctgcgcatgtttcgaaggccgttttgagattggtgagtcaaatgcatggatgatgctgccgtgtaattattgccaatgttttcccatttttcagtcactcttctcgtcgagaatggcgccaacgttaatctcgcggacagcgacggaatgacgccactaattgtcacttgttactttaccggaaaggttgtgaacaagttgttgcataatttgtga

SEQ ID NO: 84252 - DNA, 133 bp, Heterodera glycines
gacagcgcgtgaacgaaggggcggaagaccaactcgccgcagcagtcgactcagtgggcgacggacgatgagagaaagggaacgaacggacagagaaaagaaacaattcgtccgtctgatatgttttaattga

SEQ ID NO: 84253 - DNA, 1925 bp, Heterodera glycines
atgcattcattgtcaaggcaaaatgcgatcgatgcgcgtgttttattcggacgcggaacggacaagcggacaattggtgatcgccagcctcgactcgcagtacaaaatattccacttccatcacacggggttggacagactcaccgaactgttcgaacgatggaacgccgtaaaggcaaagtcagcgatcggaaacgaagtgaaagaggggcaaatggaatgtgcaaaggaaaaccgaataatgaacgcacatttcagtcgccacacacaaatggccaagaacggcatttgctgatcagtcccgggactgagttggccaggacggagttggacccggaggatggcctttacgagcgattgggctgggaaatgtggcggtcgtatgtgagcgcggatgggagtgtggaggacggattcaccatcagaaaggcaaataatgagggcgggggggggggggggcgagggttcgctcccaaagcaactgactgtccatttgccaatgccaactgtggcaatgaatggtgcattttgccctaatgagtgcccttctccgcccgttcagaccattcatttctcgtccattgagccgacccttcgcaaagaattgtggccattttttgttgcgcgtttacccatggaattcgacgacggaacaacgcgaaaacatccgaaacgaaatgtttgtgcaataccaaaagctgaaggggcagcgaatgcgcaaaacgaaaggcgaaacgacgcaccaaaaagaaaaagagaaacagcagcaaatggcgggggtggaacaaagcatagtgaaggacgtgttgaggacggacagacgcaactcattctttgcgggggaagaaaaccccaatttggaaacgatgaagtgaggggaaaagggggggagggcaatggggggaaggcgaattcggcattccaaactttgcaaaattggcatgatgaggagggggaaaagtggcggggattataccaaacaaaacacactcatttgtcaggtccatccttctcacttatgctacaaaaaatccggagatcggctacatccaggttggcacttctgccaaggctcttgtgttgtcactttatcttgtgccattgaaaatgccttcatttggccccttttctccccagggaatgtccgatttgttggccccacttttgtgcactttgcaagacgagccgttgacctattggtgttttgtgcatctgattgagcaaacgctgttccgaccttccaatggtggagaacagccttcggaaatggaagtccaattggacttcatccgtgagctgcttcgtctgttcgtgcccgacttccatgcacaccttgccaagctcggcggggacgcgcccggcctgatgttcgtccaccggtggattctgctcttcttcaagcgggagtttccctcccgcgactccttacaaatttgggaggtttcgaatatacttttggatattttctaaaaatatccgctccaaggcatgctggtcacgctatcgcaccaactacttccatctgttcattgcgtgtgccgtcgtttccatttatgggcccgacgttgtggaccaaaatctgccacatgacgaaatcctcttttacttctcttcgctgtccatgcacatggatgcccatctcatcctgcgcaaggcgagtgccatttcgaaatgaaggcttttcctcccaagcttttcatcttttctgttccatgcctcccatttgactgcttcaggccagaggtcttctctaccaattccaccgacttccccgcattccgtgcactttggccggcctttgttcgtacgagtcggactcggagcaatggacttcccacattgaaccccacgggcaattcgaatgctcacaaaagcatggagagaatggggaggagcagtgcccattcgcagtcggattcatttga

SEQ ID NO: 84254 - DNA, 171 bp, Heterodera glycines
gggtggaggaaaccctttacaccatcagcccggaaggatcgtcgtcttcttagaagagggaaagaatgatgttggtcattgatgtcatagtgaaagatgaaaaccggagaaattcccttctgatcccaacaaatccaatggaacaattttgatggaaattgaaaaagtgtc

SEQ ID NO: 84255 - DNA, 173 bp, Heterodera glycines
atgaaaataagtgttaaggggttttttgggtcgctgatcacgaatagagcacccatttttgccaatttcgaaaccctgactccaggaaatccaagtccaggtcgacatggaatccaagtccaggtccaggcttttttcaaaataccgagcaatgataacgacatagcaccggg

SEQ ID NO: 84256 - DNA, 736 bp, Heterodera glycines
atgaaatctgtccagccaaataacattctaatatttgaaagaaaaatagttgaagccgaaacatttgaaaccaagaaattgaaagcgctttatttttacatgcaattatttcgaaaaataattggacaattggaaaccccgtaccataaaaaatacatcaccaatgattatgtaacaaattgaaatattaaattaaaattactttaatttatttaagattaatcaatgccaaaaagaaagaaacttcattgtgttatgggtccgcaaaacattggaaaatgtttctgaaaattttgatgtgattgccaatggaccaaatattaatgattcctgtcaaaaggtcgtatttttaaaaagagaaaatgtatttaaattaatttatgtattttttataattatgaaaataaattaatttcagctttttgccgcaaataaactgaataaatttgaaacgataaaagaaatcattgtgttggcatattttggcatccgacaaacattggcactgatttatgaacagcagctagaaaatgttttaatcatgtcaaagcaaagtttggccgatttgttaaatgaaacgacaaaaaatgatttggcatgtttattgttgagccataaagaatcgctgaatttagagcaaattgtcaagaacatttccattttgaaaaacgagtaagggaaaggatttaaaaaaagccatttaaaatgaatattttttaacaaatagttaaataaa

SEQ ID NO: 84257 - DNA, 532 bp, Heterodera glycines
ggacaattcgtcattaatgtgccattcgcaaaatttgcaacaaaatcaattcatccccaattataaacattttccgtcattatcatcatcatcatcattatcactaccatcatcatcatcagaggctacaatgtttggagaggcacgtgaaaataaaattgaaaatgacatggaaattttaaattctaattggtcaattgtacaacaaaaaatgaccgagaaaagcaatgattatgaaaatgcaaacgaaaggcagcagaaattggaagaacaaatgggaaacagcgcattagacgagcagcaaatggaagcacagcaagccaaaaaacttttatgtattaaattttacaaatataatttaattttaaatggaatagagatgcatttttatgagcactttgattttctaaaaatgtgctctggaaaaagtggcacaaaatggatgtataaccaacaacttgagaccggcgggatcgggacttcccgcgagatttttgcgggaatctcgatcccgtgctttttccttgcgtga

SEQ ID NO: 84258 - DNA, 1667 bp, Heterodera glycines
  unsure (1)..(1667): unsure at all n locations
cataatcgtggcaatcagaacaacgggcaatgtgtactcaatggaggcggtcgaagagctgaatttgaagcggaatcatctgaaggatttgttgacggacacgcccttccagaaaaaagttccataataaggaaaaagctttattttttcaattacccttttcaggacattattacactgcaggacccgcaggacttggacaagttcaacatcgaacagttttaccatgtccaattcgacaccaaaacaaaggcacaaattgcggaggaaaagcgcgcgatgcaaagcccaaattactttttgaaccgactgaacaacgaggcaaaagaggcactgcaacagttggagaagcaatatgtcaaggaggtggaaattatttaacaaatggaatgagtcacgtttaaatgcatttagggaacgaaaaaggcggatgatcaaacggcggacgaagtgaacgccgcccatttttcgcagggaaaagtcgcggccggactcacttcgacaacgatggaaccggtgactctgaacaaagcggcggtgttggaagaagacgtggtcaagttcgtttgtccaaaacattttgacaattgtatggcactgactttcgtatgttttttcaaggtattcacgcgtaacaaagaatggttatgtacgaattgtgacgaaccacggaccccttaacttggaattgttctgccgacacgcgccgcgcgcgtgcgaaaactttattgtgcactgccgcaatggatattttaatggcacgaaattctatcggctgatcaaaggatttattgtaagttgtcatatctctcccaatggaaaatcgttgaaatttcctttacttttttgttgtagatttttcaaattttaggataaaaacattcagacaatcaagaattttattgttgtgttgtaacaattattgcacagtttttagttaacaaatttaaagattgtctcgagctgttttttgaaatttttcgggtgaatttttaaaaacaataaattgacatattgggnggggggggatgggcttttatattngtaggtgaaaaaaagctgattgtgangtcattcgatgtgggtttcttttggtactgggtttaattacccgggacacttgttttaacactgacacaaaacgggtttaaattttctcaataattttgaaagctgatcaaaacttgtaagttataacacaaaaacagctttttcttcaacccttatagagatttttggacaacaactcaataatttacttggtaaaatttttatattcagctccaaggcggagatccgaccggaacaggcaaaggcggtgagtccatctggggcaaaacgttcaaggacgagatccagggcacgtacaaacatggcgagcgtgggatgttgagtatggccaaccgcggaagcgacactaacaattcccaattgtaagtgcagaagagaaccatttgcattttccaagagaatacagtttcatcactttcgccgcgtgccctcacctcgacggaaaacacacggtgttcggccgtttggtcggcggtgcgcaaacgttgtgcaatattgagaatttggagacagacgaagaggaccaaccgttgcggactgtgctgttcatgcaagccgaagtatttgtggacccatttgatgaggcaatggaaaaa

SEQ ID NO: 84259 - DNA, 2287 bp, Heterodera glycines
atgtacggaatggtcatatcaaaagaatcaccgatgaaggtgaattaaaaacttattattgaatttattaatttcccatttattattagacattcaatcctccgttatcgaactgcttggaaacaatgtcaggtgggacattgaacaatgctcacatacattattatcattaatattttaagcacaactttcatcacttgccctctcgaccctaagaaaaatcttggaattaaattgccttattttgtgatgactgtcaagaacctgaacaaatatttcacttttgaagttcaggtcgtaaaagctgaaatacctttgttaactaaaaatcgtttataaaaatgatttaagattttggacgacaaaggcatgaagcgacgctttcgcgcttctaacttccaatcgacgacccgcgtgaagcctttcatttgtacgatgccactaagactggacgagggatggaatcaagttcagttcaatctcgccgatttcgtcaaacgagcttacggcagcacttatgtggaaacactccgaatacaagtatatttttcaaaatatatcatttgtctaacaaccagcattatttcctacagatccatgcaaattgtcgtttgcgtcgtgtttattttgctgatcgcctttatactgaggatgagttgccggtggaattcaagctgtacttgccggttcggcatagccaaagcgggaggagaacgacagaacgccagcaagaagggacttccgcgttcatcacctgatctcggattgtaaatctttttgtgtactattcgttcttttaccctccgcaccccttggtccttaattttcgaaaaatacaataataaatatcctgcttctacaatttaaaaaaaattggtatgtgcgccttcagataattgatacaatttcagaatatcttgaggtggggaaggggtgaaaccaaaaaagaacaatattttctgtgtctatttaattattttttggataaatcttttcataaaaattcggcttgtttcattatggttaataaaaatgtccctataattctaattaataaaatgtcatttgctttcttaattttacttttggcctttgttgatggtttctctcagcgattgccaagctgtcgtttttgccggaggtcgtggaagtcgaatgccgtctttgaccaatcaaatgccgaaggcgttgttgcccatggccaatatgccactttattggttttcgcttaatttacttcgactgaatcgcgtcagaggtcaaacaatgcctttaggctttccttaatggttttccgttcattttgatgtactcattttcttcatcagattgccttttgattgttcccctggggcaaaaattgcaaattgaaaatgcgctgaaaacggacggcggtggacgatggccaacacttaagggaatggacatcgaagtggtggccattgacagtttggaggaggacgtggatgactggggaacagcggacgtactcaaaagactgctcgggaaattgaaggcaaaagcaaatgggacgaataaaggcatttcctaataggggggtcaaaactaatttatgcatgtaaaaggagggggtaatgagtcaatcaatccaattaattaccatccttttagagtgatcacattttgttgattagcggtgacttggtcagtgatgtccggctgcgtgacatgttcaagcagtacatggagaacaacgctgtcctgtcctgtctgctcaccgattcggctttgggtgggcctatccccgggcctaaagatcgcgttaaaaagtgtaaatgatgggaaaagaagattggttgaattttgtatttttagacagagattttgtcattttgggtccgaacggacaattgctctttttggtggacgaggacgattttgcggaggaggaaggaatcccaatttcattgtttgacaggcactgtcataaaattgttattgttattgactctcacgtgacaaattcttctttcagatgccccaaggcaaaagcaaccgcaaaatataaggacgtgcatttgtacctcgtccaacggaaggcattggacattttgttatcaaaaaagtgattgcatttgtctagctttctcaattaggtattcctcgattttcaaggtcaaccgctgcttccttttcctctgtcaaagccgatttggtgccacggattgtgcagcgtgccaattgcttcgcttgggttcccacagagtcggacttcacaataattgctcagtgcaacaatgtcggctcatacttcgaagcgaataaa

SEQ ID NO: 84260 - DNA, 161 bp, Heterodera glycines
atggcggacgaattcctgggaatgccaaaggcgatggcaatagaagctgacggaagcagccatcttctctacggcaccacgccaataacaacgcccgcgcaagtggtgggagaatcagaagacggcaactgcgaattggacatttttgcggaccgacgatg

SEQ ID NO: 84261 - DNA, 699 bp, Heterodera glycines
tcactggtgccacttccctcgtgttcggttacgtgctgacaatgccttctttggtctatgcctttctgtggtaccatcgtccgctcagtctccaatattccttcttcgatttgctgtgtgcctttggctattccttggctccgttcattcccgtcaccgctctttggcttctcttcccatttacgttggctcggtggactttggcagtcagtgccgttgtactcaccggttcagttttggttggttttttaaatatttaatattttcgtgatttttctgttttaagatcctttcgttatggccaactgtcagagaagacccaaacagattagtgagcattttggatgacatatttgaacattctgcacaacaaaatattccatggcacaataaaattcatttccaaattttagaccgcttttggcttcgtttttgctgtctttttggcacacgctcttttggcactttgtttaaaagtaaatttgagtgttggggtgactgttcgttcttttattgtgaattttcaaggaattttttcttgacgaggccatttctcgccctgcccaaccaccggttccttttgactcgtcctctaaatttctcaccaccacgccgcaggtgccaacggcgtctttccacggtgaccacccaaacgcgttgaacaacaatgggactgccacaattgctgtggtcggatga

SEQ ID NO: 84262 - DNA, 48 bp, Heterodera glycines
aaactgatcagaagcgcaccaaactttgcagggatactgaaaggaaga

SEQ ID NO: 84263 - DNA, 811 bp, Heterodera glycines
taattaaatccattccttcgggggaccgtgccgggtgccgcggggtaagcagtgctggttcgtttcatcacggcaccgaaccttttggctagtcagcaatcgttgcttaacttgccagatcggacgggtgcgcatgattccactgttccaagcaccccaccaaaagcaaaacgatataaccaaaatataaggaaaaattttttaaaaaattttttctccatcttcctttttgatattaaagcatcagagtgctaaaattaagttgtaaataaaatttggtgcgctttagagcactttctgaaaaaaatatttatgaaacaaaaaaatcgattttttcaagtgtccatttggggtactcaaacatttatggggagcaaaaatccaacgcagaattaaagtacaggctatagggaagctactccggaaggattcggtctccccataaatctgggcgcatcggttcggggggactgccccgaaaacaaaaaaatcgattttttcaagtgtccgtttggggtactcaaacatttatggggagcaaaaatccaacgcagaattaaagtacagactatagggaagctattcccgaaggattcggtctccccataaatctgggcgcatcggttcggggggactgccccgaaaacaaaaaaatcgattttttcaagtgtccgtttggggtactcaaacatttatggggagcaaaaatccaacgcagaattaaagtacagactatagggaagctattcccgaaggattcggtctccccataaatctgggcgcatcggttcagggggactgccccgaaaac

SEQ ID NO: 84264 - DNA, 927 bp, Heterodera glycines
atgagtgatcaacaatttggaatgaccagactaaaaaaagctgccagctctgcgaaaagcagccgcccttgcagccctttccttacggcggcgttcttcaacgcggtacggccgtccaaagtaacagtattaattattaatttatagaataattaagtaaaattactattctataaaaattgtgatttatctttgaaataaataaaatacttttacttatcccaaaaattagatgataaataaaattttttaatattttgtgaaaatgtggaccggaaagaggtccgatcgatagtattgtcgaaaaaatactcaaaaaatgttacctagaaaaaacaaaaaaattgaaaatttctctgcaaaataacaattagaaaatacaattccaaaattacaatgtaaatgtattaatattgaaagaaataaaagaaagagagtagatattttatcttttcttttctttttcaagttatgaaataaaatcgcgcgttatagtaaaaaataaaatttaaagattttgaatataaaaaatttattcaaattaaaaaaagctttattgaaataaaatgtaatatttatttttttaaagtttatatttaatgcttgtagtaaatactagagaaataatctcgcaattatttaatatgtaaagtcgaagacaagctcgtgaagaagcgtaaaaagcggttgttcatctgggacaataataccaaatttctttagcaaagaaaaaatatgtaaaattaaataacataataaaagcaaaatttctgaaattatgtaaagaactttcaggcgacgaagacttgccgtacaaatatcttcccaacttcaacacgtctaaggattggattggggatgactgtccggagggcatcgtaatctacgcgtttgaaagaaaatttaaaaataatatagaaaaataaa

SEQ ID NO: 84265 - DNA, 1308 bp, Heterodera glycines
atgacgaatcgctccttattttttaccctttttattgccattatttggctgtgctttgaatgcgcaaatggcactggcaaagtgccaaaaaacattgacgagccttcttcagatgcaggtaaaaacagtttttttgaaatgataacataatcatcaaagacaaacgagacactgcaaatgaggaaaagcatcagcaggaagagacaaaaatggaaattggaaatactgtatggatgctcgaattttatttaagttttgtagaaagatagagcctgacgagacgctatcagtggaaaatttagctgaaatttttaaacaattttatacaggaatagccaattttttgtaaatgggttctaaccatatttaagcaaatgtccgacactaacagcaaagaaggcaaacaaataatcaatgccaatgaggaaaatcagaacaaagatgccaaaactgaaattggaaaaacggtagggatactcgggatccccagttcccgaattgggatatttttcgggggttaatttgagagaaacttgcgatttataaaaatgttttttctttcctttgccaaaaaagaatattgtattggcacctatttcccaatttttagcacctattttgggggtttttttttagataaacctgactattttggcagtttttagcacttataagccctggttatgaatttttaatggaataccggtaccttttttcaataccggcggtaccagtactaaccggtactaaagaatatagtgcgacattttgaacaaagcctggacctggattccgtgttggacctaaaaatccagatttgttatggctggatccagcctgagctttctccaggaaatccagattttcggtgcctaagaagtaaaattcaaattttgggtttttgccaccgaatttgccaaagggacggccaaggcaaattttttaaaatatattttctttctctgctgatcggtaatgaatttgatttttgattttttgttgttgttttttcctaggtcataaaaaaatttaagagatcttatttgtccttgtttttatggtgtgtgcttttaattcttcgccattattccttattgaaatgtaaaactaattaagattaattatgttttccaacaaaatgtttgggacgccaacgcttgtcacgtgaacctccaaatctccggtgacaatcgtgtgactgtcattaaaaagggaaacaaagaaagtaatttttgttcaaataataattatggccgtacgcttattcaagaaaaatcacaatatattcgcacataaaaatgcaataaa

SEQ ID NO: 84266 - DNA, 258 bp, Heterodera glycines
atgttccgttttgactcccaaaataaaaaaggggaaaatggtatgacaaatgaatttaatgaaattaagaaaaaaatttcccaaatattagctccctctaataagcccgtggaggtcactgatatcggagttgatgcgttcaagacaatgttggactttatttattccgatgatttgagtggactgaacggagacaatgcaatcaaagtgttttacgctggtaaattttgtggaataaaagtttatttaattaattaa

SEQ ID NO: 84267 - DNA, 1528 bp, Heterodera glycines
atttttatcattttttagatgttttgtaatatattattttctttaagagagggtaatttatttatttttttaattattattctaaatttccccttttcttaattaaaatgatttaaaattcaaaaccttatttgttccattttcactaataattaaattaattattttattaaacatttattttttaatttttatgataattttttcctaatgttaatctaagtttaatctcttatttttattattctaaatttactttcattaattagaactatttaaaattaaatcttactcatttttttctctatcttttcctaattgacaaatgaattatttaatttaaaaaaaaataatttattttttaaatttattttttaaaagtttcattcttttcggtacgcggcaacacggtgctgaacccattcccattcttgaaaccgtgttcaacaccatatgcagcgttggtggtctcgtccagcaatgtgctaatccggcacaactgttttcgcaatcaaaatgccgattttgaaattggtgagaaaaaaaaattctctcgaaacgaagagtttttttttttgttctaaccaaaaaaaagttttcccagttaatagcttttccgaaaaaagtcgcccatttaaaaaaaaaaaatttttttgaagaaatgttttattctgaaaacatttcaataaaatatgttttgcataatccacatcttataaaataggctggaaaacatttttttaaaatcacacatttctaattattttgacaattttaaatttcgaaaaaaataataaataactttctctaatataaaaataatttatttaaatatttaattaggaactgaactgatggaacacgcgaaacgaattgatgcgcgagaaaacaattggggcgatccgcaggcccacaattttatgcatcgaatttttgaccaattcaaccgttactcattggccaccattgaggcatcaaattttccatttaaattaattttattcaattaaataatagtttttcttcaacaaaaaaaaacttttataagaataaataaataccaaaaatatttgttatataattttataatttttttttaaatttttttaaactgcctgaaattaaaaattctaaaattaaaataaaaaattatatttaagatttaagttctcacaaatctaccttatcaaattgagctaaaattaactcaccgcattttatttcaaattaggaggggggaattttccatgaaattgaaaagtaaaaatttttttattttggattccttttccaaaactttttctgatcacagacagcgacggttctgggcccgctggaaaaatgtctttaagccattcattcggatttttttgtctttctgtaagaaatttacccccccccccccaccgatattttggtaaatttgcggttttaggctgtttaagaaagacaaaataataatttttaagatgaaatattttttattaattaatttaaataaagtaaaaaaatataaaaaatgttctat

SEQ ID NO: 84268 - DNA, 716 bp, Heterodera glycines
atgtaccaaatatgtataaaaaccccgaaatatgtaaataggtatgtctaaaaatctcttcctactatttagaacatggagaagccaggaaaaaatatgtatactagtgataataattacttttttacaaaaaacttttaatattacataaagaaaatatttttttttataccaacaaaaaataataattaattatactgaaaaagtatcgcaacaataatataatttaaattaaaaaaaattcaaacttaattgactctaaaaaaatacgcccaaagaaacgaggcagagaagaaagcgattaaacttgtgagtgaacatgattatattcaacaacatttactttaaaacacattcataatctagaactttgaatattttgggattaaaaaaaatgtgaagaaattaaaaagatgattaaaaaattagttgaaaaatattagatttcaattatcattgaaattttcaagaataatttgttaaattaattaaattatttagtgtaattaaacttgaaaataataatttttagcgttccattggccgcaatgtccgaggcgcaaatgtcatataaccgttaatagggcttatatttatatttgctaaaaactttcaaatttaggatgtaaaatgacaaaatttattcaaaaaggtgaaaaattagaccaaatcaatattgagctaaataatttgtaaatcataaattcttgtcaaga

SEQ ID NO: 84269 - DNA, 654 bp, Heterodera glycines
atgacacattttcaactggcacattttccggtcacggtaagacggcaaaaggggtatcaataatgaatttggtttctgtttggcattgttaagcgggtcgggcgggtaaaagcgccttaacaaagtgacaggcatgccgatgccacgctaagtgataacaaaatttggaaccctaattaaaaaaaggactttgacacaatttagcatgtttaaaatttaaaacaaccgtaggaagaagcagcgagctaatgcttttttcgaaaaatacattcctaaaaatggaaaatttacaatggtctaaaaggaatggaaattgcgtaaccagaaaaaaattaaaaatttattaaatttaacattactttaaaacatttcagcatcttttagatgcattaatgtgaatataaaagcaaaaaagcaaaggatttgttattcattttccttatttgaaaaatttatgaaaatgagaatttacagaaaattaaattgctttaatatttctcgaatatgcccttttggtaaccagacgaattttcttttttgtgaaaatagcacctgacacagaatttatttttttctgaaatatgccctctcgaatatgcacttttatgaatatatttttgtatgccttttcgaatatgcgcatttatgaataaa

SEQ ID NO: 84270 - DNA, 639 bp, Heterodera glycines
atgcgcaaaaaattcttcgcttttacaatttttctgttcatcgttttgcaattaacggatgctgaaatgtcaaacggtaatgttgtttttaacaattaaatgaataagcattaataatctttttacgaaaatggctttaattaaaatgaaaatttttcaaatttttccgaattttataaccgttataatcggacattcacttgatccatttttcataaattttactgtatttccactggagttttttgattggaattataaaaacaaaattttatttgcttttcatggatttcaaaaaatttatgtcgtaatttggtatgttcaagattcaaaattaacattttgttcaattttcaaaatctcttccattttgaaagtatttgatatgtttagagaagaaatatatttttattaattaaaatttttatttcaatttcagaatacaaagaagcgtgcaatgacacatgtgctgctttaccaaagcagacttgcggtcgtggaaggccacaaagtaacagtaactcacagataacttgctactgtaaatggaagaccagcggatgctgtttcggagaagggtgtgtaccacgtgaacaaaccgcagatgaaattacgctttacggtcgcaccggaatatga

SEQ ID NO: 84271 - DNA, 751 bp, Heterodera glycines
  unsure (1)..(751): unsure at all n locations
atgaactgtntagcaattatggacagccacagacagaagcgattgatgtggcgtgatcattttgtgctaatgatgccaaaaaggcataaaaatttgacatttggcatgagaagaagtcaaatttggcaaaaatttaactggccaattcggaaaaagcgcaaaacaaaatattcgtcttcatcttcaacaacgacgacaacacaaattaacggtgctgctcgagcaaattttaaagagcaacggcactttttgagcggaaaacagccgatcagatcggtttggaggcgggcgaaagttgcacttggcatggaagtgagtgaacaaatcaattttaactactttttttaatgttttaattaacttggaattatttttttaaattttttaccagttttgggaataataatataaaaacggatttatttaagcgcaatagtgaagtgttggtgaaacagttacacgtaaggacgacagcgggtgtttttgttgcgattcgacgcccaattcgcccgcctccgccgccgccaattttcgccgacaaatttccccatgcttttacctatgccggtggaaggtgggtgatgggaggcactgttaaaataccaaaaaattttgaagattttaaattatgctttttctgtgtacctattagcaagggtgtctggcaactccaaagtaaaatgtgaacccgaaattccggaaatgggtcatttgggtgccaatgttttggcaacaaactaaaaatttaaaa

SEQ ID NO: 84272 - DNA, 646 bp, Heterodera glycines
atgccttttggcatgattatcgccggaccatcagggagtgggaaaagcacatttttaataagatttattgctgaatcttcggagttaattagttctagacctgcttcactgctttatgcatttggtgaaatgtcaagtattgttccaacactccaaaaatgcggtgtgaatgtgtacccgggagtgccccctgaggatttgattaaccgtctaccaaaaccattattgtttattcaatttggacccacatcaatttcctggatcacattggattgctttatttgtttatggaaacactccaaaaatgcggtgtgaatgtgtacccgggagtgccccctgaggatttgattaaccgtctaccaaaaccattattgtttattcttgacgatcttttgctttcgatcgatgaatcatatcttagtgctctattcaccaaaaagtctcaccatcagaattgaattttgcagttgtttttgtcacccaaaatttgtttaaacgaagaattaaagttgcgagacaaaatgtccaatatttggtgttaatgcgagctccaaattccgcattggcgattcggaacattggagttcaactttttccagggaaattggattatttcctttcggcctaccgtattgcgaccaataaa

SEQ ID NO: 84273 - DNA, 1297 bp, Heterodera glycines
gcaagtaaacgaataaaatcaaaatttttatgtactattgctccaattttacaaaaggccattttttggaatgaaaatgatcttttttccttcttcttcatcgtctttaaatatcccactccttagtcgcaacagggggttagaagcagcgtgcatatcaacgaggagataaccatacggtttattggtcgcaatacggtaggccgaaaggaaataatccaatttccctggaaaaagttgaactccaatgttccgaatcgccaatgcggaatttggagctcgcattaacaccaaatattggacattttgtctcgcaactttaattcttcgtttaaacaaattttgggtgacaaaaacaactgcaaaattcaattctgatggtgagactttttggtgaatagagcactaagatatgattcatcgatcgaaagcaaaagatcgtcaagaataaacaataatggttttggtagacggttaatcaaatcctcagggggcactcccgggtacacattcacaccgcatttttggagtgtttccataaacaaataaagcaatccaatgtgatccaggaaattgatgtgggtccaaattgaataaacaataatggttttggtagacggttaatcaaatcctcagggggcactcccgggtacacattcacaccgcatttttggagtgttggaacaatacttgacatttcaccaaatgcataaagcagtgaagcaggtctagaactaattaactccgaagattcagcaataaatcttattaaaaatgtgcttttcccactccctgatggtccggcgataatcatgccaaaaggcatttttaatttaatttctttattggaataaaattgattaccaatcatattgaattttaacacaacacaacgaatttaataacttaaatagttttttttattctttacgactaattgacgcaatggctgctgcttcttcatcttctgcttccttcttcccctttttcttcggcaaattctggaatgtctttcttttgttggtttgagtttggttcgtctttcttctgttcaccactcattcccatcgtcgctgcagaaatcggtgaaaagaaatcggaggcttttggctggtgctgtcttggttttggtttgggcttgaggtggtccccactaattcccatagtagctgcagaaatcggagaaaagaaatccgaagcgcttggcaagtgttgtcttagtttcggtttgggcttcaggtggtcgccactaattcccatagtagctgccgaaatcggagaaaagaaatcggaggca

SEQ ID NO: 84274 - DNA, 486 bp, Heterodera glycines
tctatcacggcagctactacaggattggatgttcctcaaaagaagcatggagaagcaaatgaattttttgatgctcttacggcagcaacaacgggaatggaagtcgacgaaaacaaggtgaaaaaagcgcttccacaaccgcagagtaatgcctccgatttcttttctccgatttcggcagctactatgggaattagtggcgaccacctgaagcccaaaccgaaactaagacaacacttgccaagcgcttcggatttcttttctccgatttctgcagctactatgggaattagtggggaccacctcaagcccaaaccaaaaccaagacagcaccagccaaaagcctccgatttcttttcaccgatttctgcagcgacgatgggaatgagtggtgaacagaagaaagacgaaccaaactcaaaccaacaaaagaaagacattccagaatttgccgaagaaaaaggggaagaaggaagcagaagatga

SEQ ID NO: 84275 - DNA, 918 bp, Heterodera glycines
atgagcattaattataacgataaaaaatttatcatggacaacattttgccggctgtagagatcagtcatacgaccaatggcattacactgatcagcgagaggattgcggtgcctcgaacaattccatttgacatcgttggcaagtgtcgagagtgcaaggccactgagtgcgagacggaatggtgcatttcaaaagaaggagtaacaatttggtgttctcgtttcaaaattagtcctcgattcgtgccatttgactatgtttatgagttgccgggctatacatttttcaaggttttaaaatattatatgccttttctttaaaataatattcagattcgtaacaaaggtcgagtttttaatgtcgaccacggtttccgctccaatgtttgtactcagaccgagactcccgtctacaatttaccgcccccaccgcctccgcctcaactaaagccaaagggaaatgagcaaggaacggaagagcaaactacacaaaaattttttgagtctatcacggcagctactacaggattggatgttcctcaaaagaagcatggagaagcaaatgaattttttgatgctcttacggcagcaacaacaggaatggaagcagatttttccaccgggcttaatgattcgctccaattgaatcagcacccgcttccgcttccatccgacatttttgtcacattaaatggtggaaaatatttcacaaagattgatttgtcggatgcgtatcttcaaattgaattagaagaaaattcgaagaagctgtgcactattgctacactccgcgtgcattaccaatacgaacgtcttcccttctgcgtcaaatcagcccctggcatatttcagtcaataatggacaacatgttgtcatatctgccattcgcattggcatatttggatgatctgatcatt

SEQ ID NO: 84276 - DNA, 267 bp, Heterodera glycines
  unsure (1)..(267): unsure at all n locations
aagacgaccaacgaaaaacgtggccgaaattgcacctttcncaagcgggtctctgctcagcccgtcgtcgccgcctcttccgctgccattggcacttccgccgcaaatgcgcccaatttggaaaggaaataaaaacatggaaattggggcggagagagaagggaaatgcgaacggagcaacaaaaagattggattattattttgttttccctgttgctcttaattgtatggacacacacaaattgttgctgtttttattttgtttcg

SEQ ID NO: 84277 - DNA, 1626 bp, Heterodera glycines
  unsure (1)..(1626): unsure at all n locations
ctaaaaaattttaaaatcagttttttggcaaaatgccgtcgtcggctgtccaacaacagcccaagtcgctggtgcaacaatactcccaaattgtcgccgccgtttcttcctattgggtctgctccattggccttgtgttcctcaacaaacacttgctgagcagtcccgatctgaaggtgccgtaggtgtcactgactgatcaatctgtgccattggccatgtgtgttctttctatctggtcacttttttgatcgggtattatcggtgccgttctgtctgatcactttccttgatcgggtgaacatgatcggtgccattgccatgtgccgttctctctgatattttttgacctggtgatcatcgatgccattcggcatgtgccgctctgtcctccgatcactttcgatcgttctcccgtttacctcaatatgcctctttctgtccgttcagttgaatgcgcctctgttcgtcacgtggtatcagtgtctgacttcgctggatttctgtctgttctgctctctcctctccaaatggttccctcgtctgatcaatttccccgacatgtctcttgaccttcgcttgtcccgggaagtccgttcgtccccttttttctgtcttcccaatgatcattgattttccttaaggttttgcctttgtccatcgttttcgtcgcaatgatcagtttcaacaatttgtgcctcaaatatgtcggcgtgtctttttattatgtaggacggtctctatctacagtgtttaatgtggtaagtaagcactctttatttttgctataaataaacgaaataattcctgtgcaatgtgagcaccgttggttcaatggtagaatgctcgcttcccaagcgagtgacgcgggttcgattcccgcacggtgcatcaactttttttccatttaaataattatttttatttttactaatttcccagatttgttcctacctcattctcggccagtccacctccaaaccggctttactctgttgtatgatgattattgccggcttttttctcggagttgaccaagaagatgtcgcgggtgaattcttcaccattttgtgctaaaattgtttacccaaacttttcctaattgcttttcgttaattggacatatttaattagcgtcccaaattcgttataattggcacatatgtctttaagactccggtgcctttttcccccttcgaatgcgcttttaaatgcccaatttcccctccctcccccaggcactctgtccgtcattggcgtcgtctatggcgttttggcgtccctttgcgttgcgctgaatgccattttcaccaagaaaacgctgcccaccgtcgctgactccatctggcggttgacaatgtacaacaacttgaacgcgtgccttctcttccttccgctgatgcttgttgccggcgaatttggcgaagtgccctactcgccgcacattgtcaagctgaacttttggggcatgatgacattgagcggcttctttggcttcatcatgngctatgtgaccggtgggcaccagtgccgttgtcattcaatggcaaaccaaaatggctaaacagaagcattcaggatggcaatccaagtgactcggcctgacgcacacatcagcggcacgca

SEQ ID NO: 84278 - DNA, 57 bp, Heterodera glycines; identical to SEQ ID NO: 78091

SEQ ID NO: 84279 - DNA, 589 bp, Heterodera glycines
gatttttgtgaaaagtttgcctcgttggaattgaattcatcgcagcaactgtccatgattggggaactcagagcagataatgtgagtttaactgtaacacttaaatttaaaaataatgataaataatatttaaatgaatttattcataaaagatggaatgttttttaaaaaagccttttttcagaacaatcttcaagcagaattcgaaaaacaaaagcagatgacctctgaacatcttgtcatgctacaggccgagcttttcgtgctgcagaataaacaagaagaggacgagaaggaaaatgagaaaaacggtaccaaaactttggaatactgtagttcgcgcaattcttttgaaaaggattaaaatcctaataatcacaatctgtctcattaagcattgattggccagctttcaaggttgcaaaacgaacaaattgtacttttgggacggatcggtgaattggagaaacagcaaaaagaaaaggacgaacagcagcagagacaatacggtgggaaaattatgagagatcggcctggaccttggagcctagcttggattttccttgatccatgtgtggattttccttga

SEQ ID NO: 84280 - DNA, 1321 bp, Heterodera glycines
atgcacgcaaaattgaagcagtccaaaaattttacaagaaaagcattcaaaaaagtggccttgttcccatgccgtatgaagaaaggttaaatatttatatttttctgactgctcgaaagttcagtctttaggcgtgcattttcacctctcgtcccaaaaaacgagaggtgagaggcgagagtcccaaaaatggcgagagttggcgaaagacgagaggcgagggttgtcccacccctgatatgtatgtacatttcatttatttcaattgattttggcaacaaagttaattaaaactttttaaataatatacaaaataattaacaatttttttgttgactttgcaagaaaaaattcattcggcaaagctattttttggtctttggtccgcgagtgaccctctctctctgcccatctgtctgatggtcactcactcactttcttccgctatttcttcagctgcattccctcgccctatgtccattccaattttcaatcaatgggcttttatctgtctctcctcctccaattagcacattaattgagaatattcattataatttgataccacggatactatgttaaatttataacacacatcttaaaaaattcaaaaactttcgtacaattaaaaaaacacttaaattttacaggaaaaccgattgaattcaattcactcaaaagttttgaaataaaatgcaaaattcgaccaaagacccagcagcagaaggtaaacaaagtagaaaatggacacaaatgtaaatatttttatggaaaatcaaaaaaatatatttaagtttaaaggaaattctgccgatgtgatttgtttgggtcagaatgagggggccaccaatgctgaatcatcatcagccagtgatccgcaacagcaaaacattttgaaggttcgattccccccggggccaattgctttttcctttaaattaaaaaatctctgaatttatgaagcaaaatcatttgcttatcttttattatcgaaatcataaaaaagatggcttattttctattttatttaatttaaccttaaattctctaattatttttttatttagccaaaattttgttgttttttttttggtaaactgtgatcaaatctcaccacttgtattccaaaacatttctcaggcggtgcctattggcggagtgaccatggggcgaccctcaaatttaagaaacaaaaaattgcggctaaaatattttatttagtaaactattcgtttaatcgtttcctgaaactaattattgcactaaataggggcgtggattactgttacaaggggggggggagtattattagctcaataaa

SEQ ID NO: 84281 - DNA, 708 bp, Heterodera glycines
atgcgccgtaaaaaattatgcgaaaagcaacatattaagaacttggtaaaaatattattttttgcgtgtttattaatttatttaattcggtactgtgggcttattcttgttttcgaaccctcggtgtcccattattaacggatttagggctaaaatttcaagtcgtccatttttaacccatactaaaagcaataaatgttaagtttttatatttttgactctgaatcctgatcctgatttttcccaaaaacgatccgtactactttatgcacctttccttttaacactgataaatgaattttttgattacattcattctaaatgttatgtttagaccatcaaacgcctccatgaggaggtgtactccaatgtacaagaagatgcagctggagtctaccgcgtaactgacgtttacgtgggaactgaaccggttgatgtactgcccgaggacatagaagaaagaatggccgaatttgttgcgtggctgaatgaaaggagacggtggaggacatcaacttggtggcagcggaggcacatttgaagcttgtaaggggacaggggcgcagtggtggaaggatttcattaaaatacatgggtggacaaaggccatagtgagacaaggggagggtcgagtccatagtcagctatatgctttttctcttttgagccccaaagaaatgaaaatttcgaaaaaaaattgtaaataaa

SEQ ID NO: 84282 - DNA, 901 bp, Heterodera glycines
atgacaaaggtggcaggtgtcaattttttggtaacagtaataaggtgaagcgcggtccagcgggctataggcaccaacgggaaaattttcacaattttcgggtgaaatttgcgattcaaatggcttaatttaattgaaatttatttaaaaatctttcggaaaatatttggcattctatccttgaaattttcaaaaaatgcatgcgagtcccgtgggatcacgcacaaaaaatcaaattttggatttcgctgtgggattagaacaaaataaaaagagtaaaaaaattttagtgcggatttcgaaattagtcgaaacaatgatatattcgtgatcagcgtcccacgtaaacggtagtctttatataaaaccatcaaaaagggcgttgtataaaaaagattaaatgaaaattttcaacaaaaaactacccaccataatttttgtcaaagtcaaccaaattaaactcttgatatcatcgataaccctatagagagagtactctattagctcacctaaattaaaaaaaaattcgtcaagtttgaacacaattatggccaaaagtacgccaggaactaggttttcaaaagtttttggtcattaattttttgaacttgacataatttttaaattttgcaggctagttgaaacctatgttaaagaatgatattcagaaattactttattctaaagaatgtttggagtcagaatttttgatgagcaaaattattttatgtctactgaaaaaattttcgttataaatattttagatattttattttcttgatattattcgatagctcttattgttttcaaatagtttgctaaatttaaaaaaagttatgaccaaaaatgtctgaaaccctgtttcattgagtacttttggtcataactttgttcaacctta

SEQ ID NO: 84283 - DNA, 1095 bp, Heterodera glycines
atggctcaacaaatttggcccatttttgcgccaaacattcgccatttggaattttccaaaatcgaatatcgggacaatttgcttcgcctcatttcatcaacaattcagttcaatcccaatctgagttcaatttatgccggtggtcagttctccgacatgtttgctgatgatggtgggacagatggaaaaattggcaaagcgttgtccaaatggttgcacattccgtccaccgatggtcgccctaaacgattgacatgcggaatgagttgttatagcaaaggaccaccaccaaacttcgaatggatcaacaaattgaaaaaggtcggcaaaatctccgtagtaaacatttttgtcgtggacaaaaattgcctttgaacaagtttataagcagtttttttattttatagttttttgactaatgactaggatttatacatattaggctctaaaaattgcaaaacaggtaggctttaggctctaaaaatccataaaatagtcattaaaaatggaaaataattctaaaaagcctgaaatttaaggagtaaatgaaaacatttttattcaaatagcagcagaaataagccaaaccagtattgagaaacatatgttaaaatcaaaaaattcttgtcatgaaaaataaataaattttgagatgaattttcgagaaatttttcatttcttaggattgggggagggatgagtcggcgtacggcttgcacatgtacatttatgaccggtacatgcagaagcaaaaggccaatgggtgacgtgtcatttatcctttgattcattaggcatttctccgtgccacctcttctgccaattacattattaaaattcaacttcgcgcattggcaccaattgtgccgtttgaagtggtgaatgaaagaacccaagaaaagctggcagtgaaaaaagaacgcgaatttggctgtgtgaatgattgggtgttgaagcgaagcccaattggggagacggatcagcataaagatgaggaagatttaagcaatttgaacggaatcgtctttcaattgtacggttccaattgcattggctgagtagcagcaacgctttatgattaatcacgcgaataaa

SEQ ID NO: 84284 - DNA, 818 bp, Heterodera glycines
atggacattttcaccaattatattgttgttgaagaaaaaacatttaccatttggaacaaaaattcatatttccaagactgtactcaattcgcaacactgtaacttttttgaattttattttgactgaattaagccccatttaaaaactccaatatgattaatttattttagtagtttcaaagttgatgcaaacactttttcattggtaatcaaggacaatggcaatgccaatcagtcgacggaagtgccattggcacaaattaccatttggggttggagtaacaagggggagcaggaggcaaaagaggtgagtgagtgcttaatgatcattgattgatcaataattcctccggcaaaaattaattatgtgaaaatgatgatgccaggagggtggctatattacagtttatggtcatattttatatcttcttacttgatcaatgcctaggttcttagtttcaaacgaaagcttgaagtctagagttttataaccaaattatactttttgctcttttcttgtatttagagattgccaagactttaatctttcgttgatacaaagaatatatgattgatttttgtatgaattacatattttataaaaatttgaataatacaattctctattatttccccaggtgaaaattctgaacattggagggaaggcaaattttggcaacattgggtgctcaaatggttctcagcagatggctaccattatcatcagaattctcaaaaagcgcgagaagaccgacacaaagtgagctttatgaaaatttaggaattaatcgattttttaaatttttcttatttctaaa

SEQ ID NO: 84285 - DNA, 692 bp, Heterodera glycines
atgcattccaaaacagcacttaattgcttgctcatttggggtaagtactgacctccccattaattaaactcaattaaactgccgtcaatgttacagcattggcatttatcgttgttggctttgtccaagtgactgtgcagcagccgccgaacgaacagcagcgggaggaggacaaaggcatcttcgagaaaagcaaggacactctgtcgaacgcggcggaaggcacgaaggattggctggtgggggcgaaggactcggtaaggcggggaggggtactgtagcaccgaattctgtaagaacaaagagaaaaaagttggaagagtgattttgtaggttgccgatacgttttcttctgcgaaggaaacggcgactgacaaagccacggaaactaaggacaaagcggtgatttttttaggaaattctattattatttaaaaccggaattatataaccattagtccgattacgccgaatcagcgcgcgaaaaagcgtcggaagggtacgaaggcgcgaagcagggggcacaagagcgatatgagagcgcaaaggaatacggaaaagagaagacggaacagttgaaggagggcgggagaaaagtggcgggagaggccgaccggtgggcacacaattagcactaattggtcaattaggtaattgtaaagtaatttcagaaagactgagatctaaataaa

SEQ ID NO: 84286 - DNA, 617 bp, Heterodera glycines
atgccaaacatagaagttgagtttgccaaaacttgtttggcctcatttgtggcgatatgtgggatggccaaaaggaaaatttatggatggcttaagggttcgtaaagtaaaatcatattttaaatttaataatttttacataaaaagaaataaatgttgtaaaaattgaaaatagtttttaaaatttcttttttttcaggtaaaacaatgtgcaattactctttttaaaatgtgatgccatgcaagaaagtttaatgaaatataaacatcatacagaattaataatattaaaaatcatattgaatcttttttatttttatactcattgtttatttattaataattaattaattattattatgttttgttgtaatgatttttcactgcttttttatgttactcaattttcgtgttcttttcatttagttacatcacttcgttatgttttgttaattattttttattcctttttttaaattaattactacattatttgttaattttaaaagtaaaaagagccagaggcaattaattatccatattgatgttttattaaatttaagattcaaatatataagcttatttcaaagttgattcggtgaattaatatttttgca

SEQ ID NO: 84287 - DNA, 639 bp, Heterodera glycines
atggatggaggagtaaggttcggttcccacacgaagcgcctactaacattttgcctattttatttttcggatattaattcagcattcatttattcgtttgtccacttttttcagtgccaaattacattgtgcctaaagttggacaatggctgcgctggcataacaccgccaaagtgtgccgcaactgtgccacggcacaccgtcaccgagcagtacaccactcgaagacgcaagtcgaaaaggcagcgaaaggtgcgcagcgttgcacaagcacagcaaaacgaaagtggccaagttattggagatgaacaaaatggtggcacgaaggtggacgtgttcacaagaccaattatggtcggttttatgcaaattttaggcaatataatttattaattaagggataatatagcaaataatgaaactttttagaattcattaatatttagtgaacatataagcattaatttttttggcgatgaattagattaaaaaatgaaattaagcacaaagattaattagcgaaaagaaatttttgagattttaaatttccaaaaaatcaaaatttaaaaaatataaatgaaaaacctcttttcggtataatcgaaaaaatgaaaatatataacaaatttaaaaaataaa

SEQ ID NO: 84288 - DNA, 842 bp, Heterodera glycines
atgaaaaggtaagataaataatatttttaattttatataccaaatttaacagagaaatattaaaagtgaatgattattaataaaattgttatattcctttatttatactttttcagtttaattaccttcggattcgctgttaaacagcagaacaaattcgatggaataattcttagccacaagggcacttattcatattataatcgtggcgatatttggattaacggaaaaggaaagggaagaaatggcaaatattcctacggtgttggcgataccgtaggaattggtgtcaatacggccactcgacagatctttttcactaaaaatggacttcgtttgggttggtaaataaataattaatttaagaattttaaatataatttttatttaattaatttttgtatttaaattatcaaaatcccataactttttcacagattcctctgaatttttcgttgctcaatcttttgctgatgattcatttcatccatttgtttctatttggcattatggtggccaagatcaaattgaggcaaattttgggcccaatttcaaattcgatttggcaactctctgaggaagaaatattcaccaaagctgatcaatctgttctttttactgatcaatttgttcgtttaatcttttttttaagagtattcttggaatcagggaatataaatatcggtatgtacatgtgtatgaggtagagaattgatgactttgaaatagggttcggtccggtgggaaaaatattggaaatttcaattgaatagtaaataagttagaatcaaaaattttactcattttaaaaaaaatttcatttcgacgcgtcgtggttatta

SEQ ID NO: 84289 - DNA, 6798 bp, Heterodera glycines
atggaaaacagtcgtcggtatatgacacgacaggagttgcgtcgtctgttagacaatggagttgcagtcgaaattgaggacaacgagataaacgtcgcacatcagcaaggattgcggacgaattggacggattatgcggcggagaacttcgaagcgtcgcggaattttcaaccggccgccgtttttctggaaaatcatcagcgcgaaatagcttttagctcacttcgggtcccaattcgaacttcaagtcccaataatcagaaccgggaccccgttgcaccaccggctcagaattttgttctccaaaacatgctccctcgccgtttagacaacgacactctttcattagcgggagaggaggtggagttggaccagcacaacgagaacgaactgcttggacttccgttggatggccgtggccggactgattcaatgttggaacaccaagtgtccgccattcacccaagaggttatattcggctaaatgaattgagagaaaatattcaacaaaacgaaccgagacacaaattgcctatgcctcacgcatacattcccaggcaacaacccccgcagcaaaattttggtcgcgaaattcagtacgggactcaaaacccgttcaatcaaaacgcgcttaaccctatgcattaccaagcggtaccggttgttagcagactggaaatggcactcattttggacagaattccggacctcacgggaagggaaggtgctgataaaattcgagcattttttcggaaatttgatatcagtaccgatgaatggactgaccaacagcgcctgcgtgctttgcaatcaaaaattgagggaaaggcagagagagcctttaactcagcgcttgcatcagaaaagataagtgcgcgcttggttcttcgggaaccaaaataccaaaaaatacgggcggaaatgataagaattttggaagagcttgacgccaaagaaattacggcatttgaccaattgttttcggggcttaagcgaaagccagtagaaccgatcgatcagtttgcagacagagtatcaagcgttgtaaggcgtgcctacccaggcctagacgaacagctaatcaatgattatgctatcaaacattttctgcgggccctagacgaccccgatattgcaatgtcattagaattgactcgtagtcaaggaatggacttcgatcaattcgttacaatggctgcgcgtgctgaggcgacgcgaaaagcggtgagaagctgtaacagaggacagaacatccgaacttttccaacattttctggacaagtacacgaaccacaatcaaattatcctcaacagcgacaagtccttacctgctataattgcaaccgaattggtcatgtttcacgtgagtgtcgagaaccgagacgcaacaaccaaacttttaacaatccgtccaataaatttgttcgagaaaccaacggagactctcaaatgccgaaccgaaactacaataccccccggttcccagcacaaccaaattttggcaatagtcagagaaactttttcaacaatgctcaaacgcaaaaagaagtcacaaaatcggctaattgcatacagcttgagaatgcaccggttgttaacaaccttgtggcctgtgtgaatgtgaatcaggaattggaaaaattgaaaattttgagtgtgagtgaagggcgtaaaaaagaattgtcttcaccaccagcagttggcaaacttgtggtcatggaatttgaagtttgtaaaaagaaggcacaaggaatggtggatggcggtgctcaagtctcgttaatttcggctcaatttttgcatagcctattcaaagacgagtccctcaaaatttccgaaaattgttttggtcattcaaatttgaaagtaagggactttaatggaaaaacaatcgatgtggttggagagattgtacttccaataatgcgagatggaatgcgtcctgttctgataacacttcaagttgctgcgtctgattttggttttgatttgatcatcgggaccaatgctttgaatcagttggggataaagctttttgatgaagtgcatcaaaaattggtgacatttgaaacagcagatactgaaaccaaaaaggaaactgcagttagagtagtgtacaatgtgaaaattcaaccgcgttcatcgacgataattgaagtggcagtaaacgacgagattgacgaacaagatgtattgattgaaggggcatcagaagtgtcggagctgaaaattgaaccgacattagtaatgcctaaatttggaaaagcgaccataccggtcataaatttttcatcacttccaatcgttcttggcgagaatgataaaattggaacaggagttatagtggagaagcaagtcaccgcggaaaattccttaaattgggattgtttgaatcattcagtcaccattagctccattcagtttttgaatgagcttgaagcaaatcatgttaaacaaattgaatctgtttggcgtgagcaagcaaacaccaactgtgcgaacgaaactgatcagttaggaaaactcatcatcgaccactctcaaatttttgctattgatgacaaagatttgactcagactgatttagttacacattatgtggacactaaagacagctcaccggtgaaaatgcgcatgcgttcaattccatatgcatttcgggaaaaagtctcaataatgttgcaagactatttatcccgtggaatcattcgtccttcttggtcaccgtatgcaagtccaatcgttttagttcctaaaaaggatggaacaatcagattttgcaccgattatcgcgcactaaatgcggtcaccgttaaagattcatttccacttccgaacattgacaacactttaatgatgttgggcaacaaaaaagtctttagcaccatggactttatgagtggctattggcagattcggatgcacccggattccatcgaaaaatcggcgtttacgactgaatttggattatttgagtatttggttatgccattcggaatgacaaatgcagtggcaacctttcaaaggttcatgaatcgactttttgaaggtgttttgaacgattttgtctttgtttacgtcgacgacattttggtggcaagtgaaaacttcgaacaacatttggaacaccttaaaattgttttcgaaagaatacaaaaagctggtttgaaattaaaaatcacaaagtgtcactttgttgcggaagaaattcagtttctgggacacattttaactcggcaaggcattaaaaaagatatggacaagatccggccgatttttgaatatgcggtaccaaaaacgcaaaaggaattgcattccttcctcggttttatgacatattatcgaaagttcatacattcgtttggaaagctggccgcacctttgtttcgtctgctgaaaaaagacaccaagttctgttttggagaaaaagagttggaagcatttaaaattttgaaagagaagattacagaaaatgtcgttttgtatttcccggattttaacgcggcgcaaaaaattccggaaagaatgtttatcatcatgacggatgcgagtaaagtgggaatttcggcgattttgagtcagccggatgaaaaccaaagaattcgtccgatttattttgcgtcacgccaatgcaattcggctgagagtcggtattctccaactgaattagaagcattagcagttcgttttggagttaataaattcgcacaatttattaccatgattccaacaaaagtgttaactgaccataaagcgcttattcccatgtttaaaacaaataaggaaacggggaacagtcgcgtcgacaaatggataatggaacttcgttctcgattcattcttcaagtggagtacaatccaggaaaaagtaacgtggtcgctgatgttttgtcaagaaatttcccgagaaacgaaagtttatcaatagaagaggaattagaaaatgttgctttactaaaatcagcattagttacagtaatcgaaaatgagacagaaaatggaaataatgaaatttgtgccgacgaaatggagtggaaagagaaaattatggaaagcgaatttggccaattaattgaatttttggaacaccgaattctccccgaagacccgaggaaagtacaacaaattttggcccaagcttcatttttcaccttcataaaaaataagcttttttactgcgacgaaaaaactggaaagttacgtttattcgtgccagaggaatttcgaaaaaagttgattgatcaaagacacgctggaatgtgtgcaggccatttcagcgccaaaaaattatttttacaaatgtctgaacatttcttttggccaaacatgcgagcagattgctcaaaagtagctctggactgtcgtatttgcgcctacacacgagaaccacgcgccaatcaaccgggaatccaaatggttagaacaaatgaaccattagaattagtgtgtttggatgtgcttaatatcggtcgaagtcgcgcaaaaaatcgatatatattagtttgcgttgaccatttttcaaaatggacagtggcagagccaatcccggataaatcggctgaaacaatagcacgggcatttgttgaaaatttcattcttatttatggggcaccaaaaagaattcattctgacagagggaaagagttcgttaattcgacattggagggaatcgccaaaattctgaaaacagggaccagcacaacctcaggctacgaccctcaatccaatggccttgttgaaagaatgaatcagactattttgaaattgcttaaaaggacgactccgtcatcttgggattgggatttgaaactcccattcgtcatttttgcaataaatgttacaccatcagtaacaacgggtttttctccctactctttaatgtttggaagagttgtgaattttccgacggatgagaacatcaaatttgaagaggacccacgttatactgtggaccaggaaacttatctccaagcttttaatgaaaatctgatggaaatcatgggacatgcacgcaaaaacgctgaaattgcacgcgaaaaaagcaaattggaatttaattcccgcccaaacgtgacgcgcgaaaaatttaagccgggggacagagttatgattgtcgtccattcaacgaaagcacaagcctcacaccgaaaattagcttggaaccattttgggccttaccaaatcattgaaatgaccggaagttcagctaaagtggtccctgctgataaattaaaagctgatccaatttctgtgccaatcgaaagaatgattcgtgttccccctgggatcccaaataattcaattttgccaaaaggaaaagccaaatttaagaatttaattggcttaatttgtgtctcggaagaaatcaaaaatggcgagattaattttgaaaatgagactgataaggaagtggtttattcattagggacaatgaatttttcaggggcggacggaaaagaagcggccaattgcgacgagtactgtcttggcgacggaacttgtttttggaccacaatttgctctggggaaggccatgagcactgcacgcagttggtcgttgccgattttgatgccgtcctaaatcgcaaaatcggaattggcgctaaagaggtgacaacgccgcttcaagcactgttctgtgcatttctgctcaaaaaatttggttcgacaacggcatctcgtcgtttggtggaaacgatcatggatggcacggccggccaggaatttgtgctgtttattggtgcccgtggcgacatggtgccttcggacatgctcccgtccgcagaaaatttgatggaagtgatcgaaatgcgcgttcgcacgtgtcggaaattgtggcgaactctggaggaaagcagctatcagcttctccaaatcgcgccgccaaaactgccattcggagaagaaagccaaactgaacaattggcatggcaagaattctttgcgaaagcgccgtgggcatttgaagtcattcgagcccaactcatccatcgccgacgtttgatcgagaagccaagagttgtgatgggcgattcaaccgccaagcaattggtgaatttcaccgagatgacggccgtcgaaatgctgataagtgaagaagaaggcttggctgggctcgtgcgcaactttgacaatgccgttctctccagcaaagtaaaagcattgctaattgtatgtggacgcgatgcactgctggccaacgagacgatggaaacgatttgcgaatgctttgagcgattgagggccatttgtgagcgctatggtcacgttttcatctactgggccgtgccgccgtacattcactcacgaaaagctcaatttctcgaactcgttcgacgcttggccaaactctgcgacgacactcacattcggttcggagctgtgacggaagaaggaagaagcctcatggaagtgtttcgctatggaggaacaaacgcgggaaatcgagtgaaccagtcgggactcttgactgaacatggagcgaagacaatgatggcatggatttacgaagttgggaaatttcctggtgagaaggaattgggccgcccgcgaccgcgttctgaagttgtgcgacctggtgctagtacttctgaagagcgccgccgtcccaacattagccgcgggtttggtcttgtcgaccaccgtcggcacagcttttctcgtccatctcttcaaacgtctaatcgtgaaggacaccagcaggaatggcgtggacgcgaccgctcggaatgggcttcggcgtcttggcgacgtcgtggttctgatcagtttcgtagctctcgacgtggacaacagtga

SEQ ID NO: 84290 - DNA, 676 bp, Heterodera glycines
atgtcaacgaatgacgttaaggaagcggctgcctccactgttcttcctccgtcttcaagtcaaagcatttcaatggcttcttccgcggatgggtcaccgcttagagaggaaaacttcgtacattcattgaaatcgcaggtggacggagaaaacatcgaggaaatcattcaaagccagaaaaaagcgtaaggaaagatttatttctgggtttggaattgaccaaatttgggtcactaaaaattgatacataacatattttataaagaaaaagtttttaggttggaacgttttgagaagaccaacgaaatgctggcgacgtgttcttcgctggcagaaaagcgattggatcgggcgagaaaagactttgccattggaagggaaaagatttgccgagctaaatccgacttggactcaatcttccgacggatcgcctccttcaaacaaacattggccagcaattacccggccgaatttgtcgcagcgcaaagtgatacttttggcatttgcttgcgaccacacaattttttaaaattttccaataaaaaaatattttttagccgattcgcctcacaatcagaatagtgactgcatcaatgaacacaaaaagcaaacggatgactaaatgacgtaatttccgatatttaactcttttagaattatttttttcgaaaataaa

SEQ ID NO: 84291 - DNA, 148 bp, Heterodera glycines
cgaggaactcactttttggctgggtcaattttcttcagtgcgctgacagttcattaacacttttttactgaacgatgaaaatcttttaggtttcctgggtcctttgggacaacagaaatcagcagcacaaaaggacttcctccgtgcg

SEQ ID NO: 84292 - DNA, 586 bp, Heterodera glycines
  unsure (1)..(586): unsure at all n locations
atgcccgggcacaatcctaataaaaatattagagctcggtattttgaaaaaagcctggacctggacctggacctggattccatgttgaacctggacctggatttcctggacaaaaatccaggaaaatccaggtccaggaaaaatccaggctcttcgagacctggatccaggcctggacctggattttttgaaactcatcttaaaaatcaaaaaaaggtttgaaaaaattaattaattgcctagaaacatctaaaaatatctacttaataataataatgtatttttaaattaatttaatctttttttgaaaattaaaaaaaaacatcggtcacttgaaataataaattctaaaattttgtccaggaaaatccaggtttttcgtgttttgcctggacctggacctggatttttttcacattggacctggaacctggatttcctggacaaaaatccaggaaaatccaggttgccgaaaaatgacctgggactgggacctggatccaggaaaaaatcaggccctggatccaggtccaggncgagctctaanaaatatatatgtccttattttttcagttttgttggttga

SEQ ID NO: 84293 - DNA, 79 bp, Heterodera glycines
cgtaaagcatccaaatttgtgttgttcggcgcattggccaccggtggcagtgtgttgctgtactcgttggagaatagcg

SEQ ID NO: 84294 - DNA, 462 bp, Heterodera glycines
atggagcgtagaacagaatcacacaaagcgtaagtttaagaattaaatcgatgtgaaccgaaacaataaaaaatgcacgaattcttcagcagcagaaaacgcaccttcatcgtcgtctgttcattctttttcaaattctgaaattaacaccagcagaaagaaggatgttatgcgtgttgttctcggaaaattagacaatttgacgcacgcgacatcaaacaaaaagccaaaaatgttcgaagaggaaattgagtgtgagaagccacaaatggaaggagcattccctgaagccgaggatttccatcagaaagtgaaccttatttccgtttgaaacagttcaaaattgattttgtcacgcaaaaataacaaacacggatatgaaaaacaatactcacaaagcaatctcccaagcaaatgcatttttcattcatcattaatcaggctcattttcttttaaataaa

SEQ ID NO: 84295 - DNA, 1934 bp, Heterodera glycines
tcgtacgttgaacatcatctgaccctcgacgaacttcgcgacgttcaccccgattcgttcattgacgtaatcagcccggagaagagcgacggactgtccagcgaggaggccaagtcagacacactttttataccgtaccctttcgttacggtaggaagcgccttttggacggaggggcaaatgttctggcgccgcccaagcgcatttccaacttgcagttgtttgccaaacagtttctgtacaagttttggcttctcctgatgggtaattagctttttctcatccctccctaattaattcccattaattgctcattaattatttgtcaggtgccgctctgtgcaccattttcacttatttgatcaatttgtaccacgggacggaagagttgctcaatttgtactgtgccttcattctgatcgtcatcgtcgtggtgatgtcgttcatgtcattttggcaggaacgcaaggccattcaggtgaaaaagagacgaacggaattggaaattcgaaattcaaatgcacaattattctcagattctttatgattttgggcttcacatgccatccaatataagtgccatttattagcaattaatccattcattaatcaactaattatttgttcactttactgctcggtgattcgagactgtgaggagaagagtctgcagccggacaatctcgtcgtgggtgacgtcataatcatacggtaagcggagaagcacagtccgtatacggtggatgaccctgggaggacggacatttcgccattgaaacaaaattaaacaaaatgtaaatgttttttcaaacagatcaggacaacaagtgcctgctgatattcggtaaggcttctctctttatcttaaattatctttcattttgtatataatttaaatttccctaaattgaaattcttaagcattctccagtccacaggggtcaaaattgaatcctccgcaattaccggcgaaccccaacccgtcgactacactcacgaacccgctgctgctcacatttcgctgtttgatgcacggaatgtcgcactgaggggatgttactgtacggaaggagaagctgtgggattggtgatacgagcgggaaagtatacggtgggcaactgtaatcctcctgtctgatcacttctcacttctgctcaccaatttggttttacctctctctttgcattacttttcctgtctctcactttttttgtccgatcattcttttctttctgttcactctttctcttcttttttcctttctgatcacttcttcttctcctctgctgctgatcattccttctcttctcagatgctcggcaatttcactcacctccaatcgaccgttaagctgaccgagactcttctgcagaaggaaattgccaagttcgtgcagttcgtttccatcgtcgccttgtcaatgggtgtcattttctttctgatcggttgcatcgttacaaagttagcagtcatttcgcttttcttactcagtcattgctcaatttttggtttgaaaatgtgctctaccatttcgtcaccggctttctcatcattatgtaaattgatggctaattgaaagaaggcaaacccaaactttcctccttcgacagagttgccaatgtcccccaggggcttccggcgatgctaatctcccaaatggcaatcatcgcaagaagattagccaaaaagaatgtgttcattaagaagttaagttataacagaatgccactaaaaccaaagtaagaagtgatcattttagttggacataatcgacgaattgggcgccgctacggtaaatcaaacacaaactgatcaactgatcagtatcactttcattcacctggaggtgatcgctgccgacaaaacgggcactttgactcagaacttgatgattctgacggacatgtggtcggttctgcacatcaagcattaa

SEQ ID NO: 84296 - DNA, 106 bp, Heterodera glycines; identical to SEQ ID NO: 66704

SEQ ID NO: 84297 - DNA, 693 bp, Heterodera glycines
atgcggcagcaaatgcacaccggcgcagttcgtccatggccgatttgggaggtgcaaaaataaatttgtgattgattaaaatttttaacatttaaaaatatttatgtaaataattttaaacggagaaaatgaatgcttttagcaaattttaaaaacatttttgtaaatttttcaagacttggtaaaacaatgaagcaaaaaaaaaaaattagacattcaaatttattaataaataatgctaaactgtttttatctaatttgaatatttttttaattattaaatttaattactttttcgctcgaatgaaatcggttggccatgcaatgaaaacggcggcggaagatgagttacggtatgaaatcattcgatttgccgcccgaactacagcacatggcattccgatggtaaaaatttattatttttagagaacagcaaaaaaaattaaaattttaaaattaaattttaaatttgaaataaataaaaacttgaaattctaaatttatcaaaatattatagaaaattaaagacaacgttcttaattttctggcaaatttgggcagtattttgaagcaaatttctaaggacaaatcctagttctattaaatgcatacaatcaaagatttaaaagattaaaagatttattaacaaaattttaaggggttcctgaaaagccgagtttaaaatgaatttga

SEQ ID NO: 84298 - DNA, 252 bp, Heterodera glycines
atgccaccagatggtacgccaaatggatgtggatggccatttctttggcatcggttggcattttttgctacaatgtgcacggggtgctgcaaaaatattggcgcaaggacaaaatcaccactgttcaggtgagaagaatgtaaaagaatatttaaataaatttgacattatttaaaaagtttaaattttatttttttatttataaaattatatttcaatttaaggaatgtgattaaatgtttttgtatttga

SEQ ID NO: 84299 - DNA, 439 bp, Heterodera glycines
atgcgccgactttctgacataaacatggcaaaggattggtaccattggtgtacggtagattacagtagccaatgtcttaaaatgtttaatttatgcacaatgtttataagttgatctaatttctatgtttctgtccttattttcgagtgttgaggattttttaactattttttttttacaaactaattaatttaatcttattaaaaattacaaaatttccaaaaattttccatgcgcccgaaaatttttttatcgaaaaattttacttttagggtcaaaatctcagatttacatttttgcttatttgggaaagaaattgtaaacattgtcatttatcgaataaaaaggaaaacaattaccattacaatctggacacattgattcgatccagcttcttgaaaaaatagtaaaaaaattaattaaaaattatttaaataaa

SEQ ID NO: 84300 - DNA, 460 bp, Heterodera glycines
acattggctactgtaatctaccgtacaccaatggtaccaatcctttgccatgtttatgtcagaaagtcggcgcatctgaattaaaaatatataatttaaatttaattttttaagaacatcaattactgtctgttacgaccggaaagactgaagcgaatttgggaaatccgagggcgcgcaataccagacgaaggtgtttatataaaatacttaaagaattaaattaatcatttaaaaggttaaatattatttagctattatatttaaaataaaatttatttaattgtttatattaaaattcaaatttattttaatgcatttaattaattgagtatttatttttaaataaaaaattataggctcaccgtttcgttctgatttcttggcccaattgaaggatcttggctatgaaaatatgactgatgaagtcgcaattacaacgaaaacgcttgaaaagtga

SEQ ID NO: 84301 - DNA, 1101 bp, Heterodera glycines
atggcagtgcttagcaaattgacaagttcaacagttaccaaaaaggttgttttggcaacacttgtggaaggcattggccgtgcctcgggcgaaggtaaaattacggaaaataattctaagaaataaataaaaaagggataaagataatcaatgaaaatgaatgagaggtgcttttttctataccacgtccaactgatctcgttttttcggctgtgtgtcccgttggtttaaactaaaaaaattgtaaaaaataattttcatttaactgaattatgaacctcacccccccccccccccctacaaaaaaataaattaattaaccaatggaccgccattttcattatttttcccgtactaaaaaatagtataaattgtttatgggccaacaaaactgttgctgattgtgagcatattgaattatttcatatttaaaacaaaacaaagaaaatgggaaataaaaatattttccataaaattttccaaacaattaaccgaaattcctacaatttttcccaaaagtgtgcattgttcggcacggacatggccacgtgttccgtcggcgtcaaggccaaatgacatggaacagggccaaagacaattggtgggttttttgggctgctttcttgggtcatatcggtcagattttatcccggacaaaaatataaaaattaaaataaatatttcccgacggttgttcgaagcccgccatttttctatgcccgaaaaacttgctgaatggctatttttgtccgtttttgggtccaaaactgacttttgaggattttatggtcaaattcaaaacaattaattatttctgaggggaaataatgcgaaacttttgttaagcaaatcctttttaggcacttttacgttgtcggcatcggctttatcccctgcttattgaccattgtcttctgccatgtctattacggtatgtttcgttgttttttttactgtgaaagaatttacgggagtaagattttttgcaaatctgactgtgttttctggcgatttcgatattttaaacaaagcctggattggcccagaaaaaccaaggcttgtcctgacttggatttttgtgaaatttgttttaaaatgcaa

SEQ ID NO: 84302 - DNA, 1592 bp, Heterodera glycines
atggacgaagcaccgatcagcagtgggacaagaggttttagcagctcgagcagatggtcaggccgacgaaggtcaagcccaagcccatcacagaagggggtccgcttaaataattaattaaaattgttttcatatttaaattaattttttaataattttaaagtttttatatttgaattttcaaaatttatcaaagcattttatatcttacaaataataaaatgtcatgaaataataatattttttctacgaaagttttatttcatttaattttattttttaaaaataatttaattttattttaaaaataatttttattttattttttattttcggcttttttaaaattcagttaaaataaaagatgaagctgactgaccggtggcttaattgaaggaaatatttattattattttgtttttttccttctaaaactttttaacataaaatttaaacaataaaaaaattataaaatttgtgtttatttatttatgctttagtcccgtactgcgttggacggtttagctgcttcgtccgctgcccaatcgcctcagtttgtgtccggcatggtcagctggcgcatgccggtcactgtactgctccaaacattgggcctcctttcctacaaagaggcatagtcttcaaattggctaaatgtggcaaaatttaatttattcctgatcagatcattagctaattaaaagagattcatttaattgattgcttttggtggcattttgatcatcaaatcaattagtcgatcatgcgagttttgatcagaccaattaattcctcgatcaattagcaacagactttttccgattaattttggccttttgctcagacccattagttgataatgccaatgttggtccgacccttaatcccctgaccaatttgcaacagacttatttaaccgattaatttttggccacttctgatcagatcaattggttgaccatgtgaattttgatcacaaacttaattacctgatcatttagccgatcaaagtgatttaattttgctctaccggataacaactgatcaatttaaacaaaatcgttttagctcagtgatcttcgacgtgtacacccgcattgggatgagttgtgcggacagttgctgaaccagggctattatcagttgatcggccgagcgcagtggttgttgacggatagccaacggaaggttttcgtgccaaaaaaatttaaaaataaattcaaaaattatttttaaaaattccaaatttattttcgcttatttcatttatggaatttgcaaaataaaatataacaactttttctaagcttttttaaaagattcaccataacaaaaacaatttcatgcaaaatttaaattaattatttaaattaaattatacattttaaatgcaattaaatattttcaattaaattattattttaattaaatttagttgaaccgtgagcctcgtcttgcgcagcccattcagctgttgacccgtctccatgttcatgtgttaaaccccgtggacgcaatgcgctcttttctggacgaaggtgacaaaacaaataaataaacaatttcactaatttattaattgaaaaatgtta

SEQ ID NO: 84303 - DNA, 1145 bp, Heterodera glycines
atgaatccgggacccttatccgatcaagaccaaccaattgaatttcgttttggtttcagttgtggtgatggtgttcagcgacgggaggccatgtgcgttcgtgagcctgatgggcaacgattggaagagaaggattgcgaaccaagggaacgaattgtggagaagcaatgccaaatggccgcttgtccccattggtcagttaattatggctaatccaatttcatttgatcagttttattatacaacaaaaatttattcaacattgatcagtccagtaagttttcgagtcgatctcattttgtatcgcaaaatgaacgggcatctaaattttttgaacattttctaaggaaactcggcacgtggagtccatgttccgtcagttgtggccaggacggcttccaaacgcgccttgtccaatgcgtggattcggaaggacgaaaagtttcggaccaaaagtgcatgggcatcaaaaaacaacagcagacggagaagccacaaagctacaaagtgtgtagtccggggccatgcccatattggtaagaaatgaatggtttgtgctgaactgggcgaactcgttggattttttgaaggcgtgccgccaaatggggccattgttctgtgtcatgtggcaacggcgttcgcatgcgacatgtcgagtgtgttttgaagggccaaattgtggacgattcgctgtgcatgaaggcgatgaggccgaaaaccagctttcgatgtgtattgttggcatgcacagtttggcatggagttccacaggcggcggcgactgggcaaatcggagagcgacgggtgggtttaaaaattaaattgaaagcgcaggaggggaggtgaatgaatgtttgatcatccaggtgcgcaagggtgtacgaggactccgtgccgtggtcgtaaatggccattcaaaaaattttttgcaaaatggacgcccatcgaatagcagcagcagtgcggcggtgtcgccgaattgtcagtgccgctgttgccatcgagtaagaggcgggaggcggcgtggacgcggcggcggcgccggtggtgcacatggaatcattggcgccgtttttggacacggtgaacgggacggcgggcgcggctcctctcctgggcagcagcatgcttatcaatcgcagaat

SEQ ID NO: 84304 - DNA, 505 bp, Heterodera glycines
caaaagttttttacaaccacatattgccaatctaatttcttgcagattgaaagccatccattgcctgccggttctcggcacagcaaagcactaatagggtgtttgactcacttcaaaaaataattcattacccaaaagttttttacaaccacttattgccaatctaatttcttgcagatttaaagctatccattgcctgccggttctcggcacagcaaagcactaatagggtgtttgactcacttcaaaaaataattccatacccaaaagttttttacaaccacatattgccaatctaatttcttgcagattgaaagccatccattgcctgccggttctcggcacagcaaagcactaatagggtgtttgattcacttcaaaaaataattccttacccaaaagttttttacaaccacttattgccaatctaatttcttgcagatttaaagctatccattgcctgccggttctcggcacagcaaagcactaatagggtgtttgactc

SEQ ID NO: 84305 - DNA, 297 bp, Heterodera glycines
aaaaacaaaactgaaactgggcctggattacgtgataattttttgtgtactaataaaacccccagcaaagtccatgttcaactccgttccttttctgccttgacttggtcatgtccatgtcgtccctcccctttttcttcagctgatgcaacttggctccaagtacaaacggctggccctcttcaacaccgaacagcgccaccaagcagcacaggcactgagcacgcacagcaaagtgtacagaacgttcaacagacatggacatgatggacagcaacaacaaaaacaatgaataaa

SEQ ID NO: 84306 - DNA, 1277 bp, Heterodera glycines
gactcgatttaaatgatgagaaacggtcgggcgtttgtgtcgatgtgttcggcatttttcctgaactgaaagttgacgagctcaatgccgacaaatatccgaacattcacaagtttctctcaaacccttcaagcagaaaatcatttgacgttgataatttggttcgtttttttccaattttacaataattttccgggttgcaggcgcaaatttacgatccggcatttacgtatgagaaaaaaaagctttttaaccaatggaaaattttagaggatccaaagtggctactcttttagctctttgcagtcccataaacaaattttttccttaaaattgtgcaaccaggaaaaaactgccatttttggctcatttatccgaattttttttttttttgcttatatagatctaattttaatctaagagactggcaattaatgtttcgactcgaaaacttgtaaaaactccgaattttcactaattttcgccggttaaaatgctacccaatttcctcccattgtttggaatttgaaaaaaatggtaaaaataccaaattttcctaaacatttcagcagtcagtgcagcatgagcttgaggagttgatttcgctgaacgtcgactgccaaaagacaatccatggcgaaatcacttacatgtcgaccggcgattatccgaccattgacctgtccaatcggccaatgccaaagtatgaactccactcgaggcatggctatggcattcatcgcgaggcacggctgtgcagcggtgaacagagctcggacgtcggatcatttacaaatttgtaataattttatataaaaatttttgaaaaatttgtaaaaaaactgaaaattttggagttttttttgttgatcggtttaacattatcggattgaaaaattgtttaactcaatttttggcataggtgcaaagaattttttttaatttgatttcttttgaggcctgaaaatttgctaaaatttttatttggtcgtaagaaaattgcgatttaattgttaaattaatccgaccgaaaaatatttttaattttgtcattttccagtctcattgatcttggtcttttgtcatcgccagaggaggaggagccaccacacattttggacgtgccaagccgattttggacatgggcaaaagagtgagcaattttttattaacaaaattaaaaaaaacccgagaattacttcctttttttccttttttaagtgcaattaggccgaaacacaaattaaaacaaaaaaatttggctattaaaaaataaa

SEQ ID NO: 84307 - DNA, 744 bp, Heterodera glycines
atgcgacgattcgtcaactcagccaaatgccaacgattcgtcaactcaaagattcgtcaactcagccaaaatgtgacgattcgtcaactcatccaaaatttacttaaaaaagcaatcaaggtcggtgattaagtttttggatgaaaattttttgatttttttgcagggttccgcttcactcgctttagagggcggtggttccgctcgcggatcccttcccagccaacaaagactcggactcaactatctgttggaggcgtacgaaagccgttggcaggaccaaaggccgttcaatttctgattcgaacaccgacacgcggtaagaagaatcaaacaatggcacaatggtcggattgcttaacaatgcttcggtttatttagtaaccgattaactgatagatttacggcaacgcgatatgtctttcctggcgacaattgcaacggaagactcgaactaaacgaaaagtcagtgacccaaaaggaaaccggatttggcaaagcctttattttcccttttacaccttagattcctccttcattttttcaattgacttcgccactttggaccgttttaaggacaagattgcgcgaccagcatttggcccagtcgctattttttcattcattactcataataccggttaaatttgtttactctaatctcgcgatgatcaccatattgattcgttttgttgttttgatttttgtttagtaaaattagttttatgcaagtttttgaataaa

SEQ ID NO: 84308 - DNA, 868 bp, Heterodera glycines
atggctcttctccgattcgcagagaccaaaacaaatcgcgggaaaagtcttctatctcgtggtggatatgactacactttcgaggttaaaaggctaatttaatttggtgaaaatgttaaacggcaaattctaaaggcggtttcaaaatagacccgttcaatctgttcttcaaaagcgacagaagcgtttgcatagcggcggagagagttttgtgggtcttttgccaaagttgaaggcaatttccacaaaacaggacataagtgtgtgttcagaataagttttttaaatttcgtttaaattttaaagttaacggtctgaaagagcttgttggcccaacgtgcttaacaaatgccgacaaattttaccttttacaacaccgagatgtattttgtacaaattgcgtgacttaacttctgaccaattgggcagccgacagattactcaagtcattcctggcttttatcattttaacccttaactaaccaattccgctatttcagggttcctgtcccgacatgtgtcctgagaaagagcgatatatgcgagatgcaaaaaagacagtgcacttttacgaatgcaatgcgcatggacaaatggtccatgaaaagatggtcaaggattacagccgatcggctgctgatccggtgccctttttgtaaattgaattcggtgtttggactgagtgatatttccaatctcttcacttttaccattttaggatactccactcgcccatgagcttcgtccgctgaaaatattgcaactgacaatggattatctcattttcaatgttcgcattgcatttcccaaattatttggctttaaaatgacagatcgcgggcgaaattccgacaacttcgagcaatga

SEQ ID NO: 84309 - DNA, 73 bp, Heterodera glycines; identical to SEQ ID NO: 56843

SEQ ID NO: 84310 - DNA, 372 bp, Heterodera glycines
atgatgaacacagagttcggggctccattcaaaaatgttttgggagaaattcaattgcttagccaagcggaaagagatggagaactaataaataaaaagatttcggtaatattaaaataatattatttaaatgtccggcaacatttttgtaggttaaacgaaaacggtataaattttttatgccaattatgccaagaggatttgaacccactgcatggcgcaaaaggagcacccgttccgttacagttgcaaattataatggcactgcagtatttggccagcaacacatttgaaattcatatcggaaggcatatggagtgggccaaacaacagtttcatctgttataaatagagtcttcgcatcaatagcaa

SEQ ID NO: 84311 - DNA, 66 bp, Heterodera glycines; identical to SEQ ID NO: 53774

SEQ ID NO: 84312 - DNA, 547 bp, Heterodera glycines
  unsure (1)..(547): unsure at all n locations
atgattcgcctgccctttctttcgttggcactcgccttttccgccgttctcctcgtcctctgcgacgatttgccatgtcccaccgatccgtcgtccgcgcctcttccgcccgggtgccctccgcccccggcggacggtaaaaaagcacccgccgacggaggaaaggtcacatcagcaaaactgcttataattagcgaatagattccttttgaaggatggcggaaacaaaggccgaaaaaaacgagacaacattttacgtgccaaaagagaggacaaaagcaaggactctgaacaaaaagcggacgacgacgaagcggactgtgcgccacccaatggcacccctccgcccggcgcccctccgccgggaactcctccgccgggcgcttcaccgccttgccgtcgtcagaggggtgggcccgccggaggaagggggaggagcagcgcagcacccgccgaacggtccgccgccgaccacgccgaagccattgagaaattggcaaaaanaaagagaaagagcggatgtagcacacataagcacttnggatga

SEQ ID NO: 84313 - DNA, 87 bp, Heterodera glycines
atgatatcaagattgtttgattcggtcaataacttcaagagttatattgactcaaagttggctcagacggagttggcccgttccgag

SEQ ID NO: 84314 - DNA, 877 bp, Heterodera glycines
gccgtccaaccgttattcaaggaccgaactgtgccatgtccacaaactgaatggcgcgaaatcatcagacaggttatttgaattaaatcaatttctatataaattttcaactaaatattttcagagcattttatcatcggctactgtaaaaggacgtgccgacacttcgccaatgaaaattcaaatggcattgacagatcgatttccccacaacaaattttttgtgatttgttcaccgtttgagcaagacaacaaaaatccgagtgaaagtgctgttaacgatggacaccaaatgccaattgaagcgcaattaaggtaaaaactagagaacgggccggtcggttttttttttttggtttttttcgattttcggtttcggtttttaaccgagaaaaaccgaccgagatatttcaaagtttttcggttttaaaccgaccgaccgaattaatcaaaaaaccgaaacaattgaccgacttttttttaatgcgatttgttaacagattttgtccaaaaaatgaccaagtttgcgattttcagcaaatttttaagaaaattaaggatttttagggtccggcggtgccgataggcgccgccggggggaaaacttgaaaattttggccatatttttagcaaattttcatcaaaaaaattcccaaatttgtggattggatttgcggaaaaaacattgataatttcttgttttacaaaaacttagcaaaattttttggaaaatttgagtgaggtaggtcttggagagtgtactaacaagaagaatcaaaaaatttagcaaaaaaaattttcccaacctctagaacaccattcgatatagcttcaatagctctacaattttgatcaaaacaaattcttaaaaatcgaa

SEQ ID NO: 84315 - DNA, 225 bp, Heterodera glycines; identical to SEQ ID NO: 50965

SEQ ID NO: 84316 - DNA, 594 bp, Heterodera glycines
atgtgtcgcagatgcaatgcgaattggacggaagagcacgacaaattgtcatgcgaacagttcgccaaactcaaaaattacaaagatgacccattgtaatataataaaataattaattattaatttaagtgtcttaaattaaaaaattattctttttttagtgataaaaagatagcagatgcaattatccacaaatgtattcaatgcaacattagctttgtaaaggaagacggttgcaaccatgtaaaataatatttataaaatgagaaaaaaaattttatttacaaatttttctacagttttaagaaataatgaattttgaatttttaaagaatttcatagaaaaatttgttttttttttctttaaattccggaaataagaaccctggacctatttcgtaagaactaaaattgacagccctgttaaatttttaatttttttttttataaattattttaaaaatttagattttttgtataaaatgcagaactgaacaatgctactgctgcagaaagtcaattgatttatttgatcattattgctggtcatcaaataaaattaatatttaaaaattagaaattaaattaaattga

SEQ ID NO: 84317 - DNA, 266 bp, Heterodera glycines
atgaataaagttgaagcacaaaatgcagaacgcattcgaaaagtaaaaaaaaaaaaatcctgtaaatatttttaatttttttttaattttcagtgtcatgaattcaaaaagaaattttttacacctttttcaaaaaagtttgaccgaaaaatgaatgacaaattaaaaggatccaccagaatgaatgaacaataatcatctgaagaacattgaaggtcaatcaagcaaaaagcattttggtaaaaattatgaacgctaaaaaacta

SEQ ID NO: 84318 - DNA, 674 bp, Heterodera glycines
atgatcagtggaataaaattgacattcgtatttatactgagaattacatcggcgatgggtaagtgaataaattattcaacataaaatttactgtttttctatttttagacttctcgacgaaattcccggccctagtgatcagtagaagtgaatgaattgtattgttaagaagtgaccgaccaaactgaattgtggaattggaaattgacgtgctcataaaattgttttctttttttttgttgactgatcattgatcaactttggatttgtgttatgcgccattatgataaattcagtgatttcctgaaattggaacatttccgaccaaccgagcgaatgaatgcgttgtctgcctaagcttttggcttgcgcataggctttgtcttttatatgagttgccattgtctcgtttcttttttatttggttccaacaattaaaacagtttttctcatattttttcaaattttaatctttttgtccacggctaaatttttaaaagctttaaaattttctttatttttttttttgccaatttatcggcgtcggcgagttgtagtgtaccgtcaccccgggtaaaacaaaaaagtctcagaaactcctccccttaaaatttcactcttgaatgatttggattacaacaaacgatcatttgcccccgcattgggtcggggga

SEQ ID NO: 84319 - DNA, 449 bp, Heterodera glycines
atgaccttccttggcgtcgacggcattatggttgccaagtgagttgacataatttgttttttttactggtcggtctgcgttattctccgagccccccctcccccgcccccctccggttttcggaaaattcaccgacgcgttagccgcttttcccccgctctcccctaagctatgccatttatgacaaaaaagatgaacaatgcaattgatcaaaaaattttatttttattttcgtcagttaagaaataataattttattaaaattatacaatttctagcaaatccaatttaattcttccatttataatccccccccccttgaattcagaatgatgtgctccagtgctggcatgcagatgaccagcctggtcatgggccgtctgttgtgtgcctttctccagcaggacgacaacaaaactccgaatgaccagccaatgttgccagtttag

SEQ ID NO: 84320 - DNA, 614 bp, Heterodera glycines
atggctggcgccgaaacgcgagcgccgaaacgccatcgccgaaacgcagtggacccaaatgtgaatccatttcattcccttgccttccccgttcagctcaacgagaaaatcttcctgatgctctacttttggttcattctgatggcatttgtttcgctgctcagtctggccgagtggtgctggactcttttgttccgctctcaaaatcgctttatcaaacggctgattgagctgagccttttgcaggtagcgtcgaaattgtttttgatggcttactaattttaatttattttccacatcaacagatgattcccgaccccgagttcgacttcggctatgccggcacccgacgggacgagagcgggactgatgagtgtggtgccgaaacggaggatggcgatgagttggaggagcggcaacacggccgtttcaccgcggtcgcttccggtcttactgctgcaaaagctgagaatgtgtgcgacgacaatcaatcgggctcaccaagcaacaactccaccgccacaatggaggaaattgaacagcacgccaagcaaatgttgcgcaattccgctgttggccaatgtggcgcgtcggacggcaaagtgaaggggtaa

SEQ ID NO: 84321 - DNA, 920 bp, Heterodera glycines
atgccaaaacaaaacgaaatcgttttaaaatattcctttctggacttgacttggtttcttgatatcgaagctgttttctacgctatttctaaaacggttataccaaaccccagatttttgaatccggttttcagaaaaaatgccttgtggtgaaaacaatatttcacatttcactccataactttgtgagttcggcacggatcgagaccgggataagaccattggaaagagcagctcgagctctacaagaaggtatggaaagaaaaaatagttatttctgggactttttcagaaatcagaattaattctccaatgtggcccaaattttaggcccccagccacagccccttgcttctcccagttttaagtcttggatttgtcaaataaattcaagacttcaaattaataatcaaaaattctcttaaaatttttttgaacccaattcaaaaaaggaaaaaaatttgcagtcaaaaaattattcgaatttctccaattttgtttccataatttccgaaagttattcggtatcataatgccaaaacaaaacgaaatcgttttaaaatattcctttctggacttgacttggtttcttgatatcgaagctgttttctacgctatttctaaaacggttataccaaaccccagatttttgaatccggttttcagaaaaaatgccttgtggtgaaaacaatatttcacatttcactccataactttgtgagttcggcacggatcgagaccgggataagaccattggaaagagcagctcgagctctacaagaaggtatggaaagaaaaaatagttatttctgggactttttcagaaatcagaattaattctccaatgtggcccaaattttaggcccccagccacagccccttgcttctcccagttttaagtcttggatttgtcaaataaa

SEQ ID NO: 84322 - DNA, 1182 bp, Heterodera glycines
atggcattgctttcctatcgttttgatgttttggtggacacgcattttgatggaaaaagcgaattgacaatttggagaacaatcagaattgtaaaggacgaaggaccaaatgcaaacgataatggaccaaaaccgaaagtgtctgtacggatcgatggcagttttgtggattttccgttgtcggatcgtcaactgcccaacaaaatttgctttaagaaccttcagattcagtcagtcttaacttttgtgtacgctaaagcatttttatctttcttcagctacattgaccattccgtgatcaaatttttccgctccaagaagcgattctttgacaaaagtggcaccaaattggaagtgtttgtgcattcaattgatacgtatgtccaaccgatttgggatgtttttacccgcgaaatttggcctatttttgcgaaaagcattcgtcatttgggtcttcataatgccaatgctttggacaatttgcgtcgtcgcacttcgccgacacttctcactgatcttgatgaattgcattcgatcaattccggtcatctgtgcccagaaggaattgctgacgatggacccaatgcaactgctggccaagctttggccaaatggctgcacactccgacaaaaaatggacaaccaaagcaattacgtttccgtgcttatgtgagtccaccaaatttcgaatgggtcaacagcttcaaagaggtcgtctcgccagaattttcgtcaaattgtttttattttaccaattttgtttagacatttcgccgtgccaccacttctgtcagttacaaaattcaactttatttttgggtggaaccaatgccaattgaaccatttgaattggataacgaagtgacgaaagaaaagctgacactgaaacaggagatcgacgaattcgacttaaatgtgtataattggctgttgcaacggtgcccaattggggagacggcgacggcgccagttaagtgggaaaaccgcgaaaatccgagtgccaatttgaacaatgtcagatttgatctgtggagtttcgataaatccattgggtgagcagcaacagcatttgaattttatcgaaaaataaaatatttaattaattttaggccattggcgccaccagcggaagaaaaagaaggagaagaagaagcggatcaaagcaacaaaaatgtcgtctga

SEQ ID NO: 84323 - DNA, 1986 bp, Heterodera glycines
atgaacttccgtggtgcaacggaagcatatgccattgttcattcaatgccatttgcccgtctttcgcatcatgttgtcaaattggcaattcatttgccaaaccaacagcccattgtatatagggcattccagctggtgagcaaagctcaacaaatccagcaaggcgaactgccagaaacgcagtgttcagcctattggaaacaatggcaaaatgagtggaagaatgatccaaagtttaaggacattcttttcgaaaaagtcccagagcggttccgatgggcaaaggacaaatgggtcctgtacaaaaggcagcaaattaaaaggccacctatcggccgaattgttcctgtacccccatcggacccggaaaggttcgcgctctattcacttatgcgtcactttcctggagacccagaccatcttaagatggttaatgggttgctttgtacctcattcactgaggctgcaataatgcatggtcttcttgaagacgacaaaatttgggacaaaactctggcggaggcagctctgtcgcgctggccagatcagatgagatggctttttgtgagcatcctggtctatggccagccgagtaatgccatagaattgtggaacaagtacaaagaccaaatgtacaatccgcaaggcattattactctggcacagcataaagtagcagagcttgaagccctagccgacattgattggcggctgcacagctgctttaacttaagctgtgtgcattttagcctgccagacccgccaacttcaattgccaaaaatactgacgcggcaattgaagagtttttctttggcgatgatgatttgaatttgcctccagggcaaccaaatcctcgtccacagccaaatacccctccgccacttaacagcgaccaacagaaggtctttgatgctgttttgttggcaatacagtcgaaccctagggattcgactgtcccccgccgtttcttcatatacggcgatggaggcacaggaaagacattcctgtttggccaaattattaggcgcttgcgaaaggccccatacacctacaaagtgcttgctacggcatccactgggtgtgcagccattttgctgccatatgggaaaacagcccattccacgtttcgtctgggtagagaagtgtcattagacaaactcccaagcattccgctggagagcttctttgcccgtcggattcgtgaggcccaactcatcatcattgatgagatcaccatgcttcacaacacggtgattgaggtcatcgaccgagtgtgcaaagagatggcaattcgccagcacaaggatctcctcttcggaggaaaaacggtcattttcagcggtgacttcaaacagtcgctgccggtcgtgcctcatgaaggcttaaccgctcaggtgacagcctgttttcaaacgtctccgttgtttggtcaattcaccacgatgaaattgaccatcaaccagagactgggccaaggtcagcaagcgtacttgcaaatgtgccgccaaatcgggctcggagaaaccggagagcacttctggattcctccgcagttcctcgttaagagcaaggaagagctgatagattatgtctatcctaacttccaacaactccttggcaatgacaaagagctgctcaatcgtttgattctcgctccgcacattgacacgtgtgatgaagtcaacgagatcatgatggcgaatgtgccaggtcaagtgcgggaatacttgtccacggataagccccttgacgaccgcccactggacatcgatgagatcgagtccgaagtggctgcgttgaaccggcgcacagactcgggcatgcccccgcacagtctccggcttaaagtcggatgcgtcgtcgtccttcttatcaataaaagtgataaggaaggactgatcaatggcacacgcatagttctggaagaacttggcgatgatcgcctcattggtcgtgttatcaatagcaatgctattggcggccaa

SEQ ID NO: 84324 - DNA, 3186 bp, Heterodera glycines
atgccttctaaacaacgcaatttgaaaaagaagaagcaagatgtgtatcggcgacaggcagagcgatctgtcagtcgggataactcacccgtctcagacgggagtgcagatgggaatggagaggcatcggcatctctccggggcaccaccaccccaagcttaagtgctttgcaaataagcacgccggcgtcttctattggaagtaaaaaaagaggcaggccctcgaaagccggagcgaagccaaacttggctacgcaagaaagtatgtctctcattgacatacatcaaactgtgctcactcaaagtgaccagggttcgccgtgcaaaaaaaggggaaaggtcgccgagattgaccaacccatgtttgccaatgaagctattgctttaacacctgtttcgactcaaagtcgtgcagggcgacctgccaaaaaaattggaggcccaggccgaggcagactcagtgattccatgagcaaaagctctgaaatggatatcaatcttgtaaatgccccaatttcggcaacctcgcacactgtgcctgaaaaaataaatttcagcacagtgcaaattaatttcgcaaccacgcggaattttgcctgtaaaatttggagatgggcagcaattggcctttacgaacgtgatggcgaaacatcgcttgccccgagctctggcccaagatacattgagacctgttggaatgatctgactcagtttctcaatgacggttttgctgccacatatttagcatatttggctagcatttcacaacgaaaagtggtcgttgttgacccaatggtatggagaaatggcttggacagagtcatgccttacaaaaatatgacatttgggtacaaccctaatgttccggcagaagtcatacttttgccagtgcatttccctggacattggactctgattgtccatgatgttcagtggggtactcattttgccgattctttgcctaccccctatggcaggttggattggcaactgacggataaaattggaaagatcatttctgacattttgccgtcagcagtgttgaccgggatttttaatgcggtaaatcttacggtacaacacgatggaaatagctgcgggtactttgtgtgcctgtatgctgaatcctggcttatgaacaattgcacttttgttctgccggacttgaacatcaattatgagaagaagcgcattttatggcacataaatgagctttacggctctgatattgtgccgtttcatccaagggaaggtgtttcaacatctttcgctgttgtgtctcatcacaatggggatgtagcgcaaacttcctccaagcacatagtgccaattgaaggggatgattcagcagtacttccttcctcggaagatactgctgttcttgcgcaagcaccagtgatcggcgaaaatcaagctgacacccacggtgttgttgcggacacaattgtccagcaagaaccaatcgcgcaggctgatgatgtaattttcatcagacctaagacgccaccaaggcgatcaatgcgcgttcaaaaaaggctttcagcttctgttagccgttcgccttcaccggcgccgaaacgccccccgccagcaaattcgctgggagtggcaacgccgatcacacggcgttgctctgcatttcacaaggggtggcaatgcgctgcagcagcagccaaacatttcccggaatattgtgactccgggaaactcggtgacaaaaaatgcgccgattgcggtgcacatctcttctcacatgaagacagtagcatttgctgccggaagggaagagttgtgctgccaatgcttaacccgcatcctgatgagctcaaacagctgattgtggggaataagcaatcccgtgaagggaaagaatttgtgcgacacatgtcgcgttataacaacctgttccaatttgcgagcgtttccgctggcaacaaaccaagccctgctggcggtccgatggccgttattcttaacggagaattccatcgccgcataagcagcatgcaggctggtacaactcagattcctggctttggccagttgtacattctggacccagtcgaggctatggaacagcgtcgaaacaaccccaggtttactggggagaaaatcacaaacgaagatgagtttgtgcagggtcaccagctaaatgagcagactcttgagatcttagaacaaatgatccaattgcatcatcctgctgcgcaggcatataagcaggcgcgtgagcagctcactgagcttctccaacaacaaactccggaagagcttcgcttctttcgcatgactttgttgaatgagcgcagggctccagctggtctgaaagacccaaaattgcacccacaccaaataatcaccccttctacgggtgaagggatgttcgctattcatgcggaccccactggtgctcctccgcccaaaggaatttgggtagagaacaaacaagggcaattaaatgaaattgctcctttcagtccgtggactgatagtcttacgtatccattaatcaagccaatgggcgatgatggatacacaactggcattaaatatgctaagccaccatcgcgtaagcgaaaaggtgctcagaatgcatctggcctatttgactcggaagccgagtcagataatgagtcgtgcgagactcagtcaattgcatcatctgatgcggggtcagtcgcagattcagatgctgaatctgtagcatctgtttcatcgcagcaccggcggattgacaaatccaaacaatttatctccctgcgagattattgcaagtattatctcgcaataagggatgaaaatgtggagttgcaataccaccacatcctttcatgtggtggaggacttggtcagcgctggatccttgaccaggctgcaaaaattgattggcaaatagcaacatttttgcgtagacctgacatggatctgcggatcagcactccaaaaaatctgctgcagtatttggtcaaccaatacaacaggcagcaagcacggcaaaaccccaatgcacaacagaaaactgttgatgacattggcagtgttgttcggctttccgaacacaacgtaaattctctccaatattggaagaaaatgtatgaagattgcaacaccgtttttgcacggtgccatgacgcgaagaaagcgcgtctcttcattactttcacgaacaacagggaaatggcctga

SEQ ID NO: 84325 - DNA, 439 bp, Heterodera glycines
atggatgcatacaatttaaagtcggattctgcggttcgttttcgactttcgcgaaaccaagcctattttctggcatttgtgtctctgtgcttggttattatcaccgggctgctaatcgccgtgctcgtcatccaagtgaccacacaaaatggcgagaaacgaaaagaatttgggtcggaaggtagaaaaatggaaaaaataaaaatacaaaaatgaactgatttaagatatccgttcgtccatcttcgccaatatcaattcggataaaatagcggccaatttggaggcattcgctgagaagccgcacgtcgcggggacagaagcaaacaaaaaggtggccgatcggataatggaaacgtggaaggccaacggactcgagggtcagttgagggacaaaaagcaaaggcatttcgagaatcagtctcgaaaattcatataa

SEQ ID NO: 84326 - DNA, 1601 bp, Heterodera glycines
atggcgcaatttcttaaaaactttttgtttgctatgattttgttcattgaatttgttgttgttgttgttgttgaaagggaagagaaagtaaaattaataattttaaaatattaaaaaataatttaaaatttaatgacagaacaaaatcttcgaatgcccaaaggaaaatgcacggcctgaacagttgagggaattggacaagaaagagcgaagtgaaagaggtacgaaggaaaacaatgaaaataattaattaattaaaccaattaatttattaattactttatttattatgttgttttattttcgaaaaaatcaaaaatcatttgattttgctctaacatatacaatataagaaaaaaaataataattcaaatctgcttaagaatttgaacttttgtatgaaatgcaagaaacattcaaaaaaatgttttctgaagattcaacagttacttacaataatccaattacaaaaaatctgctcaatcgccgaataccaaaatggcacttcgaatttattgtcgaaaaagcatttcaacttttgagaagaataaaagtaaagcttaatttgtatatctattaaagatcagagaaagcattacattatctgctgatatagcatatcagcaccatctttaacatgatatcaccaaatcggtcgaaacaatttttgcatttttggtttttgaaatattttattattttttagtttgccttttttgacaggaaattttctaataatttagttctcattttaccataattttaagcttctgttccatattttccactgtgaaaaaagaagagaacatttctgctgtttaaaaataatttgtttttttaattaagcaaattgatctaacaaattttgaaaaatggaatcaaacccaagaaaaacatgaaaaagaatggcaaaaaatatcggaaaagggcgaatatttccatcgcaaaatatgccttctgcagggatttgcgcatcgaattgtacgcgacgaaacactgaaggaaaactcagaatggcaaaagtttcatatttcagtggcctccgaaatatttggcatcggagaagaaagcgaatttgaagaggtaattaacgaatttgaagaggtaattaattgatacgtaaaaaacagtggcaatttggggtaacgccaaggcatacggcagcttttatgtgccaatgcaaaaaaccatccgaaatttgttctgtttggccccaacttaggcaatttcgtataaatattcttaacgcacgaataaatacaaaacaaattaacttttacaaaacattaattttatttggaaatgccttttgattttaagaataattttgcaattttaactgaagaggaatacatggaacatgtaaaaaaatgtgaggaatcggaagaatattcaagaaaaattggagattatatgctttcttcgactttgaacaaatcgttttatcggtaagcggcgacggatttgggaaaatttaaattattttaacatttttattttgtattatcaaataattaaaatactttagaatgtgtcttcataaagtaatttcaaattccgaagaattccaacactttctgtgttatcacaaaagcatttga

SEQ ID NO: 84327 - DNA, 1888 bp, Heterodera glycines; identical to SEQ ID NO: 19589
  unsure (1)..(1888): unsure at all n locations

SEQ ID NO: 84328 - DNA, 582 bp, Heterodera glycines
atggcaaaaaatgtacgaaaacacacaaatttgagatttgcacaaaataatcgacaaaaattgcgggtaagactatggatggtggtgggcccccttttttcgaatcccgaacccgaattcgaacaaaaagttcaaaattaaattttttgtaagtcatgaaaatacattttcaaaggttttcggggacgctgatcacgagtccgtcatccatttcggccaaatccgcggattcaaacaaaaatttaaattttaaaaattcacatttgtaaattgttgagcttttaactatgttttcagcgcttaatatacctaaatggctgtattggaagagtttcaaaattttacattgaaaaaattgcatgaaaaactggctttgaatgacaatgattttgtcgaatggcttgagcatttgggactcttgcattcgcgtcgctcatgtccttgatgtggtggaaatacttcgattgtagcagttggtggaaattggcgttgcactacaaagaattgtcgggcaaaaacaggttcttggttcgtagtgcgacttttcggaccactatttctcgatagaactgtctaaataaa

SEQ ID NO: 84329 - DNA, 375 bp, Heterodera glycines
atgaaaagtctacttttgaaactttttgttggcctctgcttcattgactttacgtcaaatataaagtcaaaatttgaggactttcttgaaaatcaagaagcaatgaagtcgatccaaaattaccaagaaaagcgaatcaaaactattaaagaattacatgctgaactaacaaaaaaagggattaaattggcagaacgtagtttgaggctatatctttgtaaaattaagagtgccaattctgatacatcaaaagaaagtccaaacataccagaaataaaatttgaaaaacaagatagagaggaatatttttggcagatttttactcccaatatggatcattccgtaaaagactaacattaatttttataaaataaa

SEQ ID NO: 84330 - DNA, 447 bp, Heterodera glycines
atggtgattagaagaggtacaaaagtgattagaacaggtgaaaaagtgattagaagaggtacaacagagattagaagaggtacaacagagattagaagaggtacaaatttgatgaagaggtacaaagtgatttaaagaggtacaaactgtgattaggagaggtacaatggtgattagaagaggtacaaaagtgattagaacaggtgaaaaagtgattagaagaggtacaactgtgattgattagaagagctacaactgtgattagaagaggtgcaacagtgattagaagaggtgtaacagtgattagaagaggtgcaacagtgattagaagaggtgtaacagtgattagaagaggtgcaacagtgattagaagaggtgtaacagtgataagaagaggttcaacatggtttaaaattatataaataaggaaaagttttttattaaaga

SEQ ID NO: 84331 - DNA, 635 bp, Heterodera glycines
atgccctctggaagtgtgatttggcaaatcgggctttataaaaaaagcaacaacaatgatttcgagtacgaatgtgccgaatgttgtaagaatattatatgtaagaaaggcaacacctccaatgctataaaccaccttaaatctaaacacaaaaacagcgaatatgaggcgaaatatgaagatttgttgaagcagaagcgaggtgagaaagggacaatcgaaacacacttggtcttaggaagtggtacgttatattaaatgtgcatatgtattggttttttttaatttttaagagggtctttcatcattcgacaaaaaagtaattcattggatcgcatgcacccaatcatctttctccgatatcaacaacccgacaacaatcgcacttttcatgggaaacaatccgttgcacaaattgaaggatgagtcaatttatcgtaaaaaaattcttccaatggtctacagaatgtcaaatcaaaggtccaaaatgaattggacgaatgctcaaaaattgcttttacgtcggatatttggtcggacacttcaaacgcattgataaggttgtgtcttcaatttctttcaatttttgtcgtcaaacacaatataaatattaaaaacattttactgttaataaa

SEQ ID NO: 84332 - DNA, 1147 bp, Heterodera glycines
atgcaaagtttaagcccagaaaatcaaaaagaaattgaaatatttgccaaacattgctttgccgcgttgaaattgtttcaacaattcatcaccggtatttctttatgcaaataattaagtttcagtcagaagcaaaatattcatcaaaattgctaaaaacgcttattctgggctctattgcactttatgaatataaagttacaaaagaaattactcaacaattacttaattaatctaatcttttttggcaattgcctaacgctgagattttatatatatttgcttcttaaagcttttcgttcggatgatactaaaaagataggggtttgttcgaataggacattacggtggataatcgatcaaatgatgacagatcgcggcaatttgaatccgcgattcgcacgcggtttttctcgcgctccaccccttgttttacagcgaaagatttgagaaaattcatttttcctactaatgaaaacaatatcagcagcttactgttttatacaacaacaaattaagatgagcggttgtctcagactttgctcgctggtggaggacagacagtgtctgatcaaagctcagccttatcagctcaaccggcgcccactcgatctgatcggcaacagaaagggaagtcgtcacggcgaagaaaaaggggcgattggatgcccgatgggtcgagtaaatggccaaaatgcgttggtgccgttttgttggccggcttttccggctatatgtgcactttgttttggatcatcttggcccggagtcatattaatccattcacttacttttctgctgatgacctctctgttcattatcatcctcatattccgttgggaacggcggtggtaattgctgtgtacatgtcctttgttgtttgcttggtcagcatctttttgggcatttatcattgctttgtcaagcgttcttattagggaaacgatttttagggttttactttttttactgagctctctatggtctgaaacacaccaaaaacaagttttttttttctttggtgactgtagagctacttatagtgttattagcacctattttctaggtttttttttttagaacctaaaacctaaaagaaatttgaattattttggcattttgccaaaaatttagtaacaaaaatgca

SEQ ID NO: 84333 - DNA, 305 bp, Heterodera glycines
atgacaggttaatgcgacaacaaaaaaaatttaaaaaatttttttagacattataagcgattatttcctaaaaaaatatctcgagtccaatatttggattgccgaaaaaattggaatttctaacgccaaatggaccaaatcgcctatggataataacaaataaaatgaaaatttttggaaattctatgcgtgatcgctttataaaacggtatttttaaaaattttattggctatcatgttgtaaaattctatacgattttcacggggactgaagaaagtcaaaatcagtgattacattaaataaa

SEQ ID NO: 84334 - DNA, 801 bp, Heterodera glycines
atgaaaaagtaagaaatttatttatatatcagaaatcaaaaaacttaattattgttattattattagttaccattcgtttattataaattttcattttccagtcggattagcttcggattcgccgtcaatcagcaaacaaaatttgaagggataaatcgtagccgcaagggcatttgtgcatatgacagtaaaggggagctttggatttacggagagggaagaggaataacccaattttcctacggtgttggtgataccgtaggaattgccgttaattttgcctctctgcgaatcattttcaccaaaaatggacaatgtttgggttggaaataaataaataaataatttaatttaaaaattcttaaattatattcaaattaattgccttttttcacagactgctatgattttatctattctccatttcttgttggtgattatcttcatccattcgtttctttgtacgacactggtgacaaaattgaggcgaattttggaccgaaatttaaatgggattttgcaactttgtgggataaatgttcactaatactgatccttttattatttttaatgttttttatgcatttcttcttcaattatgttatggttgtttgattttttaaaatgtaagcaaaaaaaaaaatattccgcgaaaaattttccatccctattttacttttctatgtaggacaattgctagagcagacctaactccactgggctgctaaaattttactttcagtcaccctgggggcatgatctgatcatgatgatgcaattaacttttttacaccaataaa

SEQ ID NO: 84335 - DNA, 448 bp, Heterodera glycines
gatcggatgatgatgagtttcgtctagacgatgaagatgggcgaaagaaacaagaaagagaaacgccaacaaacgcaggtaataaaacattattataaaggagaaaatattatttttcatcattttgaatgaaattgttttatagtttaagctgatactgaagaacgattctcacaattacaaaatgatcagaagaaacttttggaaaaaattagtgaattggaaaagcaacaaaaagaacagacaaacggcgaggagaaattaaaacaaaaataaaatttgtcaatattaaataattatatttaaatttaaaaattgattcgatttttaagctactgagaatcaattgtcaaaaatgttggaaaaaatcagtgaattggagagagtacagaatccgagaaaggtaaaaagggaaaaatgaattaaaatttaatttctaaaaaataaa

SEQ ID NO: 84336 - DNA, 672 bp, Heterodera glycines
atgaaattctgtattttattatttttatttttgattgccctaattattccaattgaatcagaaaagaaaaaacttcaacaaaagtcatttgatgcaatatttggagaaaaatggcaagaaaaagaagaagaaaggcgaaatgaactcaaaaaaagagaaataattgcaaaattttataaaataaaagagaaaatcaagcaaaaaggaagaaaatattcagcaaaagaatggaataaaataaacacgaaaatagcgaagaaattggggacgaatcgacacaaaatttatgaatggattaaagaaattggactttataaatatcacaaatcaaaaactgatgaacaaaaacgcaaaattgtgcaaaaattcattgtaatgaaaaatgaatttaaacaaaacagaaaatattcgcaaaaagaatgggagaaaaattatgccgaaatttgtaagaaaatcggaattagccgttcaacaattgaaaaatggaagaaacaatttggaattcgctgtaaaataacggagaacgaaaaaatggaaaaaatgaaaatttattggcaaacaaaaaaagaaaacataaaaatgactgacaaagaaattgcaaaaacattacaaaaagatagaaagagcatttcaagatggaagaaccaatctagtaaaaaattgaagtattaa

SEQ ID NO: 84337 - DNA, 153 bp, Heterodera glycines
atgcgtgcggtggtggccagtcgaattccgccaagtgccggactgagcagctcttcggcattggtctgtgccgcggcattggccacgctttgtgtgcaaagtgccgactttggtggtggtggtggacagcaaatttttgaacacatttcgaag

SEQ ID NO: 84338 - DNA, 2132 bp, Heterodera glycines
atggtgcacaaagacgaaaataattgcgacggcgacttgcgactgttcgctatcgtcggtcggtcgcatgtgctcggcacggaacccaacgcgaaaacagcggcagtgacggaggtcagcagcagaatgggacgaaagtggggacggggaaatcgttggaattttcgcaaaatcactgcaaattttgcagttttaagtggagcaaaacaaatttagaacgagttgccacagtcgtattccgcgacattgccaccgccccaattggacgctgccaccaactttttttccacctccaacagtgacaacgacgttttgcccccgtttgatttggtggcatccgtcgcgcttccgcccgcggtgcaatgccgcaaattttttgccgaccttcgcccgttggacagaattttggcacggattgtgcgtccgggtgttgccgtccttcacgtggagttggtgtgcatgttgagccgatttcggcgcactttgctcacctttatgaagggccgattggtgggcgcgtttctcttttctttgcaatctccgaatttttgggaaattcctgcaaatttgttctagctacaaagataattgcaaatctggcaacccatttgattggctgttttttctatttgtttttgtgtcgagaaaaccaaaaaacaaaaaaattattattattattttctaatggaaaaccgaagccatttttgcagtccattctagaaaagagcttattttttggcttttgctcaataaattgctaacattcggttaaaacaaatccaaatgccccgattttgaagatttttaaggaaaatgacgcctttttatccgttttttccgttttgtttttcataaatttctttaggtccccgtcccatttgaccggaccaagcgcttttacaacatcagcgactacataagcagtaagtgtttggtggtctctttcctctctcctttctgtgcgccggtgcggttgggccccaaaatttcgtttcccccacccgtttgagccaccgtcgtgtccattgcgcccgccagcgaagagttggaaattgacgagaacgaggtacgtgggtggacggggacggacatttgggcccaactttaggcaatcattaagaattggtgtcccgacgaaaaaaaatgttaaaaatttgtagggtattttttctaggcttaaaaaatgcgctgatcacgaatctgagctcagattttgaaaatcattgatttttatctaagattttttgtcaattacttgattttatctatttttaaattatttttaaaaaaagtttagcaatgaatttgggttaaaaaatgcgctgatcacgaatctaagctctgactatgcatgaaccttcattttgtctgattttcatcaagtgtcataaaaaaaataaaccgcaaccaagcggactcgaaccccaggcccccgtctcatacgacccctagggattaataattaatttcaaaaaatcgtaaaaattcaaaacttgacttctccatacatttaatagatctttgaaagctgtttttagtatcagttttatgtccgactaattttcttaattttggaaaaaatcaagtaattgacaaaaaatcttagataaaatcaatgattttcaaaatctgagctcattgtcagattcgtgatcagcacattttttagcctagaaaaaatacccgacaaatttttaatattttttttcgtcgggacaccaattcttaatgattgccaatttggcaaattgaattcggcacattcgttgtacggctttaagaccattttggaaatgggcaaaatatgggtaattttgtaaggctgtcccaccctccatttttgataaaacctaaaaatttggtcataaaaacattcttacaaattatggggggtttcatttcgaccaaaagacaaatgatccatcccccaaaaagccatgccattgacactattttaaaatttaaattttgctatctttccaaaattattccccttttagaagagtgtcagtaaaaacatcgacgatctgaaggagggcgcagttgtcgcgcagaaattggtgaaggcgaagaatgcgtacgaggaaatggtagcgaaggcggaggcgttgctggccaaagcgaacaaatga

SEQ ID NO: 84339 - DNA, 1632 bp, Heterodera glycines
atgcgcgtgtgcattgaccagcagttttttgtcggccaatggcacaccgttttgggccgtactccgaccactaaaatgccgcaaatttgtcgcaacatggcattggtggatgaccaatcggagcccctggtaccgaaaattccccaaaaaacaaaaaatttgcttttttttttacagattagtgcttttgacatcgcgatgacaaaaaccccgctcaaatttccgaatttggaggcggatgagtcgggcgtgttcccagcggacatcccttgtcgattcgagctggacgtaggggcattggtccaacttttggtgatcaaattctttcagttgactttctcataaccattcctatgcaaaaaacggcaaattttttacggagcagaacaattttaagagcgaattgtcgccgccacatttggacgccgctgacagcgacaacgtcgttttgggcagagatgccatttttatttttttatggattgactttttggaggacgtcaaaccgtaaaaattaaaatgaatttgtgctaactcgctcagaaaattcataattttaatttctcactcaattactttgtctaaacattttcaattgcatctctatagtccatgcatttccctcatttcttccccctacctaacattcaaaattagaatttttctgcttttcattttttccacttatccttttgtgcatttaagttgtatctgccatttgtgtacacgcatctaacgattatgagcggcggtcgaccaattaccacacttgcagaggctgtaagtatcttagctagagttggcaaaattgaggcttggattttgtaaatgtttttccagttttaagtggtctgattttgggcctaattgtaaacatgagagtatcatgcattcttccactaagtaaattggcgattatgaccacaattcacctttcccatgacctaattgcacacaaagtgcccattaatggggttggggttgagaaatatcagtttttcttccataaattagtcatccacaaaatggtacaaaaaaagaaaatcctacccctcgaattgctttttgaattgaccaacgcactccgtttcgatgtccggtggggcgtctgtcgagttttcggaaatttttgacactttttgctcaaaaaacaattcgcctggattcgggttgaattgacttcctgggaaacccttcgccagatggtttatataatccaagctttaaaccatcaaaattttaatctgatatgattgaatttagagggctgactttggcagagctaagggccagtttaaacgtgctgtcatggcacttccaaaccactcactggacggtaccttcagctgtaagccatcggggccgcagttctttttttgtcgggcagaggaggggaagggggcagagacgactgattcgctatttcaattctatgctttacatgcctaatttctgcagttgaaattttagctttgagcgcctatttcggcttggactcgagcgtcggtgttcagattgttcgtgacttggggctgaccgatccagcagccatttttgaaaaacgggtggaccatctatgtgagatggtgtcagaacactgggacgtccaaatgtttgggcaagcgactcgtt

SEQ ID NO: 84340 - DNA, 977 bp, Heterodera glycines
atgcttcactatcaattggacggtgatcactatggcagtgatcagttggcaatgaatcaattggaagggtgattggggaggaggacagtccaatttaaccaattacagtattccaaatacataaaatcagttaattattacaaaatttataattttctaaaaaatgggtgtccgaaagctgtaagtaactttttaacatgccaattaacttttaaagtgttgcaaaaacctacacttaaattagaaaacttaatgagatgagaatttggctgggtgtcgccgaggatccccgtttagaatttgttccaagttgcccgaaattcaattttttgcgacctgaatttttttaaaatccaacccgaaacacgaaattttgaaaaggagggacaaaatgcaagttcttaaagattttggccttattatttcgattattcgaactgctgaaaatgttccgctcgcaaatcagcaagcaatttcccattcattttgctaggcccaaaatttggttggaatgctcggacgaagctcttcagtggcttttgcaaaatatgccgcacgttgttctgaagttaaaaagtgtttgagtgtgaaggaatgaaaagaaaatcctaaaaaaatgccaaactgaccgtccaactgctcttgggcttgggcccggacttcctcagattgacccaaaggtggcaagtcgaattcctggatggtggccccgtcggaactgtgaaaaagtatggtgtacaaaatattttggcgttgggtgtaattaattcctacccagtcaaatttaaaataatttaaaattgaattttaaaggaaaattttgtgttaaaaataagaattgaaatatttaatttaatttttgaaagttctagcatttgattttacaagaacctgggcatggatataaatttatgaaaaattattccttttaattcaaaataaggtggaaattttttttaaataacttaattttgcta

SEQ ID NO: 84341 - DNA, 1554 bp, Heterodera glycines
atgaacagttccgttttggttgaaagcggcgtccaattcgaaatgccaattttgtttgctttgtccggcatcgaaatgctgctaaatttggtcgagttgcccacctccgggatgaacatctatctgatcggacgaacaccgatgatccatcgcaatttgaagtttattctgctctaccaaagcgcatggatttttactgtgacttatttaattttaaaaaatccaaaataaaaaatgtatttttgcccaaattattttggaattgatttcttataattacttattaattaataattaatttttcattttatctcttttttaattggcttttccttttcctttttcagcgttccttcgcccgcttttccatttgtctgctcaaatttctctctgccaatgctttggtcagtgagcagctccaacccttcaaatttgcttatcagctgagtgcttacaatcgcaattttgtgccgcacattttgatcattgagcgacttatggccaccttttggcgtaaaaattatgagcgatccgtcggttggcacttttcgctcggatggagttcattcgtggtacactttcattacgcaccgtttgaatttccacggtcttttttccgtctctaatcattgctttaatttggaatggaaaataaatttaaattttggtccaaaagtttgtccatttctttggctggaattttcgcttgtcccctttgtttccaattccctgctgaagaggtccaatttctggctttttctaatcccggcatttccctgtgattacggcacttcgtttgaccacttgccaattgcgtctaattgttgttttgcctttacgctcatttctttttgccagttcatttggttcagtttttcgtcgctttgtacaattcgttgtccacaagcacaaaaaacacttcactctccggcttaatcaccacatttgtgctgctgcttttgggcttcattgaactctttgtaattacccctaattaaataataattaaaatgaaataactattatttttaggtttttatttggctatggcactacaacaaaaaggcgtatatgaaaagtttggcaaatgtgaaattgcactgcttaaccgagcgataccaagtgaaagaagaagcatctcttagtcagaagcaaaatttaaaactgttaagctgtctgagaacattcgcattggcaagcaactgatgccaacagtgattcttcagcttgtcaatgtgttggccacctccgtttatttgtccaccacaaatttcggcatttccgtcaacccaaacatcagtgccatggtggtggtcaccgtgacaacactttgtggtctgctcattgaagtcacaatgattacgtaaatggagattaaattatttctttcattaattaaaattacgaaacataaaattccatttataattaaaaatgcgacaaaatgccaaaatatgcacagggaacaaatacataaaaaaaaaattcattttaaagtccaaattttgaccgggcgcccgcctgggacgccttttttcaaaatttgtggaacta

SEQ ID NO: 84342 - DNA, 56 bp, Heterodera glycines; identical to SEQ ID NO: 52733

SEQ ID NO: 84343 - DNA, 216 bp, Heterodera glycines
atttgaatgagaatagaaagagccaggttcgatgaagttttggtaagccaaaaaaaaatccaaacatttaaaaatctataaaaaatttaaaaatgagaattcatgcgagattttctggaaataagcttaatagggcctagttaagctgtaaaaaaaatttggggcgatttgaaagagaatagaaagaaccaggttcgatgaagttttggtaagcca

SEQ ID NO: 84344 - DNA, 349 bp, Heterodera glycines
atgcatagggcgagtgctgaagcggcgcagcgacgtgccgaaaatcgacgactggccaatgcaggttaataaaaaagaaattcgtgaaaatttgatgttcggcctttaaagcttagaatctcggcaatttataagtacaagacaagagcaaatacttgcattaaaaaaaaaataatatactaagaaacgggggttggtttttgattgaacgcttaaattgcagtagagcccaaagctttcaaactcctatttagtttattattaaattctaggtgcgccgccgattaacgttgatgagatgacccctgcgcaacttgaagcggcgcaaggagggcttgacgggaactga

SEQ ID NO: 84345 - DNA, 160 bp, Heterodera glycines
agttcgtttcaaagtagtcaaagttgccaacacgtcattgctcgcacttttccgtggaaagaaagagagacctcgttcatagaaactgacttcgcatgataaaggatttttcctttcattgtttttgttgattgcgattccgaaataaattgttgttgaa

SEQ ID NO: 84346 - DNA, 1858 bp, Heterodera glycines
atgagttcagccgacggcttcttcatctccatgattaatttgttggcttatggtcccattgtcccttttgtcttcgctttgctcattggcattccgtccgccatactgtactgcttggaagtgtgggtcatcatcgccaactttgccgattttaactcggcattttttgttcttgtcgttgtccgcgcaattttggtattttttcataatttaattaattaaaatatttttccagagtttggccaattggatttgccaattttttgagaatcgtttcggcaaaattggcttatttctggcctttttccatcaattgcccgaatgtgctttgtctttcctttattttgctgtcaattttgcatttcatgtggaaaatttgttgacagtatttctgcttttgaatcggttcagctccattttgttgcccttcacttacaataaggtgccaattcagagggggcgcagtcgttatttaaaaaacctccaaatgatttgatgaaaaattatttataacttagctcttaagcaaccaaatttttaattcttcatatcatttgattcgattgctctaagtattctctaccagaatacaaaaaatttcgttaagtttcaaaaaagttatggctagaggaactcaaaaaacccttgttttttgagcatctgtggccctaactgttttgaaacttaacgaaattttttgaaattttgtacactgatagagaacacttttggctatcgaatgttctcaagaattataaatttatattgcttttgagctaaattataaataatttttcaccaaatcatattgatggttttttaaataacaacatagccccattcagagggcattaaatgcaaaaagacttaaatatagtttatttttaattaatttccaattttttttgtttcagttgtggcgttgtgcattggtccccgctttgattgtctctttcgtcctcccacttccgttcactgtgccaattttcagcttacaaatgttcattcacatccaaaatgacaatgtcagcttcacaattgaccattacaagaatgaaaatgtgcgttatcaaataaatatataaaatggaataatttttttttaaattaattttttgaatggttttggtatatttatagagacacctacaatatttggcccatccatctttatttaaaccttgtacaaattctgtaaattccttcttttcaaaaattcttggaatcacaaaaatttaatgatcaaataattgattttgtcaattatcgccattctatcgattggttttccctaattaggcggtgaaaagcagcaaaatctccgcttggtctgccattttctttggcatcatttgtcttctgttgaatttggcctctcttgttgcgtacaaatttcgccgccccaaaagtgttgttggccaagtgcaaagcaattacagcactaataattcaatggtcgagcggaaaatgaccatttatacggtggtctcttttttcggacaattaattatggccattttcatggtaataataataaattaattaattactgttatttgccatgattatgacagataattgtttacgtcacgtccactcaatttgttgatgaacccaacaaatgcaccaacaatggccaaccggcacagtttggcctcagcgcagagcaaacgcagacgcttttcctggccaattacaaccaatacccgtgggtgaacgacctgagcaccatcgccatccccgcgtggttggtgcactcacagatgaacaaacattaatttcaacaaattaaatgattatttaggctcttattgtgggcttcaacaaaaatgcgccaattcatttccaaaaaatttca

SEQ ID NO: 84347 - DNA, 1514 bp, Heterodera glycines
atgaaaattgacatattattactattatgcctattcatcatcaaaaatacaattgatcagactgtttctatgaaaataaaacaatcgaaaggatttgatcaaatatttggcgatggatgggagaaaaatttggaggaaaatggaatggatcaaattgatcaaaatggaacaattggacaaagacaaaatgacgacaaaaataggacaaaaaatggcaaaaaaagtgagtcaaaaatattggcaggacaatttgatcaaatatttgatcaaaatttggaggtgaaagaagaatcgggaagcgaatgtgatcaaatggaacaaatgccagaaaatattggacaaaattgtgatcaaattcgaatttcaaatgaaaaacaaaaaagagaaattgttaaaaaattccataaaataaaagagaaaattaagcaaattggaaagaaatattcaaagaaagaatggcaaaaaattgaaagaaaaattgcaaaaaaattaggtgtaaatcaaaggaaaatttacaaatgaaaagagaatttggaatgatgaagaacaaaaattattcagttgaagaaaaaagaataatgttaaagcaatttgatcaaatatatgcaaaattaaaaatgaaattaaatgaaaaattggagggaaaaagagaaaaatgcaaaaaaataatagcaaaacatttgggcattgaaataagcaccatttataaatggaagaaacaattaaaaagtggaaaattggtgcaaaatcaaaaaaatgatgagcaaaaaaaagaaattgtggaaaaatattttaaattaaaaaatgaatttatgcaaattgggaaacattcacgaaaggaatgggaagaatttcatgcaaaaattagccaattatttggtttgagttataagacaatagaattatgggccaagaaatttggcattattcaaaagaattcaaaaggttaaatagttaaagaatttaatttaattaatttaatttaattttttttacagtgttaaaagtttacacaaatgttgaaagaatggaaaagatgaaacaatattatcaattgaaaagccaaaatccaaagctcactgatcgaaaaatgagcgaaattttgaacattccaaaacgatcattacaaagatacaaatcagaaaccaaagtaaaagcaaacaaatttagtatacaatagtcggtcagtcattagcccgcttatacggtaaaatggagtcggaaattgaaaaaatccaaatatttttatgtatttttttttgtaattttttttcttacaaattaatttgtttaaaatgttctactgtttacacaaaattataattgcttttataaacattcagtcttattaccaaagctcactgatcgaaaaattgacgaaattttgaacattccaaaacgatcattagtaaaaagcaaacaaatttagtatacagtagtcggtctagcctctaaattttccaaaaaattttgttaactttcaaaaaatttatggccaaaaatgttcgaataaa

SEQ ID NO: 84348 - DNA, 329 bp, Heterodera glycines
aatgggctcaaccggatgccgaacaagctgaatgccgacggtactttgcctatttacttcatggcccgcaaaaaatggtagtgacttgctcttaatgtataacaaataaatgacatttcgatgcttcttttctttggttgttcaggagactccaaaaactgggaagtgaacccttaatgatttcagttttgatttctagtctttttaagacaattatattgtctcattttgtgtcatattaatgttatatgcccattccatgctgtaatgttgttgccgaatctggtgtcgtttcgagcgcggttttcacgaccattcggatgtggaga

SEQ ID NO: 84349 - DNA, 736 bp, Heterodera glycines
atgaatatgaaaaattcaaaaaatggtattatgcgaattataataacgggtttattttaggttagtttaaaaatttttaattgaactgtttaatattttagaagaaaaattggatgaatattgttctaatgacacggatattttgatgaaagcgcttataaaaatgagaaaaatatttatagatataacacaagataaggaaactccaaatgggattgatgttttgagaatatcgacgacaattgcgtcttcatgcatgaagtagggaccaaaataaatgaaaataaatattaatctttttagcatttttcgggccaaatttttaaaaaacaatgaaacattacctataattcctgagagtggctttgagccgaaagatagtcagagcaacatagcgataaaatattttgaatggattatgcatcgggacggggttaaagcgaggcatgccggaaatgggggagaaatatcgcttttgggcgacaaaaaattaaaaattgattgtataattggggcgcaaaagagaataattgaatttcaggtaataatggaaatgaaataaatattaaaaaatttttagggatgcgcttttcatgggtgccaaaattgttataaggggtatatgattcaagcgaatggatttacggcagagcaaaattatgaaagaacacaaaataaaatggagagattaagaagtgtagggaaaaagatggggtatactgtagaagaagtttgg

SEQ ID NO: 84350 - DNA, 1731 bp, Heterodera glycines
atgactgtcacggcggagccttctgacgacaaaaagtcccttccaacagaccttgccactgcggagcatcctccgcccgtttctgttcctggaatcactgcgcctcaacaccctgtacgaccaatatacaactcaaaattggcaactcagaagaaacgagcggcgatagagcgcgaccgactgaataaattggccgaagttcaacgaatgaagacggaactgtacaccaaacttgttgaacaacagaaaagtttgttgaagaagctgcagcagactgaggacaaggaagcgaagaagaaaatagtgaaatatttgaagacattcgagcttaaagtggatggagtgaaaaccgagctggaacaattagcactgaaaatgcgcgaaatgcaaatgcgacaaccgcctaccaagcgaacgcgtactggtctttcgatatccgaacaacaactgttagacaatggggcagaactgggctcgcaattggaaccaagtggaactagtcttttccaagataataaccaacttatttttaaattaagacaaaattcaccagcaatcgcccagtaaatacagcatttccaacaagaagttattgaagtgagttaacccattatttctgttttttcttttccatttttagactttgtcgtgttgtttacgtctcggcttgtccccaggaatttagtgaaaaattaattcttcatatggaacgatttggagaacttttcgattacgatatcaatgcaacgcctcaaattttcacatacaaggagccacttgatgcgcaaagagtattttctgaatttagtccatttaacctttgcgatccctgttttcaaaattgttattatttgaggctgtgaatgaagcggtgggcagttttgaactggcaaaattgaaagtggaatgggcaccagtggcgaagggagtgaaggatgacaaggacatagtgccagacggggagaggaaaccatcggtgttgcatttgttttctttgcctaactaaattatagtaacctaaattggaaggattatataatcataaattttagatttcaaacaaaaaagtattttacggtcttgtaaaattaatttttaattttttttaaatttaggagcaggtcgctgcaaaggatttgatcgctttgctggaatacgatgaggaagaggaagatgacaagaaggagggagacgaggaacagttgtcggacaaggagggaaatgactgattcatccagaccaaaccgactttaacatccaatgatgggtagtgtcgttcagttcaagctatcatgacattaaattcttccaaatcacctctgtattccgtagttcagtgacgtacggtcggtcttacacgtaaacataaaattagtttttattttttcccaatgacttttacgtctctgctttcatagtcgttaaacatgcaaatcctatgtaaaatcggtagaaacttcgatctgtgtgatcatttcatttccagttgttttgacaatataaagtcccactttagcattttccatggtttgcacccttttatttgtcttgtttcccccacccaacatttttcatacaaatgggactgccagtcccttttcatttacatttttggttaatctaagcctatcatgaaaaagatattcaaagattgaatcatcttaaagaatgaagccaaagaaaagacaaactgacaatgagactcaatgttcaattgtgattgttttttta

SEQ ID NO: 84351 - DNA, 387 bp, Heterodera glycines
atggggaaaattaaacaagtaaacaataaatacaaaaagagtccaaaaactgcgcaagaatgcaaaatttgtgaaagggctacacttttcaagtattacaaaatacagagctgtgatggtaagccaaaaacataaacaaaatgaaaagtttattgccctaatagaacaaattacataattatttttaaagcaattaattagagaaattaaattattatttttttagcttgtaagcaattttttcgtcgtacaatcgttgctcagagaacattcatttgtccgaaatcaaatttatgccccataaataaaggtagctttttcacatatgtaaatataattttaattaaaaataaaaagtttaataaaaattaaaattcgaaataagaa

SEQ ID NO: 84352 - DNA, 944 bp, Heterodera glycines
atggtcgaaaaaccgatgaaatttgcattactagtaagttcattttaaaataatttaaaaaattgatcatatttctttaataaagcaaaaataatggcgacacgaaaagtgaaaaattcaaaggaggatcttggccttttgatgctttatgcggtcaaaggagaaggaaaaccagagttgtttggatgtgcatgataattttaattttgcaggctaattaagaacatttagacctaccaatatacttttgtcacttcggctcaccatggttattttctagcaaatataaatattatgcatgtatattttcttttaaaacatttcctatgcatataaaaatattttatgaatcaatataataattgatattttaaaaaaatatttaattcaaagagcttttttatgaatgttgctaaaatgaattttatattatttcttccttttctctatgttttttataataatgcaacaaaattaaagaaatcagaaaaaagtttggaaaattgcaacgtcaacaaacaaattaatgagcaattatttaatacggacgaaatgcaaattgccatctttctaagagactttgcaaatgaatcgaatgaccaaggcaaaggaaaagcaatggaccaaaatggtggtgaggaagcacagacaaatcagcaaagcaatgaattaattggtagtttagaattatgccgactttcgggggtcaattaggatttccatcagcataatacaaaatgagggcacgttcatgagttcaaagttaggcaaaaaataatattggccagttttatcaaaaagcatctttatcaaaaatatttttagctagacttttttcacattaggctggtaattttgcataaaagtggaatatgtaatgaatccttatatatttcaattaacgtgaaaatttttataaaatgcaatcaacataagaaattaaa

SEQ ID NO: 84353 - DNA, 1581 bp, Heterodera glycines
atgttatggcttaaggcatctgctgattggcggccacctcttggttctgtttggaatccatcacatcctttggtaagtttatgaaaagtaccaaaaaatctattttttgagaattttttactttttaaggcaaaatttgaattttgcgaaggaaacccaataagtcaatcttccagagctagataaagatttatgccaaaaaatattgaaatgcttgtaatatgtaataaaaaattaagccaacagcggaagtacaaaaattacgacaattaaaaccccctaagaatggaattaaaaattttcaacctaaaaatcggcttttcaaaaaacctaatgacttttagaagccctaattatgtagaaatttatcactatttaaaatgtacccaaattaattatttatatattttaactagctcgaccggatttttcctggatccaccaggtccaggtcatttttcgacaacctggatttttcatggacctacattttcctggatttttgccaggaaatccaggtccaggcatgaaaaacctggatttcctggataaatttttttctttttatggcgtaatgtatttaaaacgaatataaaatctgcaaaatttttccgccacccttataaatccttatgctcttaaaaattgactcaaaacgaaaaatttggacaaaatttgttagcaattcgcattaaaaattacaaatttttcccggcgacgcctataggcaccgccggactctcctcggttccccctgggaaattttttttaaaaatttttgcaaacagaaatttttcaagaaaaaaatcttagaagttttttaataaggaaattataagaaaaacattttttcaaaaaatttctcgggggggagggaacgagatgctccccatccctcacacattcccaaatagttttttggaaaaatgcgccgaaaaaattgttaaaaatctgatttttgattttgaatgcactgaaatttacaaattgcttattgtttcccaaaattgttaaaatcgatttacctataaacttagaaaaaaatgagaaaattttttatgaaaaaatttcaagattaaattttggaaaaatttttcagcgattttttctgaaagttcgaaaaacttaattcctataaaaaattgaaaacccgtttcaaaattttttcaacttttttttttttacaaatacatattaaaataattttttggtgtgattaattttattatttcaagtgaccgatgttttttcaagttttcaaaaaatgcttaaattggttttaaaatacattctcattataaattagatatttttagacgttcctaagcaattaattgattttttcaagcatttgtttgctttttaaaacaaattttaaaaaatccaggtccaggcctggatccaggtctcgaagagcctggatttttcctggacctggattttcctggatttttgtccaggaaatccaggtccaggtccaacatggaatccaggtccaggtccaggtccaggcttttttcaaaataccgagctctagtaaagactaatcaatttatatatacaaaatgacaaattatatta

SEQ ID NO: 84354 - DNA, 993 bp, Heterodera glycines
atgttcccatgcaaagattgtccaaaatggtttctgagtcctgaaaaactgaagacacatcagcgttattcgcacggaagtgcgtattttatatatttttatttcatattttaatttctatacgttaattagttcgtttattaaaaatttcaattttcagaatgtacttttacttgtcacaaatgttcgagagtgttcaccgattcgtcaaattacagggtaataaatgtaaaaaaaataattaattcttaatttttttttttgggtggttttagccctaatttgtgatgttgtatttctgtttattttaaatgtgtttaaaatctatccaagaacagttaccggaccagccagtcaaaatatgattaaattcatttaacattttaaaattctgttaaaaatatgcaattatattttgcctatttctttttgttttgaatattttttccttttcggataagttttagcaaatattctcaacaaatttattaaaatcacatattttccccacgacacctaaattctttttttctataaattggcacaaactgaaataaattacgcatcaaatttaacaaagagagaaatctcgacctgccgaatcaaaaaaataacgtcacttttgaaaaaatgtttaccaactaaattctttgaaaaaatcatgccgcaaaaaaaaaagaaaataggttttggaagtaaaaaaagttttcgtcaataaaaacgatcgaagcattgactaagactggggcaataaaataaatttttaaaatcaaaaataataaaataaaacgatttagaaacattattatcgcgtccactttgggggacacccgttccattgcaaaacttgcgggatggaaatctctaaaattgtaaaaaaaatgtaattaatgtaaattatttttcaaccatttagcgccagcttaagaagcatgaagaacaatgttcacaacaaaattaatcttttgaacatccaaataatattattaaata

SEQ ID NO: 84355 - DNA, 480 bp, Heterodera glycines
atgtgctcgatattggcacgtttggtgaacatatttgcgctaaaaaatgccggtaatagtggctattcagcctaacttctgctcaaaaataagcacaaatatttaacacgtttagacagcctgaatttcataaacaaatattggttggcattcattactacgaaaaaattcacatctaatacgaaaatgttccattttaaacattattgaaatttaaaaattggtccgatggtgctgtaaagcgctgtcggcgaaattgggctatttaaactaaagttaacagtaacattagttaagaaaattttagactcgataaatcatttatattttgagaaaacatttttaattttaatatcaatatggcttttggcgagagcatttggaattatcttcaactaccaacacaaaaatgagagtacacttaaattatattttacaatgacattcgagctataatagtttacaatacgattaaataaa

SEQ ID NO: 84356 - DNA, 565 bp, Heterodera glycines
atgcgctgcgatttttgtggccacaaggccaaaaatccactaaaaaatttatctgtccgtgtcgaattgagagattgtgttgatcctgagatcacacaaagcaccacccgcaccaccctcttctccaatacggccgaaaatttccttcagttgaaggccaaagaaattgtcgaaataggccaaaaggaaccggagaaacttgccagggtttttgaatcgaaactagaccaacaagtgttggtcaagctgaacataaaggtcgatattttttttgttaaaaccagcttaaacaattcatgttatttaaatttaggaatcaaaaggcgattttgagggaagtgactttgattggattgtttccagagtgttcactgaggacaaagttaaggtggaggaggagaaagaaaagaaaaaacttacggaggaaggagaacttgtcgatgacaaaaccaaccatggagaaattcaaattataggcgaaatgttggccggaagtactgagttcgggagtgctttgtggcatttgcaaattgccaattcattatttttaaacttaattatctga

SEQ ID NO: 84357 - DNA, 706 bp, Heterodera glycines
atggccgagctcgacaaacttggccaaagtgatggagacgatgctggaggtgtcgaagaaggagcgggaatggacaagcgctcacttttgttgagcgaagcagttcaagtcacagtcacttgctttgcgcctcctgttggcgctcgacctcggcattttccccatcaattttgggggtacaacgagaaacatcgtatacagatctgtaactgggatgacaattactgtcttttctacgcattaattggctcacgtgcttatcacgacccggtactgttcaaagaatggacgcaagcccgacaaccgccgcaacaaaatatggcacagctaacattgctgcaagatttttgtgaaagccaagaagcatttcgtctactgttaatcaatcgggcgctgatgcgctcatccgctgagcgtttgttgaatgcagctggcattcgagaagctctgaatgcttacggcattgatcaactccaacctattcaagactattgggtgtgtgtgtatgtgtgtgttctccacagtttgaatggacaattacattacactatacatttttaggaccaacgatttcctggactttatcggattttgttgtttgaagaccggcctgaggtgctgcccaaacccatggaaggggccaactggccgtcgttttgatgtcacattgtttctctcaaatagacattatgatggaatcaaaaaa

SEQ ID NO: 84358 - DNA, 613 bp, Heterodera glycines
atgtcttgccaatcagttgcacgattgccaggtgagtgttaaaaaacatcatcttcagcagcatcattatttagcgtatgtatgaacatttttcgtgctatgtcatgaaaaaagaccaattggccatcgttcctgaggctggttatgagcgaaatgaccgagccagtattttggtgaatgaaaatgtatttaatttgcgtacacctttgatatgcattaaggctattaaatacctggattagagagccaaaacagaaggagtattcatatagcatgctggaaacggccgtgaaaaagtcataaaaaactttaagcttgatggctggattgaagagcggaataaatgtatcgaagtgttaggatggtaaagataagtcgtctatttagaaaggactatcatcatcgttataattaaagcttttggcacggctgtgaacgttgatatgatccaaatgacaaattcgttgatggacgaacgtgtcgtgaacttaacgagtcaacccaggatcggttgactcaacttcgtgaaccggacgaactgggtcattgtatagaggtggaggaaatttgggtgcgtacacctattttttatttaattttccgtattttaaaa

SEQ ID NO: 84359 - DNA, 59 bp, Heterodera glycines; identical to SEQ ID NO: 52421

SEQ ID NO: 84360 - DNA, 59 bp, Heterodera glycines; identical to SEQ ID NO: 52422

SEQ ID NO: 84361 - DNA, 59 bp, Heterodera glycines; identical to SEQ ID NO: 52421

SEQ ID NO: 84362 - DNA, 59 bp, Heterodera glycines; identical to SEQ ID NO: 52421

SEQ ID NO: 84363 - DNA, 59 bp, Heterodera glycines; identical to SEQ ID NO: 52421

SEQ ID NO: 84364 - DNA, 59 bp, Heterodera glycines; identical to SEQ ID NO: 52421

SEQ ID NO: 84365 - DNA, 59 bp, Heterodera glycines; identical to SEQ ID NO: 52421

SEQ ID NO: 84366 - DNA, 59 bp, Heterodera glycines; identical to SEQ ID NO: 52422

SEQ ID NO: 84367 - DNA, 655 bp, Heterodera glycines
aaaaaatcgattttttcaagtgtccgtttggagtactcaaacaattatggggagcaaaaatccaacgcagaattaaagtacaggctatagggaagctattcccgaaggattcggtctccccataaatctgggcgcatcggttcggggggactgccccgaaaacaaaaaaatcgattttttcaagtgtccgtttggggtactcaaacaattatggggagcaaaaatccaacgcagaattaaagtacaggctatagggaagctattcccgaaggattcggtctccccataaatctgggcgcatcggttcggggggactgccccgaaaacaaaaaaatcgattttttcaagtgtccgtttggggtactcaaacaattatggggagcaaaaatccaacgcagaattaaagtacaggctatagggaagctattcccgaaggattcggtctccccataaatctgggcgcatcggttcggggggactgccccgaaaacaaaaaaatcgattttttcaagtgtccgtttggggtactcaaacaattatggggagcaaaaatccaacgcagaattaaagtacaggctatagggaagctattccggaaggattcggtctccccataaatcggggcgcatcggttcggggggactgccccgaaaac

SEQ ID NO: 84368 - DNA, 269 bp, Heterodera glycines
aaatgcttgatttgttccggcgttggtgcgacaattccaatcacttattctcacaatgatgatcctccattagtgtcggcaactccatcaattagtggtggtaaataattaaataattacattcattttttcttatgtatgttaattattgtatatttacaaagcaggaagcagcaaaactgtgagtgatgttgaacgtcgtcattttttgcattacaaatgcgcattggaaaatggtgcgcggattatttacatatataattaataaa

SEQ ID NO: 84369 - DNA, 817 bp, Heterodera glycines
atggagttcaacgttgatgctggtgggcttggcaaagagtttttctgtgaacacatattcgtggagaacgcatccatagtacgataaaattttccgcactctaaaaaataatgaaaagcaaagggtccaattttagataaataaagaactgataaacgaaaataagatttttttgctcaaaaaaatgacattttgtaagaaactgttcaaattaaattaaaaatggtgatttggggttgggctgagccgattggttaatgctattaatgttcttctaggccataacttttttgaaacaataaaaaaaaaaaatttttttttgaaatttagccgttaaatattttgtaaaatgatgtagaaatcaaaacaatattaaataagctaaaataatgggggaaaaaaatttatgaaaaaagaggattacgattcgatatcccccaaataaggacaaaatctttaaaaaaaaaggtcaatataattaaaagcaaagggcagaatcgaagataaaataaggaattcatgggacgaaacataaggacattttgtaagaaacggttcataattaaatttatatgaaaaaagagggttacgattcgacacctccaaataaggacaacaacacaacccgtctttggattaacaaaaataatttacatttgaggtgacccgtcaaggacctgtccaagaaaactcattgaacatattatcaagaagagcgttatcactgaaaattctgatggcccaggacggtttctatggtcgatcatatggcgaatacataaaactgtgcccatatttttggacaatatattgttaa

SEQ ID NO: 84370 - DNA, 1189 bp, Heterodera glycines
atgctgggtcattctgagtggatggatgcgcaagaaatgatggccaatttcattgagcaacattcggtcggttcagttctctcggcatttgctggtcatcatgtgccacaacatattgcaaatttgctcaatgagaatgaagaatccacgcagggtcaaatctttaaaattaatatttagtttattaaaatttgacgcttttacagatattttttaagcaaaattattcattttattacaaattcactacgattttttgcagatctttttttttgtataattatttttaaccgaatgctttcttttaatttctataaaaaaagattctaattaaaattgtcaacctaattttttaatcttttttcaacaaaacaatgcgctaaagataaaacagatccaaaaagtataatcctaataaaattcgttatttgctaagaatacataatttaattatatgcctaataacttattttaaatttttaatataaaaattttagtcttaaaaaactggggaatacatccagaaaaaatgactattgaaacgagcatcattttctcaaaagaaattactcctgcgcagaaagaaaaagtactttttttcaatttcattaaaattttcaaaatattttcttttttaaggtattttccactcttgacagcttccttaaagacaacaatatacgaacggaaatgtgaaattaattaatggtcaggcaattcataaattcacgggaaaaatttaaaaaattttcttattaaatgaaaaaatgggatttttctgctttccacatgaaattctatgtttgttatgtttctatggtattcaatttgttgaaatgatttttcgataaactttaactggcaaatttaattttaaatcaaagtttttttttgtgcaaattttgccaaaattggcaattttcggtaaaaatgtaataattaaaacttgatatcttttttcattctaagtatttttaaaaaattgtacattagttttgacacattacaaattttttgaaattttttaagttaaatgaaatccaattttttatttatatcactattctcaaagcattttaagaagaaaaaaaacagcaaaaaaatttcaaatttttttcatttcatttcgaatgtgcatttttcgtcaatgtgaaatatatttttttgaataataataattaataataaa

SEQ ID NO: 84371 - DNA, 1256 bp, Heterodera glycines
atggaagccgaactttgctggaccatttggcaaaattattttgaaaatgtacgtggatgggtgtcgacttcgcttacatttgattttctcattttagggcgatccttttctgatatttttcattgccttggctttcacccggggggtccgtgaggagcttttgcaaatgaaagcgcgtgatgacatcatcgccctgctgaaaagcgttcccggccgaatgggtgggcaaattttgataacttttctttctttctttttgatcgcatttcgttgatcagtacgcgaagatgtcaacgatctattggaaatttgctttgtgcacctcaaattaacgccaatttccatcagagaagttaattcattaaaaaaattcattaatattttcgtaataattttccggtaggactttcattgtatgcttttcggctcaaatctcatcgacgaatacgccgaaattcctctgaatcggctcatttgcttgcccatctccgtccacgagctgtacagacgtgccattgacgtgacgacgctgaacagcacgagctttggctattttgtaattgacacacgcaaccaaaagcacttcaacgccggctccatccccggctcatacaatttgagtgctgaaacggtctgtaagctgaaaaatcggatgaaattgtctgttttttctttttcagcttgtcgatgacccagaaaagtttggctatgcgatggattcgctgatgaagttcaagcaggacaattatccgaatgaacacatttgctttttgggctttggaaccaccgacgacggcgaccatttgatgaacatggtgatcgccaagtttctgcaacagaattttgagcacatttccttcgtggacggaggatatcggacgctgcaccaaatgctaaaggatggagggaacttgaccaaactgagcaaccactacaggaggaacgactgcacggaatgcaaagaagggggcccaaaggagggagaaaacggcaaagcgatggtcggtccgcaaaaatgccaaataaaagttccaattgcggattgctctttgtcagacgcacgtccccttttagacgtttctcaaacggttgaaaaaatcgctgccgaagagaaaagaatcaatggcgccgcgggaaacggtcggcccgcgaaaggggacggacatcgaagagaatgtgaagcacgtgagcagcaccgatcggttcggcaagcgctaccgcaacgtgcagtcggtgttcagcatcaacaacgatga

SEQ ID NO: 84372 - DNA, 1497 bp, Heterodera glycines
atgtccctaaatatagggatttgggctgaagaagaggacgatcaacgaccgtcgtttcagcacgggaagaaacggccgaacgattctgcaccagtctcttttgtctctgcgggtgttaaagtcggaagcaaaactcaactggcggatgtgagttattttctgactatacatacaattttcgattattccagggcaatcttcaagaagatgaggaagaaagcgaaatttcagctgttgaaactccgcccgaaaagcgtcccactccctcaacatttgtcccttctgtgccttcgaccagcgatgttggcgctcaagtttttgcgggaatgcgttcatccaaatttcaatcaggcggaggaatgaccgacacgacttggataaaagcgggaaaaggaagcgtcgtaatgcaaatgatgcaggtgaatcatacatggatagggggggaaaggggggccattttccttcaaaactggttgataaaatacatttaaaggaatggtttacaaaaaatcagaaacagcctctttgtggaatggcatttggtgattggtttgggatggatcgaacatttggccatagtgttttttaaagtcaaaaacccatgcgttataatacgcggaatagtcgaaatccatttttgaatttggtcagcaaagaattttgaagaatgaacgtggaaatgaatagagccgcattaccccgcttaagtttgctcctccctttgccgtgccattgcgattggctcctccctcagcacggctgtgattggctccaccctcagcccgccacggacagcaaacaataatgtgaatgattgatgggggaaatttgaatatgattttgtctttctgtgccatccctcccccatcatcgccactgttgggagtgggcaaaagaaatttttttctcaatttcgttggatgattgatagggaaatttgaatatgcctttgcatttcggtgcgcttctcccctgccaggcaccactccgttattgcccactgcgatgggagggcaaaaatggactgaaagaaaatgaaatttcttcgcaagtttagttttgattgacagttcagtgtcataaaaaagaaaatttgaaggaccaaacggaattgtcataaaattcaaatgcgaaggacgaaagaattgcgattgcaaaaaaaccaaaaatagtaacgatggacaaaaaatttttgtgtgtttgtgcacaatttacgttgggcaaaaacgaatgagaacaaaaaaacttgttcgtttgtgcacaagctatgttgggcaaaaaatgacgtttgtatatgattgtgttgtgtaaaacataaatgataggaaaaaatttgcgtttatgcacaattgtgaggcaaaaaataacggagcaaaaacttgtggttgtgcattttgtgggagaaaagtgacgaaaaaaaggaataatttgcaggagatgtcaatcaaaaaccgaaatgagaaggttattagtcaaatgagcagtagatttgtgtaa

SEQ ID NO: 84373 - DNA, 634 bp, Heterodera glycines
atggacgtaactcttcccgtcagcaactcggcaggtgaatggatcggagaggaacggagggatggtgttgtgctctatgcgccgtggacggacgagtggcatgtgcaacagcaacagcaacagcagcagcatcaacagcaacaacaccaacaacaacaacaacaacagcagcagcaacagcagtttgtccggcgaacaggcacggggtggacgcggtttccagcatggaacgaaccgctcgttgccaacgattggcgagagaaggaggaaaatcggatccaaaggaagcgactacagcgtgaaaacccggagtattgggcgcaaatattggaggaggaaaagcgagccggtgaggagcgccgcttaagggatttgcggttagagcgcacatgggatggctacaaggaaggccacttcgagcgtcggcacaatgacggctcgttttttgaggccagaaaatttcttggttcaaatcgacagaatgactttttttcattttcagtttgttgctggggtcgggaagacagtggttggaagttctggaggagggctttggtgaatgatgttggcatgggattgaaagtgttaagattaactatgattggggatggtatttggcattaatcgctgataa

SEQ ID NO: 84374 - DNA, 803 bp, Heterodera glycines
atgcccgtcgatttggatgattcccttctatcattggatgtgtcaccgacgaactccttccctattgatcctcccctggccgacgtagattcgtttgtccctgatttggtgccagaactgggcgacgactcggccgagtatttgtccgactctgaggaattcgaggttgagcgaatatgcggccaaaaaatcgaaaacggccgacagttctttttggtgaagtggaaaggatatccgaaatcccaaaacgattgggaaccggaggaaaatttggtcagctttgatcgttttcgaatatttttgttgcccataccgttaattttagctcggttgtcagcccaaaatattacaatattggcgtcgtcgccaatacgataaggagtaccgggcccggacaaaggacgacgagaaatcggccagaggggggaagaagaagaagagcaaagcgtatgaagaaaaaccaaaggccgccgtggatgtggagccggatccggtggaaaaagcaaaagaagagatgggcgctacccctggggaggtgttggaggaagagaccgaaggtctggaggaggaggatgtgtgtaaaaaagggaaaccggaatcggcagatgcgggaccagaggtcgaacaattgaagaaaatgctacgtgacagtggccaaatgccgatggataatgccccactacccctaccccgctgggtgcggggtagtggggcatttaaaaaaaggtacaaaaaattgtacgacgcaatgactaataatatgggatgatgttggatatttatgtattgcttgttgttgcata

SEQ ID NO: 84375 - DNA, 811 bp, Heterodera glycines
cattttgaccatcacttttctgcttttctcctacaatgaagttcgtcagggcaattgcattttgttgtgtttttagaatttaatgttttttcaggtgatgccaagagtcagttatttgaaaggtaaattttcttggttgtatataaaatttaaaaatttcaaaaaatttacttaaatttttgcagctttggacatttggttggctgtctgcttcatgattgtgtaagacgtttcggtattataaaacaataaaataaaactaggattttattgttaatataaaaaactagagtgccacgggatcgggaattttgggcaaaccctggaccgggaccttttcgggttgaaaaaccgggaatttgttggctgggaaaaccgcgaaaaaaccgggactagtcccggtcccggtcaaaaccgggaccttggtactcagttggactcagttgtccgctaccaggtcccggtcccgtggcactctataaaaaacccaaatttttaagtaaaaaataaaggggaaaaaattaaaattgaaatatattctggaaaatatatggaatacgccgaatgaaaaaatttctttattttttttttgtcttttttcagctttttgtcgttgatcaaacttgccctcatgaaatatatgcgacaacgaattcgcattgtgactggcggcgcacagtaaaattttttcgaatttaaattaaaaaaattttttaaatttatttttaaaggagttctccgtctgctctgcttggcggaatgttgccgatcatccaactcagcaccggcgctggtccaatgctggattacg

SEQ ID NO: 84376 - DNA, 1178 bp, Heterodera glycines
attgcgactaaaaatccgcgcgaacagtccatctcacaccgatcactgctcatgtgggcgagagcaaaattcaaaattacaaaaattggaaccgggaggaacggaatttggtttacgagagagataaggagatttaaaaaaagattatgattggcgaaagctgaaaacccgagagtatccactcaagaaatttctatgagtttttacggtatttttgagagcaaaattactgattttgacgatctttcgataattttggtacagtaactgaaacttatttggttattattgaaacgatttcttgaaagaaattacggcaaactaataatttttcgtcataaaaattttgggcaattttttgtaatataattaaaaagttgaaatttctccggcggcgcccttttacacaaattttcttcagaagtttaaaaagtcaatacaaaaattatttcaatttaaattttttaaaatttttacattccttcatttgtccaattttcagactacagtccaatggccaaattctttacagtcgtcgcctttccgttgtggccgagtaaagcaatgaattttttaaattttttaaaattttctccttttttaggtgccccatggatttaactttggcaagacccaattagaatttaatgagtttaattttcaatatttttttcattctctttacagtttccattcgattcgcagacctgcaagcttggcattgaaagctgtaaaattttttgcctgatttttttaatgggggtatacaattttacaaaattaattgttttaatgaaggcttttttcatggtgttaggggttgctcaccgaaattttttttaatttctctaaccttctccgacaaattttttcacagaatttcctccccgatccacgacttttctctccctgaatgtcggggaaaaccctaattttgtcggaacctcgaaaactattttaaaaaattgcattattttgccagatgggtacacctcggaccaggtgtcctacggctggtccaagggccaacgcgaggcactgaaactgcacaaaattcggctgcccgacttccgaatcaaagaagcatttgtcacttcccagttggaatcatatgcgaccggtaaaaattgtttaaataatttttttaaattttttttacattaaaaaataatttaaat

SEQ ID NO: 84377 - DNA, 750 bp, Heterodera glycines
aaaacggtgcaaatctgagcagagctttgcataatttgacaaatgaaattggccaaaatggaaagtgcgaattgtcatacgcaattcacaaaaattatattaccgaagctaacaaaaagaacaacaaattcgacgcctcaaattcgcactttatgtatgaattggacaaaatcaacaaaatttcaattgaccaatcaacgaacacattgccaactgcattgatatggattaatcaattgcgcaccgatttcgccacgttggtgccagaaattgggctggtggacatttggcaaaacgttgacagttacacggaaacccgcgagttggtggtgaaattatgtgaaaaaattgctacaattcaaacagatgtgtcttacaatggcagtaatttggttaatcagatcatcagtgaagcaaaagataaattggaggacttcaaagaaaaaagcggtgggtcaaattgagtcgggcgcaaatttgtcactggttgtggtgttcgagatacggtattgaaccttaacgaattttgcagactaatagagaacactactaatatccaatgataacaagaattaaaatcttagttagatttgagcaaagttatgtgtaaaaacctatgattatagcacaccgcgcttcgtctcgggaaatattgcccgccatcaaaacgattaattagggaagggtacaggatggtgacaattagatgggaaataggacggggcgagagttcgtcatgaaaatgaggaa

SEQ ID NO: 84378 - DNA, 1278 bp, Heterodera glycines
  unsure (1)..(1278): unsure at all n locations
atgacaaaggaagtttttgaacaattccgtcaaaaaattgaaatgaatntaagtctttctgacttaattcttcggaaatgggcattaattgccaatagtaaacttggcgaaaatcaaataatcgggttccaagcttcaaatacatggactaacaggttcaaaaaaaggcaccggattgtatcgagaaaggtctgcaaaataaaattattaaaaaattaaataaaaattaagatcacaaaatttatttcaaaaaaacattttgtgaattatgaaaatgtaaagaaggaagcctctgaatttgttgaaaatattcggaaaattatcaaagatgagaaattttctgaaagagatctgcttaacgcggaccaatccggcttcgaacttgaaatgcatgccaagcgtaccttggcaccacttggaacaaaattagtcgaatgtgtagtgcaatcggtggaaagtactacacacagctataccataatgccattaataacggcgagcggaatattgctgtcaccactatttatagtcattgcagaacgatcgggaaaattcccgaaaaaaggaatattccaagtttttaaaaaatatattaccaaaatattggcaattttaaggcaaaaaacatttattcggttgctaataccagtcatattatgaccaaaacattgatggtcgaatgggttgaaaatgttctatacccaactttgcgctcaaaccaaaaaactatgcttttggttgatagttggccaggatggaatgaattcgagaccaaagaaggggtagaattaagcgtaaaacaaatacccaaacatggaaccggaatttgccaaccacttgatgtctacatttttcggtagattttttgtgtaaatattttaaaaagtttaaatttagtatgtggaaagaatttacaaggaaagtcactcaatttgttattgtttgtgaaattgatttaaatttgcacactcgggacaatatcattaaattgcaatcactgatacacaaccagctccaagcaagccggtttaatgcttggataaatttcgcgtggcgaaaagctggattttatgggaatgactccttcccaatttttacgcacccagttaaatattgttttgatgcaaaaaagcagccacatcaatgccaaaagaatgaatgtgccaatgttgttttaatccggtgcgctcattgcgaaatcttcctatgttttgaacatttttttgtcaattaccatatgtgtactgattaaatgattttgatttagagaaaattaaa

SEQ ID NO: 84379 - DNA, 1473 bp, Heterodera glycines
atgttggccaaaattcggacagttgtgcataccaaagcgatggccaattttggaccaatgggtcaaagaattttggaatgccgaacttttctcgtggcgatttcgtcggttgtggcattaatttggccactcggcggattatcttcacaaagaatggccaacctttgggtcttttattttattttaaattatttttatttgaattatttttcagatacttccgatttgttcctttcgcctccttttggttttccattgtttccgttcatttctttgaatgattctggcgatttgattgagacaaattttggaccacaattcaaattcgaccccgcaaaagtaaagagaacaaaattatttaatcaaattcagtgcagtttttctcggcagctattttttttatcaaaatttatgaaattgcacgccgaaaaaagttattgccgagtattgttgtgtaaactacaacagagccctaaattgtttggcctgaacaaaatggacattagtgccgatggtagcccctaattgcattatcgtaaaaacatgttataggaatcgctgatcacgaatttacatccatttagaccaatcccggacctgaattcaaacaaaaagtcgaaagcacattttccaacacatttatacaactaatcactccgaatgcataagtgtgtttcgtgaagactgtgcctataacatgttttacgacttaaacgggggctaccaacagcactattatcacctgaccattttttcaatttttaattctagcttcttttaaccaatttaagaacaaaatcaatcattttttcaaggactccaaaaacccaaagaaaatttttaaatttttttgtaaaaatttcttcatttttaaaggccgaagctgagaatcgaaagctgaaaaatgaaattgagaaaatacaggaaaaatttgacaagaaggaggagcaattggagaaggatttgggggaattgcagaaaaagttggtcgaaatggagcaacaacagaacgaacaacagaagagcaatgaacagatgaaaaaggtgggaaaagaaatatttacggcacattttgaacgatttcggcagaaggcattccaagaagagcttgagaaaaaggtcacggaacgaattgtggcagtgcagtcgaaggttgacaaaatggaaatggcacatcaacagcaaaagggtaagggaaatgagcaacgattactgtacctaccgtaacattgttttattactgtcaattattaattgaatttgttccaatttaagttgtcactgaaaaggcaatttttgagcgaatcggcgaattggagggacaacaaaaacaccaaaaacagcaaggggaaagggagacaaacggcgagaatatattttcaatatattattagttttaattatatttttaaatctaaatgcttttcatcttttaagaaatacggtatacgacttttgaaaatatcaatttga

SEQ ID NO: 84380 - DNA, 1274 bp, Heterodera glycines
tacttcaattttacatttggtgaccaaaaataaggcacgagtatgtttatgaattcaatttattttttaaattctatgtatctgatacaatttaaaatagggacaaaactcaaaagttgaaaattttcccccgtgcgtttgacggcggcggttttagtgattaataaaaaagatggattactccaaagatgtctcctctgtcactcattacgattttaagagccacaaaaatgaaaaatatgggccagcagcagatgtgcatcagaagaataggctttgtgggttggttgacagagattgatcggctgatcagatggagaattccactgatcggcggaactgatcggaataatttaatcccaaattataattattataaattcggaattcattttgacccttcaccattatcaattatattattatttcaacaatttattattttttactgagcaagtgaatgtcagagaaacagaaataattatcgattcaaattcgcggaaaatcaaaacgatttaattgaaaatagattttatttttatttttttctctgccgatgatcggaccacaagtgattagtcgcctttgtttacgcaacattattcactcttccgtcattgctttgtgcgtcattgttaaccttatgcaagtcagctcatctcataattttaaatggagacacagaaaaaaggggaattttaattggtctaattaaaaaaattcaaatttctaacttttttgggcaaattgttattttcacggaaatttgttaccataataaaaatactagtattcaattttataattataattaattattttaaaaatacattttaaaaatggaagtgataaggaccagcagcttcatattctgtgttctgttcagtccgttttctgttctgtgccctacgtctctcttcgggacggttctccgcttttcggcatttattcccaggcaccgaccggcaaaaccgtcacccaattccttggcgttccgtttgctgagccgccaatcggtaattaaatctcattaatttttgtaggttttttctgctttaaggcaaactccgatttcggcgtcctgtgcctaaaaaaccgtggcgtgatcaatggaatgccaccgctttccgcgactcgtgcgttcagtcgccggacacttattttggcgacttttacggtgccacaatgtggtaaattgtagcacttgtttatttttggatagtttggcaattaattcaaaaaaacgaaatattttatttgtttattttaggaat

SEQ ID NO: 84381 - DNA, 75 bp, Heterodera glycines
tcaaagtggggaattgaacccaggcgaaaaattatgaaaggtagaaagtttaaccactacaccacatgtgcatgt

SEQ ID NO: 84382 - DNA, 118 bp, Heterodera glycines
atggactcgctggaagcggagaagcgtcgcttgcagggtcgcctcgacgagttggaggggggcggaacggcggcgaccgttgcgacgacgacgacaacagtcgccgacggcggcggcg

SEQ ID NO: 84383 - DNA, 1166 bp, Heterodera glycines
atggtaataaattagaatggaacattgattaaagctgaataagagatttaaaaatgcataaatatttcattattatatgttttgttttggaaatttaatataaaaatattgtttttctttttttcattaataaagaaaaattatttgtttgccttttcaagaataattgaatgtataacataaaaataacacacatataagcaattttaacaaaaatatgaatgaaaattaaagcaaaaatatattaaaaacaaacaaaatatatattggaaaaaattggagctaattaaggtaagttaatcgttgcattaacaaggggggtgcaacgtattttaaaaaggttttgtgaacagattgttggccgataaataggttgtggtttttgatcattaattgttagcatccagtgctttgttggccggtaaatgtgttgttagaaaagttgtcgcggtgttttcttcaaaagtaaataaaaacaatttttacattaatacatattatgttaaataaataaagttcattcattcttttctttaaaaaataattcaaatggatctttcatttaattccgagaaagctcctccaaagcgtgccaaacgttcaccaattcagcgattaaaagctggagaaacgatgatgtgcgtataaaaaatataattaattaataaaataatatggttaagtgatataaaattggttttgattatggccgattctatgcggattgttggagaaaaaagcaaagtttggacgattattggtagcgatggagatgattacatcaacataacaatgtgggacaaaaacattgaaaggctgtctcgagaaatcgggaattcttttcaggcaatttttttatataaccaaaaaataaattgtttttaggaaaaaacttacattctcaaaacttgggctgtttttaaagttgccgaaccatttaattatggtagcgttgagttggaattgcgtgcccaagaaggctcaactgtaacaattgttaccaaaactgattatgttataaacggcatcaccaaagaaatgtactttgattttttgggatcaaaactggcactcaacgaaacaaatttcatgccatcaaaaattgaaaatttacggaaagggggagaaattcattgtaaaataacacaaaaaatacaataaaatta

SEQ ID NO: 84384 - DNA, 719 bp, Heterodera glycines
atgccgacttttcctcccaatcttttaaaaatccatggttcactccagcaaaaattatcagcaaaacgtactgcggcacacttgacaacatcgcctctctcaacaattccaacaaaacgacaacagtttcttgacggcacggcgcatttggacatcacagcactgctaacctgcactgaagtgtcagagccagtccgtgcagtcattctccaactggacgcacttctcaagctcgcggtggacatggttcatgagacgtcgacccaggacactcgcgcggtactggaggaggaccgacgagaacattcggtcgttctgatgggcgttccggaatcggacagtggcctttcctctacacggcgcgcgattgctgaccaacagcaggtgttagacattctggacgtttgcgaaatgaggcaatgccgaccaagatttaccggatgggccaaagaaaggaaggaggccccgacttctcaaagtggaaatgtcaacccgaaagattacacaaacatttctccgcaataaaacccgtcttaaaaactccaaatttcaagctgtctctgtccgtccatctctctcccctgaacaactcaaggagcggcataatttgatcaattgttgcaagacagcccgcgcccaatttcctaatctcaatttcattgtttatgctggacatgtcattcaccgaaacgatgtctctgtttttcgtgatgaccctg

SEQ ID NO: 84385 - DNA, 78 bp, Heterodera glycines
attaatgaatttcatattttgaagccttaggaatgtaattttaagactttttcgctaatttttatttggcgggatttc

SEQ ID NO: 84386 - DNA, 627 bp, Heterodera glycines
ccgcgggcaatcactccgtccaatttgtcagcaagtgactttggtgcagcatcaaattctgctggcgttgtgtcctatttctccagcccttcggtgttcccatcgtcgcatcgtccatactcttcaaattgggcaccgaattcaaattgcatcagcagcaccaccttcggtaacaacgacagtaccatttcgaccattgagtcggcttggtcaactcgtcgagtacagacatttaacgcatttgttggtggtggtgctggtggggacagcagcgacgaggagccgatggtggcacgggcacgacgtcaagtcatggacagcatggagccaatcggagatgggggcagcgggggaggtaggaatgttggcacggatttgccatggcatggaaggcaatggcagcaacaacaacggcgaatttcagcatctgctgaagttgatcaacacgccaacaacaacaacaacaacaacttcaagcagttcgagcaccgttggtacaacaaggacaatcagcacagcaacggcaacaacacattcaagcagttcgagcagcgttggtacaacaatgaaaaagaggaggagcacagtcgtggaagatcgctgcggtcatctcaccattacagcacg

SEQ ID NO: 84387 - DNA, 439 bp, Heterodera glycines
  unsure (1)..(439): unsure at all n locations
gtttctgacattacactgctaaaatggtattatttttgttttgcatagtcgcttcatgaaatttgcacttttccttaattaagggcaaacacaaaaagccgttcattgaccgcaaaagtgcagtgaattattctttacacaacaaacatttggaggaggcgcagcggaccagtaatcgtaaaagtgttgcgaattttcgtccctttgataaacactttgaggtaattcaaaatgttgcgatgaataatttaataaatggatggagcaatgcttataggatttttatgagggatatgcgaatgaagcggaggaggacggagcggaggaaatgcatgacggagaagggcaaattgagaccgatcctgcgcttttctcttctctgctggcggatgngcaatcacagcgatgtggcgaagagcgttttcagcgggaggtgcct

SEQ ID NO: 84388 - DNA, 912 bp, Heterodera glycines
gagtttccatctccgacaaaactgttcattgctcaaaaaatggaatgtttgggacgttcaaaagccaaatcattgtgcgaccaaaatgaatcagaggcaccgcagccaaagataaagcgaaagcatttgaagaagcgcagttggatgacactgttcagaacggacaacagcattggggagggacggtgggaaatggcagcgaatggagtggaggagaaacgcaaccgaacaacgccgacaacaacgatgtcgccgaggatgagcagtttcagcgccaataatggacgcaccgccaaatatgggctgggaccacgtcgtccctatgcgagagcggtacaatggactgaatttattcaaattgagaaaagagggggcactacgttcctccccccctcccccccaaaaatttatgaaaattttttcagccattcaaaattttatgatgagttactttgtttttctaaaaaaaatttcctaaaattcactgaactaatttaatttctttttgaaattttcttataaaattcctagttattttttttattaattctttttgcagactccgctgctttcattgactgcacgagcgccatcacatttttcttcgcctttttcgtcgaccattcgccaccagcagcagcgaaagtccgtcgcccccggccgcaacagaaacagcattagcaatgacgacgaatgggttcgcaaaacggaacgcttcatcacacggacgagcggatttgtcgacaactcttcgtcatccaccgctttctcccgtgcaaatcggctggacacagcgatagatgcggaacagcgcagttcgatgcgattggaacgaaccgccggcgccttcgacgggtcgtggcgacggactttggcaccggcggagcacagcaaaacacagccacagcagtt

SEQ ID NO: 84389 - DNA, 1046 bp, Heterodera glycines
atgtatgagcatcttttgtccgttcattcgagcggcggccgcggcattaaaatagacgaatatcaaacgacagaaaaggagaaaaagggacagcaacagacgacgataatgcgaaaccatcagcaaacaccgccgatgagcgcatccgcaccagcgacaccgccaacaccgaacaacgcaagggcattccattgtgaggaatgcaatttcaagtgagtgatcagtggcggaggggaaggaagggcgatcactgactgatcaatcagagtgatcacagaggaaccgaacaaaaatgtagtgatcagaataaaagaaaatgactcctcgggaaattaagacaattttactttaggggacgcacattggtggcattggagcagcacaaagtgcaaaaacactctcaacgggcacggaccggcactttcccaaacataacgccaaaaatgtcgggtctgactgcgcattttgaaccgatgatccctcaacagaacggaggaaggtaagcggagtcggagagcggatgaaccatcattaaattgaatagaacgggataaattacggtgaaaagggggtcgtaataacttcccggactgaaaatgtagggactgaaactgactttcgctgccttatctttcatccaatgatctcaaagccatcagtgccttttcccctcaatgcttttcctctgtccccttccatttgcaatggtttgtttgttcagaccgctcaacggtctgtctcttctatctggcgttttgtccgccgcttctctgcccgactcgccgctttcgccgtcctccgtcggcggcggactatttccgcccgcctttccgtcgtcccttcttttcggcactgtgccgtctccgttcttcgctcagtcggccattgttgctgatcagcaacagcaactgatcgcccagctgatcgccgcccagcaaaagttggcctccgcgctgctcggctcaccgcccgccgcgcagcaaaacgcgacgcaaacggcgacaatggccgaagtcggcgactccaatcagcagaaaatgttctga

SEQ ID NO: 84390 - DNA, 124 bp, Heterodera glycines
atgaaaggtcaaaaacgatcgggattaaaaagaggaagtaatttaattagcaaaaaattcataatatttttcagatttaaaaagactaaataatttggtctaattcttttatgaaaaaccaaca

SEQ ID NO: 84391 - DNA, 705 bp, Heterodera glycines
atgcaaattgatcaaaggactcgattggaaaaagtcagtcaatttgataaagaacagaagcagaagagaaaggtgaattaggggtaaaatatatgttagcaattttattttaattattttaaggcacttttaaatttgcgacaaaattattgggatgccaatgtttgtcatgagaatctccaaatcattggcaacaaaagtctcattgtccattataagagaaatttttctgctggtattttttcataatttacttttctcctcaaaaggttgttgttcgtctgtttttgctaaacatccgattttgctgaataataataattcgtccgagattttttactacgaaatttcagttaaaaataggaaagagtaagaattttttttatttttgaatataaaattaatcataaatattaaaattttatttatttgttattgttatttctttattattaatttttcagttgggtcatcagcatcggattcgtactcaaaaaacagaaagaattgaaaggaagaatgggaaatggcgcttttgcgtatgtaagcaatggcgaaatttggattaacgctgaaggaaaaggaaaaaataccgaatattcctacggtgttggcgataccgtaggaattggcgttacttctgccactcggcagatcattatcaccaaaaatgggcttcgttttggttggaaaagaaatatataa

SEQ ID NO: 84392 - DNA, 1122 bp, Heterodera glycines
aagtgaatggcaatgctattaatttgggcaatgatggacaattatttgatggaaaaaacagtgaacaatcgatcactgatcaacaacagcttaaggtgggcaaaagaaaaacaaaaatagacatacctaaacaatggggtgggagaaaaataatttaaattatgcaatatacaaaagcaattttgttaatttaaataggaatttcgtgaaaagtttgccagaatggaaatggaattgaaaatggccaaattggaactcgaaaatgtcagatttaccttaaaaaataacgagtaaaaatttgtcaaaaaatcttaaaaatttagaaggaacaaaagttaaagtaccaggaactgatgggagaacagaaggcattgaaagaaaaagtggccaaaattgaacaggaaaaggagaaaaatggtaaaaaacgtaatagtgagagctcccggaaaatgcggaaattagggatacagtatcaaaattatactgtcataaaaatagttgtgaatttaattattaggaatatcgaaaatcaaattattaaaacttaggcaacactcaaaaaattgggcccattgaataaaaccaaaggggagaggaccattttttctataaaattatgtttatgaagcctagtcataaaagcttcccatgtgtttttggaatgactaacggatcagtgatcacgatttcgactaatcctaattccttaacccaaattctaaaccaaaaatttaaaaattgataaaactgatttttcaatcttggtttcgaattcgggttaggaattaaaaattgtataaatggatgcaaagtcgcgatcacaatccacaaaaattactgggtacaaatttacgaagtaaaaaatatgctagccaaaaagttgtcataacgttctcagtccattttggtcggcattaaaacattttttaatggataaaatatttttaacgtccattttaagtaataattgggtttatattttaagctagtgttgaggaaggattctcgcaattgcaaaatgatcagaagaaattttggcaattattttggaaaaaatcagtgaattggaaaagcagcaaaaagaacagtcaaaaggcgaggacaaattaatatgaaaataaa

SEQ ID NO: 84393 - DNA, 742 bp, Heterodera glycines
atggcgacatccgttgtctcattattccttgacttgttccgttggttggcactcggatttggcattttgttcaatgccattttaatccaaatggttgttcgtcacactccaaaaccaatgcgaatttacagcaaagtgaacatgttttatcttaatgattttgaactgattaaaacatattcttaagatcctattgcaaacatgtgtgactgacctttcattacttcttatgatgttttttttctttccggtgcattttttatttaaagttgaaaatcaaatttattattttttatttatttaagtgcaattttataacggaaaagggcgaattcgcggcaattttgtacggtttggtcacaataaaaggcgtggagaagggaatttggaatttgttggcatttgtctgctttgtttttcttgtctatgtgtcaatgtttggctatgtgtcccaatttattttccgttatttccttattgtccggtactttaattaaaaataatttatataattaagcaaaattaatcaacgtaattaagcggcaaaaccatttcggctctgaattattttttgctgttttttctgatgcttctgttcccatttgcttattgcgtccatttgttcaattgctattttccgcctgctgaacacggactaatggaggataattatgttgcggaaattctcggcattaatctcgacgaacaaattccgttggcagcttttcctttaatgtactga

SEQ ID NO: 84394 - DNA, 541 bp, Heterodera glycines
atggttctcgtcagcgaattttgtgctcaatttctctcctgcccgacaaagtcacttcgcgatcgactgaaccacccagaggaccgagtccgagttttgcagcaattgattgggaaaaaggtccagacaacatacaaggatcggaatggaatgtgcaagtgttttttcgttggtggaatgactgaacgaggcgcggcatttgaacccgcatatggacgtctgcgtaagccgttcaacattaacgtggcagcgcatttttacgctcgtcaccgtgtcaaattgcactacccctatgtgccatgcatcattgaaggctttacgcgtggtgaggaccgttattatccgagggaactgcttgaaattgtcgacgacaaaaagggagggcgattatttggtcgattgttcactgaaattgaggagcgggaggaggaggacaccaaaagtgaagcttcacattcttccaactcttcctatttacaatttaacggtaaaggctgcaaatggtatgaaagcattgacgaaattgccaacactgggcgtg

SEQ ID NO: 84395 - DNA, 308 bp, Heterodera glycines
cctccaagatgggacagagtgcggcgcaaggctcaaccatgtcaaattcgcagatgcccggtttgtcgacctacgcaggtgggagagaagggcgtcgattttccttgcttttttcactaactctcaattttaggcgttgcacaatcgccaactccaattgaagtctcggcctgggcggtgagttgaaaatgggctgggttttgacttctctaactttcaacttcacatttaagcaacctccgaagcccaagtgaattgccaagaagtcgatgaacggacgatgtgcgctctgcgaagtacaacatttg

SEQ ID NO: 84396 - DNA, 1244 bp, Heterodera glycines
atgtcaggtattttttgcttttaggaaatttttttaaattaaatttaaattttttcgaaatttccaaaatcccgcaatcccgcgcgggatcccgcaaattttaaattcgggatttgcgggattaatcccgcgggaccccgtcccgcaaaaaattttgagttccaatcccgcagcgggatcctcaaatttgaaatttccggtctctagttacaatacaaattatcagtcgcccgctcattcactaaaaaataaaaagcaacggaaaggaaaaaagccaatgttagcatattattcaccagcattgtatttgataatagttttctgagttattagttgaaaatgaacatttaaataaattataaattttacttaaaattaaataatttatttcgcagatttgagtgcaaattgttaacagattttgtccaaataatgaccaaatttacgatttttagccagttttttaagagaaataaggatttttaggtgccggaattttaaacaaattttcttaacaaaatcattaaaaatcccaaaaaaaatttccccggcggcgcttatcgggaccgctggcgcccccaaaaattgtaatttctcttaaaaaattgttccaaaaaatcatttctcgcacatccctaccccctctccccgcccagcttgttccccaaaatttttgaaaaaagcacgccacagccacaaatggtgtagctgatttatactaattagaaaaaacatttttatcatatataaaaaatcaggacatctcgattttttattaagccaataaatgagaaaaatttgaatttatggcatttaatagtttttatattttttaatgtttttgtaattgaatccggcaaaatccgacagaattttgatgaaatatttggcgacggatgggacaaaaacgaaaaagaagaattaatgataaaaattgaacaaaatgagcgaaatgagaactcacaatcagcagcagttgatcaaatgggtgaagaaatgggaaatggtccaaatgatcaaatgggaaattataccgatcagaacctttttaaaggtgatctgaatataaatgatcacaaaaagagagaaataattaaaaaatttgaagcaattaaagaaaagttgaaggaaaaataaaatacaaaagcaaagattatggaaaaattgagagaaaaattgcaaaattattaggaacaaatctgcaattaatacaaaaatggaaaaatgaattaaatctaaataaa

SEQ ID NO: 84397 - DNA, 320 bp, Heterodera glycines
atgcttttttcgtgcttatccgttcgtattaagtgcgcaaaaattttaggcatttgcctaaaaatcccagccctattaataattgattgcatctttattttgtcaaaattatgcagaacaaagtggaagaaacagttgactgattcgcttcgacagctgtgccaggaccaaatgtacggaagtgttgccaacggaggcaacggattgggccaaattgggatggacgaagacggcaattaattaacccggaaaattttgctttttcttttacctatcgaaatcctatcattcttctacattaaattcaaatgcgtttgtta

SEQ ID NO: 84398 - DNA, 782 bp, Heterodera glycines
atgcgtctttccgttctgcttgcctatttgtttctgctcctccccgggcccggtggcgcccaatttggccaattgccaataggcggcggcgctttacccggcggcgccacactgcgctcaaacccgctgattaatggtaaaaacggcgcggcgaacattgccccgccgggtgatgaacaaatgtgccaacaaccgctccaacagttcgcccttttgcccccctcccaaacgtcggcacggcgagaggagcgatgtgagtgatcggaaagtgattagaaaaggctctaatcaatttttgggttgtcttccgcaaatattgacgccttttaaaaatgacgcaaaatttcaatttaaatttccctgggttttctaaattttctcccattgccttaggctgttgctgttgttgcccccagcaacaaaatcaaatgcctcctccacctcggcctccgtcatgtgaattttggaaatttatcaaagccacaaatatttttgaaagaaaaaaagagagaaaaaagggcattaatcacattcaaaaataatttaaataatgctggtctacccacaaaacaggctgctgtctctgttgttgtcctcagcaacagcaggcgccgcctccgcccccgccgtgctgcgtaatttgctgctgcgaagaggtcgaaatttttcgaaaattttagtttttggattttaaattttcagcaaagaccgccacctccgcctccaccgccgattatccttcagcctttgccgcccccaccgcccccgccgccgcagggtaa

SEQ ID NO: 84399 - DNA, 2452 bp, Heterodera glycines
  unsure (1)..(2452): unsure at all n locations
atgacgacgacgagcagttcaataacagtgacggcacaaaaattaaacgacgaaaggcaacggggaatggcacaacgccaacaacaacagcaacagcagagaggggcggaaaggagtagcggaggagaagcgcaagatcagacacagaatgccaaattcagcagcaacgaaccgatggaagtgnccggaattggaaacggcagcgaaaacaatggcacagatagaagtgagcaaattaattaaaaattaaattgtcattttcttttgaatagagttggacatctaaagcggaagaatcggctgaaattggcagaaatcagctgaaaccatgcaacaagttcaccggggtcagcggcgacgttggcgttgcgaccgtggcgccaaattcaaaccattcactgtccaatgctgcgcttaaaaatggtccaaccgtgggccaaggaaagcaacaacaacaacaaccaccagcacattttgacccggtttttggcactttacccccgggctttgagccctcgtcgcccgggttcgcttttcccgaagagtcggtgctgaacaacaacaaattgatcgaattcgacgtgccatcgcaaacgcaacaaccgtcggcactgaatatcattaataatagcatcgatttgagcaccaccgataaaaatggcatgatcattttaaatgaaattttttattgtaaattcgaatatttgaaggggttgggccgtccatcgaaacgtcgacaatctctgcaaaaaacagcccaggacggaatgacactgatctgccaaaatattggagtgagtttttatcgtggacagataaatgaaccaaaatccgtaaaaaatgaactactgtaattcggttattgtaagtttaatcggtaccaattgaggcttaaactttgaattcattcatcatactagcctttcatttcaagcaatgatcactaaatttattttgcactgatccattttcccgtcacgaaaataatggcctttcatgggataaaaattgaaaataatccttttatttcaaaattatttttaaagcgaatttttattttttaaaaagagatttactgattttatttgacaagtttaattccctttattggcttaattacatgcaatttggcatttgttaacttttttagctttcactcggcttccctttatcaatcgcacggaattggccaattccgcgccgccgtcggtgccaattgtgccctcctcctcctccaacaacaacaacaacaacaacaacaggccaagggaggaggaaagttggtcggcggtcgatttggagttgaagccgccccatcttggccaagccgattttttcacgcccaatgaagccaatcaaagcaaaaagcaaaacaacggttcattagctgaaaggcagcagctaattttggacataacaaagtgccaaagggagggccaaagtgccgacgacaaagtgccaacggaaaaggaagcggagcaaagtaccgtagcactagtggcaccccaattggtggacaccgtatatacggaggtaccggaggccattttgccggctgctgtcgatctgagcagcagtggcaacaaggccgaaatgttgcaattggcaactggaaatggtacggtaacggcagcaccggttcaaacagaatttaaaaaagcggccaatacagtaatcgaacgacaagaattaccaacagcagcagcaaatacagaaatcgaacagcaacagaatgcgattaatttcgatgcgccgacggaatgcaacaaaacgctggagggcatgggaaacgagaagcagaatatggtgggagacgagaagctacagcagagggacgaacacccgaagaataaaacggacaaatttgtcaagacaaaaaatggaggtaaaatggaacaaattggacaattaaacataaatttataaaattaattaatttaatttagaagatacttgctgcaatttgttacgcttattaaaaagcaacagtgacaatgtgacgactgaatttgctgcatcaattgatggaattggaggaggtgagccgccagaattgcttcccgtcactgagttgagggtaattaggggtaattaagagaaaaataaaaagcgattattaattttaaggatcaacagcaaaagccggagaaaaatgcccttaatggaatcaatgacaataaattggacgactcaatacgccaaacagtggcggacggagaacatgaagcagaagtggcaaatgaggagagcggcacggtcaaagcgaattggaaagtgatcgaagagggtgggcaaagagagaaagcggcacaatgccaagggaaagcaaatttaaaatttaaatttagcatccacaacaacggcaacaactacaacaacaacacagaacgggggactggaaattcttaaggaggacctgcgggaggagaactgtacgaattataataataaa

SEQ ID NO: 84400 - DNA, 340 bp, Heterodera glycines
atgctcgccaaccatcgccaacttttcctccattttctgttcgcaattgccatttttgtctttgtcattgcgccactgatggccgattcggagcacgaaatccacgctgatcagcagtgagtagagtccataatccttattaaaactgatgccaaatttggttaaaagtaaatttaatttgcttttcagaagtgccataaatcccagagaaaaacgctggggcggcggatggggcggcggttggggacgcccgtggggttggggcggcggatggggccgtccttggggctggggcggcggatggagacgcccatggggcggctggggctggggacgatga

SEQ ID NO: 84401 - DNA, 245 bp, Heterodera glycines
atgggcgttagtcaaaaaaccatcaaaatgaaaaatatcgatttttggtcgttaagaattttgcaaaaaaattataagaaaattaatattttacataaaaaattcccaaattaattgtttaaaagaattaatcataaaacacataacttaattctcttttctttttcatttcatatatttcagtctgcagttggtattggatttaaaattgcttcaaaatggccacttccatcataataaataaa

SEQ ID NO: 84402 - DNA, 470 bp, Heterodera glycines
atgtctgaagcctacggttttctcgacaggttaacaaaaagaataacgcgacgcagaggcaccactcctgcagcttcgggatttggagcggacagttcgatggatggtggtgggtgacttttgactttgtttctccaattagctcaactcgtccctcccattttcctatttaaggcggtgtttctaaggtgtgcatcggcttgtgcctctgcattctgattctcgtgattctgttcgctattctccttttggttgttgcgcttacgcctgaaagtttccaaggcgttgctgtgctgggaggcctcgcgagtatattcggcaattaaatcgaaatgcgatgttcttcgatctctgttgttgtcccataaggcataagcctaagtacttaattctcgagttgttcacttatcgtacatttgctcgatgtatttttattttgttgctaatttcactctgagtatgtaaataaa

SEQ ID NO: 84403 - DNA, 322 bp, Heterodera glycines
atgtatgtaatgtttttagaaaactgccattttaaggtaatttttattttgtttaagaaaacaaagttttgaaaccgaattatgtacataaacaaaagggaaaaaggaattgacaaattaaagtgcacaaatcaataaaacaataaagcaacgaatgtgaattatgtaattgataaatgtgtgagaatatcattttaaccgtaaaatccaaaatatttggtgtagctatatgcttacattaacgaataattccttatttgtcataaatagacacagctaatttgccaaaaatttcatcatcaaatgaggcaaggcaattaaa

SEQ ID NO: 84404 - DNA, 45 bp, Heterodera glycines
atgtttgactatgatcgagatttgaacattgcccagcagttggct

SEQ ID NO: 84405 - DNA, 2041 bp, Heterodera glycines
  unsure (1)..(2041): unsure at all n locations
tacgcacgggattcgatgcagtccggtgtccatttgtccgcttcgtcgagcagcggatcatcgaccgagaccactcggcacgaaaatgtgttctactgaaaattagtgnaataaatcggctttatcattcattggatatccttttatgttgcgctttttcacgtgtttaggctgatgagcgacttttgaagaaattgcctccaaacgtcgaatcggctgcccttttggtccgttcgtcccaattcgatcagtttttctctgatctccagttttcttcaggtggctaatgtcagtgctttggaccgtcctttgagtgcttttgtccgtcttaaatacccaaccgtatgttttgttttactcattagtggccaatttgtcacctctttcagttgcttcatcccgaattgcccgatcacccaattcccgtccgtttcatttatgtgttgctcaacccaatggacaattacccaaatgagacaataaacatcggtcgggcgatgggtgcgcttttgtcggatgaggttgaaaatgaatagggcaattagcaaagaacggacgcgggggaaaatagaaaaattatatttccaaaaataaaaaacactaatcgaatctgtgcaagttaccatttgtccaccaattttcactgatttggcatcgtctgactttgttttttcagcttcattaattaaatataattaattttattttgacccaattaatctcagcattcggctataatttcgtaatttgaatacttttgccaaatttcgtcagattttccaatcggtcgcctttcattgtttggagcgccacactttgtcggatgcggtcgacgaatttctgtcccaaattgttctcattccgccaggcaattgttcgctcgaaacacgatggaagccggcggacagagacgcgggaggggcggtcagaaaaagggcgaaaaactcaaaaaggaaaattggcgcgcgtttagacggtacgccacgtcggaatgctttacgccaattacacccaatcagtggacgaattgccctcctcatttgcaccgtttgtgcccagtgaatacagcaccagcaccaaagaggcggcagccgcctctcggcacttgcaattggcccacctcaacgcggacgcacggccttaccgtaccgggagacttttcgggggactgatggccgacctacggtgggattggggaaaaacaaaaataaatattccaaaatataaatatataattatcccaaaatataattccccccttcttcatcaggcgcaaattgccttggtttccgtcggatttctcggatttcttccgcggccgtctcagccaatccctcgccgccaccatccttctgttcttcgccaatctgtccaatataatcactttcggcgccattatggagcggtctttccaccaccaaattgcttccattgaaaatacgtttgaaaattacagaattaattactcatagttgttctcctaaattaattaatccaactaattaattaactaattaccccaattaatttgttaattaattgtctctctcttttcaaatataatttgtggcgctctgtccggccttctctttggcctattcagtgggcaaccgctgagtttgttttagctaattctgccaatgttctctcccatccttcagatgttctgtccgccaccggtcccactttgatctttgagaaaattctttttgatttttgcacgtaatttttcaattttttttttaatttccgccatttccgcccttccctttcagtaccaaccattgggagtttctgccctttcgcttttacgtcggcctttggatgagcttttatctgatcattttggtagccaccgatgcgtccgcgttggtcgcactgatcactcgcttcactgaggaggcatttgccactctgatctcgatcgtgttcatcatccaagcattcgagaagttgttcgagatcagttacgaggcaccgatcacccgacagccccagggggagggatcaaattgagaaaagaaagaacattgttgaagga

SEQ ID NO: 84406 - DNA, 382 bp, Heterodera glycines
atgaagctgattgaatccagcgacatcgtcaaattcccagacaatgtcactttcgcgctcaacaaccgtgttgtgactgtgaagggaccgcgcggtacgctcaagcgcgactttcgccacttaaacattgaaattatgcgagaaaacccgaaggtattctgagtaacaaacaaacaaaatctgaaatttatagagtgctcttttcatttctaattgttgttgaaatgattgcgctttcgtttaaaatagtctcaaatttaaacttttatttttccaactttcaaaatgctaaaatggtgggtttttagctgctccgtgtgcggaaatggtttggcatccgcaaagaagtggcagccattcgcacagtgtgctcacacattga

SEQ ID NO: 84407 - DNA, 316 bp, Heterodera glycines
tgaaaagatgagaacaacaaagcaattggtcaattcaatacccggtaaaggtaacacccgagatccttcgtcagagttccactgggatcactggccgggcaacttggcatccgtcgccttgaaagttaaaaacattgactggattttagagtataccagtaagctgaatatactttgtcagaagttccgagatggcggtcaatgctgtcaaggcggcgctcaagaagcgctcgaaggtcagcaaaacggtcttcaagacggctttcaagacggcgctcaacgtcgccaacatgttcgttggtccgcagggtcatag

SEQ ID NO: 84408 - DNA, 743 bp, Heterodera glycines
atttgctaaaaaaatttagttacctaaaatgcctgtgcgacaaattctctcgggtacccgcagaattgcgaccaaaagtttgtgttagtggtttttcaaattcgataatcatccgttttccctttgacagcgtttggaattggttcggcgaggttggccgattacgtgagtgatttaggattttaaagcattcaaattgctttattcaatcttttccatttagggtgtctttaaggccctcctcgagcccttagtggtttccaagtttgaagagctatcgcgcattagagtcgaaaaaattagtaatttttttcacttttttaattaacacagagtcttaaatttagcgatcttttttgggatcctcgttttcgtctcattggctgacgttgctatgaccctgcggaccaacgaacatgttggcgacgttgagcgccgtcttgaaagccgtcttgaagaccgttttgctgaccttcgagcgcttcttgagcgccgccttgacagcattgaccgccatctcggaacttctgacaaagtatattcagcttactggtatactctaaaatccagtcaatgtttttaactttcaaggcgacggatgccaagttgcccggccagtgatcccagtggaactctgacgaaggatctcgggtgttacctttaccgggtattgaattgaccaattgctttgttgttctcatcttttcactaaagtcgtaaaaataaagttttaatgtaaaatg

SEQ ID NO: 84409 - DNA, 789 bp, Heterodera glycines
gaccccggcataagcgaggacctcaaggcgaagagacatgattgtctctataaagaaagacgtacggtaaaggggatacttgaaaatagaccacagaaggtagtgattgagaatcatgtacccggtccaaatgttgcaccatatctgggcctcaataaccaatccaaaccacaggagaccgaagaaccacggaaaataattattcctaggaaaagacttaaagagcaaactcctgatcctgaatcagataatgatacacttgaggagttaagtccggaacctcaaacaacatcaatactcaacccacccattccgatcaaaactattatacacccgacccttttaaatggtctttttaggtacgtgaaagaaaacaaagatttatttaaaattacggcggccggaaaggtacagtcgaacatgaatttgccgattgaaaacagtaattatagagatgttttgttgtatctcgcagggaagaaagatgaaacaccccggggtgcaaaatttctcaaagatcggttactgaaggatccaacagtaaaagacatggttgataaatcaaaggtcatgtggggacgtggaaggaaaaaggcaataaaatctataaaaacacccggcatagcacgagagaagaaacccttcaaaccactaatatgggccagactgtagagaaaatgttatcaaaaatttattttaatttaaaatctccggcaagttttgctggaattcaaaaaattttaaatgaggccaaaaagattgacccggaaattacgaccgatgacatta

SEQ ID NO: 84410 - DNA, 464 bp, Heterodera glycines
atggtcgtgaaaataataagtcggagattattggcgctatcaactcaatatttccgcaacgcagttagagtttatatttagatgataattagctgaaattttgagaatttcacaaggatggtcgtgaaaataataaatcagagaatattattaacccgatccttctacaatattgctgcagtatttatttagagattaagtagctgaaattgtgagattctctatttacatttcattatcactttgaaattctcaaaatttcagctcattatcatggaaatataaattgtataggcgtcgcagaaggatcgagtcgataagcgccaataattttccatttattatttcagcacgtcgatgcataccaacagatatttgtaaccgtcgttatgctttttcaactgatcaaatatgcacaaatcgcactgccaatcggtatggaagccgctcggtaccgtctttag

SEQ ID NO: 84411 - DNA, 684 bp, Heterodera glycines
atgtatctgtataaatttgttcaagtaaattgtaaatcggaaattattagcgtttatcaactccatacttccgcaacactttatacagtttattttgagggggtaatgagctgaaattgtaagaattatacaagctggccaaaccaaaataataaatggaaaattattggcgcttatcgactcgatccttctgcgacgcctatacaatttatatttccatgataatgagctgaaattttgagaatttcaaagtgataatgaaatgtaaatagagaatctcacaatttcagctacttaatctctaaataaatactgcagcaatattgtagaaggatcgggttaataatattctctgatttattattttcacgaccatccttgtgaaattctcaaaatttcagctaattatcatctaaatataaactctaactgcgttgcggaaatattgagttgatagcgccaataatctccgacttattattttcacgaccatctttgtgaaattttcacattttcagctcattttcctccaaatgtatctgtataaatttgctcaagtaaattgtaaatcggaaattattagcgtttatcaactccatacttccgcaacactttatacagtttattttgagggggtaatgagctgaaattgtaagaattatacaagctggccaaaccaaaata

SEQ ID NO: 84412 - DNA, 759 bp, Heterodera glycines
agtcataattaatcagctttggcgtcacggcgatcggagcccaacgggcacatttcgaacggacatttaccaggaggacttttggccgcaggggtggggccaattgtcaccccgggggatgagtcagcaagtcacgcttgggaagaagttgcgcaacagatacgtagagcaactgggacaaatcagcggctcttacgacagtcatgagctgtatgtgcgggcaacggatgtcaaccgaacactgatcagtgccatttcggtgggggggggggggaggacaacaaagaaaaatgattggttgtttttgcagaatttcatcggcttttatggcaagggaaaagctggccgtgattacccaaatgaaagcgattggcccgccggctttgttccgatcgcaattcacacggtcgatggaaacaaagatttcatttctccgagtggttcgatgcttttccgtctcccacttcccccccccccccccccccctccgcaggttcgttgtgtccgcgttacgccgaattgtctgatttgattgggaacaccacggaatatcagaacacttatcaccaatattccgtatgagaagggaataacacttcgattgattcaaacattcgaaggttcttttagagtcttctgaaattcttgaacggatgaagccgaaaagaaaggtgacattgtcgacatttggctgtttcaagacactttctttgtcgaggtgaacaatatttgaaatggctttgaattgggaaaaagtgg

SEQ ID NO: 84413 - DNA, 385 bp, Heterodera glycines
atggtcaaagcaaatgaaaatcggacaaatggtggaaagaaaagaattgcctcaatggcactttcacttttggaaaaggcacttcgaagagaagacgaatttggggacggaacgaagtcggagataaaacgagaaatgttatcgaaagaatgtgatgaagtgaacattttttatgttcatgggattaaagaggagaaaaaatatgcgacggaaaagcgattctctgaagaagcaaatcaatcggaggaaagaatgaagaagcgggggcttttagtttgatggatgaaacttcgaagaatggggcaaaggaaggaacagaggagtggggaaaacacgtctttaacagcaatttgaaaacagacaaaataatgaacagacaaataaa

SEQ ID NO: 84414 - DNA, 1032 bp, Heterodera glycines
atgccgaagaagttccagagaggaaatccgaccattcaggccagacgacttttacgacgcaaggatgttatggccaggtggctaaacgaggacacgatgcaaatcttcgcgtgcgctgagttttcaatgcaaaatgtggaatatcaagcagtcaacaactgttaccgctacattccggtccaaatccgcattgacaagaagacgctcaacgcattcctggatccggagcttcacatcctcacagcgtcatcaccattcgcagattgtggaaatttccgctaccattatctgcaactgagccagagcaattggatcaaaatcgacacacgcaccgctacgatccagaaaatcgactccagcagcatctctgagatccacgaagcctctggagacaaatcgttgttggaaatcacgccgcttgtttttcatcgatggacgatcgacaacgaaacaggcgaagggctattcgcgcacttggatgaatggctgcgtttggatcaatggaagtcgaaggagaaggagcacaaaacggcgcgtgcgctcacactgggagccctcccgagcggagtgattggcctcaccgaagaatggttcatggacaaacttcgactgctcgtctcctactggacaacggcatgctgcatttacgtcacattcatttttgggcgcgatgtcctgatacccttggtatgggtctacttaatggggcccgtcatcgttaccatccgcaatttggtgacgggaaatcagtggacgcagcggaacagagctactcgaggcacacggcgagcaccggcaatttcaaggattgaagcaattgagctggtaccgccttcaatgccccaggaaatgagagcgaacgaaacgtcaagttcacatcaagaggaccccgagccgtcaccgctggtgatggagctgaaacgacaaatggtcgcattccgttcgaagcgacgttttcaaagccgtgggaatgtcgcggctgaacgacagccgcgaatgtccgttgagcggacaaatgaggatgacgggtag

SEQ ID NO: 84415 - DNA, 716 bp, Heterodera glycines
atgttcagctttcgaatgataccaagattgttagatttgatcgacaacaaaaaaagttatagtccaaaaacaagggctggcgccgaaacggcggcgccgaaacgatacagaccccagagaaataagttgtacaggaaaacatttgttggaacagagaaagaaaatataaaaatagtgcattcatataattcagaaaagaaacaaaacaaaagagagagtgagggtagaaaagtcttaccaatttgatttctctgtttctcatttaaacccatattttttatcattttcactagacacacttttttcccttcttcgttatccgcagccgctcgttacaccgccgccgccacgtattttactgcgccggaatggcgcaaatttttggctatataattcagcaagaatttcggaataatgatatagcttgaaggaaaatgtgattgctaatcagtgatcgcagatcactaaaatattcccaacaaattgatcaatcggtccattgcaggccaagcacgcgctgtaaaaaggagtagaaatcaacgagttcatcaatctgaaacaatgatgaaaagcagaattttcatggaattaaattggatcggcagatgttagttttaccaattttgcggtcggtgtgccgacaatctcgtgcccctggtccacccgtatctttgccaacacgggattccgttgccaactctcagcttgagtgcgca

SEQ ID NO: 84416 - DNA, 121 bp, Heterodera glycines
ccttcaatttgctctcgtaaattaatctgcgaatagatccttccttttttgctgctttattgagtattctgcagcctctgcatgatcacaattcatttactgtcgtaataaacagaaagaa

SEQ ID NO: 84417 - DNA, 723 bp, Heterodera glycines
atgtacgtggacatgggctaccggacgaacccggcacggactgacaccaaagtgccgtcctcgccatattcattaccaagacaagaaaaggcggcagatacgcgaaccaagcgggatcagcagcagcttaagccgaatagagaaaggtgggacatattttatagaattgggaaattttaatcaaatgccaaaaaaactgatcagcgggcgggggagggaatgatcattgctgtcaattgatacgaggatgatcaactgacttttgatctgatcagcggtgaccacgataatcatttgaccattgttgatcaactggcactatcaaaatagtgaccaagatgttcaattggtaccaagatcggtcaattgaatctccgttaacttatcaatctaacacggtcaattggtctgatcatgttttaccaaactgatcagtgggaaggaattatttgtcattttctgatcgtaattttgtatttttttaattccaggataaccgaggaggaagtgcggatgttcggcatggatgtgactgatcagatggacagtggtgatccgacggagagtgatcaggaggggaaagccgagaatttattgcccaaaactggggttgaaaatcatcctaatttggcggtgaataattgcgccattccgtcaatggcattcgatgaatgttcacttttgtaattattgtagtttttttcaaatttttatattgaaata

SEQ ID NO: 84418 - DNA, 282 bp, Heterodera glycines
atgccaactgaaccatttgaattggtgaacgaacggacgaaagaaaagctgacactgaaacaggagatcgaagcattatccaacgaaataatttataattggctgttgcaacggtgcccaattggggagacggcgacggcgccagttaagtggaaaaaccgcgaaaattcgggcgccaattttaactatatcagatttgctctacggcatgccaattattcggatgccaatttgaacaatatccgatttgatttgtggggtgcaaatgatcccattgggtga

SEQ ID NO: 84419 - DNA, 671 bp, Heterodera glycines
atgaaccgccggtcagcaaatattttgaaaaattacaaaattttcatttaaaattacaaattttcattttcccccatccattttttccatgtttcagttggctttgcagcgacgtgtggatggacattctgccatcttttgaccgtcctcaactcggactcaaaatggcattgctttccgaccgtttcgatgttttggtggacaaacatttcgacagaaaaagcgaattgacaatttggagaagtgtcgtaattcgcaaggacaaaggaccaaaagcaaacaatattggaccaaaaccgaaagtgtctatattaattggtggctatggcaaatttgtgggatttccattgccggaccatccgttgcccaacaaaatcagctttaagaaccttcaaattcagtcatccttaacttttgtgtacgctaaagcatttttctcttgctttaggtacattgactattccgtgatcaaatttctccgctccaagaagcgattctttgacagaaatggcaccaaattgaaagtgtttgtgcattcaattgatacggatgtccaaccgatttgggatgtttttatccgtgaaatttggccaatttttgcgacaaacattcgtcatttgggctttgacgatggcgatgctttggacaaaacttcaaagaggtgtgtctag

SEQ ID NO: 84420 - DNA, 278 bp, Heterodera glycines
atgccaattgaaccatttgaattggtgaacgaacggacgaaagaaaagctgacactgaaacaggagaccgaagaatcatccatcgaaataatatataattggctgttaaaacgatgcccaattggggagacggcgccagttaggtgggaaaattgcgaaaattcggatgccaatttgaactaaattacagatttgatccgcggtatggcaataatgcgtgtgccaatttgaacaatatccgatttgagttgtggggtggaaatagttgcattgggtga

SEQ ID NO: 84421 - DNA, 378 bp, Heterodera glycines
atgccaattgaaccatttgaattggtgaacgaacggacgaaagaaaagctgacactgaaacaggagaccgaagaatcatccaacgaaataatatataattggttgttgaaacggtgcccaattggggagacggcgccagttaagtgggaaaaccgcgaaaattctgatgtcaattttaattatatcatcagatttgatccttggcatgacaattattcgggtgccaatttgaacaatatccgatttgagttgtggggtggaaatagttgcattgggtgagcagcaaaagcaatttttgattgtcgaaaaaatataaataattttaggccattgtcgctgccagcggaagaagaagcggatgaaagcattgaaaaataa

SEQ ID NO: 84422 - DNA, 864 bp, Heterodera glycines
atgggaatgcaccgtattcctctattaattagcattccctccaatataagcaccaacggcagtccgaacggctccaaattggcacattggataccacaggtgcgctcaaatcgcagtctgaattttcacagaattgtagtgtgatccgaagcttttactctgatggcaaaatgatcaatttggcagttttggcattaaaatttggtgccaaaattaaaaaaaaagaatggatccgcaacacatacaggataggctttccggatggaaaaactatgttttaccatactttatccgatacggtatttttaaataccagaacaaaaccatttgagattgttggaatccctgaggatgagatcacattaggccccgtccgaatatagcaaaataaaagaacgttatctttgatagaagaattaattaaattttttttcgtaaaattttttttaaaattcctttattttagaaaaccgattttttaacagaacaaattgatttgaatttatttttgttaattcgatgtatagttattttaagtttaaaatattttaatgccctcaagcgatttgcgttgtatgggcgggcgacattgaatttgcaaataccgaacagtaaaatgaatttcaattctgttggtggtaccaataggccgatggaagcgccggagggcattctcaacggaaaatccattccgaccggcaatcatcaatttcacatatttttcatcgggattgatttgtatttgtcaaatcatttcatgactgaatgaatcattcgatgatcactcatttttgttcgaagtgctttcgattactttttctaaatttttaaaatttttcaattccttttttctgttttattaaa

SEQ ID NO: 84423 - DNA, 1987 bp, Heterodera glycines
atgccggtggcacaaaatggcggcatttttggcacaccgccgttggcacatgaagttcaagcagtacagcaacagcatcagcatcatcaacggcaacagagcagcagcgaagctgaaagtatcgtccatcaaaggaaacagtccatggcggaccatgaggaacaatggaaagaagtgaattattttatgagtttttaattttttaatttgtatagaataattttcttaattttaaaaattgatttattattttttaaagttcaatctttagcttgtaccatttgatctttatgcttccaatatttttattttttatccaatttttagtaaattattatttaatattttttcagattgatgaattgttgcactcccttcaacacgattcccaactgattgcccatgctgatcagcaaaatcaaaacccttctttactgatgaaaaattcgtcaaaaaattctatttcatcgtttaacagcagctctgtaaatattttctctataaaatttattatttttttgtttatttatttttttataaattcccattttccaattttcagtcacctaatagttgtgccggcgccaatggcgtcacagcttgtgcctatcaacccattgttcgatggttgagaatccaggtcattagtattctctaaatgatcaatttagcgttcataagctttgttttgttcaatggacaaatcaaattttaaaaaaatccgcaattatgaggttttagggaaggattcgggaattacaaaatttaaaaaacacgaattggtcaaggtgggactaagtcgggagcatcgtcatcaccagcaacagcagcagcaacagttgaacaacaatggttgcagtgcgcaagcgcttgccgaactgcttcatcggcacggctttgacacagtccgcttcatgaagggatcactgaacacggcactgatggacgaaattggggtgccacgacgagtgcaactgcaaatatgccgtttcctcaacgacaacacagtgccggagcacattcgcagtgctggtacaacaacaacaacaaattatttaattatatttttgaatttaatcggaaaattttgatcgcattttttaaaatttgagactgtataaaatttgttcaaaccctgaggaataaaattcgattttagattttcagtttttcccgagattttaaaacatcccaacaactcgttttagagcaattcgaatttgtgtcggattggctcgactcattggaccttctcgaccatttgggctcatttgcgttggcaaatctcacatccacaacggatgtgatcgctgcaaagctgagcagaggcgatttggaagtgcggttgattaaattttgatttaaattcattaatattttatttaaaaaaaacattttttttttaaagtacggtaataagaaaaattatggtaattggtaatcattttattcctatttccagaaaatgaatgtcacccaacttggtcacatcgctcgaattatgcggtccttggatttggcggtgcaacagcgaaagaaattgcataaatccagaacaaattcgtaaaaattttttttaatttaaaataaattttaatttaattttcaattttttaaagaaattcttccggttcatcgtctcctaatgtttctgtgaatggttcatcacgagaagcttgttcagcaatgcaatttatgtcgagcttaaatcaaaatggacaacaaaatttgaggcaaaatattttcgggtaaaaataatgtttttttattcataaaaagtgattaaacattccataaaataaattaattaataacaaaataatattttttaagtgtgtctccccaatctccaattatgaatattgctgagctgagggtgcgtttgaaggaggacagtgcccgattttctgcacattatttgggctccacggaaatttcgaatgtcgaaggcaccgaagactgccggagggcaatgcaatcggccaaa

SEQ ID NO: 84424 - DNA, 1143 bp, Heterodera glycines
atggactactggtttttagtccgtaagtccgtatggatgcctagtccgtagtcccgtcctgatccgtattttcgcaaaatgccgatctctaattttttgagttattagggccgattttcttggtttttaggtatttttattactaaaagtttaaaatttgaaaaaaaaaattgttatgctgtacaatttatttacaaaatacaaacaaataaacaaaaatatatctctgacaaatgagaatctagctaaaagtttcaaaaatgcactcctaaaaatgaaaattttctcaaaaattcctctacaatttattatttatttgatgaaaatttttggttttccaaattatatatctccataaataaataaataacatatgtctttttcctgtaatttaaagcaatgtttttgggagctcgttcaactcttttcattgatcgtaaagatgccggccaaaaattggctaaggctttagcccatattttgcctcaacgtgataacattgtaagaatgagggctcttctgcagtttagtttccgatatacttttatgtgtacaaaaaaccctgaaatgttggagttcaatctttcaaatgctaccaaggatataggcatatgtattaaccaagtaagaaaaaaactatggcctaagaaaactgaggatggtcattgattggatgcgtaaactgcagtaacgccgaattgggtgccaaaacgatagtattttgtggtttaacaggtggttttggcacttccgcgtggcggagttccagtggcttgtgaagtcgctgatgcctttcaggctcctctcgatcttctgatggtaaatgcaaaaccatcggcactattaccatgatttttacttcataatatatattttaggtaagaaagataggtgctcctggccatgaagaatatggaattggtgctgttgtggaaggaaatccgcccgagctcgttatggtgggcagaagaaattgttgcctaatgtaaagttcaattctaagaatgaggaggctgtcagaattacacgaccatctgaagcatatgtgcaacagcaaatgcagaagcaactcaaagaaatggagagacagcgaaaagtgagtcatttaaaacacgcaaaaatggatttaaccgaaaattacta

SEQ ID NO: 84425 - DNA, 254 bp, Heterodera glycines
atgattttcgggccattcccggcgaatatcgcgaaaagggcgaagctggcgatgggctccttctctgctggttagtttggtcttcgtttccaagccgattcgttcccgtttccagatgaaaagtccgataataatcagactcagtttgagattgtctacgtttgtcgtcggtctccatcagaggttgcaaatccaaggagtttgactgttgagttgttttcttgagcgatttgaactgatccgagtgaaataaa

SEQ ID NO: 84426 - DNA, 2018 bp, Heterodera glycines
aacacaaaattgcgtccgtcagcaaacagttggacgagaagggcacaaagctcaaggaagcgttggagcagaacgcgtcgttgaaagacagaattggcacactcggtgagtattttgtgcccttaaatttaaggacatgtttcgaggacggatgagaaatttgtacaaaaaacaatttagagcaagaaaaattggaagtctcgcttctcattgaaacattgacaaagagtcgggacagactgcttcaggaaaaggtcggtttccgtcgacaaataataatttacagtttttgctgcccaattcaaattattaaaaccggggaaattgccaaaaaaaagtggcttattgttcgaaaatcgagattttcgaactttacatcataaaatgttaattcaattcgtcgtttttcaccttttttaatctaattggggtcggtgagccttttgctttactactggtattgttgcattcatttaaccattcatgattcgggtttttgaatttggtcacggcccaaattatgtttttcttgacctcaatggttaaaatattcgcacatttttaaatgattgataattgtcaattactttccttaagacggacctccgaaatgagctgcttggcctcgagaagcgcaaagatcagctcgaattgcaagtggccaagttgaacagcgaaaaacaccgccatttgggtacacaatccgctggttttctatcggttttaatttggcctaggatctgttccattttccccaaaaaaaaaacaaatttttcttttcagaagacatcagtgaactgcgccaaaagtgtgacgaattgtggggtgaacggaccgagttgcagagccaaattgacgacttccaaagtgacaaggcgctaattgtggtaggattttcttctctttttttggatggaattttgtggattttttcatgtttttatttttgaccctaacatataaacatgaaacataaaaaagcagtaaatataaaataaatgtctaataaacatttcaatgtccacgcctttcccttacatttccccccccccccatttttcaccatttttggttcaataacctcctttctctgcatattaataaaatgtacagcttctgttaacaaacaacaattttgttgtgtccctaaacctcccctcttcatctctgcccacacttctgtgtctctctggcattccccccccctcccccctctcaattgctgcacaattaaatatttgtttatgagccaaatgaccccttcgcagttcgacatttttgttcgcgcttttcaacacaaaccagcactgattgaaagtgtcatttgattgtttatttgtgtgcgtttgtggtgtgtctttgttgggtggtttctgctcttttttgtggtcacatcgctttgccccaaatttcgtcaaattccgcgcccctttttcattagttgcacacacaccccattttccagctcctttctgtaacaaaatacgcttcttttcctttgttaaatgtgcgcacctcccattcccccctcattttgccattgctttgtttaagcaaccgattcggacggaatggaatggtccaaaagttgttcaacaccagaagaagatgaagacgaagaagaaggtgtttcatgggttttcaatgtgtgaaaattgctcccaaaatttcctaccaaatcagtgcaaagtcccgaaaatatgtggcccaattggtaatatgccgctgccgacattggccagtgtgtgtgccaagtttaatgatggagctactactaatcctttgttggcggataatgttggcactattgaaattgatggtgatggtactgctggtgccaatgttgatgctgtgcgcccgtcaatgtcaaagtcggaaaaaagggcacttcgtagaagcagtaattaattacccaattaattgttgacgcaattcaacaaaattttttttccacagggaaaaaagctttttggaggaagcaaaacaattgtttgtccactcaacaaacaaacaaagaa

SEQ ID NO: 84427 - DNA, 488 bp, Heterodera glycines
atgtctcattttacgaatatgaaaattgaacttttagcatgcattttaattaacggtaaagcacaggcaaaacttgaaatcgggtggagacacaatgccaaggcggggagccaacaaaatgtgccgccatttttcagcccatttccggctttacccattcatttgcttgcgtagtatgaacgaacgcgcaaataacgctaatccggcacattttgtatttataaaatgtatgaaaataatagaaaattgaaaaatgaattttaaaaaggaaaaactgaaactttaatatagatttatacaaatttttaaatggaatattgaaaaatatttaatttatcaaatgaaaatatgaaattttgtataaaaaaacttgaaaattaaaattttttagggtaatttagaattctaaacttgaatttttaaaattggggaatgaaaattttttaatttggaaaagcatttaaattttttttaattttataaataaa

SEQ ID NO: 84428 - DNA, 152 bp, Heterodera glycines
accacggccaaaccgattcaagaattgctagggaacttattgaacaatttcagcctttcatttcatttcgtattcattaattagccgataaaaatgtgcgacgaagaagttgctgctctcgtggtggacaatgggtccggaatgtgcaaggc

SEQ ID NO: 84429 - DNA, 927 bp, Heterodera glycines
atggtttgtgactaaatttagctttttttggtcaatttaggaacaaaagtgaaaattttcaaaattctgaattttcgacttttgttcgaattcgggtccgggattcgaaatagggcaaaatggatgtcagattcgtgatcagcgaccctgaaacccccgtaaacatgtttccacgacattttagaacaaaaaaattttcttttaaaaaagggggggcaccatcgatagtattaccgcaaccttatttaaacttttttgcatttaaggttcttgatgtaaacaaaacccaacaagaaccaaaggtggggtaattttttagaaactttaattttcgtcttttaaggctcctcctgatgaagtgaaagagacgccacagggagacaactcggaagaagttccaactgaagccattgttgttgatgttgtcgacacaccaaaggaagccgatagtgaaaatggaaaaaaagaaagtgaaactgcggagaaagatcagccatcgtcacagaattctcttggaaacgaccaaaagaatgaaaaagtaagagttgtttctcgatttgattttgttttatgtatttgcttcaattcagacttctccggctcaaggtggtcttccaaaatggatggtgcagaatgccaatgctccgccatccccttctcccgaggttgatgggcataaagagcagcagcagtcgtcagcatcgcctcaaaaagtgcgtggcagaggccgtggacgtcgtccggcagcggagaaaacagcagcacccaacgataaacgcgtccaatcgcctacggtattttgtgaatttccttttttattggtatacaaaaaattactctgttttattttcatttcaggatgataagacttcacaacgtccaagacggtcgacccggactcgtaaaagtacgcaaatcccgatgctg

SEQ ID NO: 84430 - DNA, 103 bp, Heterodera glycines
ataaaagtcaacgtagaagcctaaaaccaagtggaaaatgtgttttttatgcttaatatatcgaaactagcgcgcagaaaaaaaaaggcatatgcctcaaaat

SEQ ID NO: 84431 - DNA, 941 bp, Heterodera glycines
atggcacttcagcagagactgaccatatttatcaaaatcagaagcattggacaacgacattacgaaaaaatagcactggtgaaagaaataaatgaaaaatatgaaaagaaaaagtaaaaatggaatttctaataatttaaaggaaaattggtaattaattaattgattcatttcatgggctttgacgtttttcccttcaagggttttctgagtttcgcgtcacagaaatgctaccgcatcgtaatgccataatcgcaacctctgagtctccaattgttgttgatgccactaaaaaagattctctgacaatgccgctaatgattgaacggcttgaatttgttaatattttttaaaattatttaataattaattatatataatattttttaaactaatgactaaaagacactttttaggcgcgaaaactgcgtgaggaacaagtgaagctggaaatgttggaagcgattcgccgcgaacagcttggcaccgatgacccggacccgaattgtattatttgacaaaaagaccatttaaggggtaaatctttagtggagagacgaagacaagcaattgagaaaaagttgacacaactcgcacaatcggaaagaatccaccgagaaatgttggcacacaatcagcaaaggcacgagacggacaaagtgaatttggcatttgataagggaatcaaaatgacagaaggaacaaatttgaggttgcttcttcaattcgctcttcattcttagcgatgccatgcgaaacaatgcgacggttcgtccgttggtttcgcgtggacagcccccgggaatggattcgccaaaattgccaattggccaaacgccactttcccaatgccagctgtgaacagattgaggcattgttaagcaaatgcgtacgataattgcatatgcaatttccatatatttatatactttttctgtaaa

SEQ ID NO: 84432 - DNA, 431 bp, Heterodera glycines
atgtctttcactgtcactgtttatgcaatacgagtttattaccggaaaggtattaaagtttgaaaattggacatatgaaatgatttgttataaaaggtaattaaataaatcgaaataaattttgaaagtcaaacttttttgcaattgtctaaaaaacggccattagccattgttttgctgtttttaaaatcaattctgaatttttacacaattttggcatttttgagggttaaaaacctttttttggcagttttaaggcacattttagtgcatatttgggcattttattttatattattttttcaattaaagatactgggtccaatgtcgagaaagtgaatcttcgcataccgtatttgctcttttttatgtgccatggtatattatttttcaaccttctcagaaaagggtacataattggagactggtag

SEQ ID NO: 84433 - DNA, 372 bp, Heterodera glycines
atgataccaagattgatgggatttggaagacaaataaaaaagcttttgtggaaaaacttgctggcgcccaaccgtgcgcgcccaaacgtaagcgcctacttgagcgattccgaaaaaatttcattttttattgacataatgccataattttaatcaaaatattgttgaaaattacagatttctcaaatttctttgaattttttaaaacttttccagctgctcatttccaaggacctccttggcatccaaggacgaatgggagccctgctctaattgtatgcagcccttgccaaaaacccaaaattaatttatccattttgatgactattatttctaattctacgcatttctacggtagtgtttcgaaataaa

SEQ ID NO: 84434 - DNA, 1242 bp, Heterodera glycines
atgcaaaaattgattgccaagaacagtgagtgtctaatttcaacttagtttcaatttgtcattattgcaaagattaaccaaaatctgtgtcaatccaaaccgctcaaaatgaaattttaattttccaaccttcactgtttgggcattccaaaattgtgggtaccactggtgccagaacaacgaattgccgatcagctgcaccggtttgccgtttgagccgaccaaattggtgcctttgacggacaattggccgaacggcggtgcggcagcatcgacaaaagtaatgccaacgatggcaaggaggacgagttggacgaacatttgtgatcaaaccaaaagcagctaggaatgattatttatttgaagagtatttttttattaagagaaattttattggattgccaaaactgattttggaaagagtatttatagggcgacgaaacggaaaaaatttgacaatttaaaattttgatgaattcgccaaacattttgattgttcagcttgcgcatgcactaatgatcatatcccgttcatccaaaaagcttatgcgcttttctgttcaatattttacttttcaaattttttggctaaattttgtttgttcagcttacggtgagtgattttgacagctcagagacgtaaatctccaacattttgaatgcgtttttctattttttttattagcacagcctatgaaattaattttcatttttgagcaattcatttttaatatgcttattaatgaacttttgaaatgattgaaaaaatttatacatgtaagtttaataatttgttattttttatatataaacctcaccaaattcgacaaatgatttacccgaagcctctcggtcttctctttaattatctgacgccttgagacataagcctgactgataactagaccttttcaaattgaatttattctgctttaaaactatacaaattacttctcccctatgggcaacacctaaaacgaattagactgctggttaatgcccattaaatttattgaaaatgaatactcaggcaattttctaaatcagagctcggattcgtccttgaatggcaaggacgtcctggaaattgggccctctcacttgaaaatttgaaaatatccttgaattcaagatgtccttgaaaatgagcatataaagaaacaattcaaaaattttaatttttgacttttataccaatttttattaacttattgcattactggtttaaaatctggtaataaa

SEQ ID NO: 84435 - DNA, 1213 bp, Heterodera glycines
atgttcgtccaactcgtcctccttgccatcgttggcattacttttgtcgatgctgccgcaccgccgttcggccaattgtccgtcaaaggcaccaatttggtcggctcaaacggcaaaccggtgcagctgatcggcaattcgttgttctggcaccagtggtacccacaattttggaatgcccaaacagtgaaggttggaaaattaaaatttcattttgagcggtttggattgacacagattttggttaatctttgcaataatgacaaattgaaactaagttgaaattagacactcactgttcttggcaatcaatttttgcatattttgtgattctttttcgggtttgagttgctaaaaatgggctgatcactcacgccaggcactcaaatgcaattggaaaatttaaaaagtgaaaagactgagccgagatttggctaggcaaagcagctttttggatgaaattattaatcgagtccgatgcttaaattaaagactccgaataaaaaacaaacaaagtttttggctcaaaaagaaggcaatttttaaaccaattaagcctaattgcatttatgcttgtaggcactcaaatgcaattggaattccaatgtcgtgcgcaccgcaatgggcgtggaacagggcggctatctgagtgacgcgaacaccgcctaccgactgacggcagctgtgattgaggcggccattgcacagggcatttacgtgatcgtcgattggcacgcgcatgagccgaacgcggacaaggcggtaattacataatttgattttgcataatatattttaaaaaatcagagattataatttagcagtctgaaaaagatggtttagccaaaatatcaaacatttcccctttattggcccacaattattcatttaatttttgaaatatttacctctgatttaatttttatgaaactttaatagtaggaatcttgggttctcgagtgttagaaatttcgattcttgagcacgattcattgttttgcttcttgagattgaattcttcaccaaaattgcgaaagcgtacggctccaaccctcacttgctttacgaaacgtttaacgagccattggatgtgtcttggaacgatgtgcttgtcccttaccataaaaaggtaattcgctgggaaatgaaaattgctaacattctcccccttaaggttatttctgcaattcgtgccatcgacaaaagaatgtga

SEQ ID NO: 84436 - DNA, 1336 bp, Heterodera glycines
atgaaggatttttggctaggtcaggtcaaaaccggtcaaaatcaccggttccgggccgggttgacatttcaagagaaccgatttccgggcccagtttctcaaaagccgatcaaacatgcgaaaccggatttttccaaaaaaaaaccacggttcaagtttccaggacaggtaattccggtaccgggcccggcccggtctttactaaaaacccgagaataagacaaaaaaagactagcgtttcgagtcgaagtgggcgaagtacgaaaagtgtaaggttcggcgaagtacgaaaattgaaaagtgggcgaaatacgaaaagtaaggtttggcgaagtacgaaaaagtgccgaagtacgaaaaagtgcaaaatgggcgaagtacgaaaaagcgcaagtgaacaaattaaaagcaaaataattagtttaaaaacgaaaagcaaaatattattttaattaaattaattataatatttattatttaaattccgctacataattaaaatagattttccaggttatgaagacttctttaaaaatccataagaaacattcattttgattacaaagcggatctcgatggtggattttctctttccttttcagcaattggttttgctttcctcgcaacactgcatgcgggattatgttggaaattgtcgattttaagtttttggaattaaaattagcgtaatataaaaaattatttgctgtgtttatttttaaataattatccattaaatagtatagatttagtgaagctttggctcaccacatatatgattaattcaaaaacatttcttaattgtgtagcgaaatttaattaatctatatatattcaaattaaatttaattaacataattagagtgctcattttgcagcatatgctgtttttttttttgctaacttggggcgtgataataggcatgaaaaacgcatttctaacttggttgaggcttctaagtccacttctttcatgctgatttttgctgatttcttgattttttaatttttgtgcagatttttggaggttttttataatcagggagcaaacaatcgttttttgacgccttttttcaatttttggtgcctttaatctcttaatttttatgcttttttccaattttttgtttttgccttttttgtgcttttttcatgcttattttggaatttggtgctatttactgtggtgcttaatcggttattttttgtgctgaaaacgagcactctaaacataattattttgcttttcatttgatcgcttgcacagtaccctttgtatataggctaattgccaaagctcttagttttaaaaattcatcatcggaattttattcaa

SEQ ID NO: 84437 - DNA, 199 bp, Heterodera glycines
  unsure (1)..(199): unsure at all n locations
aagtgcaataatantggacaaataataattcacaggtgtgaaatgctaaataaagtctgaagtccggatgatcaactgaaactgaagaaaatggaaaatgtgaagattgcgaaaaataaatatatataaaatttgcatgcgaatgtttatcgaaattccgattaaattgttttttgagcgcagataaatcgcaaagcat

SEQ ID NO: 84438 - DNA, 1294 bp, Heterodera glycines
atgttcgtccaactcgtcctccttgccatcgttggcattacttttgtcgatgctgccgcaccgccgttcggccaattgtccgtcaaaggcaccaatttggtcggctcaaacggcaaaccggtgcagctgatcggcaattcgttgttctggcaccagtggtacccacaattttggaatgcccaaacagtgaaggttggaaaattaaaatttcattttgagcggtttggattgacacagattttggttaatctttgcaataatgacaaattgaaactaagttgaaattagacactcactgttcttggcaatcaatttttgtatattttgtgattcttttttcgggtttgaattgctaaaaatgggctgatcactcacgccaggcactcaaatgcaattggaaaatttaaaaagtgaaaagactgagccgagatttggctaggcaaagcagctttttggatgaaattattaatcgagtccgatgcttaaattaaagactccgaataaaaaacaaacaaagtttttggctcaaaaagaaggcaatttttaaaccaattaagcctaattgcatttatgcttgtaggcactcaaatgcaattggaattccaatgtcgtgcgcaccgcaatgggcgtggaacagggcggctatctgagtgacgcgaacaccgcctaccgactgacggcagctgtgattgaggcggccattgcacagggcatttacgtgatcgtcgattggcacgcgcatgagccgaacgcggacaaggcggtaattacataatttgattttgcataatatattttaaaaaatcagagattataatttagcactctgaaaaagatggtttagccaaaatatcaaacatttcccctttattggcccacaattattcatttaatttttgaaatatttacctctgatttaatttttagtaggaatcttgggttctcgagtgttagaaatttcgattcttgagcacgattcattgttttgcttcttgagattgaattcttcaccaaaattgcgaaagcgtacggctccaaccctcacttgctttacgaaacgtttaacgagccattggatgtgtcttggaacgatgtgcttgtcccttaccataaaaaggtaattcgctgggaaacgaaaattgctaaaatcttacacattctcccccttaaggttatttctgcaattcgtgccatcgacaaaaagaatgtgatcattctcggcactcccaaatggtctcaagatgttgacgtggcggcccaaaatccgatcaaaggattcagtaatttgatgtaa

SEQ ID NO: 84439 - DNA, 1121 bp, Heterodera glycines
atgatcatatcccgttcatccaaaaagcttatgcgcttttctgttcaatattttacttttcaaattttttggctaaattttgtttgttcagcttacggtgagtgattttgacagctcagagacgtaaatctccaacattttgaatgcgtttttctattttttttattagcacagcctatgaaattaattttcatttttgagcaattcatttttaatatgcttattaatgacttttgaaatgattgaaaaaatttatacatgtaagtttaataatgtattatttttttgtcggaaagcactttgggtcaaattatggactgaaatgactgattagaaataataatttaggtgacaaaaaacacttaaaatctctttcagattttgaagtaggaagaaggaaatgcgagggacgggcgaagctcggcttagcactcgaagccgaaggcgaagcccaatttttttcaaagcacgaagttcgaagccccaaaaacccgaagttttcaaagctcgaagcacgaagtttttgagaaaataattttcttccctatcaaaattttaatgggtggtaaaaattatttgtaacaaaaaatcatgatcaaaattaggctgttcgagaccgaaaattcctgagactgagacttctttctataaattaaaaaacaaattttcatgcttttcgaacagatttttttgcggcaccggggtgacgacaagcgccgcctgggaaaatttgaatacaatttatcaatagattttgtccaaaaaggccgatttttgcgattctgagccaattatcgaggatatttttattttatttttcacaccgcttttttttgcggtgtatttatttaaagcttttttgtgggggagaggggggggggggggggtacggcggtgccaataggcgccatctgggaaaattttgaaattttgagcgtactttgttaacagaattaggcgaaaaatgaaaaaatttgcgattttaaaaattgggggtttaggcgtcgggggttaattttggacctatatattaaaaatatacgatttccatcatgtttttcaaaatgttaatgtttaaaaaattaaaagaaaaccactacttggaggggaactgatcaaaa

SEQ ID NO: 84440 - DNA, 951 bp, Heterodera glycines
atgcgcgccattctcttcctggccatggtttgcttggtgatggctgttattcttgagacaggtggccacaattaattaaaaaattaaaaatattttattattttagccaactcaaaggcagtgaaaaataagaaaggtataaataaattgataataaatattaattggaatatgcttttaaaggagcaattacaacgccagcaaaaggaaaagcggcgccgaaaggagcagcgaaaggaggtaaagcagaaaagagagagggactaattaatacaaattaattaattaactaattaattaattaaggaattaaaaaagacgcaaaatcaaagggaaaaggaaaaaaggacgccaaaggcaaaaagggtaagaattttaatataaaaagaaatttaaaaagttaatttttgaattttagacaaaaaagctaagccagccaaagggaaagaagtgtctaaaaatggtaattattttaattttaaatgctaattaaaattgaatgaatttagacaaaaaatccccaactgccaaagcaaatgacaaaaagagcccaagtaaataatttaattaaattctaattaatattgtgccaaacattgccaattttaagccaaaccaatggcagcagtgaaagccgtgccaaaggcggcggagaatgctcagaagggaccgtcgagtgcggaagtggtggcggaggaaaacaacttggacactgaggcgatcgacgacttgggggcggaagagtcggactttgaccaattggcagaggacgaactgctcgaggacgacgccatggacggcgaggcggacgaatgggaaggcatgggggaggagacggagatggacagccaaatggcactctgatggccaactaattggacaaatggtaaacggaacaaaacgggacaaatgacacaaaatatcatttttggcatttcattttcagcaaaa

SEQ ID NO: 84441 - DNA, 88 bp, Heterodera glycines
atgctgatcaaaaaaggtagtaacaccaagttgatcagatcactccttcatggtgatctgatcagcccattttggctgggaacgaggg

SEQ ID NO: 84442 - DNA, 838 bp, Heterodera glycines
atgaaagagatattttattttcttctcattttactaaacatttttcattgtgcaaaatttgacgttttcactgcaatggtcgacttggagaatttgttggcaagtgaagcggcaagaacaccagaacttctcgagcagtacatccaaacggagaagaacaggctggaacagctgagcaagtcgggcaaattgagcaaaacaaaaaaaaaaaaaaaaaattaaaattagggaaaaaacaaatttaaatgtttaaattattttgatctttatttagccttgccgaagaatacgcacggggattatctgaacaaaaacaacagaaacaagccttattgaccaaagataaagtaagttaatgcaatgcttaaacaaaactttgccatttttggcattaattttaaaacattttaaattattttttaaattaattcttaatattaggaagaagcatcggtgtcaaatccggtcagcgcctatttgctgatcaaacggatggcgcgtgattggaaaagcatcaaaagtttgatgaacgcaaaccaaggcgaattgttcatcaaaaatatcactgatgaacgaatggaaaatgcggtgctaaaaatgaaaattgaataatagaatttgcttttggaattaaattcagataaaatatccggactctgaggatttggaaggagctgctcaaggactgctaagactccaggcaattgaaaattctcaattaaattttttaatataaatactgattgtcttggaaagcagaagggttgcgatttgaacgaaaaagggcacaatcaagaaatcggtgccgagtcgttactcaaaaaaccatcaaaataaa

SEQ ID NO: 84443 - DNA, 637 bp, Heterodera glycines
atgagatcgtcgtaagtttcacaacagacgaaatcacctacagagaccaactcctcaaacattttccgcaataataaatttttcatattgagtaaaaaatataaatattttcatagttattctttaaagtcttgataattttagagaattatcattttattttctgattacattatatcgtggtgagccgaagttacaaattaaatttaattatttttttattttaaataaacaaaaagttatatgcaaagaataccgaaaatttagactataactcaattaaaggaaaattaatcaaatgattattaagtagcgataaatttttttttattattaatttacattagatattttagacttgcaattttttcaaaaaacttatcttaagattatatccataggttctcatttttttacattttccattaatgtttcaaagaaattttaatgtttattataaataagaaattttttaatagaacaaaaattataaaattatttttaagctctacttttaattcaatattaagaatccatttgaatgaactctcatatctattttgaattatatctgactaataatttcttatatccatgatcaaaaagccttcaaaataattatgaaattaaaaactta

SEQ ID NO: 84444 - DNA, 1034 bp, Heterodera glycines
taaaagtcaatatggcttaggaaattgtgtggctggtgaacatgacattattactaccacagaggagccaatcgcctcaaaaccgcacagaattccatttaagtacagggatgaattgcagaagcacattgaccaacttcttgcgtcgggagtaatggtagaatctgacaccccttgggtatcaaatattgtcctagtacagaaaaaagatggtgggcttaggccgtgtattgactttagaaagctgaacgaggtcacagtacctgatcactttccattaccaagattggaatcgattttggaaatagtgggcaaatgccgttattatacatcattggatttagcgagtggctatcttcaaataaaattgagcgagcgtgcctcccgtaaatgtggggtgataactgagaacaaaatttatcaaatgatcaatcttccatttgggttaaaaaatgcaacaagtgcatttgcgagaataatggcacatgtgttgactggtcttgaaaatgtcatagcttatgttgatgaaattttgatttttactaaatcagaaaattttgatgagcatttggattgtctcagaaaagtttttgagagatttaggagattcaatttgaaattgagtccgaaaaaatgtacttttgcttcggcagacatggagtttcttggatatgtcgttagtgagaagggatacacacctagtctgagcaaagtagaaacaattctaagcctcaaaaacccgtccactgtgaaggaagtgagacaagtggtgggcatggcaagcttctttaggaaacacattccagctttttcgactattgttgagccattgacaaggttgactaggaaggaaaaatcctgggtttgggctgatgagcaacaaaaagcatttgaccaaattaagaaaattctttctgaaaaacctgtccttatttttccggactattctaagccatttcacatattttgtgacgcttcctcggttggtcaaggaggcgctctcatgcaatgggatgaagagaacaaaatttata

SEQ ID NO: 84445 - DNA, 1816 bp, Heterodera glycines
tcgctcacacaacgacatgctgcgtcgtgcttcgtcggaccgggaccgtgccgtggcccacaaccgtggtcgcaacagtcgaagccgttcgcccatccgacgctcgtccactcgctctgacaaacacaacatttccggctcctccaccgccacatggcaatcgaagggtggctcttcgtcagcatcgtcccgttacgtgggcggcggcaagcagcgcgacggtggcagcggcggaacgggccgtagcaattcgcgtacccgagccggaatgtcctcctcatcatcgaatcaccatcaatcgtcgtcgtacgatcaacaacaaaagcaacagtttggtagcggtggcggcactgccgcgctgaatcccttctcccagccgcaacccttcgccggtggttcctccgtcggggcgctgtcctatggcaaacagcaacagtactcaattggcagcggtggtggtggtgggtcgtcacggatgacgtcggcaacttccactgtctctgctgctggtggtggtggcggtggttatgaacggcatggccaaatgcaaggtggcttttcgcgttttatgtgttggcactcaaaaaatccagcacttttttctataagattcaaggaaatataaaagattttcttgcgatttttaaaaaattttaaaacaaattttcggtttcaatttttatttggtcgtaatcaaactgtttcaaaaattcaatttcattttttggggattcttttgtcttttcaaatggactttttaaacgattttcaaattttttcccgcccaacaggacgttcttattataacgatcgttatgccgacacaacaactgctacgagtgcgtacgcctcgcgcaccgacccgtcatatggccagcgcattggccaacagttttccagcggcggtggggcgcgtgacgaaatgtacggtgtttcgagtggcgggggcggtgcgttcggagacagcggttacgccacatcctcgtaagtttttgtaagttgcattgaattgagtgcaacaacctatttgttttgcaataatttatgtatttgtgggaataattaatgttaaaatcccattagaaaacttagaaattttttttaaacttcaattaaaaaacaatagcaacactttaattaatgtaattaattgctttttcctccagggcgcagttcgcttcttcccgtggccaatcctccggcggtggtggtggtggccagccctcctcctcctattacaacagtcagtcgtcggcatgggcgaaccctgctaatagccgtgccacggaaatggtcaattcgcgcgcatttggcacgagcgccggtggaacttcagccagtggcaacggtggttggagcagacaaactgatgacattctctctggtaatagctgcttgagcttggcggatttttttatgaatttgaaatccggtaaatgggtcagggtgcacttcaatttttctccccctcctttcaaacccctgatttttttttacaagattagaaattcaacataatattttgataaaaattgctggaaaattttcaaacatttttattttccggggaggaaactacctgcttcggatcaatcaagatttaaactatgaaaaatttatgccatatcaatcatagttatatatttattttttgttgtgctttcagaatggaacatgtacggctcgccgtcgaagatgaccggtgcttcctcgtcatccggcggtcgctaccatcagcagcaatcgatgtcctacggtggagcaggaggccgatcgggcggttcactgtactcgggcggtggtggaggaggaagac

SEQ ID NO: 84446 - DNA, 1286 bp, Heterodera glycines
atgtgtgttgctactggctacactcttgcgcagaaaagagcatttttaatgaaagcaatttcaattaagactccgggaatggcgacgatgatgaaattgacatacaaagcgaaattaatgtggacgaacgggtgccggtgcgcaattattgctgcattgagcctggaacatctgctgaaagagcaaagagtactgacaatgaggataaagtgaaacaaaccattaaattcaaccaaacattggctcttttttaaagactttacaattgcctgaagatgaagagaatacactcaacgggtcatcgttggcaaacagttcaacctcaacatcgtttgtcagcacaattcattcgttgctcgtctttctggagcagtccaacaacaacaactgttaccggttgatcaactgtttggaaacaatgcgacccaagcatctgatcatgtacagttccgatttggcatcaacgcgggccattgaggtgaaagggcgaaacacccaaaacgatttatggcaatttgtaactttttaggtgtttaaagcggtaaacaaagaccaccaaatgactgtccattcgtttgtgtgtgccctgagcagtgaagaggaacgctttctttcgtccatccaaagggaaacggacgcaattgaaatgctaatcagagagcagggcgtacgtttgacttaaatcaacgaaaaagagaagggctcaattttcttttgtgttttaggtgctgatggtgccgagagaatttgacgtcagtcgggacagcgtttcgcagttgcgacgactgacaatgaatcggacggactcgcgcaaacggacggcaacatcctccacacaacggatcgtagacgaagagtttgaggaacaattacgtccattggtcatttttatatcttttcaggcggtgggggaaggtcaccctcccccgaaaattcttcatttttaatatacaatttcaaaaaaaaattcattttatttaattttaaaaaaatccgttttatttttcatttttccaattggattaaatatctttgttaatccgatcaaattacaggtcattgtcgacatgcgcgagttcaacagcgaacttccaatcactttataccgtcgtggcattgatttgcacgccgccactctcgaagtgggcgattacgttctcgcgccacagatttgcgttgaacgaaaatcactggatgatttggcccaatcgctgctgaacggacgcctcttcaagcaaatcgaacaagtgaaacaaaagaaatggcaaattaatgaaaaacaataa

SEQ ID NO: 84447 - DNA, 1148 bp, Heterodera glycines
ccgtttgggcacggccatctccacccgtaccaccatcgctttttgcggatgctgaatttgcgcttttacgaggcttatttgacctttctgtacatgggcatcaagctgttgtttttgagcaatgtttgcatgcaggtgaaaaattaattaataacttcgagcacatgggttattttcggcgctattatcaaagttaccgattttgaattttgttaaaaccaaagggggacccttttgggtttgtctagtttggaattttgttccctgccgtttttgttgtccctgatcacgcatctgacatttattttaactaattctgagttcctcttctttatttcaaaaaaaaatcaaaaaacaataaacttgaattcgacttttatacaagttcggattagggtttaaaattagtcaaaataggtgttagattcatgaaggacctgaaaaatactcgagaacaaattttcacaagttattatcacaaattgtaagaattattttaagaatttcagatgtttttgatgaattggtttttacaaaccagcaattatcgctattatggtctcggcgtactgcaggatttgtttgatggacggcgtaattaaatataaaatattttaaatggtcagattaaatgcaaatcaatttttttagcatggagtgattccggcaattttccacgcgttacctattgtgacatggacattcgaatattgggcaatgttcaaaaacacactgtccaatgcgttcttgtcattaatattttcattgaaaaagtatttttaattcttagaaaaattatttaaaaaggcatacggatatattttaataaaattactgaaatttctatttaatcctttttaaatttaaaatattattttagatttttgttctgctgtggatttggtatagtttgctggttgtagtcacaattttcagcttcattaattggctgatgtcatctttgccctttgaggcgagaaaacggtgaaaaacattgaacaaaaataaaatgatttttttttgtaagatttattgcgcgtcgattagaacttgcggacgtcgaattcagacaaaaggattttgagggtgaacttgacgaggtatcaaatttagcattattttttctgtttttttgcagtcccaattat

SEQ ID NO: 84448 - DNA, 1173 bp, Heterodera glycines
tccacggccactgtcaacaacgcctatcaggccccatgtccgcacgcgtccaacaactaccgaccaaacaactggcaccgattttcgagcaacagtccagtcaacccaaacggttttagaaaccgccgatggtgccactcagacagaaacaggtaaaatcagtgatcagattttctaatcaattttatcccccataatttcattttcagagcaagggccaattcaaaggctgtgcacggagctgaacaaggcgaaacgcagaattgggacgctggaacgccagctgcagaaaaaaactgaagaggtgaaactgctcaaaacccgaccaacagagcaaaacggacacaggatcaaaagagtgagttcagtggaccacttgtcaaggcagagccggacaaaacgtgctaaggaaatagcgcggaacctcagccatctctttagaccagacaaattacttcttaatttttttattttaacaataatgccgcattttcaggcactccagtacccgaaatcgacaaagttgtgcgccaggccgtcaccaggccaatttcatctcgcccaaaaaaccgcccggaaaatggaccaaaaggggccgaacaaggagacaagaacgaatcagtccactcctggacatccaagtcacactgatgttgggattcagttggcgacaaaggcagcagcttcgacaatttctcaaataaatgctcatccattcatggctatttcaaggcaaagatactttttttctcattttccccttttcaagaaactttgggaaactcatccggctaaattcgacacaaacaatgccgctggattcaccccaaaattacactggcttctcgcccatggtccagactttgccaagcgttgggggtggttcgcatggatcagtgaacagggaatcgaacaccttcaccacgttttgaacaagcaggttggacagactcaatttcacagttcaaaaacctattttttgttttagtctgagcgcttcatgcggtacaagggcaacgaactgctgctgaagatcggagaacatcagacattgctcaattctattttcgacagataaaccggtttcctctgatcaacaaatgttaggaatcattaattttattatccggttttgttaaatattgttacttttaatatttttaatcaaataaa

SEQ ID NO: 84449 - DNA, 667 bp, Heterodera glycines
atggacatcggagagatgactccaccaccgttggtcatcgacgaccgatcagagcgcatcgaacagctggagatggagctcaaggaccgggatgacaccatccaatttctgcgggagcaggtgcgcaaccgtgatgcgctgatcactgccatgcggcgccagcgcatttgaacaccaaattgaggagttccgtggttttctggcccaagaacaacggatgcgcgacttcctatctcagaaaccgaaggcccacttattgctcaatcatttcgtcccatttgctcggcaacattctttcctcggcttgctggacgagcagggtgggcagcaaaaattaattaactcaaattttcaaaaacattaggggatgaggcacttcattcggtttggagaagactggagcaatggtggaaatgcatgccggacgcggaccaaattctacaacaattggagcaccattttgtcagcaattggctcctcgacaccggcagaattgctgagatgaagcaggcgagttttgagtggcgtgggaaggggttaattttcccagaaatcatttgaattttaaacattttagaggctggaagaacaaaaagaagacgacaatttttcggagcattcggatggtgaaaatgatgaagactcggtcatcgatgttattgggtga

SEQ ID NO: 84450 - DNA, 114 bp, Heterodera glycines
ctcaggtgggattgaacctgggactccctttttggtggcaaactcacagaccactaagacaaaaaatcaattagtttttgaactggggactcaaaattgactcggtgtgtaaac

SEQ ID NO: 84451 - DNA, 1430 bp, Heterodera glycines
atggcaaattttgcagccgccgcggcttccacgcagcaaagtgcgaccgcagctgagcaattcgctggcggaggtgcgcttttcgtccgtcgccccaccgtatgctttttcagatgccgaccctccgccggtcgcttctccgtcctcgtcgcttccgtctcacaatcagtcaaactcacgcaaattcatcacttctcaaatggccaacgacgacaaaccgccaaattcggccaatttccgcccttttcactcattcgaaagcgaacgaacgaattcaatcggagaaggagaaataacggaaaaggacaaaagaagtggaggagaagcacaaaacaaacaacaacaacaggtggggggatgccatgttgagaaagagagggaaccagtgaaaaaataaagagaaaattagggaaacaaaaataaaaatgggggtacaaaagaattttttagacatttcgcaacattttatgcttaatttgtgttgttcttgggcagctaatgaatcactaattagttaattgcatttgttaatgagctgtctcacatcggccttttccgcaattcagcagaagcaattcaacttttcggacattgcctctctcgccgaatgttctcgcggtggtccgtcgcgcgtgccctccccccctcctccgctggcgaatgttcctccgccccctcccgccgctttgtccgcttcttcctcggccctttccgtgccttcgccagcgttttttaattcgccagtttttgaatcttctaccaatgcacccgcttttctgcaacattatttgcaacaaattattggaattcagcaaccgatggtgaaaaatgaaggagagaaaagggaagaggaagaaaatgggagggaaaggagaaaaaggaagagagacaaagaggaggaagaggagacgaagaagaagacaaacattgagggatgaaaggaaagaggaggaaggaggaaaaggaggaggaagaggagacgaagaaaaagacaaatattgagggatgaaaggaaagaggaggaaaaggaggaggaagagagacaaggaggaggaagaggagacgaagaagaagacaaacattgagggatgaaagggaagaggaggaaaaggaggaggaagagagacaaggaggaggaagaggagacgaagaaaaagacaaatattgagggatgaaaggaaagaggaggaaaaggaggaggaagagagacaaggaggaggaagaggagacgaagaagaagacaaacattgagggatgaaagggaagaggaggaaaaggaggaggaagagagacaaggaggaggaagaggagacgaagaaaaagacaaacaaaattcgctttttctctccctttttgtataatattttatttttttagttagctccaatttcttttgcctctcattttcataataacaattacataataaa

SEQ ID NO: 84452 - DNA, 1081 bp, Heterodera glycines
atggccaaacccccgctttttgcgcttttcccccctcacgccgctcttcttgggcccgtctcttccgcgatttactcgtccaattctcttccaaattgtgcacaaattcctgaagatcaattgcaacagataaaaaatgtcaatgagaaaaaaatgacggcatttttggagaaaaatgaacgacggggaggagacggaaaggaaactgcgaattcatcgaacaaaagcgcaatggatggagacgaaacggcaccattgaggggggaaggggcgatgagcaagttggaagcaatgccaacccaagaaggaggggatacggaagaaagagaaagaggttgattgggaggacggagtgggcacggcacattgggggcgggggagggagggatgccgaagaaatgcaatgtcattttgctacttaagtgcatttacggcgcatgtccaccgtttcttcctccggttactctcccgatcgccttacgaagtcggcactttccccgtccatcgccgattacggcaacggacagtcgccgttgaatggcatcagcggaaatggcggcgatggcggaggggaggacagcgggggcggtggggaggaggacagctgcaagaggggcaagcagagacggtaccgaacgacgttcagtgccaatcaactggaggaattggagagggtgagcaggccaaagcggcggggaactgctaacacgggcaaacatgttcagatgttcgccgtcactcagtacccggactgtttccaaaggtaagtcatttcggcaccgattgggccaaaaacaattaatccctgttcgttcaaattcaccgtccattttctgtccgtctttcactctccgcccccgcccattttctttcatctttccttaatttggcctatccaaccaattttctcgcttccgcagtcccccgagggtacctcttttccgcagggattggcttttcccctgaggggaaattattattgcgccttcaaatgtttctctctctcttattttctttttctattttcttccgccattctccttcgatttctccaaaatgaaggacaaaatgagcaaataaa

SEQ ID NO: 84453 - DNA, 553 bp, Heterodera glycines
atgcatttggctcgccatttaaacattttagaattcgctgatgttcttttttatagcaatatttttgtaatttttaatttgcaaataaatggtaattattttttctttgtgtgcataatcaattgcacaactcgtgccccaagtgcaaacaaaaattaatgtctcctaagagactaataaacgcatattaaataattttaaataaatatcatttataagtatcatttattttagcagagataattcttttaatttcatttaaatttttatttatactgctttaacagtaatgtatattttgccaaaaaacaaaaattaaattaataacgtttttcttagtaaaatttcgaaaattataaaatgtttattttaggttttatttaattatgataaattattttttcttttcatttttggcattaaattattttatttaaatctcatatgacagatgaaattttttgcatctgtaagaattataactgatttaatattgttattattgcgtttttaaacgttctttaattttttcattttttatgaatttgacgaa

SEQ ID NO: 84454 - DNA, 414 bp, Heterodera glycines
atgattttattattaaaaccgcttattgttcaaccaatgttcggtatcattcgttttttattcgtacctctcgcctctataggtgtttgcctaaagaggcgaggttacttaattccattgactttgctaaacttcttgacacctatgatgttgattctttacttttgaaaccacctcatctcattcagtgaccaaatttatttatattgttatttatgtcggtgtcacgcttttgcgtataaattgattgattgattgattgattgattttgcgctattaatagcctaaaatattttttgttagcatttttggaatttatttgattttgggaaaatttaaaaaataataatgaatattttttaggttgttttgtgttaatgaatattttcaattttagataaatgccctcttaa

SEQ ID NO: 84455 - DNA, 762 bp, Heterodera glycines
atgaccaaatggttcgcgactgtccgaaaacgtgcaatgtttgcccgggagtttgtgaagatttgggcaccgaatgtcccgaccgacaaagggcgggttattgtgggagagcggtgagaaaaaaaagaaaatcaaattaagactaattaacaaaatatttaatttctttaaaataaatgtctgaaacatttgttactgtttttgttggctttataattttttttgcgttagctgtacaatgatttgatgaattggcaatgcccgcgaagttgcaaccgatgcggaaacagaaggcgaccacggggaagaatatacacaggcagaaaaagaagacaaatttaattaccactaatttatttattgaattattcacttttccccttccaccgaattctaattggttattggcagggctgccagattaaaattttcaaaagcctcatttggcatgcaaaaaacctcattttgtgtcaaaaagcctcatttttgcagatttattcaaaacacgtttaaaatgatcaaattttgtatttttgattgagcaattttttgtttgaaataagcattttgtgaaattctgagcatgaaaaatcaaagttgtttttttgcggcgctttttacaaaaattttttgggaaacagagggtcccggcggtgccgataggcgccgccggaaaatttttgtaatttttaatgtgatttgttaacagaatttgtccacaaaattgccaaattttgcaacttttagcaaaaattttaagaa

SEQ ID NO: 84456 - DNA, 446 bp, Heterodera glycines
atgagcgagggaattgaagctgcacaaccttctcctgctcatgagcagattcagcaacaatccgttgataggcaaagcgaggataacgagcatcaaccgtcagatgtttcacaagcacctcagcaattgtgattttcttttgcatgtttataattaataaatttattaggtttgatgcgcgtcttccgtttccacctcatcaaatgcgtcctggatttcatcctcgttttccaccatttccaccgaatggcatggggggaccaccaatgcggccaccttttcgtccgcctccaaatttctcgcagcaacccggaggcactcaacctgataacttcccaccgtttttcaacagtcctgctcacagaagtgatttgtttttctttattctgactgtctcttctatttctacgggatttcttaatctttcttcccctgtctatttaaag

SEQ ID NO: 84457 - DNA, 153 bp, Heterodera glycines
  unsure (1)..(153): unsure at all n locations
atggagcaaaatgaaccccaacaacaacaaggacaggaacagggacaaggacaacaacaaggacagcaacagggacaggaaccgcagggacaaggacaggaaccgcagggacagcaacagggacagcggcccgagatgngcaaaaccccatcg

SEQ ID NO: 84458 - DNA, 595 bp, Heterodera glycines
atgcataatgatattcatttaggcaacggaggaggaaatcactggcggcaaaatgcgcccggacatggaggtcattttcattggcgttttatttttcgtttttaaaatttttctatttcgttcagtgcccttcggtggagcagtggcaaacaacggtggacaaggaggctatgggcaaaacatcgtacctggtctaaacggtggtcagggcggctatggacaaaacatcgtacccgctcagggtgatttactcaagactattcagtttattatttttatttaagtgtaaatttatataaaaggtaaaaaaaaacattttttgaatccaaattttacttttttgcattttagctggcgctggcggcgttggatactttccggcggcctaccagcagcacggagggcaaaatgtgccgggtggaggtcctttaaaatcaattaaatccttcacctgaaaaactgattctcattgtgttttaaattaacaggccagtagtgttgttcttcggatgagactgaatgtatgacgaaagactccgtcgatcgcttttattctcattctgtcgtcgtttttcccgctttattttggatgata

SEQ ID NO: 84459 - DNA, 570 bp, Heterodera glycines
  unsure (1)..(570): unsure at all n locations
agaatgtagccagcagacggggacgaggaggaggaggaggacggacggggaaaaaaggggagaaatgagcgaggggaaagggagggaccgactgatcacaattaaggagggcttacaaaaaacaatcataatgcatacatacatagacatataatatttcctttttacaatacaacacattatgataaatgattcctttctagaagcagaagaagcagcggagggagacaagcagcggcaggtggtaaagcaaaaaaaaaaaaaattgcttgnctgtgttaatgggggtatttatttattatgattatgaatagtgtcttggaagagatttgaacagaagagaagcaaatacatattggaaaagggtaaattgttgttgtcgggcccaattatggtaatgtcaaatacaattaaaatcttacaatagaatggatattgaaaagtacaaacatccggcaggggtacttttgttgcagtttaattggactcgatgataaaccatagggaggagaggaccattttgatttggaatctttcatcaaaattaaatcagggatttgtcggaatgcc

SEQ ID NO: 84460 - DNA, 2613 bp, Heterodera glycines
  unsure (1)..(2613): unsure at all n locations
atgagtctctcccactcggaaggacactttgccctctttgtacgcctcgttgtgtttgtcaatgaactgtttggcgctataaatattgggtatttcaatttcaaattaatttagtattttcagctaacctcaaataagtcagcatccgttcgttctccacttcttggtccgcgtatgctttcccttaatttttatctcgtttattttccaattccttatgacttgccatgcttctgtttgtaagcattccaatcggaaaagccgcgttcgctacatcattcttatttttaatagatttttacataatcatttttcattattatgaccattttgtccatgccactcccatccctttttacatcatataacgaagacccgacattcgccctgtcgttcatctaacatccgaagcacgttgtccaatcataatcaatacgatctaatcatccgagtcgttctcatctattcgctgcacttcggatccgagcttcggaattgggcaaatccgagttcaggttcataatcggcaccctcgaaaacccctaaaaactgggtttgacccaaaatttaaaaaataataaaaattaggggcacacattcttcaggattacctagtttttatatatatttcattttcaaaaaatttgtcactcctatattttagcatttattttagaattataatggaacataaattgcatacagacacgcttgcggtttttgagctttcatcacgtatctgttcagagcggaatatgaatctgatcaatccggaaggtcgtaaaaaaacttttttaattaaataattattttttaatttttctttaattattaaaatttaatgacgagtttttatttgctgaatatgtgacctaaaacataaaaattaattttattggaacactttggaacttttgttggcacagtaattatctatcatttttttatttaatttattggcacagtaattatcatttttttaatttaaaactattttataatttaatttcttgtaaactatgattttcaaatataagcaagctaaatatttatttattttttagtagttcttcaacagtttggcatgatcgagaagctacagcacaagttgcgcttctcattgcaggacaatcaacggctttccgaattgaacaatcgcctgaagcgacagattgggtaaaaatgggtcgaattaatttttttttttgaacattttattataaaatatttaaaattttaaatattaaaatttaatattaatttattgaaccaattttgttatttcattattaaattttttgtaaattaancgaanttttannattattattaatttttatcattcaattaaaacgcagaattttctattgtttaannngattatttgtaattnnatattgtaattttcagaaatatgagcaaatcttgtatgagaacaaatcaaccattcatcagcttgtgtccgatttggcggcagctacgcaaaaaaaatgagtgcttgacagctgaacttgagcaacatcgtcacatattganctggcccaggatgagctaagggtgggataatgtgaacagtaattagcctaattgattgggattaacacttaattatgggttacaaaaatttatgaaaataggcgaaaaaccaatggtgagacaagacaccccattggtttacaaattttaaagatgatatatatctgtttcataaaacaaatttttggcatcgttggtcatcaatctgacatcccgaacccaaattctaacatcgggtcggtggtattcaaacaaattgaaatttcaaagttttggtttgggttagggatttttacgaaaggatgttagcaataaatatttatcgaggattttcaagaaattttatgatttatttgaattcttaattttatttttcgggatttcgaattatgcatttcggttttgtcttttaaggtttcttttttttaatctgtattataagtatctgagcatttgtccagggacttaatgtaatgatcaggcggcataatctggattcaattaattcatcttattttgaatttgttttcattcaaatataaaatcaaaatttgaattctatataattttttttttttatttcgaataaatttgcagaatgtgactgtcagaaaatcgacacttctgcgggacaacaatgatgatgtgtttctttccggtgacagaacagtgcagaacattttcaatcagcacaaaaatgggttaatacatcaatttacataaataaaattaaaacattttatcgaaaatttctatttaaaattttattttttaaatatatttttattttttaagcgaaaagaagcgttcaaagcgtcgttccagttcacatcatatgattttgtcggacaaacggtcaagactggcgtttaacagacaggtgatataatagggtcagagatcctgaatttagtccttatttacaagaactgtccttttttatggattttttcaaacactacaatcgattttttaattttaaaaatcattaatttttgacttatttttatactggttttttccaatctttcaatttttgtttctgcctttatattaaatctaatttcattgaataaa

SEQ ID NO: 84461 - DNA, 2535 bp, Heterodera glycines
gaaatgcgcaacaaccacctaccgtatacacagtacgcatagatggccgagattatgtgacttcgggtcaacacgccacgcatttttcattccgaggaagtaatttgtacatcaacaggaaatattatgaaaatcatccgccaccgatgaagcgaattggcagcagagcgacagacttggaaaatgaagaaagtaattttttataaatatttaattgccaaaagtatttgtaactaaatattttaaaaattaccaaaaatgatttaatttctatcaaaaaataataataagttttttatcgccagcgcaaattttaatatctttatatttctatttttccattttggctcttttgttggcccttttcaacaaaatatttatattttataaataaaaatatataaaattatttaatactttaagatgcgaatcgtctgaaacaacagcaatcattaaataaagcatcatcatcaaaaaatactgaagaagctggaacatgttcagatgatgagacttatttttcactctcagagtcagaggacgaagaaagtttggcgcaattaattttacaaaaatacccaaataaaagttaaatatgtttaattaaggaaatcctgggacttatgtgtatgtgcaagcctccgaaaatgatcaaagtacgcgctaaaaacactataaaatttgtgttagtcctgaaaattttgccctggttaattaacaaatgtatttaaattaattgttacgaaatgaaaagttttcatatctctttaattgaatatcaaaaaatcataaatgcaattcagctggtgatgggtactatatttttgtgcccgatgaaccggcacagggcaatgtttccgaaatgccacccacgcatccgacaacatcgacgtctctagcaaacagtgaactaaatattaattttttaaatatatttgtttaaaaatatttttaaaaattattctaaaagtttttaagattgtgcctaaataattattttttatatttttcaaaatattaaatttctttatttaatgacgcaaacgaattcaaaattatgcatttaaaaaatccatcaatggctatgtaaacaattaattgacgatcaaaaaatgatcaatttaaattagttatatacataaatttacaaaaatttaaattttaaaaaacaactaactctcttaaaaaattacgaaaaaaattttaaggaaaatgctcaaattttttttattgaaaatgaaaacaaccaattattgccttaatgtagtgcattatttttgaattcaaaatttattcatccctttttcttacagtggaaatatcatcggatgaagagcctgaaaatgaagccccagactcggaagatgaagaatatatcccatcgatccagccgataatgccgccggcatttccaacacatagtgaataatttatagggattccatttaatgataatttaaatttaaggtgatgatggttaccatatttttgtgcccaatgaacctgcacagagtaattttcttaaaatgccatcgatgcggtcaatgccatcatttctatccttgccgtcattgccttccttgtcatcacttccatccttgccgtcattgccatccttgccgacaatgccatcgatgccgacaatgacatccatgccgagaatgccactgacaatgccatccatgccgagaatgccggaaatgctgccgacaacgtcgacatttccaatgcatagtgagttaattagtcatgttaagtatctgcctaaaaaaaatttgaaaatactattgaaaaatttttaaaatttgccaagctcaaaatttataatgaatcctcagactcggaagatgaagaaggtacgtgataaaaattttaattattaaatttattttttgagtttcttatagtggaaaaatcatctgatgaagaaactgataatgaatcctcagactcggaagatgaagatggtacgtgataaaaattttaattattaaattggcttaggtaggaccatattcaggcattttttccgttagaattcttaagtccggcaattttaaaaactcatgaaaaattttccaaagttgtgcctttaaattgtcctattttggtacaaactctatatttgattgaagcatttagcgttagcttacaattcggcattagcttgcagttaacaaaaaaatatttaatataaatttttaaaatttatttttcgacattaaaacatttctttatatttagccaaagtttactttaaacaaattaaacgtgaagttgacgaatatgcgaaagaattaccgcctcaaatgaaacaagctaaattagatgcagaaaaacatatgaaagaactaaaaagtcatctggaagatgcaaaaaacactgtcactggatatatgaaagggttaaaaatggaaatgagtaagtctaaaatccataaaataatgccaacaccggaaacgccgggattgccgccattgtcatccccgccggcattgccatccatacaacaactgacatccgtatcgacaacag

SEQ ID NO: 84462 - DNA, 638 bp, Heterodera glycines
atgccggcggcattatcggctggatcgatgggatatattcttcatcttccgagtctggggcttcattttcaggctcttcatccgatgatatttccactgtaagaaaaagggatgaataaattttgaattcaaaaataatgcactacattaaggcaataattggttgttttcattttcaataaaaaaaatttgagcattttccttaaaatttttttcgtaattttttaagagagttagttgttttttaaaatttaaatttttgtaaatttatgtatataactaatttaaattgatcattttttgatcgtcaattaattgtttacatagccattgatggattttttaaatgcataattttgaattcgtttgcgtcattaaataaagaaatttaatattttgaaaaatataaaaaataattatttaggcacaatcttaaaaacttttagaataatttttaaaaatatttttaaacaaatatatttaaaaaattaatatttagttcactgtttgctagagacgtcgatgttgtcggatgcgtgggtggcatttcggaaacattgccctgtgccggttcatcgggcacaaaaatatagtacccatcaccagctgaattgcatttatgattttttgatattcaa

SEQ ID NO: 84463 - DNA, 740 bp, Heterodera glycines
atgcacacatttctcttttccgccctagtttggatagttttggtctgctttttgcacaatggtaaaataaatttataaaataatttttttttttaaatcggtgttgtaggaaatgcgcaacaaccacctaccgtatacacagtacgcatagatggccgagattacgtgacttcgggtcaacacgccacgcatttttcattccgaggaagtaatttgtacatcaacgggaaatattatgaaaatcatccgacgccgatgaagcgaattgtcagcacagcgacagacttggaaaataaagaaagtaatttttaacaataattatttgactaaatcctacatattttaaaataataaaaatattttaaaaaacaaaaacaacgcgagacaaattaattcatcatttatttctttatgattctttgcttttttattttaattaaagtcatgcaaattttgccctggttataacaaatatatttttaaattatatttacgtaatgtaatatttaacaataattatttatttgataaattttattagaaaatattatttaattctttaaggtgaaaatcgtttgaaagagcagcaatccctaaataaagcatcatcctcaaaaaatactgaagcagctggagtttgttcagatgatgaaagttatttttcactctcatcagagtcagaggacgaagaaagtttggcaattaattttactaaaatatccaaataaaatataattaaa

SEQ ID NO: 84464 - DNA, 640 bp, Heterodera glycines
atgcctatcgatgaaggaaatgatgatcaaactaaacctgctgtagacgttgaaaaatcagttggacgcaagcgaaagaagaactttgaagatgcaattaattttgtaaataaaattaaggtgctcctaattaaagacagagaaaatgttaatccgccaattcaaattcttcacttaattaattgctccccaaatttatgaatcatagcattttatttttattttacaacatttctaataggctgtcagccggtccaggtccccgatgttttaagtggctctaattcctatatccagaaatagtttagtctagaaatctgagagactcggctataaaaattttcgtaaaagccgaaaatttcttgaattttcgatttttatttagaaatctcataaatattatatttattttgttcataaatgatccatcattattttattttaaaccaatttcagcaacgattcattgaccatgaagatgtgttcaaaaattttctgaacgtttggaacaattatcgacgaggcaatttaaaaaacaaaaacccaaatgaagttttttggcaagttgccacactttttcatggccacgatgacctggtcaaagaatttgaagactttttgcccgagcaaacaattcgac

SEQ ID NO: 84465 - DNA, 520 bp, Heterodera glycines
atgccaattttgtaggtttaagccgaatataagaaagtaatataaattagcgtctaaaattaattttttaacgataaattattggaccatgtgtccttttttcaagaacctataaactttttgtactttgatttctaaaaaatgccttaagtatccaatgaaatcctagaaaaaagatatattctacaattttaattaacaatttaaaatgaatagattttaatggccattatatcattttatctctatttcaatgtcatctgtccaactttctctgacatttaaattgggcgtcattttaagcgttcaatttacgtcgaattgtttgctcgggcaaaaagtcttcaaattctttgaccaggtcatcgtggccatgaaaaagtgtggcaacttgccaaaaaacttcatttgggtttttgttttttaaattgcctcgtcgataattgttccaaacgttcagaaaatttttgaacacatcttcatggtcaatgaatcgttgctgaaattggtttaaaataaa

SEQ ID NO: 84466 - DNA, 1354 bp, Heterodera glycines
atgtccgtgttcttcttgaccattgaccgaatttgtatcatacgctttggacacaattatggctatcagatcaagcgagtgttgaagctgtcctttcttagcgctttgtcggttggcattctgttcaacttcatcggaatgctctcggcaatgccagtgccaaccaagacgggtgggtcaggatgggtatttaagcattcgggttgcggtatcggccccaattttcgcgattcttcacattgttagatatcccatggcatttgaacggtgccattcccgaacctcccgcgtcttttcttccaatttaaaaaacaaaaattaattattaaacaaaatagtttagatttgttttttttaataccctaatattcgttttttaatttagaatgtgaaattttcggctgcattcttggcactgccgtccaattgtaccttggatggcgcgccttttgtgccattttgaacacaatcagtggcatttggttttttgtggttttttatcggtccaatcgtaaaatggcgtcaacagcaaaaatgttaaacaatgctggacaattgcaaattcgtcgtgccaatcgcgcggtatttacataataaagtgatttcttgaaaaactaaaatattattagaatttctttagaataatttgctgacatccgttgcaattgtcagtgaattgttcctctcatttttgccgcattttcttccatttatttgggaaagagtaagtagagaaatatatttgtcataaattattttaaaaatacatattttcattttaataaatgaattaatcgtgttttattttaacaatttatattaaatacatattaaataactgtaaatgatatttcgttaatttagtttgaattttcaatttataaaatataattgctttatttttataatatgatttataactattttttaaattgttttaaataaaatatttatttttttcattttttttaaatgatttttcgcagatttttggtgccggctcatcgcttggcactggccctttgtccgagttgatgagctcgatcgaagcattgctgttctcctctatatattcgcacatgttttcggcacgggacgccacttcaatgcatggcacgggaggaacattacaacagcaacaacagccataccatatggaaatgaattacagtaggcagaatatggaacgaagacggtctgaccgtgtggtaccaatggcaccgggacaacatcagccggtacaaatcctggtccgccaagttacgcccgtcgagaatataaacaacaggcctgggacctcgatggcacgctactgagaagaagcgagaaattttaagatgaatcacgatttcaa

SEQ ID NO: 84467 - DNA, 327 bp, Heterodera glycines
atgaagccgaagcaattcctcaaaagcagcatttacccacatttgaacgattttaggtagggcagagattcttcagttaattataaataattaaattttagaaaattggccgacaatttggacccgacgcacaaattcagaaataaatttataaatgaaaacattttcgaatctgaacaaattgacgattaaaaatgacaacattttcagtttgttattctattaaagttaaagaataacaacatttaaaaaaatatttgtctaaacaaaatctaatattctttttgtccattttattcatttttcttgataattttttataattaa

SEQ ID NO: 84468 - DNA, 483 bp, Heterodera glycines
atgccgccgagacggaggagggcgaatacgacgtgaagaatctgatgaacaaattcctcaacatcgacctgacgccgaaggagcgggccagcaaattggacgagttggaggcgttgcgggtggaggccaagaacctgacgaagaaggtcacaaccgaaccgccgagggggggggggctcgaaaaaaaaactttttttgaaaattttgcccgttttacagttcgagcaggccaacctggactcagtggaggtgagcgaggacaagcggcgtcagctggaggcggagttcgagcagttgaagggtgcgctggcgaggggggcagggggcaaacctaaaaaaaaaattttccggaaaatttacaaatttccagaggacaggcatcgggcgcgccaggagtacgagcaggagatggccacggcggcagcgcaaggtggcgaaaaggaggaaattcaggtgtggccaattcaaaatgacccatcctaa

SEQ ID NO: 84469 - DNA, 1110 bp, Heterodera glycines
gggacagaggaggacgaggaggccatggagcagctggtgctgaacgcgcagaatttgatgcagtcggtcaaggacactgtacgggcagcggaggccgcgtccatcaaaattcggacgaacagtgggacaaaaattaattaaaaaattaaaattaaacatcatgaaaaaaaagagaccggaccggccaactcgggttggagtcatctcgagtcgggaaaccgaccgaatccaagataaatcccgaagcttttgaaaaacgaccgtgacggatcccgagaaggggataccgaccgaatcccgaagattttgggaaaacgattgggccgggcggactccgaggtcgggccggagcaggacaaaacgtcacgtcgccgccgaaacgtcgccgggacaaaacgtcgccgccaaaaaaaaaattataaaaatttttcaaaatttcaagaaaattaaaattttaagcttttttgaaaatctaagtcttaataaaaactaattttccgaatttccaaaaaaaacgaaaaaaaaaagtttttgtttccttgtatttccttaatatttttttttctaattttttctagaatttttttcgtattaggctagccaactaaaattttttataattttcttgattttttttatagaatttaaaaaaaaatttgcgacgacgttatgtcccggcaacgtttcggggccggcgacgttttgtggtgtaccgaggtcgggttcctgaatttaatcccgtgggttttccgcgaaaatcccgcggtatcccgaccccgcccttgtctctattaaggtatcgggaatttttcatttttgccatttaaaaaccagattttcattagttttgaatttaatatcagggcattttgaaaggcttggaatattattagaatcaaaggctattttttaaatttctgtgttcaaaaaaaaatttttttttaattcgtattaattagttaaattaaatcggaatttattttaatttatttaatttacagtatttttttcattgaaattctaagtttttttctcaaatttaaattttcaaaattgatttaaggtggcctccgtctgcgatggattcgcaagccgatgtggtccaactac

SEQ ID NO: 84470 - DNA, 435 bp, Heterodera glycines
atgggtgtgacaaaaaataggcatttttggctctttaaaaatattttaaggggtataaaaagaaccaaatttagtgcggtgtaatggtcataatcgtttcttattaaacaaaactttaaaaaattcaattgttattgataaatattccttgcacaaatatttctttgatcatttttgtcgccaattttttgacgaattattttttggccaaaattttgaatttaaaaaaatgtagccgattttaccattaatgaaaaaaaaatgtttcggttaataggccttgccaacgttaaaggatttttccttttttttttttgcaatcatttcaataacactgacaaaaagcaattgctgctcgcatcggtttgtgattgtttggacgacgaaacgacgcgcgagattattaaggaaatgtttattaaaaagtaaaataaa

SEQ ID NO: 84471 - DNA, 514 bp, Heterodera glycines
atggggataaatcctcagatctgcgagccctgttttaatgtaggtaaataaattcagttttattcagatcacagaattggtaaatttaaatggcaacgcaaagtaactttggaaaatttcaacagcgttcaagtcgacaatccagtaaattagtgttaggagtttgtttagtttagggaattaatgtattaaaggtcggatcatttctcaacaacccacgaaatgctttgatgaagcggctaaacgacggcgcattcagcaacaattggagtcacttgagaaagtccgtttattggcggaaaatgatgcatttcacgtttttcaggataatttccaagaggatccccacgcgaatatcacatggcacaaagcggcaccaaaatttgacgatgaaatggtttttggagacaaagaaaagaaaaggcgaaaacggaaaatcgcgtcaccctcaaaagtcagcggagcggagcaagcaagtgaatggaagtcgggggaagagaaaggaatcatttga

SEQ ID NO: 84472 - DNA, 648 bp, Heterodera glycines
acgatgaagactacgacccatccgcgcaaatggcggacaaaatcgccagcctcggcttggacgacgtcattcggcaacagcaaccgaaaggggaaaaagtgccgacgcaagcgacgaataacagccgaaaagagggcacagcgaaagagggggcgacggaactgagcgaaagggaaaagagagaggcgcaaatgagggcggacggaacggcggcgatggatttgttcggtttggaattcgaaacaatccgaaaaaggggaaaagccaagccaaaggaaagggaaatagaaaatactcgaaataaagttgcaaaactcaataaatatcgaactcacattttctggccttatttacaacaatataaacggtatttagagtggtaacaaatgggaaacaccaaagaaacagtttaaattctgggaaattgaatggatttcacttttaaattctgggaaattgaatggatttcactttccctctttttaggcttggccgtcgagcgcaaggagcccacctttgacgaccttcgcacgaaggacgactttcaggcatttgcggataaattgggcgaacaaatcggggcgaggaatgaccacgcgaattactcactgtttgtcagtgctttggttgaccatatgacaaagccaa

SEQ ID NO: 84473 - DNA, 1910 bp, Heterodera glycines
ttggtcgctgccgcgttggattcgctgcgcgaaatttatttcaagcggaacatttcggcggaacagcagcgcgacgcggcactgctctcgctggtggcccatcccaagcaaatgctttacgcggcacagaccggcacaatcgcatgcgaatacctttcactggacaccatggaccagtggatcatttgttggtggttactatttatatacaaacacatttttgtggggacagagtgcaaaaaaagcaacaattttaacgaatccgagctcagcttttttcaaaaccattgatttggtctacgatttttcattgggaacttgactttttctataattttcagaaaaatttgttggcggtaaacccaatattctgcttgaatgtagttgttcatgaatgcttttttagaatgagcttttaaataaatgagtggagaagtcaaaaaagctatttttgagttgtgaaagaacaaaaaatttggaaaattttgaaaatggccacattattcaacttaaatgccggaatttttatgactcaattgacgaaaaagagtgaaccatgaaaaaacatcaatcttttttcataaccaattgataaaagccaagtttcaaggttttgttttgaactgctttagcactattccaacaaatttgcatatttatttaaatgttttttatccaaccaaatgtctatttttaatataaatttggatgaaatgccgtggcatttgtcagcatatcacccaccacatattccacgatttatttatagtcggtctgacggtgtgccatcggttgctggtggacccggcacattcggccaaccttggcccgctgtaccaacgggcagttcagcactgtttggtggttcatttgttccgtgacgagtgcattgttgtccaaccgttggtgcacaccgtgttggagcacatcaagcagcagcagcaacacaaccaccaatcgcaacagcagcaccaacaacagtacggcatggtcaagcagttggtgggcgagctgaaagatggtcagtcagtgtttcattgtttgaattattgtgaattattgcgcgcaggacacaatgttgttcttaatgccaaaaaattttttttttaattcaaaaaattttattatgtattattagttttttgagaattttttttttgataaattttcgaatttttttacgatggtgcttgatcgaattagatttttaaagacctaattgaaacgcggttccggcatggtttttctgtggactcagtaccgtttttgtgggaaaatgccgagaaaattgtaaaataatacacattttgcctgctgtccctgatttcttcccatttcctaagaaaaccagaagacttcccaagaaaaagggcctataaatttttttttcaagagatatttctttttttttaaatgcattttttagaagaagactttgtaaaacccgaaatagtggtaaattcgcagtttttaaagatttcatttgtttttaaattttttttatttatgcttattttagcgatcaaaaaattcttagaaaacccatatttttcaaatcttagattttggtaattgttttgtgagataaatgaagttcaccaaaaaacatgccatccctactccccccccccccctccaggtgtgcacacgctgcacgcggctggccacctgcatgcccatcgacggcactttttgcggatggcactgcgcgagctgtgcctgctgattggcgaccagcccgggctgcttgggcccaagtgtctattcgtttggatgggcttggcctacgcccgggacgaggtgctgtggctgttgcggcacagcgaactgtggcctcagctgatgcaagccgcattctccagcaaaaaggcgatggccaggagcgggttggccaccattgtggtggacaa

SEQ ID NO: 84474 - DNA, 647 bp, Heterodera glycines
atgccattggacggagcaatcggacagcatttgaacagttacgggtaccgaagcgatggctcatttggctgcaatggtatcagtcggccgtataaaatgggatttggcaccatgccaatgccattcaacgcggcgattggacaacagagggaccgccgctacgttgggagtgccaattggccatttccattggaatttgtgcccgtgccaatgccatcggacggcgcattggcattccaatcgccagcattttccaccggagatgtggtcggatgcggcgtttgtttggccactcgacagatctttttgacgaagaatgtccgacgaaccggtgggccaaacacaaaacaaaaaagcaaataatttaaattacaatttgtcagatgactcctcttttttcactacaactcccatcaattctctgtttccatgcgtttctctgtggactggcgacaaaattgaggcgaactttgggccaagtttcaaattcaatttggccactctttgaagaaagccgaagaaacaacggaaagggcgattactcatttaattaattaattaattcattatccattcatttttcactttatttttttcacatttattttcagttttttatattatttatcatgcgtatttgttaacaa

SEQ ID NO: 84475 - DNA, 1264 bp, Heterodera glycines
ctgtacaacgaggaactcattgatcttttgtcaccggaccgggactcatcctccatcaagatcatggagaacccgacaagccacgaaattttgctgatgggtgcatcatcgcgaagtgtcaattcgcaggaggacattctgtccgcgctggccattggtgcccaaaatcgaacaactgcagcgacaaatatgaacaaacagtcatcacgctcacatgccattttcaccttgaacatcaagcagactcgagtggtgccggttgatgtacgggatttttttggcggaggggcaaaatgataaagaaacattggttcacgaaattttttaatttgagaaaaattcttagggggtaatccgaggcggtgaacacgcgccttgccttcttgtggctcaatatcggcgcctcgcattcggatttgaatatttttcgagctatagggtgccaatcatttttcgggaccaatgttttttactattaacatttgggcgggtggtggtgtgacattttattatacttacaattagtgttgcataatttaggacgattcggacgaaaaggagaacaacacagcggatgaaggtggtgatgatgaggaggaaagttctgagaagatgggcacaggaggaactgaattggaaacattgcatgccaagttccattttattgatttggctggctctgagcgcctgagcagaacgggcgccaccggtgaccgagtaaaggagagcatcagcatcaattccggactggtaagcgaatgtggggggggggggaaagtctgggtatattcaaatccagagctgcataattctgtttacaattaggctatttgatatggtgaatttgaatgcccccctctataaatgtactcatattacagtatttttcaagataatgtaaaaacacaaaaaaataagcattaacatcataaatttcggcaatttttgccaaaaatagaaatttgtttatgcgcagcaattcaatattttttacacttcacagcttgcacttggcaatgtcatttctgcgctgggcggtgcaaaaggtcgaattggtactgtccacgtgccgtaccgcgactcgaaactcactcgtctccttcaggactcacttggcggtaacaggtcggcaattttgaaattttcttgttaaaattttgtttttttcagtcgaaccctaatgattacatgtgtcaacccgaatcagattgatgccattgaaacacttggttctttgaattatgccaaccgaatcaaaaataag

SEQ ID NO: 84476 - DNA, 262 bp, Heterodera glycines
  unsure (1)..(262): unsure at all n locations
atgccaattcgtggataccaattcctacacactggtgagaattcggcttagtctttgtgaaattgcagaagtaaaaacaatatttgcagaattaaatggtaattctctttcgaaggtgattttgcctgaagagaatgagaagtctcccgcccgtttgatccttcttgacatgctccgaaacacctgtcctaaaggcaacatcacaacgcttcagcgtcgatatttcaacgactcattgngaaatcgattggtgacccaatan

SEQ ID NO: 84477 - DNA, 774 bp, Heterodera glycines
atggccatcatatgcattcagagcatcggcggtacgatcacaggttaatgaattgttaaattaacatagactaaatattattaattatttttaattaatagaagaaaagctattaattaatggttaaattaagaatatactaaaatattattaattctgtttaaattaatagaagaaaagctattaattaattgttaaattaataaatagattaaaattatgtttagaaagcattgaattattaaattatttttagcgaaaggcaccttgactaagaaattacaaatagatgtgccatttatagaagtaattagagtatgaaattccgcgcaaaatgcgcgaaaagcagaaacatttaagcgaagcgacacaaagcgaaagaaaaagcagtgggagaagcaaagagaaacaacaaacagaaaaaaacgccgcacttccgccgactaattagttttaatttccgtccgttaattagacaaatagtgtcgtgtcacttcagtaaaaagtgttttattgtttttattttcattatttataaagtggcagtttctttcacatatgaatttattatatgaagggcttccttttttaggcaaatgcctaaaatttttgcgcacttaatacgcaaagataagcacgaaaacccgttttgcgctgggtttggggtgtctacgatgacttttataatgccaatttttgcctatttcagggttttagtgccttatgtgcctattttaggatttttgaaaaagtcattaacaaaaatgcaataaa

SEQ ID NO: 84478 - DNA, 604 bp, Heterodera glycines
aaattaaccgaacaatttggtaaaattctatgcgaaatttgccgaggtaattagtggaaatactaattgattaattagttatttaatttttcattccaccacttttagaactcgtaaatgatgttgagctgctccgccgtcttcaagcagaacactttgacgtcatacttgccgaactttatgatccgtgccccatggcacttttccatcggattggcgccaaaacgaaacttggcactttagcgttgccgttgtaccaaatgactgtccgtccatttggtataccaacgctgagcagttacgtgacaagtgagtgaatgtgccaaaggggagggaatttaattaataaatttaatcaatttggttaattataatttagaataaaatacttttatttaaaaatattacataaaaaagtacaaaaaaaaattgttaaaaagatgtgatcacaccaatgaatggaggtcacaaaatgaattttgtggaacgatttgtgaattttgtcaacgatttgtgcgattggttgtttttgtcggatttggtggtttcatatgaggtcagcacaaaaataaaaataaaaatgtcaatttatatttaatttaaa

SEQ ID NO: 84479 - DNA, 522 bp, Heterodera glycines
aggtccatttggcaaattttggcgctattgagaacgcccatttgagtattttaatacagaatttaatcgatgtgatcaggtcgagaaatgcacgacaattagtgaaagagtttggcgacaaatatttagaggaagtgatgaaggcaagttaaattgttccataaatgggcgagggcaggagcagtttaagcagcaaattattcgtttggcaatacagtggccgaaattgtcaatttcgtttttaagtttctcgacgaagcaatggcagcgtcaaatgagtctctcccgcttgccaaaattgtgcctgttttatgcgacgcctttgccaaaattggcaccgtttctttcggctccattttccattctttgctcagctcaacggaattgcacagattcactctttttgtatcggaatgcagcaaacgcgatgatttgttcgatgcaaatttaaaatgaatgatcaaaaattggtcatttttgaactgtccaatttataaaacaagtataactttttatgtgcaa

SEQ ID NO: 84480 - DNA, 1334 bp, Heterodera glycines
aggaatttgatgcgagaaaaaaagcgattgttaaaatttgctgaatatttgggacattgttcacgagaagtgagcctttctcttatttcgcatttcattctttcgccataggcgacagattacggaaagtgtgtggcaacgaacgcggagagaattcggaaaggcgactgttcgactgagttcgaccgactcatcgcctgtttaaagaagaggcgtaagttgggacaacatatttctgttgtttcgggttctagtagtttgctttatcatcagtttgtcctttcctttcggcattttgtccctttcattttgtctttgtcggcattttgtcctttcctttcggcatttcgtccctttctttttttctttgccttttgcgcccattccatcctttgactgttttctctttttagaagtgcgtctgtaaatcgctgctccgatgaaagtcaaacggcttaagcgtgccgctcacattttgactttttaccgttacaatttccattttcttcccccattttccgtccttctcgacggaactttttgccaagcggcgcttcagtcgaaaataaatcttcgagaacaaatgctaaaatatttggcgcaatccgtggaaatggtcgtcacgaaatgcgttttgaatgagctgcatcagttgggaaaaccactccacggcgccttggtcatctgcgaacaatttcgaattgccttttgcccccacaaaccgatgaggacggcgtcggaatgcatcgctcatttggcgagacggtcacgagaagaaggaaactcaaaacacattgtggggacgcaggtgggcgagcagtgacacagcaaaaaggggtagagaaactaataggccacgaaaagtcggactttggacccgaattcgaacagaataataaaactcattaatctaggaaaattggcaattttactgattgtgaataacaaaagtttaggatgaccaactgatggagaaattacgaaaagttggcggggtgccaatcatgtcaattcgcttcaatacaattttgctggaaaaggtaaaaaaatagtgaaaacgattgaattttcgcaaattgtttagccttcagaggaaagtaaaaaaatggcagaggaaaaaccatcgaaggaattggaaagagtcaaagaattaaaggacgaagcatttgcatccggagaaaaaagaaggaaacgcaaggccaaagggccaaatccactctcatgcaaaaagaaaaagaaaagcggcgaggggaaaaaagacggaaacgcggggaaagtgcccggggcatttggacaggaagagagcgaacggaaagggaaaagcgacgaagtga

SEQ ID NO: 84481 - DNA, 1288 bp, Heterodera glycines
atgcttggcccaattttgatggctattcgattcccactaatggcacaggatgaatttgtgaaaagcattggtgagtgtgtgtaagggtgttccggagactcaaaaaattaatgaaattttgcccaaaaacgctccgactaacggaatccgatcctactcttgttactgtagtcaatttatccataataattatttacactgctttgtgagtagtaccacgacttgattgatgcttctccatagcgcgaattgaatttattaaattcacaagacacagtattttcttgttttgactactgtttttgggtacagtaagactattcgtttattgattttgcctataattttgacagttccgtccaaagtgttgactgtcgaagaaatgttccccgttttactgtcccatgcgacgacttatactgaaaatctatgaattttctaaaattcttaaaatccgttcaattcacagcaatatcgtaaagataaagggattttcgtggaatttgagacggcaattccggaagaaaaacaagacggaattcaccagttgagtttctcccttcaattaaattggaatttatgtggtaagcaattaaaaattgaaagaaaaaattttgatttccaataatttttaaaattcgcagaacccaaaatattaaaatttttgattaaacataactgttgttcgattttttaaagtttcacaaaatctcgatcatcacaaaatttgacccccgtccaaatttcatcctttttttttgtccttcgcacagaatttgaatcgatctgttactgcttggcgacattgcgaattgtttcacaaaagcaagataaagcggaccacattcagacccaacgccatttgttccaaaaaaatccatcgatttgtcacgaaagtacacttttatgcaaaatgccatttcagggtaacataaattgtaaatttagataagaaaaattaatttatgatttgatgagttccgagaatgggtggcacgacgaggagaaggacattctgacggttactgtggatgtcattgtggaaaatggtgggggagaggggggggggggggttaaaaagggtggaatcggacagactcggcacgggtgctggactttcctcaattggcattttgtgcattaccatttgttgcgattctgacaatgcaaaatttaaaaattcatccccaacttaaaatatttgatgctatttttagcagaaactcagccatcagtggacaacaaattggacaaactcaaaaacagcagaagtgaaacgcagctttga

SEQ ID NO: 84482 - DNA, 455 bp, Heterodera glycines
atggtgattaaaagtgctacaacagtgattagaagaggtacaacagtgattagaagaggtgcaacagtgattagaagaggtacaacagtgattagaagaggtacaacagtgatcagaagagttacaacagtgattagaagaggtaaaacagtgactaaaagaggtaaacagtgattagaagaggtacaacagtgattagaagaggtacaacagtgatcagaagaggtacaactgtgattaaaagaggtacaactgtgattaggagaggtacaatggtgattaaaagtgctacaacagtgatcagaagaggtacaacggtgattagaagaggtacatcagtgattagaagaggtacaactatgattagaagaggtacaacagtgattagaagaggtacaacataaattcaaattaaaaattgtatgaattataaatttattaaatttaaaaataaa

SEQ ID NO: 84483 - DNA, 936 bp, Heterodera glycines
ttacatcgatcactccgtcatcgcttttcttcgttcaaatcaccaaattttttgacaaaagaggcaccaatttagatttgtggattccatcatcacgagacatggatggccagcagctggtttgggatatttttgttcgtgaaatttggcccattttttctgaaaacattcgccacttgggcttttacgatggttatcatttggacaatttgcgtcgtctcatttcgccaacaattctcaccgatctcaaccaattgacttcaatctattcctgtggtttgtttcccgctgcgtttggtgatgattttgatgtgccaaattcaacaatttctgctggccaagcattgtccaaatggttgcactctccgagaaaagatggacaacccaagcgattgcgttgcataggttacaacaaacaaacgaacttcgattggatcaacaatttcaaggaggtgtggcccaacatttttgtgatttttgtttccaaattgtttagcaatttctccgtgccaatgccatttcttccgtcagttacgaaattcatttttatgtgcaattgtcgtcaatgccaatggtgccattcgaattggtgaacgaatggacaaaggaaaagctgacattggccaaaacaaagggatgggacaaccgatggataatgaaacgatgcaaaattattggggagaccgcggcggttcagcagcagaagaatgatgaaaattgggataacaatttgaacagtgtcttcgtttggctttttcgtaccactaattgcatcgggtgagcaattaaaaaaggcattttattttgtttaaataattaaaattttgcttaatttagcccattgtctccgccaccagcagaagaagccggacaaaacatcacaaaagggccgtcatctgaactgacaatgagtgatggacaaaacgaagaaaaaca

SEQ ID NO: 84484 - DNA, 555 bp, Heterodera glycines
ggccgggtccttaaatctttaccaaataaaaataatacttcaccggatggtataaatttcaggttaataaattcttttgcgccttatgttaccgaacttttcagaatctcatttgataccggaaaattaccgaccttttggaaaaaatctataataattcctctctttaaaaaaggggataaaagttgtcccaccaactatagaccaattgccctcacatgttcactgtgtaaaatttttgaaaaatttgttgtcagggcaattactagtttccttttaaaacatgacctaatctccctacaccaatttgggtttgttaaaggtcgttctactgttacccaacttattttaactcttgaaaattggtttgacggtatttacaatggaaaaaatattgactgtgtttatattgattttcgtaaaagcttttgatgttattccccatagcttactttatataaggttcataaaattgggtttaaaggtaaaacccttaattggatttctgattttttggccatccgctcctttttaattcgtgttgaaaattcgttt

SEQ ID NO: 84485 - DNA, 156 bp, Heterodera glycines
gtcgtaaaacgtattcgcgagaagtttacaagcctacagaatgaccaacagttcatgttgaagcgacagcgacacactgatcttcatgcaaaattgaacgccatcaaaaaggcactggaggagtggaacaaaagggaggaaaacgatctctattag

SEQ ID NO: 84486 - DNA, 64 bp, Heterodera glycines; identical to SEQ ID NO: 76326

SEQ ID NO: 84487 - DNA, 171 bp, Heterodera glycines
atgccaaaaaattgtgccgaatttgattttgttttcctttgcctaataaaggtgtcctcggtggacggcaaggaggacaatgctacagtgaatgtgtgcagtgacggaactgttactgctgctgctgatcatgacggtgcagcattggggcaaaaacagtcggacattcag

SEQ ID NO: 84488 - DNA, 99 bp, Heterodera glycines
ggagtaggacaaaacgtcgtcagccgaaacgtcgtcgaacgaatttttcgaccataacttttttctttctcagctcaattaaacattcttggtattatt

SEQ ID NO: 84489 - DNA, 116 bp, Heterodera glycines
atgccacaatttgcattctttgttcacttccgacgattgaacggttttggcttcgcagttcagaagacaaaaattgaattgaattgttcagagtcgatgaaaacgttctatttttg

SEQ ID NO: 84490 - DNA, 1232 bp, Heterodera glycines
atgccccaaaattgccaatgtttgtcgtctgcacatccgccaatggggggaggcggtggcagcgatcaacagcagcacaaagacggacagcggaagattaacggaatgacacagcgatgcgcggtgaaaagcgtgggaagggtttgtgttctgcgggggaggaataaaatgccaacatttgtgccaaaagtgaaggacgacgtggcacacttcggctatcccatggaattcacgctgaattacgacggcccaccggcaaacatttccgaagaagcggagacaaagcccaacaatgtttggccaagaatgaccttcacggtgacagcggaagacagctggggaaggattttcgtggaaggtgttggcatagtgccaatttttgggtatttatcagcgcgaaaacagtgccaaaaaccgtccgataaacggcaagcggacaaaatcccgactaagcaaaatctcaacttaattaattgatttaaaaaactctcgacttccaaacctcggcttactgccttttttcacatgatttgtgttttgtccattttttgtgtgttgtcctttgtcaactcatatacagacattccaccatttgaaaatgcctttgccatttgtccctcaaaagggtttgccgtctttcctctgcccatttcatttggcccttcgcccgttcacttttggctcaattgcgtccgcccaatttcgcctctgtccaaagtgtggacacttcgccaaactcacattggccaagcggaggaattggcacagctcagaacaatgggcgaacaaatggtaaaaattgttctttattcgtaatttaatttaaaaaacaaaacaatcaaatcgcagttttgtcaagagggaatggccacggaattgggcggaaaattggaactcacagtgcgaactgtgcaccaaagccgacaatacatctccagtgacattttacaatcgcttaaatacaacgcaatgatgcgacggattgggtgggaattggcggggaaagatgaaaggataattaatcacactaattaacttaattaattaatttcccaatcaaaaagcgaagcaaacggaaaagcaatttccaggatcagtgagcaattgcagtgtcgcattgccaaagtgttggaggagttcgatcgggtgaagcgacagctgatcaaagtgcggaagggtcgaagcattgccaacgcataaaaaaggaaatttattttaaattttgctattaa

SEQ ID NO: 84491 - DNA, 478 bp, Heterodera glycines
atggtcaatctcgaggtggcacaaatcaacgtcctttctaaagtggatttgctaacggacaacgcgccttttcgtctggaatatttcgaggagctgcccaatttaacgcatctgaccgactgtcttaatgtatctttgaatttaaagtttaatgcatatctttttatttgtttttcaggatcatcctgccttaattcgttacaaaaaattgaatcagtccctctgcgaaatgatcgaaagttatgggatggtcaattttgtatcgctggacgtccaaaacaaagaccggatgggctttttgttgagattagcggacaatgcaaatgggtttaatctcgcaaatgttgaagatttccggaaagttgtaatgaatgattttagttgaaattgtttgctcttaaagataaaattatttttaactcaataattatgagatatttttgggaaacactttgtcagttggttgttttgctcggaa

SEQ ID NO: 84492 - DNA, 1064 bp, Heterodera glycines
atgcttttcggactttttctcattcataatatgcaattaacctcagaaaaaggggaaggaaagcggaaaagagaaggggaagagagtgatgaaggtcagtggagagacgaggcaaagaaacgtgagaaagtccgtgaaaagattggggaaaatgagcaatttaaggccgaaggtgagcatacggtggaaagggtacggtgggacggaaagggtacggtaaaaaaagtgcaaaagaaacaaaaggggaaaccaagtgtatatgtacattcattgagctgaataaccaagaaacattggacattgtcaaccgtttgctcctctttagactgccctctttttgctttgccatttgccaattgccttttcatccaccgacattgacaacggcgttttgggtaattgctgaaattctgtccttttttggtctgttcacttattttgtgaaattctttttgtaaaggaactcccgaagttatttgtggtcgagattttgtccattttaaagtcgtcacaaaaaaggtaaaacaaaaggaaaacaattgaaatgaaagcaattaagcctttcggaggccgtgtttatgtcaaaggcgaattcggcaatccgaagtgcgtggagagtgcggggacgacgagggatggcacggaaagggagggagaagtcggcatcggacgggagggagtcgggaggaaaaacgcgccgaagacggaatttggtgggaagcggaggaatgcttaatgggccaagaataatcactccgttaaatccttcagatgctccggccaaaagagaaggtctgaaagagaagaacgaatactttggacaatccgagcataatccatggcgaccaatcggaacagtgccggaaggggaggaggaggagggggaagaagccgcgggcgaagggacggcacgcggaggagcgaacgcggcggaggaggcggcggacgaagagacactgcgacagctgctgctggtccgagccaaacaatggcaaacaaagtgccggaaggaatttaggagctgcagaagcgccacaaccacaacaccaacggctcccaactga

SEQ ID NO: 84493 - DNA, 396 bp, Heterodera glycines
atgaacaatttggcacttatgtatagtaattgtagagggtgggggggggggggggggtgttgaaccctgcccaatcattgactttgtcaatatttcagtctgctgatcgcgcacatcagcgcattgaactgcgctgttctgcgacagcatcgcgccgttaaatcgggcggttctaaacctgaaccgtacaagcaaatgccaggtaaataaaatttatattaaaaaatatataaaactgagaaccaagaaccggaaatggatggtggaccaaaagaaaagaagcatgaacaaacggatgtagcggccaaaagaatgaaacgcggggcaaaaggaggcggctcatcaatcggaaaagccctcgtaaaaaaggagcagagattgtggggtctgggttaa

SEQ ID NO: 84494 - DNA, 210 bp, Heterodera glycines
atggtccgctttaacaatgaacgtgacatcggcccttacacaacgacaaacaatggccaccaacagcaacaacaacaacaatgaagcaattacaaatggactttttaagaatttaatgcacagcgaatgctcgatattaataaaataaagttacaaagagatattttaataaatattaacccattttaaacaaatacatattaatgtggt

SEQ ID NO: 84495 - DNA, 368 bp, Heterodera glycines
aaaatagagccctcagcaggagtcgtctaattcagtaaatacggtatgtattgcaaataaaaacataaataggtaatttagaattgcaaaaaaaatttatttcctcggttaaacaaacatttttcactcataaaacaattttttaatccgtttttttctttttggcatataaaagaatttgcaaaaaaatcattccgttaagcagcgaagagagcacaaacggcgcaatgatcagccaatcgccggcagtctcctggacggaagtgaacacacgcgcaacacaaccgccgaattgcatggagacggagatctatatgttatgttctcaataaattgacataaattggaaagaaaagaattttcttcaa

SEQ ID NO: 84496 - DNA, 1255 bp, Heterodera glycines
gatttcgttttacacaccactcaggaaatcgctggagatgcacaaatcgcagttgctcagcatatataaacatcacaaacaacggcgaaaccggagctagtggaaccttgagtcaaaaagaacacaaccacctcccagcacctcagaaacaacaagtttgtataaatttaaaaccaaataattaatgctttgttaaaggcagagtcaaggcgacagaaaatcaaagaaagtgtcctggccgagccgtgtctgaagcccacacgacttttggctaaagtgaggcgatcagcaacggatgaagcctttgttgccatgagctccaacaatgcgttgactgaaatgatgcggcgtgagaagaaaaagttgctgggaaacgtcgacgtgcaggacccactggcctttgtcattccagcaacgttacgcgaaaaacgtggcgaagacatcgtcttgtatgacagtcgcaatgtcaggcaaggcgaaaaggacgttgtccttattttcggcagtgttaaggtacattttttggctataaaattctgtttgttattggcattcctttagactctggacattttgcgccaatgtggcacgtggcacctcgatggaactttcaaatgtgctccagcgatgtgggagcagtgcttcgtcattggtgcttcagtgcatcagaggatgtgcatcagcatgtggtgtctcctgcctggaaaacagcgacgctactacgaagaagcactgaattttgtccgtgaacgcacctcaccagaggtcccaggcaaaggttaactcttcgatttacggaaaaggaataaattgaaaaattttatttttagttctttgtgactttgaaaaagccgaaatggcggccgtccgcgcggttttccccacggcactgattaagtgctgcatgttccactacgggcaaagcctgtacaggaacttcaaacgacttggtctcgtgcatttgtacggcgagaagacagaatatggtgaggcagttcgcaacacattcaggtaaaaaattaaatttagatttaaatcataattttttccagaagggttctctctttgccgcttttgcctcccgacattatcagaagagctttctcaattatcgtggcgtcttctcctcctggaatgccagtgttcttcctttacttctctcgaacatacatcggcttgacacagcgccagttgttggatggtgttaacgcatttggagataatccactcaatttttcacccattggcaatcatt

SEQ ID NO: 84497 - DNA, 1334 bp, Heterodera glycines
  unsure (1)..(1334): unsure at all n locations
atggcaactgtttcacattcaatgccnacccgggacaaaaatgtgttgagtgaacgagccgggccaaattatggtaaaaatgcgtttcaattaaaaaacaaaatgaaaaatgccatttaagaaatttgaaatctttgcaaatatttaggcctccgtttccaagtttttgtcaatgtcagcgactatttgccctcgacagaagctgccggtgttcgcattactgtgcataagtcaatgcgtggcgtactgtactttttgatttcaattcttgtttttagtcctgaagaacagccctttccggacacacatggccataggaatgaatttgcttattttcaaaaaaattaaaaataaattatttttagtgctccaactggcttcgttagctcatttggcatccgtttgaagtgagtaataaaaaaacatttaattattttgaaaagaaaacattagcttaatgatttaaaaattaaataaaaatatataataattttgaagatgtgttaatcggttgccaagtccatacggcgaatgtgttgagcaaggcaaaactgatgaatatatttatcgggacaaggaatattccactgaggtaaaatcttgcaaaatcctgtaataatcaaaagttatccaaatgtgacaaatccataacctaaattagcgaatttaattattgaaaatccccttctgctgaaggggtgccaacgttcgtgcatccaacggatgctggtcagaaagtgcgggtaagaagaacagtcgggaaacagattataataaatgaaataataattaataaatattaattactaggaataaaatttataataataaattaataataataaggataattaatctgcaaatattctatttttggcaaatcaacagatgtggcgacccgcgttttcctcgctatttgaacttcagcaattgtcccgtgggcgacccgcggctgagttagtgttaatcttcaagaaattatttaaatgataacacaaaaatggaattcatacgcataaaaattctatattttttagaaaattgtaaatgagaattgcttgaaataatgaaaaatcagctgaaaaagattccgttttaaagaaacaattatcattttaggaccagcaataaagtttttttagcaaaaataattaattaattactaacaatgcatttaaattcaaatttgcaggagagtgtctccgtcgtgaaatgcacagcggctgcgcggtctgccactcagcccgactgcgtgtgcagacagccgtgtcggtgcgatcaaataaaacaattaattttgattgcatttaattagaaaattaatccataataaa

SEQ ID NO: 84498 - DNA, 1161 bp, Heterodera glycines
ggctccgatgccgtatttaatcggaattccaaaagaaacattccaaactcagaacaaggcggaattgggggatgttgttataatggacgtggatgagaagcttcttacttctccatatgatgacaaactgccgttagaagctttcaattttttgcggaatcgtttaaaattctccagcgatatttttatttctgattcactggcaagggcctttttgcagacgaacgcgttgatttttggcaactacgtatctggtcttgttgtgggtatgtctgatcagtttgagtttgatcattttcaattgcttttaatagacccgcatggttcttacagctgggacaggaaattgtttactgaaaaacaacgtcctagcctccggcaatttctgtcttccttgatcggaaaagatggggtgcaatatttcgaaagatttattgatgaaaaattgtcggaattgaatgagaataggacaaccattgacgaatttgaaagagaggctcaatcgatgggagttagaggccaattggacaagaacggtgctgttacggtaacttaaatattttatttgtgaaattatatcttttttcaaaacaagactacggatatgctgcaacaagcagtgtcttctgtaagtaattaaatatttgattttccatacgagaacctcttcaagacaaaacctttatttccctgataaaaaccaattcgtgggttcttatatagaagcaccagttcttatttattggaaaagtgtcaaataatctaataaaaaaagttttcttacttcataggtgaaaggaaatgcaactgatgtaattggtgctttgaaggatcaaatccattcgttatcagtgtgttgaaattttataagtgttaaacaaaaatctaaaaaagttcaggtcagaaacaaactgagcgtaagacgaaaagaggatgccatttcttcagtcaaaaagagaaggctgagttcgtctgttgcccgttctcggtcgaagtacaaacagaaattggaccctctgacgattgacacctcacaatttaacctggataaattttctccctcttccaaaacgcgttctgtttctccaccatccatagaaagtgctcattctgtcggtgatctcattgatttatccgatcaaaataattcgacaattacaa

SEQ ID NO: 84499 - DNA, 516 bp, Heterodera glycines
gaagacccaattttggtcccccgacccaacctgcaccaaaaaaagcgcatgttgtgtatcttttggtcagtacatggtccactgtactgggaactgctggcacctggcactattttggacagtaatagatacataaaccaactgcgggcggtggatatcgcttaccgcatccggcgccagcagggccaatttgacggtcccctactctttcaccatgacaatgctccgccacaccgttctcatttgacaacccagtacatttcccagacattgaattggaatgagttgccccacccgccttatagccctgacctagccccctcggattaccacctttttctttctctcaaaaactttttacggggtaggcgcttcactgaagacgccgaggtcgaggaggcggtggggcagtacctgacctcaaagatcggcacagattttttccgtcgcggcattaggaaacttccttctcgttggagaaaggttgttagggtccagggaaactattttgttgag

SEQ ID NO: 84500 - DNA, 2855 bp, Heterodera glycines
  unsure (1)..(2855): unsure at all n locations
atggcacgaccaccgccagcagcattatcaggcagaaaagcggtgccaatttcgtttgtgttcggctccagcacaccccgcgagatctcccaccatgtcaacgaatgtgccaagaaggggctgaaggccaagttggaccagggcggtggggacacggcgaagcgccggggtgacatcatctactacatgaggcaggcaaagtccactgacgcgaaaggtccagcagagcaggcaaatttcaaatggagtggagtcatttttgtgctccgtaaatacgggtacatccctaaatctcgccactcgaaagctcgccgagacaaaatctggctgacttgaatatttttttttataaaattgaaaatcccggactgctaatttgaaattacatggtttttggagctccgtaattacggattacggcttccgtgtcgaaaaatagctgtaattacggcttcgcgtaattggaaaatccagttacgtacagccctggataggacaaccatttttggcactgtgtgccaatggtcgagagcagaaaattattggcattgaccagggctcccagatcaaaattttcaaaagcctcatttggcaggcaaaaaagcctcatttttataaaaggtattctaaacacgcttaaaatgttcaaattttatatttttgattgcccatgatcaatttgagcaattttttgttcgaaataaacattttgtgaaattctaagcatgaaaaaccgaagttgatttttttgcggcgcttttttcaaaaaacttttggggaataatgggggccggcggtgcagataggcgccgccgggaaaaattttgtaattttcaatgcgatttgttaacagatttgtcgacaaatatggccaaaaacattatgccattttatcaaaattaatcaaaatttaaaaaatctgacgaattttccccaaaaatcttcaaaatttctcaaaaaaccacaaaaagcctcaaaatttctcaaaaaccacaaaaagcctcaaagcctcattttgaaaatttagcctcattgacctatcaaaaaaccacaaaatgaggctaaagcctcgcatctgggagccctggcattgaccaggccagaactaagaaccttccccaccgaatctctggcttagagaattggacaattttacatggacacgagagagggttgaaattggattttttggcataatgccattgggccgaaggtgcgaggttttaaattggaggattttaggtaagaatttcttggcacggtgccagggttcaagttccgccgatccgaattgccgatttaatattttttgccgtttgcctaaatatccatggggaccgaacggtgtggcacagattttctgctttgtccttccttacttggccctcaactagttttgccgggatttgagtcccgacaccgaaattcgagtcccagttttgtcggaatctcgatcctcccgttttccaatagaaaaaacggatcggcgtctcgggaaatcctaatgggatcccgatcccttcccgtttatagtctcgaattttcggaggtcaatctcggtccgagtcttgccgagtctcaaattttccatgcctaattttctgggcctcaatgcgcggctggccagcagcagcccttttccaaaacagtggtgccaagtcttagcattcagaggtgccaattctttcataaatccaccaattatatcgaatttttcgacaaaacatgggataactttgcttaaatgcaataaaattgtatattcttggtatcattcgatagccgagctttttcactattagcccgcaaaataaaaataaaaattggtcaactttagaaaaagttgtatgaaaataagtactatttctgccataacttatgttaaatttggtaacttttttgaaattttccaagctaatagagaaaaagctgggctatcgaatggtaccaagaattaaaatttgattgactttaagcaaagttatgccatgttttgtcgaaaaatttgctaaaattggcggatttatgaaacgatctggcacggcattcggagataaaagaaatattttaaaatgggataatgcatttttaagagcgatggatcactgctggcggcggcggtggtcgctccatttcgacagagtcacgaaatgaggaagatgaagctgcttccgagccggacattttgcaggacagaatgatcgacttcatgcggcacaaaaaggaaagcacaacaacaccaacaacagcaacaacgaaaatggaggacggcggcggcagcaggggaagggtactgtagcttgggatgggtttttgtaacaataatatactgtagctagttggcatacagtaagcggtggaaaatggatcggcgtctcgggaaatcctaatgggatcccgatcccttcccgtttatagtctcgaattttcggaggtcaatctcggtccgagtcttgccgagtctcaaattttccatgcctaattttctgggcctcaatgcgcggctggccagcagcagcccttttccaaaacagtggtgccaaatcttagcattcatcagaggtgccaggtcgtttcataaatccgccaattttaacgaatttttcgacaaatcatggcataactttgcttaaatgcaataaaattgtatattcttggtatcattcgatagccaagctttttctctatttgcctgcaaaattgcaaaaaatttggtcaactttagaaaaagttgtatgaaaataagtactatttctaccataactactgttaaatttggtaactttttttgcaattttgcaggctaatagagaaaaagcttnnctatcgaatggtaccaagaatgtaaaatcttg

SEQ ID NO: 84501 - DNA, 1596 bp, Heterodera glycines; identical to SEQ ID NO: 19762
  unsure (1)..(1596): unsure at all n locations

SEQ ID NO: 84502 - DNA, 1532 bp, Heterodera glycines
atggcgaagcgttgcacggaggcggtagacgtacaagcgcatttgtcgtcaatgtacatgcatgaggttgtgccagccgaggtcgacctcactcgcaactatgcgcgcctcggtggcaattatgtgcttaacacggaggcaccaaaagaagcgcatcgcatgctgaccatgcatttcagcaaactcgcgagcaccgaaaagcatcgcgtacgtgtaccgcacaagcaacgcatcggttttgcatcaatgcgcttgttggaaagcacgcaggagaatgtgtcgctgattctcaatctgcagcgtcaggcggatgctcggaatgcggagatgatgcaaatttgtgcacaaagaggaatgccaatgcacgcaaaaatgcgagaagctggtgatgaacagcagacggtcaattacgagctgaaggcaaagagagagttgggcttggacatgcatgccagggcaacagttgacattgcttcatttggcaacgacgctcgtttggatgccgatgctgcggaggacatgcatttttcagtgtcccgcgagcttgaacgagacaccgcattcgcgcaccacgcgttcactgtgcgcatacccaacgagctgagtacaccgctgcctgtactgcgcacaagaacagcaacggaagagcatgcgattgtgatcgaaacgagacatcgaccagaacagaatcagcgagtcgaattgatccgatggattgcgcacgcattacctgcgcagaaataccgttgccgtgaggcaggcgatgtgcaccaaggcatttacctgcgatacgatcggcctgtctctttgcacgcggtggaactgacgcggcagttggcacgctggggaggagagatcagaatgcgcaccgatgcttcgggcgatgaacagcttgaactcgtgcgcgagttggagtcctcacacgaacgcgtctcacacagcttctgtaccatcaaaacagcgaataaggcaacaaggcaacagttgcgcacaggccaatccgagggcgttgaacaggtcatgcacgcaatgttgcaacggcaagctgaagcggaacgtgccactccgctcactgtttggctgaagaacacgataagccacgggccgttgcggtcacgcgaaagcaccgaggagcagcagcgcgtgcactgccaatgggcacgacgggaagcgccgcaacttgccgagttggtgaattggattgctttgttcggcggccacatcattcttcacacacaagcaaccggccaagcgcaattctcccatgaaattcggctacaaaaacaacgagaagcgtcccctgcgcccgcccgccggtgcattcgatgtgcgcgcgaaattgtgcccgcacattcacgcgtaaaggagccgttgcacgagcagtacaacgtcagtgaacaatggcgacgcggttctgcctctgaagaagtccaactgatgatgctgtgcccaaacttgggcccacctggcattcaaattcgcacgagagagtcgcagacacagacagaaaacagttactcgcaacacacgcg

SEQ ID NO: 84503 - DNA, 783 bp, Heterodera glycines
atgcagaccaagctgggttatctggatgaaaaggtaatgcaagccatgaaattggcttttactcaagctctgaagtcgatttgtgaatacatggttgaaactaggcggtgggcttcctccgcccttttgtctaatccaacaaattttgccaggtcagtgttcaactcaggaaaattattggcaaaaggcattggccccaacctgatcagaatctggccctgtgttgaactggcaaaagctgactaccaattctttccattggagcaagatcagagccaaactgaatgctacgagctaattcccatcaaatttggaacgtcaagtggaaccaaattggcattcgtcgatccaaaaacaatgatcgtaagttcagaatcaaaaattgcaccatgctcagaatttcgcaagcagttaattttcatcaatgatgcactgtatgaagttgatcagtggactgctcaagtaaagcaagtcaaagtggacaaaattgggaaagttggagaattcgcacccgaaattccgtcattcaaaccacacacatttcattatttggctttagtcaatctctccgacattttggaacaggtttacgatgccaattcgccaaaaatcagtgaaattacctatggccttcgatccacggacacaattgtcacaaaaacaatgtcaagccagtggaaagcagtcaagcaagagctgaaggatgcgattttcggcggatggatcagcacctaccaaacagttattgcaataatggttgcaattgtttttgcagacttcctg

SEQ ID NO: 84504 - DNA, 643 bp, Heterodera glycines
  unsure (1)..(643): unsure at all n locations
atgggcgccattatctatgcattgcgcgaattcaggccatttatcttcatgtcagatattgaactgcacactgaccacaanccgctcgctnttctgctcaagaaagcggacaacagcccacatttggcgcgctggctgattgagttacaaaattatcaaatcaaaatcgtgcacatcgccgggagccaaaattcactagccgatgctctttctcgtgcagctgaagataagcctctgtctgaatttcgcaaattgcaggaattggatgacattgtcgaatttccggtatgtttagccatctcgcaatacgaccgagtggttttggacccttttgtcaacacggtgacgatacgacacaaggatggtaactcttatgaggtaaatttggaaaaagaactcaagaatgatcccgaggccacggcttatattgattttctgaaaattggcaaatttcctgactgtttagatgagaaagaaaaggacgagtttgccgtggccactgttaattttcaattggactctggcatcctttatttcaaagaatcgggatgccaaccacgaatttatgtcccaatttcgttgagaggcctaatttttgaatcatttcactcttcccttcttggtggtggtcatttgaattacc

SEQ ID NO: 84505 - DNA, 209 bp, Heterodera glycines
atggccacgctgcgctcgcccttcttcggcgagaagagcaacatcacgtcgctgacgcagaagatcagcgacgcggagtacccgccggtgcccgacgacagctacagtcagccggtgaccgcgctcatacagtactgcctgcgcccgaaagcggaggagcggcccagcgcggcgcaagtgcaccgtatggcgctgctgatggcacagcg

SEQ ID NO: 84506 - DNA, 516 bp, Heterodera glycines
atggtaaaacaactcagaaaaatttggccatattttgcaacatttttattttcttaacacgcaatgtttctttttaaagcaaaaaaaaaaaaaaattatttttgcaaaattataagaattttacgctttaaaatttctaaaattaattgtaagcaaattttttttaataataatttgaaaacaacaatttttacaggcgattattagcgaggtgaaaagcgtaatgccttttgtaattggaatggtcatcggcgcttgtcttctcttcattcttttaaaagttaatggtggaaaaaagaaaagaggagaaatggaagagaataaggaagaggagggaagagaagaagaattagcggaggaaaataatggagaagaagagggaggaggaggaatggaagacaatgaaccatggacgttttttacgcataattataaaatagactatttactagaatttaatcttatcatctataaaataaaattataaataatgaagcattctcttaaaaaaataaa

SEQ ID NO: 84507 - DNA, 78 bp, Heterodera glycines
cttctgctgcctctgtgttactgcttgtgtcacctgtcgaacaagtacttgccgatgaggaacatgatttcattggac

SEQ ID NO: 84508 - DNA, 144 bp, Heterodera glycines
gaagccttcattttggaagcatgtcgaactccaattggctctttccgttctcaattggcttcggtgtcagcgccggcattggcctccgaatgcattaaagaattgttgaagagaactaaagtgccggcaaaggaagttcaagag

SEQ ID NO: 84509 - DNA, 119 bp, Heterodera glycines
gaagaaaaatggcaatgagaaggcgaagggaaagcaatcggcggagaaacactcatttcgaggcaattgtctagaaatgatgtgccgccggaataataaaaaaagaaaaaatcctttct

SEQ ID NO: 84510 - DNA, 1477 bp, Heterodera glycines
atgtgctatgtgtacatgaccaccaaatgctcgtttgatgcacatgctgaccatgatgtttattggtgtaccgctgattgtggtcaattttttaaaattttaattagaattggtcgatgaacctggaattttcgaccggaatcccggttttgaaaaaatttgaaacaattactagaaaaaattttgcgggaaagaattaaaatcattctcacaaatcacaggctggatcacgggtcactcatatgtggtctatggaccgttgctgaacgggctgacatcggtgatctttgaaggggtgcccagctatccagacacatcccgaatgtgggccattgtcgagaaatataaggtggaaaatcaattaaatattgatttattaggcctggttttgaattttttaaataaatatatacattatatacctttgctaaaaaaccttcaaaaaaaaatgctaaaacaccaaaagaattataacaatttatttttatgctatatttttttttgacaatttttataaataacaattttttaaaaaatttagtaaaacaagtctaaataaaaattaaattttcgtgatatcgtctagaatttgaaaattttttctgagaaattttttaagtttttcatgcttcactcataaaaatgtttatctacaaaaataaaatgtgtaaaaatataaaaatctaacataatccatattattttttgaaaattatttaaaaagattttaacatttttattttcctttattttttttttgtttttttaattttttccatacagatcaccaagctgtacactgcgccaaccgctgtgcgtgcgctgatggcattttcagacgaaatggtcacaaaacatgaccgttcatcgcttcaagtgatcggctcggttggcgaggtggtaacttttttaattgaattattacaaaattaatttttgcttttttttaatttcagccaataaatccttcagcttggaaatggttgtacaccgtagtgggagaagaacggtgtgccattgtggacacttattggcaaacggagactgtaatattttgtgttactctgtatttaatacatttctaatttattttaatttataataatatttaaaaaatcattgattcgtatttattttttaattatttttctttattattattttttatataatttttctttattattttaaaattaaataataattttttatccttttatttaaaaaaaaattattttttcttttctttatttattattaatttttaattattgcttcactttaatttttccctttaatcaagatattttcaattaaaatcatttttaatttttaatttaagggtggtcatgtgctgacgccaatgcctggggcaacgccaacaaaaccgggcgctgccacgctgccattctttggcattgtgccacgcattttggatgccgaaggacggcatttggaggtgggcatttacttttaa

SEQ ID NO: 84511 - DNA, 1759 bp, Heterodera glycines
ctgttagccggtgcccatgttaatggcatggcaacatatgtggtgattaatagaacccggaatttttgaaaaaaagcgaactaggatctggacctgggggccgggggtttccaagatggacccagacaggagtccggacctggtccagtcaggatcttgggaaaatcctgcacaggatctctcatgctcctgtcctgccggtctctaatggattaacagactttttccactagtcttggcatttcgaggatagaatttctaaaggtttttctttgatcactgttttacaaattcatctccaactcctgttgatcagtgctcggccaaaatcccttgttgaatttcaacaaaaaatccgttgccaaaaccctcgacttttatcatgccaaaattgaatgttttgccaattttgtcaggacatgtatcgccattctttggacgacccgaaaaagttttggcattctgttgctgaacagcttcactttgaagtgttttcgaacaacgggctggaatggaattttgatcatcgtaaaggcgaagtttttgtgcacttcatggtcggttctcggacaaacattgcgtacaattgcttggtgagaaattattatttttttgcatgattgacttggtaaggcctcgaaagtctctctttactcaagaatggcacaaattgtgccattacacagcgaaccaccgagaggagggtatgggcgacaaatcgggcgtcaaaaatgctgacgtatacctaatgcctgattgtgagactgatttgtatggatctgattgatttctacttagaaaattttcaaaaaattttttttagaattttttataagaaaatttaaagaaaaaagtagtatttcatcataaaccttgaaaaatcgttggaaaatttttttcgaaaattttgttttcttgaattttaaaatttatgtttgaatttttctttttgttagggagagggacgggaaacggtgggggaatggatgtagtacacccatttggtcaatgatcattatttatacccccccaaaaatttaattcaggaacgtaacattaaagccgggattggtgatcgggtggcctaccgctgggagggaaacgaaccaggcgacgagcggacaatcacttaccaacaactgcttgatcaggtggtgttttcaatggcaaaaaatgatgattgagcctattgtagataatgggaaataattttctcagaattatgccatgttacctggcttaaaaagggttgatggcttttcgtacaatgggcagttagtttgtacaatggagtttcgtacatttttaattttcaattaaaacctagaatttctttctcaaaaagaattaaaattatttttttgtttttctaggaaacacgaaaaatttctgctaattttttcgttatttcaaattaaaaaaaattagaatttttaaaatttttttagaaaaaataaatcattctaattttttttatagaaaagattaaaaggttttaaaagtttaataggtccgctttcatttttttatagttgccactttttaagaatttttggtcttaaatttcaaaaattttaatgaatttcttttaaaatccaaatttttttggctccggatgcttctttcacgggtctttattttgctgcacaggtggtcacgttcgctgccgtattgcgcgcccgaggcgttcgcgctggtgacgtagtgtccatctatttgcccatggttatcgaattgccggtggcaatgttggcctgcg

SEQ ID NO: 84512 - DNA, 290 bp, Heterodera glycines
atgtcgaaagtgtgtgctgacgagaaaagtgtgggtattgagcgatttttgaatgaacatacagcagagagagcaacagcagcaggtgttgtgagattataatcataattatgatttattgatatggcctagagctatttaaacagaaccataatttcgaaatgaaaaatttcagatttttagaatggatttttccaaatgtagactaggttccgataaaattaagtatctttatagcgctaaaaaaattagataataatattctgctcattattagtttggtcggtgta

SEQ ID NO: 84513 - DNA, 1710 bp, Heterodera glycines
atggctgaagtgtgcgtaaggcattaagacggacgtcaatttaattaatccctccaaaaacaaggaaaaccactaatccctttagggagttcaaaaaatattaaaaaaaaccgggtacttgtacagtttggatcacatacatagaagatttttaatgctaaaaatgtgtttttaggggtattcggggtcgctgatcacgaatataacattaatttcgaccaatttcgaacccgtgacttgaattcgaaccaaagtcgaaaaaaatcaccaaaatccgccattattatccaaaatcgattcaaatcaaattttattcctttaattcgaatatttttcatttttcagatactttagtactatttccaattgataactctcctctacaaattacacacaacaaatatggttgttgacatttcaaagatggagcctttttcaccaccagtatgctttttttttataaaagaaactgaaaacaagatacctaaatgaactttattttgcccgacatcgttcgggtgtactttttcgaaatccctgtccttgacatttgcgccttagaacttgattttgaacataggagcaatgtccaaggcgcaaaccagggatggggcgcggacagtaaaataccgcagtcgcggattcaagttgccgcggtcgcggatctcgtcaaaaaaatcccgcgtcaaattgccgtgttcgcgtcccaccccaggcgcaaatgtcggagaacataaaaatcaaaaaatttcattcttttgaatccattttctggttagaaaaattttggtttcgtattcattccggtctctaatggtttaaatataattgcccgaaaatttgggttgtctgtgtacaaaattattttataatcattgtccatttttaggtgagtcacgcgttgttcccccatttgaccactgttttgctttccatcgggctcatcttcaccgcgtggttttttgtgcatggggtaagaaaaaaatggatacattttgaagctatgcaattttttcaaatttcgctgaaattaaaaaaaaaccagatacctgtcggaacggccggaccctgattttctaaggttttcaaaaagccaaaacccatacatttggctatatttaatctcgaaaaaaacttcggaccgaaaaacaaaacaggaaaaaatccatggttttttagagtgggtattaaattgtcgacccctcaaccccaaaacttacgataaaatcgaacaaaacggaaattttctaaaatcactaatatgctttattctacacaaaaaattcactgcatattaatgcaaataaagagtgtcacaataaatttcaactttttttgaaaaatttttgtggggtgggggcgaactgctctcgttcaaattccattcctttttgcaggtgaccagtacgaagaaaacgcgaaaccttgtcaaggagttgttcatcggcacattggcgtccctttttcttggcttcggcaccctttttctgatgctttgggtcggcatttatgtttagagttgaaaggaggaagaacacagggatttttgtcttatttttggggactttttttttctaatttatttgtattttttttattcctctgctaattgttattgagtgagtctgcccttttttgtttgtttcttcccaatttggaaactgttgaatgttgtgtaattgtttgtccctttaatatttttattttaaa

SEQ ID NO: 84514 - DNA, 2170 bp, Heterodera glycines
  unsure (1)..(2170): unsure at all n locations
atggggccagtagccggaacaatcgtgtcaattttgccagtccaatttccacatctcttaaatcaaccacttcgagcaggtacaaaaaaaaattgttgtaacgaagccggagggggcgggggggctttagtgtggctgacaagaaaaaatttctggctcaagagcacttattatttaaaatttctaaggaaaacttatctgtactaacatcagaaaaattttcaaaaaattaagccaaaaattaactttttttttttaatttaagcaaagttttagaaaagtggagtacctatttagtgttttttttttttgttcaaatttcggttttattcattgattttgcctcatgtgaacaggcaaacagggacctcatcacccttaggtgcgcgtgcagatgccagcaaacagagggagcaggtgaacaacgaaatttttgttaataatcaattttgagttgaattgttttcttcggcagccaaaattttttttgtaaaacagtggttctaatggaggtctcttttccatactaatttttccaaaaaaccacaaaattatcatttttggcgcgggtttaaaaatatggccctanattcttcaatttttcaatgtggcgcctatctgcactgccaggcccttccttccccgatttttgattttgaaaaatacgctctgcaaaggttgcgtaaagagcaattttttctatcttttctctacttttccccagggtcagaagagtcgtgcctatgagatggcgtttcatgaacagcagcagcgtgccaagggccgaaatcccgcaaattcgtcctccattttccaatatgtgcatcaccccaatccgccgccgccgcgtaaatgatcattaacaaacctttggcatttcattttgtcgcgtatttctctcacaatctctatttacctgttggttcatctctcgtttttttcggactgacgtgtttttatggtgtaagaataatatgcaattttcttttttgtaaaaaaaatggctactctacaatacttcccctataatatgtgtcccccccctgagttttcgtaataggtttgcaaaaaaagacaaattttcatggagtgtgaaaaatttattgcaaaaaatattttttagaaactaacatattttaataatcgtgatttttgagctagtttttcaaaattttaaatgcttttttaatttctctatttttgaaacttattttaaaaataaataaaaagtacaaatttaaattccagctccaaccatattcctcaaatgtgcggacaacgtggaagtggaagtagagctcgatcgtaatatttttcgtttttctactacgcttgacacaatgatggaaggtaaatacatatttcttcgatgcaattatttaaaaaaaaaactaattttttatttcctagatcttggaatgtacactgctgaaggcacaaaccaggcttgtacctctggaaaaaatctgacaaatgagggaatttgaagagcattttttgctcttagattaaaagttcaaaaaaaattagattactactattattcatgtctaaatagaaattttataatgaattttgccataattttcgataaaataaaaatcttttttaataaatttcctataaatagagtgcttgacgattatttatagttttttagaaatttccggtttcaaatgtaagtagtacggtgatgcgagaagtgattgaatggtgcgagcatcacaaaaacggtttgtgcggagcacggggtcatggtaaacaagctcgaaaatcttttccgctcgaccgttcaaaattaacgagaccgcgacttttcgattgattggtcgaatatggctaacgggactaaatcgcccaattcaaaatttgtgtacacgctcttaaaaaatgccacaaaaattaatttttctttaaaattctattcctggctaattccatattagatgcctcaatagagccaatttatgaagaaattgctttggatgtgccaactggtaaagatgcggaggcatccgcaccaaatgctcaagctggagaagttgcggaggcagccgaatcaaatgccaaaccaaaagaattggctaataatgaaaagcgtctcgtctttccaagctgggatgagaattttttggataaggaatggcctgagcttgttgatataatttta

SEQ ID NO: 84515 - DNA, 1015 bp, Heterodera glycines
atggaaattgaaaaagtgtcggaatttgcgagagaaatcgacagaagtgaacgtaaaagcgaatctcgtcacttacataaatgggcttccatggaaaataaattgaaaagaaaaatggaagcactgacaatgagaaatggttgggcttttaccttatgcgtgaacaagaaggtgcaaattaaatgctaattaatactaattgtaatgaatttccattaagataattattttttttaattttaatttattacaatatttaaggaactgatggatccaagcaaaggattttacaataaaagcgaggacaaagtgacattggccattgatgtcaattatttatttaaaaaataattgaataatataaagttaaataatcattttgtcagtttgcaagcaattttaggctggtttgaagcatcgtacaaacgtccttcttggaccgtaatcgaggaggctgcggacgcagaaactcaggctaacggagtgcaattgtcatttggtaagtattttacacatcctataaaattctaaaatttttattgtttgtaatcttttatgtcccacaaaaaatactgtatacgcttagtgaatttgcgcatttttttggtttttgaaaataaaaattctaataaatcctaatacatgtgagttaaataaaactttcgaaaatataagcaatgaataaacctcaaaattaatcaaatttatttaatattaatcgatgtttgttctatttttaatggtgaatgttgaaaaatctgcttaaagaaaaatccaaaagtttttgccttagttcaaaccccttaattgaaaatcatttcttaaatttgttattatgatttatagtgaaattggttaaattttcactcttttgtattgaattaaatatttttaaactcctacagacaaactcgctcaccggaacatcgaagactcatacacggtgaaacaacgcgaagcgatcgcattcgatttggtaggggagaggaattcgtatcgagatgctaacaaataa

SEQ ID NO: 84516 - DNA, 107 bp, Heterodera glycines
aattagagtttttctttcttcaatctccttaattgtttatgatttgtcctccgtttttgcttctttcactgtaacatcgatggccaaagtcactttgcctcgctttt

SEQ ID NO: 84517 - DNA, 555 bp, Heterodera glycines
gttcgtcaggcgggaggccgcgacatcggcggagtggcggcgccgggtgccgccgctcgtcccgggcaaattctgtggcttttgggactgactcgtctccaaactcaggtgggcactttgtccgtcacttcgtttcgttttgtccccctcactttgaatttcgttacttttgtcaatgtttcgtccgttggtcccttcacattatctttttgttttccatttgacgcttttcttttttaaatttttggcattctattatactttttttgggttagttcactaaatgccattctcttctcttccttttctttcgtccaactctctgtccgtcgtgccgtagtgctgcctctcttccgtctctgtctgtctctcatttgccaatgatccctctcccgctccgtttctctgctgatgtcctattttctcttcagatgagagttgtgaaggctttccaagccactgtgcagaattcccacccgtcttcgctgtctcttcaggcgggtgaccgtctccgccagtcttaccggcgacttcgaattgcgaaagaaattgagc

SEQ ID NO: 84518 - DNA, 1384 bp, Heterodera glycines
atgaaatatgcattctattattctattatattttccgcctttgccaatttgcatgtaaaagctttcccgccaaaagataaagaaggtaaatctgtaaatatattgaactttctctaagttcctgttgtattcctaaaatacgaaattccgctggctatgccccttagccaattccatgaaatgcttatatatattcctcctcttaataaatttcaaatttaaggcaccagtaatggaaaaattgtcaattctttggcagatcaaatggagaaagtgttgaagaaaggagaatattcggatgttcattttttggttgggaaggatgacaaaaaggaggcgagtcaaaaaaagcaaaaaccatagcttaatgcccaaggataaacaattacatttttagaacatatttttatggaaatcttgtaaattctcgaaaaattttctgcaaaatctataagcaaatgcatataaattttgaatatagtttaatgatcaacaaaatttcaatgttgataagaccaataaatatgcctcggtagctcaatggtcggatgcccacggattgggctttagggtgggttcgattcccacccgagtcctaacatattatcattatttatttgtaggaaaaattactaaattctcaagacttttacgtcagtattttaaattgaattttttgatcttttttaagattgtaacagctcatagagcgattctctccagtgcttccgatgttttcaaagcaatgttccgttacaatgaaggtcaaattgtgatccccgacattgaaattggcgcgttcaaaacgatgctaacatttatttacacgaaacattttaacggattggatgccaataatttgttggaagttttaaaagctggtgaaaatttatgattgggttttaaataaattactatttaattatagctgacaaatataacatcagtggcctggtaaaagaatgtgccaacttttgtgccaaagtttcaattaaaaagttgccaaatgtttttgtggcttttgaacaggctttgttgctgaatatggaggtgaggaaagaattttaattattaaactcattattcatgtatctaaaattattcttcattactgacaaaaaattcacgggtgttcgttttttcaaaaattcaagacaattttcataaattttttgtccagttattttatttttatagagttgtacgcgaccgggacctgatactgaaagaacgtacaactgagtacctacgtcccggttttgaccgggaccgggaaaagtctcgggtttttccctgttttgccagccaaaaattcccggtttttcaacccggaaagtacctggtcccgtttttctatggtacgatccccgacgagttaaagtaa

SEQ ID NO: 84519 - DNA, 498 bp, Heterodera glycines
atgtcttttaaacgcgtgaactccttccaacccgccgtgccaatggccaaaaaatgggatttccgatcaatcgggtaagtgatttttaataaattaaataaaaaaataatttcttaaacaattataaatacaattataagataataccctttaagaattatttcaaaaaatttttttgttcagaaataattttgctgaagaaatggaaaattataaattgatggattaccaatcgacaacttgcgaaaaatttggatttacgaaaaatattacggaatttcgtgtcaacccggatgtggagcgccccgatgaagcgatgaaggatgcaatcgacaacatgataaaggtggctttaaaaactacggaagaaaaaatgaagcgaaaagtgcggatgtttggagtggcaattacgggtgctgggcttgcttccccggtttgggtgccgtatcgggcgtacccgcagaacaatgcggatgttatcatgcaggagattaataa

SEQ ID NO: 84520 - DNA, 585 bp, Heterodera glycines
aagaaggccatgcaaatgctgaaaagggagttggacattaacatagatgatataaaattaaagagtcgtcaatctcctggaagttatgacatgttttttgaacaatggtatacaatggaacaatatgaaattaaagaaggcgcagttatttacgtttgttatgaatatcattacaagacattagttgagtttgacattttcattgaatataaccagaaaaagtacccagttcgtgtaaaacgtgcggacactgtgcgcgatttgaagacgaaaatcggaaatatccaagagattggcattttgcccaaccaacaacaaaaacttatatgccaaaaagcagatggtaaagtactcgtggactttgaaaaaatcgttgcttataacatcgaaaaaaattcaaccattttcttgacacttgctgaaattgagcggcagatggagaagcattctttatccaacaagcagcaggaggaggagaagcattctttatccaacaagcagcaggaggaggagaagccttcatccagcaattttgcatcaccacagctgaagaagagaaaaggaagaaactacagacaaaagtga

SEQ ID NO: 84521 - DNA, 927 bp, Heterodera glycines
atgaccctttcggagaaaggtgaaacgatgaaaattatgaaatttttaataaattttcttaacaaaattctttaaaaataccaaaaaaaaaaattccgggcgcctatcggcgccgccggcccataaattcgcctaagatttcaaaatttgaatataaaatgcctatttttcagtgaaatccgaagaaaatattcataaaattacgtttttttctaatgcggcgcctattgcagcaaggggtgaactccgtctagccaattccatctcagcaaagttaaaatctatcttttttcttggtaaaatcagcaaaatcgtatcattcaacttaaatttttcaataaaaaatggcctttttgtcttaaatttctcacaaaaaaatccaatttttttaccgctgcgtctgtcggcgctgtaggtgaaaattttgcttttgaaagtgcgagttgattgttttatttttttaatttttaaattcattgtaacataagaatttaatgcctttttaaatgagtatttttcaagaaaaaaatatttcttaaacttttattacataactattttgctagaaaaggtattgaattattaaaatatttgaatttttattaattaaccatgaatatattcatgtcccttgttaataagtcttttgtatttctttattttatttaaatgatagaaaattcttctatcgttttagataatatatttaaatattttttttaatataatcaaatatatttgaatttatgtatttataattcaaaaaatctagagagaaaaaataatgaatatttaaaaaaataatttatgacacagtttatttactgttatatggaaccaaataaaatttcttagacaccaggaacgatttccatgtcataacggtcagcgcaacattttgatatgaatattggtaatttataggga

SEQ ID NO: 84522 - DNA, 73 bp, Heterodera glycines
atgactcccgatgagtgccgttcaattgcgagcgaaggcgaacgatcccttagagaaggcgacgctgttaacg

SEQ ID NO: 84523 - DNA, 486 bp, Heterodera glycines
atgcctatttttacttgggagaatatgaactttcgattggacaccacgaaaaggtgagacaacagttttacccttatcaaaatatttccattaacaaataagcgaattgaacttgcaaagaaacttggggaccaggcatcggttcgccgttcttacagcaacattggcaatgcctatgcattgatgggggattacgaaaacgcagaaaactcctacaggtcttcatgactgtgggtgaagcaaaattgtaatttgcaggcttgccttagcattggctcgtgagatgaatatcccggaattggtcgaccaattggacgcggatttggagaacctcagccatatcatggcgaagaacaaaagtgaatttcattagtatcatttggaattgttttgtaaatgttaggaatgggcgacccttccgcaaaacaatctgccgatataacgttcacaagcggcggaattaattcgtcgtttggaacggaatca

SEQ ID NO: 84524 - DNA, 625 bp, Heterodera glycines
aacgaagtgccaatggaaatgccgacggcgatgagaacgttgcgcgaagtgcgcgagtcaaagggccaccaactgcacacatttgcccagcagctcgtccagctgacacagcacgtgcacgtggcacgcaaggagtacgacatggcacaactgagcactgaaacgaagccgttacgcgaaattcgacgcgatgcggtgggtgactaattagacgaaattgtttcatatatattatttaattttaaatttaataattttccaaaatgatgttatgacaacccctataaaattttttatatttttcgtgtcatgactctccaatttgctcacaggtgtgcaaacagttgcgcgagttcctcagcgagaacgagtggtgcgccgtgttgatggagaaccgtgctgcgttgggcgagcgcgtgcacaccgattggcatgacagcgtgcatggtgggcgcatgagtgatttgttgcaaaggcctgcactgcgtgtgcagcacgctgcagtgctttctgctgcctggggcaccaccagtggcacatattataggcgggcacgcaccggaagcacagtcacaaccaccacaaccactgccatacgcttacccgttaccatccagcacatact

SEQ ID NO: 84525 - DNA, 1248 bp, Heterodera glycines
atggacacagttgtgcacgaacgacattcagcggaagagagcgtgcattacaccaccggacaaccagtcatggaacaacggacgctgcaagtcgacatagaccgacggacgagccgagcgaagacgcaagtgcaagatgttgcagaaacagcacgcgcaacaaggagattttctgttgaaaatacgaaacagaacgtgtcgctgtctccgctgcaggtgaacaataaagaatggccaaagaggcgggaagaaaaagcatgcgtgacgataaaaaacggaaaagggacacgcccagatgctgctgcggtgtgccaatatttgatggtacccgaaaaatcagagcgcgccatgagttctcgagctgcactcgcctcgagtgggtcgagttacgtgaaaaggttaagcacggcgtcagaggatgaagcagttgggacgacgagcgcaccggcaccacgcgtaattggcattgaaacacgcattgagcaacagccaacgccgtacatacggcgcgagaaaacggtgctgaggacagagtcatggccaaagttggacagccgagccaaagtggaggaatggctaagggggacagaagagggaatgccggaagaaatgggagaggaacaattcggagaagaacaggatcaactgcagaatcatctaacagtgacaaaggcagaattggctcggccggaagaggcgctcggagtcagcgttgagaagccggaaagaagggaagcgaaggaagagcgccggatgagattggagcggcaagaaatggccttccagctggttcagcagctgttgagtgcaggacgaagtgaagcatcgctttcggaaaagcaacgggcaatggtttccgagcagttcaagcagttcggcctggaggagatgagcaccagcattgtgctggagcagctcgaagaagtggcgggcagacccgaggcaaaagtggcgctcaaagcgtggaagagcctggaagaaggactgagagtgctggctgttatggaagaacgggtcgggtttgaagcaacctggacgaccggagagacggagtcgggtgctgagaagacagtgcagttggcacgtgttgaagctgctcagaagcgagttgaagaagcgcaggagcagctaaggaccttccttacagtgttggtcgggccggaacagttcgaagaagccaaactgctccagaaaattccatggcacacgtcagccgaataccgaggcccggaatcgcgcgaagaatga

SEQ ID NO: 84526 - DNA, 706 bp, Heterodera glycines
atggacggcttcgaacagaaccaggtaatgatcatgatcagtacaacaaaccgagctgataatcttgataaaaaactgctttttgcataaaatgggggcggtattgtagcgttgacgtgaatatttttggaattttaatgccctttgttaagaattgctttaaattttctaaaaatttcccattttaagtttttttttttcatttcatgggtgggcatgggaatggctatgcttctactgttaacatactaatcacagcaaacgcctttgccgaatttagcttgtacccaaaattttggatctttccaaaggaacattttttaaattttgcttcctcctttttaggtcgccgtatcccaagtaccgccgcagggcgacgagcctcagccgtcgctgacaacaatgggcactgaacaaagtgcaatgggtctatacaagcgaggacttgagatggtgcaacaaggggaagtgcggtttcgtaagagcaggttggtccgactaaaaccttagatttgatggcatattaagccgggcaaattggactatgttcacttaattttgataatttttgattattgttttcaaaattttccaagcgtttagggcggaatcatgcgaatgtgaatctgaacaagactttgctgccaaactttacggggttcgtctcgcccttcgtcaaataatggacgaaccgcaaatgattcag

SEQ ID NO: 84527 - DNA, 1868 bp, Heterodera glycines
atggtcgagaggcgcaaggaatcgcctaagcgtcgccgccgttcgtcaagttcttcgagttctggaagctcttccagtactggttctagctcatcaggttcatcttcgtcctcttccaccactgcttctcgttcaccttccccaaagaaacaaagagcagctgctcgtccttctgctcgtgacgatcgtactacacgtcgttctccaagaaggttaacctgttagggactctaattggctaagctaaccaatgtttctgctccctccatttcgatgtatacacttattcgcaaatcttttattttaggacggggggacggttaacccactcgtattcttttcgtttaataggtcgcgttctccccatcgtgtccaaccgaaaacagagaaaagcactgtcagctctcgccgttcaccgtctccccgtcgtcgtcgtccgtcgcctcccagccgcggcccgcgtcgccgttcgcgctcgcctcgtcatgaacgcgcggctccatcaccaccaccagtgaaaagggaacgtactccggaaccaccgccacgccgactttgtgttcggtaatttttgttgtaatttattgaaatacaaatgaattgttcagaaatctaagcagaaatatcacaaaagcgcacatggaggaaatcttcgctctgtttggggctctaaagtcctgtgagttgccaatggaccgtgtgcatgtgcatttgccccggggatacggctatgtggagtatgaaaaggcggaggatgcggagaaggctctgaaacatatggacggaggtcaaattgacggactggaaattcagtgcgaaatgacttttcctttcaaagggaccggcggaggttagagcacatggggagtgttttcttcggtttacttattgcttcgtttaggtcgtggtcattcgcccgtcgggattaattctatgggcattgggatcaagcgcgagcggagccgttcccctgcgcgtcgttttgccgctcgtttgtcgcctccgcgtcgcggccgtcgctcgcgctcgccgcctccgatgcgcgcgtctggcgcaaatcaaattcctttggggaacaacggccgttttagaagtcgatctcctcgtcgttgatgactgatgaccatcttttgcaatgaagcgatttcgaataatacccacgtaaaattgtttgatcaaatgaaaacgaaaagtgttctcgcccctcgttattttgttctcgttttcgaaatcgatcaatatatatggtcattctgtcccaatttatttaaaaaaattaatgtttttacattaattggctagcttttgttagaaatgcacttcagaaatatttaccagattgtttggttttattgcatcttgtttagaattttattgttataaacgatttgcagatgtcaatttttcgtagctttttctctgctacagacgatgctcaatcggacgatgcaactaatgcagaaatagtcgatcgccttgtcgaacgattggaaaccgggagcagtatcgaagacaggagggatgcgctcaaagcacttaggtcgttggcgcgggtaaggcgcctgttccaccatttttcttaaggttacaacctttgattgcagaatcttcgtcttcatgtcgcgactcgtggcatgagcgcttacatggacattcttgaaaaggaggccaacctgcaagatttggttgccctcacattagacattttggacatagtgctcaacgacagtgccaacggtggtgagcaagacgcaacgacagtggctgagaacgaggacgaagtgggcgatcgccttgctgaagtgtttctgcaaaagcccacatttatggtctcgctgatcaaactgcttgagtgttatgacttcgcc

SEQ ID NO: 84528 - DNA, 70 bp, Heterodera glycines
atgctctttttgctgctcattgtccgtcttttgttgcttctgcgcaactttcaactctttcagttccctg

SEQ ID NO: 84529 - DNA, 1200 bp, Heterodera glycines
aattttacatacgagcggcccaacgcccttcagccgttggcaaaaggcccttccgatttgttgttggattatcaattcaccaaattcttcaaattaatggagggtttgttttctgttcattttttctcactttgaactgcatctttaagggcatttgcttaagtttttccgtccaaacggtgaactttcttcttctgtaaatacacagcttgaaggtgcgcttgtgccttacaaaaagttgatcaaaaaacaggacgaaaccattgccgagcttaccagggaactgaaagagttgaaagttgcgcagaagcaacaaaagacggacaatgagcagcaaaaagagcataccaactgcaatggagtgggtttttctttatactagtactagtacacctcattatttagtttctcaaggttattccaactgaagagtttgcttcaacgactgtccaagcggatgcctcagcaaatggcgagcaattggcactgctgagggcggaattggcagagaaaaatgcactgaacgaacggagggcagacgcagagacgaaactgcagcagctgacagtgtccggaggcggatttcccatgaaatatcgaccaatttcaattttagccttgcacaacaatggcaaatcgaagctgatcgatacaagggatgggctttgcaatggcagtcctaccaaatatcgcaggttttcgtcaattaccgaaaaaaaactatttattttttaactcacaataagttgcctaacccaactgatacggtaatccaacaattggagcagcaaaaaacagagcttgaactacaaatccaatatggatggcaggcctttgaagcgcaaagtgctcaattaggcgaattagtacgaatttcggaagcaaatgcgaacaaactgaaccaggtggagcgtgaattgtccgaagttagcagtgagcgagaaactttgcggcagcaattagaggtcttacatttactctcccagaagtgcatcgaatcaatcgacaaatgtttagagccagcaaaatgtcccgcagggatcagccgttgccacacacagcgaggagttgacactgctgaagcgtgaacacgaggacttgttgctactgttggcagagcaggacaggaaaatacatgactaccgtcggcggttggcctcccatggagaagcattaagtgacgcggacgaagagccatga

SEQ ID NO: 84530 - DNA, 443 bp, Heterodera glycines
atgggcaaaaatgaatcagcccaaagtagagacaaacactcactcactcattttccattcacttacggcgcggtggtaaggcgatttgcgacggacggacgacgaaatgtaaacgatgggaaaagcacagcaaaaaaaaaaattagggatgggatttttaaggatgaaaaagtccaaaataaggccgtaaataagggcgaaaaagtcaaatttagggtataatttttaaaattgctgttttttacatgaaataatttcagactaaggcaaacaattttattcactgattgcagtacaaataagctatattttagaaaatttttttcatttcttagggtctatttttgaaaaatttagtgtcgattcataggggtatatttttcgaaatttttttgggtcgattcttaggggtgtatttttcgttttttattgcatttttgtta

SEQ ID NO: 84531 - DNA, 544 bp, Heterodera glycines
atgtcttctttgtccaccatttttgttgttctgctggtaattgccatttgcctttcattaacaattgccatgccagcagtggacaatcaaattgaaaggtataaatttttattttttatttttggcattccatttttctttctaatggctgtgccagaccaattacggcactttttgacgccgtaatttcacattccgccaatttttaggaaaatttcggcaaaaattggaagttttatttcttaaaaattgaatgcttcaaaagtgcaaaaaaaaacaacctaattttataatttgaagatttttcaaaaagttttttgttccttttttaaattaaattttaagtgttccacttcggaaaaagcgttatggctacggcggcggtggatttggcggcggatttggcggtggaatgggctttgatggctgatttggacgctgagccgtgaagaacattaatacgcattgtgaatgatcagaaatcgatcaatataaatgatgtgcgacagaactcttttaaagactttcaagtttataaaataaa

SEQ ID NO: 84532 - DNA, 901 bp, Heterodera glycines
atgctcgatccatcaatgccaattttaatcccgaataaagcatttggggtaaggaaaggatgaaaaatggttgtgagtgtctccgttgtttgaacttttgggaatgataacattctattgttttagaaacgagtctttgattttcatattaagctttcattcaacgatgtccaacagcgtgaacagcacgaacaattcctcgtgtcggtggctatccgtacgctcacccgtccgtttggtcaagcgatgctgcatttccgtacccgtcattgtttctcggaagaaaattcggaccctgcgatgggcatgcgacagatttgtctgaatggccgagttcactccggccgtaaccaagtggactatccgctcaacgattcatttcccgtttgctgctcttcgggtttcaccaaaattcaaataatttagacccataaaattgctatggattgggctaatttttacaacgctttggcccatggcctttccttttgcggcgactttccacggcgtcttttctccaataattcatctgaaaatgaattacccaacactgttcgggccggccttattttagccgctggctttgtgggcaacgtgcgaagcatgatgaatttgtacgacattcacctgctgcttactcaaaacaatagacatttggtcatcgcattgctcgtcggatgtgcggcagcccatcgagggacgagcgaagtgcacgtaatgaatttgggggagggtggagagaaaggcggtacatcaaaatgtacaaggggtcttgagagggtgcactccattgttatgcccatttacgggggggggggcatggaagggggcttgacttatgttacggcgtgctgacgcattttataaattccgccaaatggtaagaaaatcaaaaaataaa

SEQ ID NO: 84533 - DNA, 61 bp, Heterodera glycines; identical to SEQ ID NO: 61697

SEQ ID NO: 84534 - DNA, 729 bp, Heterodera glycines
atgagagaactacacttatattatttatttaatctcaacaggtattctgtctctaaaaaaattttcgagaaaatcaataatatccctcataatcccaagtaactatatttataaaataagactttttaggtgtacaaataatcaaaaaccatattttaatatttcgacattcctaattccaaaaatgctactcatttcaactgacatcttcatgagcctgtcgttagttgccgctttttctcattctgctccagtaactcaagggaaacgtaagttttcgaaactaattaataaaaatacttgaatttcattaatcaaattcttccacgaatggaagaacgaccacagagaatccaccaacttctgctggggctgtctcatcagtcgcacaagttgccaccgccgtattggcagtgactgccgccggactgccggatgccgactgtgcacgacgaccgattgggtatgccaaagaagcgtagactgaggtgacctatgttgcttctgccgttgatgccccgttgtctcaaccagaatcagcaccaactcaaagctttgcgacagatgattttaagacactggtcggtgccacttactgtgatcaaaagagccgtgtgttcacgcattatttatcatgaatatttaattgcgattaattccgatttttattttctgttttagttatttaaatttaacaattaattgtttttcctcaacccatgaacaaaa

SEQ ID NO: 84535 - DNA, 1313 bp, Heterodera glycines
  unsure (1)..(1313): unsure at all n locations
gaatggacattgtttgttgagggtccaatggtacaaacaacgacgagtgcgccgaatggcggcggtgccttttccgcgagtggcggctcctccggcgtctcctcatcatcttcgacggcgacagcgcccgtggcccgaccgttggccaccgccgagctcaatgtacgcgtgctgatcggtccggcggactgtgtggcccaggtgcacctcgaactgcgtcccattcacgaaggagtgagtcagggacaggtggaattgctctaaattggcaaaaaaaaaccgggaaaaaaccatcatacattttgngacaggacaaaacacaaccaccgaaatacagtcgaaacataacatagccgggaataaattttcaaaaccagaaagtcttctagaaaaaaatcagaaaattctaagaaaaagacatttttcaaaaaattttaaagcgatttttcaaaatttaatgacgaattacaaagttttttataaaaatctctggaaaattttttacttcgatttttctaagatttttttcttgaaaaattctaagtgaaaaaaaaattaatttgttcccggctgtgttatgtcttggctgtgttttggtgtgtaccgccaacatttaacatcatttgtgtctgttttttttttggttttccacgggcctcttttcgtgagtcgaatggatggatgacttggtttttgaccctttttaggtgctcggctgttcccttgacttggtggtgtactgttttccctttgacaacgaatggtcagtcgatggcatccaattttagtttaattattagttttttaattcacttttttaagtgtttcacccttttcccaccatttgctcgcgagcactccgaattccgtccgtggtccccctccgtccgccgcagttgtcgaacaccaccacaacgccgaggatgcaaatgtgggcgatgacattcccatcgaactcgttccccccaacgacgacgacgaggagaacggcggtggtgatggcaccgatggctgctgcggcattgttgccgaaaatgttgcccaacaacaacaacaaattgttggtgatggcatttccatcgaactcgttccccccaacgacgacgaggagaacggcggcgaagtcagcgatggcactggcactgttgccgaaagtgttgcccaacaacaacaacaaattgttggtgatggcatttccatcgaactcgttccccccaacgacgacgaggagaacggtggtgaagtcagtgatggctgctgcggaactgttgccgaaagtgttgccgaacagcttaaacaccaccaagaaccgg

SEQ ID NO: 84536 - DNA, 333 bp, Heterodera glycines
atgcccgcacttttcacttccattttcaacatctttctgattcttttgctggtaagcaacaaatatcaaccaatctttgaatttaattctcccaatcttttcaggtgtttaagtttcaagaaacttttgtgggctttgcgggcgcaacgaaacagacggacaaagtacggaataaaaaacaatcggttgaagccaaattccaatttttagaaaagtgaggacggtaaagaatcgctgagtccgacactgccaccatatgacaaatgggcggccggcgtttgttttgcgatgcgattcacgcaatatttcatctacacgaatctcgagacgtaa

SEQ ID NO: 84537 - DNA, 1595 bp, Heterodera glycines
atgacgaagaaacaagtcaccatcgttggttctggaaattggggcacggcaattgctcgaattgtgggcaaaacggtgcaaatgcataactcagaatttgatgactcggcggtcaaaatgtgggtctttgaagaggtgaaaaacacccaaaacgaaatattcttttttttaaattcgtttaggtggttgaaggacgcaaacttagcgaaattatcaacgagaaacacgaaaatgtgaaatatttgcccggaaaggtgccgaaactttgaatttgtcattgtctttccaacttttattggaattcagaaacttcccactaatgttatcgctgtcactgatgttgttgaggcttcaaaaaacgcggatgttctcattttcatcatccctcaccaattcttgcacaaagtttgcgaacagctcaaaggaaacatcaaaaagagcgcaatcgcaatttcgctgattaaggtgaaaacgattaaataaagcagtgagttatttttgaaaattatttttagggcttggccacttttcacgaaaaagacattgggctgcgactgatctctaatgaaatcgcgacctctcttggcattgacacttccgtgctaatgggtgctaatctcgcgaacgaagtggcagaagaccacgtaaattctttcctccattgttttataaatcatttattatttttagttttgtgaagcaactattggtaaacatttaattcttgttggtaaaattcattttatttattttgcctgtaggaaccaaaaacccacagcatggaaatgaattgaagaagttgtttcacaccgacaatttccgaataaatgtggtcgaagacgcggcaacggtaaatgaattgcttctttttttcgcggaaatgcctattttaggttgagttgtgcggtgctcttaaaaacatcgtggcatgcggcgccggattctcagttgggctcggttatggcgacaacacaatggttgggggtgaaggagaaacagcgaatcatttttaacctttcaacaggcggccatcatccgaatcggtctcatggacatgataaagttcatcgaactgttctatcccggcgccaacttgaagacctttttcgagtcgtgcggattcgctgatcttttgaccacgtgtataggcggacggaaccgaagagtgtgcgaggcattcgtcaaatcaaacaaggtatgcgaataatccgtcaaaataagaatttatttgtttcttttagcctttggcagaggtggagaaggaattgctgaatggacagagtgcgcaggggccattgacagcgaaagaagtgttcgaagtgctgcaagcgaagaatctgaccaaagagtgagtcgaacaaaatatgtaaataagaatgatcaacggtgatcgtttaatttgggttgcactatgtttctcccccaaaaaaaattattatttttttttgggtggggaaacgatatgagaagatgaaatactcctatttttgctttattgaatttacttatccttcaggtttccgttctttgtggcgattcacaaagtttgcagcggtgagacgccggccaagaatttcctcgaccttattcgttaa

SEQ ID NO: 84538 - DNA, 376 bp, Heterodera glycines
atgttgttgccatcggcggccatgaaaatgcgtcgcaaatgctcattcaatccggcatggcaacaccaatacgcatttgtccgccgtagcaaaaagggcaacggctttttttactgtgcctattgtgagaaggacatcaatgtgcaaacaatgggcatttcagcggtcaaatcgcacattgacaacaacaaacatcggcaaatggagcagcaacaaattgtcatgtcggcggtaattggaaatgccgagaacggcgccattgttgcggcacatcagcagcagcaacaatatcaaatgaataatcataattgtaatgctgttggaggagtaaaggcggaagaaccgccgttgcaacaactacaccaacagctttttg

SEQ ID NO: 84539 - DNA, 115 bp, Heterodera glycines
gaacaatttttgcaagacgagaggcaaagagtggacaaactgttcaacaacaataacaacaacagcaaaagcaataataagccattagaaaaagcatatggaggagcatttgcaa

SEQ ID NO: 84540 - DNA, 1754 bp, Heterodera glycines
atggcaaagcgttcgtttggcgcactgttgtcgcccacattctgcggcgtgcccagcgagcgcaccgcgatgctggcagcgtcagcgactgcggcagcgaccgcggtaccccactctctgtcccaacagtcgccgttcgtcgtcgtggtgaactcgcgcagcgactaccgccatttcgtcgaactcgttgaacagcccgacgacaacaacaataacaatcggccaaaactgttggcgacgtcgttgtcatcattggcggaggatggcatttgccaacagcaaaagttggccaacttggcacggtcacttgccgatgccgtgggcaatgtggcggcaactgttgctgaacgtcttgaatatatcgacgatcatggtgagggtgcaagtttattttgttttatatttgtaaatgaggttgcgtgatttcgttgctaaatttcaattttaaaaaaattcgcagtaatcttttccaagaaggtacgataattattataccatacccaacattttatgtaacacagaaccatcttctactgctgttgaacaccatcagtcactggcacatatcgccaacaacaaaaacaacaacaatgaaaacattgctactacagtaagtcagcgctgggactcatccggcgagccttgcccggcacgcgaatcgctcccagcaggcgaaccggacaacaaccacttgccgttaatgatgcgcgaaatgcccagctgcaaaatggacgacgacgacgacgatgatgatgctgatgatgaacagtcgtcgatgggtgctgctgctgaacagcttgaacttcagttagtcgattcgtggtccatggaggatgattcgcaatgtactgaattggccgttggtgatggatcggtgccgttgcggcacaaggacacgcttgaacgactggacggcggcaacaacgagcggagactgggcatgttcctggctgaacggctcgcacatgggcttgagcggaacgagcgtgccatggcacgggccagccggcagcgcaactcgttgcttgacgcgctgatcagtgctcttattctgtcggaggagggcgacgatcgcaagggggagcaccagcagcaggacggcgacgaacagtgccaggacgagctgcagttgaacaacaaattgcggcgcgtgtgcaggggtaggaattattcaaaatggagtgggcaaatattcaagacttgactgaatagttaagtcgcagattgtagccgtaacagttcaaaggaatccgactgataaacctggtcataagctggattgattagagtaagcgcacttatccttgtcaaaaaaaaatctgaagcttcgttcaggcttaaccggggagattttccaatattttaacaaatttttgacgaatattgcaccggattttcgttaagcagatcagcaacataatgccaaaaagaaaaatggcttattaatgacgccgacggcaaattacatcaataacagcaacaacaacaattatgctaatgagcatgatgatcaacagcatagtgatcatcatcaacaacaacaacatcaacagcagcagcagcagaattggtgtacaaccacaaaaaatgggagcaaaaagtcgcgatccatggatttgttacagcaacaagcacacacaacaacaacaacaacaccagcaacaacaacgacatggagcagtaccaacaacacaaccaaacagccggagttgctgctggatgcagcagcagcagaacactggcagatcggacag

SEQ ID NO: 84541 - DNA, 434 bp, Heterodera glycines
catggaccacgaatcgactaactgaagttcaagctgttcagcagcagcacccatcgacgactgttcatcatcagcatcatcatcgtcgtcgtcgtcgtccattttgcagctgggcatttcgcgcatcattaacggcaagtggttgttgtccggttcgcctgctgggagcgattcgcgtgccgggcaaggctcgccggatgagtcccagcgctgacttactgtagtagcaatgttttcattgttgttgtttttgttgttggcgatatgtgccagtgactgatggtgttcaacagcagtagaagatggttctgtgttacataaaatgttgggtatggtataataattatcgtaccttcttggaaaagattactgcgaatttttttaaaattgaaatttagcaacgaaatcacgcaacctcatttacaaatataaaa

SEQ ID NO: 84542 - DNA, 1419 bp, Heterodera glycines
atgggatacgcaccaagcaagtgtccaaaatatccaacacctggagcacgcagaaggcggcttgctgatcaacatcgatgttttaattgccttatgcaagggcataactctcaacaatgcagctcaccaaagaggtgtccaaaatgtggtgaaaaacaccacttcatgatctgctattctgaaggagacgctccgagaggaaccactcctcaacaaacatccaaaggaggggctgttcaaaagaaacagtcctccaacagacgaggagaaccacctcgtccgactcagaatcatttttcggcattaaatgaacccttaagaataagggaaaatccgtctgaaatatcaatttttgacggaaaaagaacaaatgttttaaccagcgttgtgacaaagaagtcacacgcgtttttgatgacccgacgattgagggtccggtcaagtcgcgatcctcgtcgaatgatcaaagccatgtttctttttgacccagcgagtcagacttcatatatgtctgacccgttaattgaaaaactgaaaccacataaggtgacttccgaagaaatggaagtctacggtttcggtggtgaaaggaatggaccaatacggttccattcacctgtctactccgttcaaattcaacggagtgacaataagtgggaggaaatcctactcaatcgaaccgagcaaatttccactccattcaaaatggtggagtggaattcagatgattacacatcggaggagcaggatgttttccaagctctaagtttttctcaggacgaacctgagattctcataagtgctcggcacttttggaaatttttccaaagcaaaaaggaagttttgcctgggttgtttgtcatccaaacaacactgggccctctagttaatggagagtcagacttcggaccaaaggtcccaaatacaggagtgtcaatggtggccattgatgaatccaatcaagggcagatgccagctgttaaagaaattgaatatttctttaatttggaatcgttagggataaaggaagaccccaacgaagatgatgatcaaacagcaatgcagctgtttgacaaatcaatccgtcgtgaaaacggcggacgatattcagttaaatggccgtggaaggaagagacaccgaatcttccttcgaactacagaatggccttttcaaggttaatgtcgactttgaataagctcagacattctcctgaacttctacagcaatataacagcacaatcaacgaccagttatcaaaaggtatcattgaagaggccagggaagcacctggcactcttgagcactacattccgcatcaaggagtgttggctaagggcaaaaaacttcgcgtcgtttatgacgcgagtgctcacacaaggggtacaaacagtttgaatgactgtttgtacagaggtccg

SEQ ID NO: 84543 - DNA, 1531 bp, Heterodera glycines
tttcttccctcttttcccatttcttccactccatcgtccttcttcttcttcttcttctttttctccttcttcagattgttctgtttctgttggcaatgtgtttgatttgcactatgatgtccggcctttgggagcacgtcacgggccgtcagttccgcgtgtttttgccatgggatgagttcgtcgtcagcaccaaacaagtcctttccatgccgacttctttcaatggcatttctttgcccgcctccgacgacgaggaaaccgaccaaaactcagtgggaccgtccaaggcactgatcatcgccgccctccaattcttttcctacatgattttgctgaacaccgtcgtgccaatttcgctatacattaggtaatgccgcagggaatgccccgggcaaacaaaggcaaaatgccaaaggcaaaagcagactctgtccactcgggaatttgactctcgagcaaagcttctccaaatcactcccatttcaaatgccattatttcacgttcactttgtcttactgcattttcttcgtcatactgtatgcatatggttttccctctccccaatggaaagtgtcgaaatgattcggttggcccactcgaaattcattaacaacgacatcaaaatgtacgacgacaaaacggacactccggcacgggcgaggacgagcacactgaacgaagagttgggacaggtgcaatacgtattcagtgacaagacggggacactgacgcagaacataatggcaagaaatgataaaatattataaaaaatatttacatttttttaattttaaaaaataattaaattaatttttattaaaattaaaaattgtaaattttaacaacaaacaaatttaattaattttaaatatttcaaataaatttattttgcttttgtccattttcggtgttcaaaaagtgttcgatcaatggacgaagttatggcgatgtaatgacagaacgtggcgaaattgtgccgattgacgaggagaaggaaacgccgccggcgttggacttttcggacaatcattggcacgagccgcacttccgtttctacgaccggacattggtggaggacacgcggaggggcgtcgaagaagtgcaaattaacatattagtaatatttattactaattaattttaatcaccttttggtccacgaattttggcgtttgttggccatttgccacaccgtaatgccggagagaaagccgggcaaagtgttggaatatcaggcacggcaattccacagcaaaacacccgcatatattcacatgtttaggcacaaagtccggacgaagcggcgctgacatcggcggcacgaaacttcggatttgttttcaaatcgcggacaccaaaatcgattacaatcgaagtgaacggagcggaggaggtgacaacaaggaaaagcaaaaagtcaaaaacaatgccaaaggtgtatgaagtgctgcacatcctcgactttgacatgtgcgcaggagaatgtccgttttggtacgcaatgcgacgagaacggtgctgtactgt

SEQ ID NO: 84544 - DNA, 1645 bp, Heterodera glycines
acaaaatttttaaagaaagtgcaaattttttttttttttttaaataaattagttatttattaagttgctttccaattttcgttcgggaaacggcttcttatttggaacacctttcgttttcatatcagtgacgatacaaaccaacccttcaggcgtttatctattaaatctgctgtcatccccggtggcactacgaaattcattcaagtattagacaattcaatttaaatcaaggaaaattattttagcccccagacgtgtgttggaacgcaccgtttaaaaacaaaatcaggcaaatttacgatgaatggatggtgaatggagagaaagaaacaacggcgtccggaaatatgaaggctccgccaatggagacgtatctgcaatggattgtcaccgcctggaactcactctcgaaggaactgatcgccaaatctttcctgtcatgtggaattacggaggaaattaatggaagtaaagatgagctgatcaatgttttcaaggtcgtctatttgcagttttttgtgtatttttcaagtgttttaaggcggacggagccataccgaatgggcttaagcttctgagccaacgtcgcaatgaagaaaatgttgtgaaagcacttgaactaattgatttaggacaagatgaaagcgatgtctctgtcgacgttgctaatgaataatattttcatcaaatttattttcttttttaataaaattgatcgccccatgaagtctttttttaggggcctttaattagaggggggggccttctaccagaggtgggccttctattttcaacccctccaaaaaggggcctttaattggagggggccttctaccagaggggggccttctattgttcaacccctacaaaaaggggccttaaattagaggggggccttctaccaaggggggggccttcaaatacaggaaatacggtatttggtacatattttgggttagggatgcgatttttaggtaagaaaaatcccagaataggtacttaaataggtaaaaaaaaatctctaaataggtattaaataggtacaaaaattccaaaataggtaccaaaataggtaaataaaaatttttattaacgattttttagtggaaaaaagcaaacaaagagggaaaattttggttctacatatctctttgtaaacgaaaatttaaatatattaatattttcttagataatattgacattttaaattaaaaattttgtcaatagaaaaaataaataaattttgggataaatttttgagaaatttttccaattcttagggtgcatttttgaaaatttttttggtcgattcttatgggtatattttttgattttattgcatttttgttaagaattttttgaaaatccttaaaataggtaaccaaaatgccgaaataggtataaaaataggtacctaggtaataggtagaaaaatcccgaaataggtaaaaataggtattataaaagtgggtgtagaagctccaaaccaagctaaaaactcgttttttatgcttatctcaacgttacaagtgcgcaaaaattttaggtatttaactaaaaatcgcatccctagcaataaaaaataaaatataccccaaagaatcgacccaaaaattttctcaaaaaatacacccctaagaat

SEQ ID NO: 84545 - DNA, 472 bp, Heterodera glycines
atggacaaaaatgaatcagcccaaagtagagacaaacactcactcactcattttccattcacttacggcgcggtggtaaggcgatttgcgacggacggacgacgaaatgtaaacgatgggaaaagcacagcaaaaaaaaaaaaattagggatgggatttttaagggtgaaaaagtccaaaataaggccgtaaataagggcgaaaaattcgcgaaataagggcgaaaaagtcaaatttagggtataatttttaaaattgctgttttttacatgaaataatttcagactaaggcaaacaattttattcactgattgcagtacaaataagctatattttagaaaatttttttcatttcttagggtctatttttgaaaaatttagtgtcgattcataggggtatatttttcgaaatttttttgggtcgattcttaggggtgtatttttcgttttttattgcatttttgttaataaa

SEQ ID NO: 84546 - DNA, 63 bp, Heterodera glycines
gtgacgcgcaaaaaaatcgaattgaatcccttcgcgaagggatttagagaccaaaagggcgac

SEQ ID NO: 84547 - DNA, 1032 bp, Heterodera glycines
atgtctttttcatccgcttcaacagatgatgaatttacagctgaccatggtaaaatagaaaagagtactgtactaactcttttgttaccacctgaaaattattaatattattcagagttatattaaaaattgaaaatccaaaattaaattggttaacaaaatgaaaagagtattaaaatacttataggctatggttttgaaattaattaatttcaggcatatctgaaaattttttaaaattcgagcaattgcggcgttcgagaagaataattgaacaacgggaacgaattctggaaatgcctgcacaaaaaggaaacggtttaaaaaattagtcgtgctacttacttactgtatataatggtggcactttacccctctccaccacacaattatttgggaaaaatcggaatcagagaggacaaattcgtaaattctgcgtgactctgttgtcaaagtgccactgattcgccattaatttcgaactttggccaaacaaaatccaatgaaaaattacattattcaacagatgaaatccccagaaagaatttgccaaagccggaaaaactagtggatcggatgaaagtgttgttgagcacggccaatggggcggacattcactttttggtgggagaggaaaagcaggcgagtttaaaattgaaaaagctaaaaaatcattcattttaattttattttagctttttcgagcacataaacatattctgatgttggcttctgatgtgttcgaagcgatttttcgtattgacgagaaaaatccaactgataaaggcaaaatgaaaattaaaaattattatttccattggattttttcgttaaatttagccatttccgccgaactgtcagaccctgttgagctgcccgatgttgaagcagcagcattcaaagtgctgttgagcttcatctacgcggaagatttgagtgaattaaacggagacgatgcaatcgccgtactttacgcgggtgaaaataattttaattgaaaaatttgatgttttaagatataaatataataaa

SEQ ID NO: 84548 - DNA, 148 bp, Heterodera glycines
atggcatttggcatgtcataccaaatttcagtgagatttgttaagtccaaggagttgggtaagttttcaattttaagtaaaacgatatttttcagaaaaattggtaaagtgtgcaaaataagcaaaattttcactaaaaattaataaa

SEQ ID NO: 84549 - DNA, 1284 bp, Heterodera glycines; identical to SEQ ID NO: 3405

SEQ ID NO: 84550 - DNA, 429 bp, Heterodera glycines
atgctgatctatcgatttgccattccatatttatcttcctcaatttgtgtcgcttgtagtttttggttttgcttaacaatattcaaaaattttctttaaatattcctccagttttttccagctatacatcggttgccgcgtcaaatttcaattgtttcaattagggttgatccccgttcccgagccacgtaattaaaaagccaaaatttgaatccaatttttgccccccgaggggtcgggaagcaatcctagtttcattgcgccaaattctttttgtgccataagtgaattggttatacatatatatatatatatatatatatatatatatatatatatatatatatatattctgtgattttttgaatatagatttataaggatacgtgattaatagataatttacgtaaaaagaaatgaaaaattgaa

SEQ ID NO: 84551 - DNA, 720 bp, Heterodera glycines
atgcattgtttacaaatacgaagaagaaacagaagcaaaatgtgggtgttatttgcctcgacgccttttgtgtctctatttttttaaattcaaaagtcaaataattttaaatgcttcgtttccccaacttttacaggtattcttttacaaaggaagaggcgggaacggaaaccgtttcgtttctaaggctctttgcgagagaagatgcaatgcaagtggattgataaattaaggaaataattaattagtttattgttacataattagtgctatttaagtttatttaaaagtcttaaatagcttccaattaaatattaaaagtggacactataaattaataaatcatattgaaaatttttcattaacgaaacaatttttaaaccgaattcaatttcagaaatgagcaaaaggaagtgatgaggagcaacacagagaagagaaaggaagaaaagagaaaggaagaaaagagaaaatgaaatgagaacattcactgaaaacgcaatggatttttaaagtttgacatgttcataaattggtggtataaattcacggtccgttaacacattaaatggtcaaattgcaaaaagcgcaggaaatagtaattaaaaactttaatttaaattttattttaaatgtaaaatttatgcttcctatcttttggtctaatcagtgaaaaaggaatttcggtaaccccaaccggagaatgaacagcaaaataaa

SEQ ID NO: 84552 - DNA, 1287 bp, Heterodera glycines
atgtccccacaaacaatttatgcaatgggagaaaacccatcagatacagtaagacgacgttgttttgatgtacggcaaaaccaaaacaatgtgtactccgacttttgacaaaaacaagcaacgaaaaacaaccaaatatccagcaatggtagttttgtggtttcttcgaaaaataaaataaaataattccgaagtgcattttctaggctaaaaaaatacgttttgcaaaataattggttttgtctatgattattcatcaagtacttggctttttcagaaatttcatttttattttttctgatgaattaggggttaaaaatgcgttgaaaatgaatccgagctctgatcatgcgaaaccaatgtttttgtctatgattttcatcaaatatcattataaaaaataagccgcagccaagcgggctcgaaccccggaccccgtctcatatgacccacaaaggatcaataactaaatttcaaaaaatcttaaaaaaactaaaagctcgacttctccagatagcttattcgaaagctctttttgtgctctacaacatctgtgtatgagttttttatgcccgattaattttcttaaaattttgaaaaatcaagtacttgatgaaaagtcatggaaaaaatcaatgattttgcaaaatccgagctcagattcgtgatcagcgtatttttttagcctcgaaaatgcattttcgaaatttttaattttatttttcgaagaaaccacaaaactttaccattgccgggctccggttatccataaaaaaaccaaattttatgacatttcaattacaacatcattatttgttccagtgggcgtcccgtcgccggtggcactgcgtgcagtgtcggcacgcggcgtgggcagcggcacgcattggattggcaacgattttgaggactttgacaagcactacaagaccggactgcgtgacgccgtgccggtgtgtgactggtttggtgactgattggtgccgacacgttccattgcatggcaacacaaatttcacggcattttgccaccccccccccttcccttcccaattttaacattagacatggtaataaagacgagtctatagtatactacaaaattttcagattgccgccttctggaagaaattctccgctttcgtcatgatgccactgttggtattcgcgggctagtgagtgcacaacgccaaaaacaattatttaaactcaaaaaaaaacgaaattctttttcagttgcggatggaaggaccatcagaatgtggtgggtgtaacgcacaattttaa

SEQ ID NO: 84553 - DNA, 318 bp, Heterodera glycines
atgattgtactctttttaaccattgttgtaccattccaacaatttttgtacctctccaacaattattgtaccttttcgacagtggttgtacctcttctaatcacttttgtagctcatttaatcacttttgtacctcttctaatcaccgttgtacctcttctaatcacttttgtagctcttttaatcacttttgtacctcttctaatcaccgttgtacctcttctaatcacttttgtagctcttctaatcacttttgtacctcttctaatcaccgttgtacctcttctaatcacttttgtagctcttttaatcactttt

SEQ ID NO: 84554 - DNA, 61 bp, Heterodera glycines
gggcttcgccttcggcttcggcttcgagtgcaaagccgagcttcgcccagccctgatccca

SEQ ID NO: 84555 - DNA, 560 bp, Heterodera glycines
atgtacggttttgttttgaaatggacagaattatggtaaagtacaaaaaatcaaggaaagttagaattgattggactcataaactctcataaaatgccaatgatgagttataattgcaattgaatcatcgtttttcagtcttctcgacgccgcttctcccgggccgagtgatcagcagaagaaagatgaatgaattaattaatcaattaattaatcgattgattgattgatgcgattatgtgaccgaaaatgatgtgatgttacattgtgttattgttattacttaattaccgtatatgctctaattatagcccagtctctattaatcccccagtctctaattatccccccttttctgaggaggttgaaaaataatcccccatgggctataattagagcatatacggtatgttattgtttggatgtgtttgacttttgcttgctcaccgcaaattcgtccatttcctttgtattttatttatatgtaattacataactcattaattgtgattaatcgttgataaaattgctgatgataaaatgtgacgcaacacaataaa

SEQ ID NO: 84556 - DNA, 615 bp, Heterodera glycines
atgaattcaaacagtatccgagccacttcggcactttcgccgacaattctcaccgatctcgaccaattgaattcaatctattccggtgatttgttgcccgatgcgactgttgatgatgattttgatgggccaaatgcaacaatttctgctggccaaatgttgtcaaaatggttgcacagtccgagaaaagatggcatgccgaagcaattgcatttctttttgaaggagccaccaaatatggaatgggccaacactctcaaaaaggtgtggccatattttcgttagccaactgattttgattgcatttaattaatgtccgtccgttttcccattgtttagcattttctccgtgccaatgccatttcttcggtcagttaccaaattcaatttactgttcagcaaccgtcaacgcaaattgtgccatttgaattagcgaacgaacagaccaaggaaaagcggacactgatcaaagcaagcgcaaatgtttgggaagaccgctgggtaatgaaacggtgccaatattgggagacggcggcggttcaatgggcagcccaaaatttggacggatttagcactgtcgagtttcattattacgtcgaagctggcattgggtga

SEQ ID NO: 84557 - DNA, 849 bp, Heterodera glycines
atgattgactgtcgcctctacattcccgtgactgcgcactttcccgaccgagctatcgcagctttcctggatccggaacttcgcatcctctcgctgacagcacaacatgcaagctgtaatagctatcggttccatcatcttcaactgcgaagcaatcccaacatctggttatggattgtctctcgaaccggcacagcacgacgaatgccgaaggactacgtccacgaattgtacgaaacaacgatcaaccaaacgaatagcaatttggaacttcatccattgatcttccacgcatggcaactcgacaatgagtctgacgcgacacgcttcccgcacatcaacgaattcatcaactcggagcagttcaaggacaagctggaacagcacattacggcaaggactgaagctttgggcgcgttgaagggcggaatagaaggattcaccatgcgctggctaaaaggcctgatcgacgaagcaatcacatggtggattcgagtcgcctgcgtttattcaaccttcctcatgctgcgcgacattgttctgccatgcactctggcgtatttgctcaatcccatccgagtgactcttctcagcctcgttggagtacgcccgcatccgacattccgacccaccgtttccaaaccactcgggatcgaagagggaatgccgctgcgtgaaatgccacgaacccccaaaccaccagcgcgcagggcagagcatcgatccatgtcaccaatcaaattggacatgatcgccagaacggctcggtaccaacaaccacgaacacagagccatctcgaccttacagaagactcgccctttgggaggcccagacgaaaagaattctga

SEQ ID NO: 84558 - DNA, 1236 bp, Heterodera glycines
atgcccaaaattcaatctaaatctgcatttattcgtgactggatcaaaaaagttgaaggcgaagaaatttactccattaatggtaaaataatcttctgtcaagtttgtgaacagcaggtaaagacaacaacgacttgcaacaaacaacatcagcaacatgataattttccacagattccatgctcgcaatattgccatttaaaacaacacgcaaaacatcgcgctaatttggaccgattttcaaaaaagaaaagcaagcagcatcagccttttttgacaacaaatgaaaacaaacaggaccaattttctgccgacttttgcaaagcacttgtatcggccaacattcccttttttaaactgaacaatgcagttttgagttcatttttggaaaagtattgtcaacgcgccgtgccggaccaatcaactcttcgaaaaaattatttggtccaacttttttctgaggttatataaattgttcaaaaatttttttttcaattttgatttttagacaatgacaaaaattaaagacgacattggtgaagcatttgtttggatttcagtggacgagactactgataaaatggggcgaatgatggccaatttgttgataggaaaattggatggaaaaatggcatcccccgcacttaatttctgtgaaagcgcttgaaaaggtggacagtggaacaatggcgcgttttgtcaattatttattttagttttttgtagtaatgatttgcattgtttaggtagtgaattctttcaattcggatgatgcagtgtgtatcaaagaatgtcaattgactttcaacaattcagtttggcaggaccttgcttacatccattcaaattttgggcaattggctactgcaattacaaaattggaaacacaaggaatgaccattttcgatgccatggatgtattcacaggcgttcacaatcaaatggacaatgtttatggcgaaaaggcaaacgaaattcgcaaaaaattcgcggacattgtggacaagaaccatggaattgaaaaaatctcccaattttgccagattctgtccgaaaaaaacactgagtcagatgtttctccaaacctttccctttttacaaatttgctcctttgacaccttgtgacgttgaacgatctttttctgtttacaaatcaatgttggccgataatcgtatgcgttttacccccgaaaattttgaaatgtatcttatttgtaactgcaatcagtgaataaa

SEQ ID NO: 84559 - DNA, 1570 bp, Heterodera glycines
atgattttaattaagtgtttgttgtataatacctgggtataaacttcacttcactgaattcattcaaaaattgaaaagaacaatttggtaagcatttcgacacccctctgagctttttgttgtttttctggataagctgaatgagtttaattaaatgattgaagttatggcatcgaaactctcaggcacatcaccatctgcacacaactgaaagcaaaaaagtccgaatttgccatccaagaatccaaaagaatggcaaaaaataaaattaataaagttttagtaaaatccaaaattattttaattgcctaagtgtttcctacaggagaattttggcacatgaacacaaaaaattacatttttctgtattaccaaatgtttaatgtgtaagaaatctgttaaaaagtagggaattggctttgaatgtcggagattactgaagggtcttttgtatcccattattccccataattgcagaatccaacattaacgcctttatttcgggaaagcatacaatttgggaccctcggcgattcggtcttgggtcggatgtgacaaaaagtgatcgagagcaacacccattgagcgtaattgaaaggtcgggggggggggggagatcaaagaaccgcttaatttggtggggcacagataagaaaaaagcgagaaaaaagaatcaaaaataatttttaaataatagatagataaaatatccattattattatttttattatcatgttcgtattttagctcaatttgcgtgtaattttttcttgtaaaaggtcactgaaatgcatgatttcaaattattgcctatttaaaagacttattcaaaggatggaccaaattagtacacaatttcaatcaactcttcatgatgtgctcccgaatatccgatcatttttgcagcttttgtcattcagccattcccagtcccttgtgctcctttcccgtgccactgatcgcgcccgcaatgccatcctggaatggaaaagcgctgctattgcgaattcaatcattttttcaaaaatgagcaaaaacaaaagataatttaaagaacttaatttttgataatcatccatttttagggggggggggggtgtatttttttaatttttatgtcgtttcttagaggaactctttccgttcaattgcgttttgtatggaaacttcttcctgaaacagcaccaaaaaaatgggtaaaatggaaaagtagggtggcgactcactgattcggcacaagaaaagtgcggggacccatcgtaaaatttagtaatttatggtgaaaatctgttaacaaatagtactcaaattttcaatatttttcccggcgccgccagcccctcttcaaaaagttttttggaaaaagcgcaccgaaaaactttttatttattttttaaatttggaatagaattttaaaaattatgatttttgaccacaaacgatggttttttgtcggccaaacgcagattttgaaaattttcagttgacagccctggtttgaggcttctaggtccaactttttcatgccaatggaaattataaaacgtaaaaataatttataaaaataaa

SEQ ID NO: 84560 - DNA, 1129 bp, Heterodera glycines
atggaccgcttcttccccattcggctggaacttttgtcggacccggcggacgacgtgctaatgttggacattatgctgatcacggaaatttgtggccaaccaaaacagcagcaacagttggacattcgcactttgagacttggcgaggaacttaaccaagaagtgggggaggggagtggaaggtcactttcaacagcaaaatccccagttaagctgaagtccgtgtctccttacttggtcaaattcagcgtggccttgcttaagatgttcaaagacgatgacaaattaatcgacgagcgcggcattcacattgtccggtgcgtttttcaccagttgactacaatattgtaaattggtgcttcaattaagacaggtctgcttgttgcttgagccgacggatgtgtttcgttcgttggcattacttctcggcacaatggtgaacatcgacggatttgtccttccgactgcgggacaacagcagccacaactgacaacggccccctcaggcaccaaagacccctttttcgaccttcaatttgttgccaaaatggtcaaaatcctcaaccagattctgatgactaccaggtaaataaatccatttgtcggtcgatagaaaataatattttattttctgtgagctgtttcctctccgtcagcgactccgttgcccggagcaaaacgagtgggccgagttgtttcagaatatgtacaaatgttgggcccatcagcccatctgtttgctgtctttgtatttgctttcgcagaattaccaagtcaatattcaatcgaattttgtccttttttcctcgtaaattattcactgtttcagcccgcgttggagttggtcccgagactttctgagattgaaataacctttgatctgctgacagaggttgatcggcttgtgcaactcatcgagtccccaatccttgcttgtgcgtctgtcttctcgtatatatttcatattttgtttatttttttcagatgttcgaatggatttgcttcatcccgaccaccaaaaatccctttctgcgcttctttctgcccttttgatgttgttgccgcaaagcgaggcctttaatgtcctccaaaagcggcttcaggccgttccccatttggctgttctcga

SEQ ID NO: 84561 - DNA, 437 bp, Heterodera glycines
atgtgtgttaaaagtatcatgtaaaggaaataaataccataaattttaccagattaagcctaggcccaaggaggcctagcctaaccgaggggaaaagtcagtgttttcgttttgagattgcttcgatggtcggcgatattaacgcctttccgtgctctgatgatccaagcattgatgggaaggacgaagaaacaattggaggagggacgaacgacatttctcagcagcgaaatgattgtggggacggggacaaacgatgcttcgaactgtcggtgatggtggccgagcccgggttcagaagacgcggaattgctctcgaggcctgcaagctgatgattgcttacattcttcaacgcataaggggaaagccaaattttatcgcgaaaatcagtgccttgggagggccccaagtttggcactcttccgagatcggctga

SEQ ID NO: 84562 - DNA, 306 bp, Heterodera glycines
atgattcacaatattatattcttcatgggtcagggtcagcgttcaaatccgccgcccatgcccatgcgtccatcaaagcccatccatgcccattccgccgtcaattagactcttctgccgccgtagccgtagccatagccatagccataacgcttttaacgaagagggtgaaattagaaattccggcgccaaaaagtgccgcaattggtcatgcacaaccattaggagaaaaatggagtgccaaaaattaaaaaaatgatacctatcaatttcatattaatagatttttaaggcaaataattgcca

SEQ ID NO: 84563 - DNA, 218 bp, Heterodera glycines
tcgttaaaagcgttatggctatggctatggctacggctacggcggcagaagagtctaattgacggcggaatgggcatggatgggctttgatggacgcatgggcatgggcggcggatttgaacgctgaccctgacccatgaagaatataatattgtgaatcatctgaaatagattatttacaaaatgccattcgcaatgaaataaattttgaataaaaa

SEQ ID NO: 84564 - DNA, 138 bp, Heterodera glycines
catgggcggcggaatgggcatgggcatgggcagcggaatgggcatgggatttggacgctgatccgtgaaattaattgcaccaataatcggattgtcaataaaaagataatggaataaaaataataataaatgttagaa

SEQ ID NO: 84565 - DNA, 101 bp, Heterodera glycines
atgtcttcttcgtccaccatttttgttgttctgctggtaattgccatctgctgctgttcattaacaattgccatgccagcagcggtcaatgaaattgatag

SEQ ID NO: 84566 - DNA, 160 bp, Heterodera glycines
cgagcaactgaaacgagaaaagcgttggggctacggcggtggaatgggcggcggatttggcagtggatttggcggtggaatgggcagtggctttggaatgggcagcggcatgggcatgggatttgttggcggaatgccaatgggaggatttttcgactaa

SEQ ID NO: 84567 - DNA, 695 bp, Heterodera glycines
atgactgctatgaaagtgtccatcattctgctcattcttggcattgtgctcctttcgttggcagttgccatgcccgtagcagaagctgaaaagtattttatgccttttcaatacacatttatttggcctgacttaaacaattttaattttcaaagtttaatttatataaaaataaaatttcgatgtttataattaaagaatttttttaataagaaaatttggcttaaatgtctaatatttttcattatatgtatatatttgaggatttttgcttttttaactgcctttttaaacaatttcaattcatagcaaaattataaaaaaatttaattaatttatttatttttttaatttgtcagcatgcaactgatacgacaaaagcgttggggctacggcggtggaatgggcggcggatttggcagtggatttggcggtggaatgggcaatggctttgggatgggcagcggcatgggctttggtggaggcatgggcagcggaatgggcatgggatttggacgccgctgatgcgtgaaatgatcataaatagattatttaaaatgatccaacattttcctctgctaattaaatggatcaaaagaaaacaaaaaaaatgaaattggaatattagcgatgataatattttcaatgatataaaaaatatttcttttagttctaattaatttattttgaataaa

SEQ ID NO: 84568 - DNA, 543 bp, Heterodera glycines
atgactgctatgaaagtgtccatcattctgctcattcttggcattgtgctcctttcgttggcagttgccatgcccgtagcagaagctgaaaagtattttatgcctttaaaataaacaattttaattttccaaattcttatttattttcaaataaaatttcgcttctgcattgcagaattcaaaaaatgtattttaattatatttttaaaaaatttgtcagcatgcaattgatacgacaaaagcgttggggctacggcggtggaatgggcggcggatttggcagtggatttggcggtggaatgggcagtggctttggaatgggcagcggcatgggcatgggatttggtggcggaatgccaatgggaggatttttcggctaatgaaatggatcaaaagaaaaaatgaagtagtatatttgcgaccatatattttttattatgtaaaagtacatttgcttttttaaaaaaaaaattggaaatcattggtcaatgtcaatttcaagggcattgttaaaaactacaaagaaaatacacagattttcaa

SEQ ID NO: 84569 - DNA, 420 bp, Heterodera glycines
atgcgaataatgcgaaaggcgaaatgcgaaaagcgaaacctcggcccatccctgatgtttagttaccaaaaattaactcaattaaaaagagctcatcactttcactccttggcatttgatttgataaattcgactggggatggccctggtatatcttggctttatttattattagaatcaaattggatatcctgatatcctattcattagggcttatattttatttggaaaaacctggggtaccttccgggttttaagagtcggtgccggtttttggcgattttttctaggtggcagtacacttaacttctaatcattctaacactcattatttttaattattttagaattttttcaagattacgcgtcatttaatatatgttcttgagcaactttttaattaattattgacgaaggtaa

SEQ ID NO: 84570 - DNA, 430 bp, Heterodera glycines
atgtcttctttgtccaccattcttgttcttctgctgataatttccatttgcttgtcattaacaattgccatgccagcagtggacaatcaaattgaaaggtataaattttattttttatttttggcattccatttttctttctaatggctgtgccagaccaattacggcactttttgacaccggaattaaattccgccaatcaattaaattttaagtgttgcacttcgtcaaaagcgttatgactatggctatggctatggctacggctacggcggcagaagagtctaattgacggcggaatgggcatggatgggctttgatggacgcatgggcatgggcagcggatttgaacgctgaccctgacccatgaagaatataatattgtgaatcatctgaaatagattatttacaaaatgccattcgcaatgaa

SEQ ID NO: 84571 - DNA, 807 bp, Heterodera glycines
atgaattcatcaatgacagtatctcttctgctaatgttgatcattggcactgctcttttggcattgacaaatggcatgccaaacgcagagtaaaaaaatagagacaaataaaaataaaaataaaactaattgaaatataaattataaataatcaaatcctttttaataaactttttaaaattatttaatttttttgaataattaattttgttcacaaaattttaacagaaatttatatacaataaattattttaattcatttatcttcaaaataattatcaattcaatttctggttaaatataaataaaaaacgcaaataaaatttaataaaaaggaaaataacattttattaattgtttaaaataattgattgaaagaaaaaatatatttaatttttagtgtttcattgacgcgcgaaaagcgtggcagttacggtagtggcagttatggtggtagcagttacggtggtggacccagcggtggtggtgacgcatttggaagcggaggggccgcaggtttcggaagcggaattggcaacggtttcggaagcggaggcggcagcggttttggaagcggaggcggaaatggtttcggaactgggggtggcagctacggtggtggcagttacggtggtggtagttacggtaaaaggcgatgatggaaaaacattggtccatttgtgacgaggaaattgcaatgtgatcatcctttcttcccgatcactgcttttccaaatttatttgttgtattatttatacaaaattttaatgaaaatgaattactgctaattgatgggatggagtaaa

SEQ ID NO: 84572 - DNA, 1421 bp, Heterodera glycines
gtcaatggagcaaggaaggagcctatacaataagcgctaatcgagctttgatggaaatgctggccacacaattactgccatttaattttgtggacggagagggatttcgttgttttattgaaaagttgcagccaaaatacacaattccacacagaaaacactttgcattacatgaactgccgggtagttttgacgcaataaaagtactcaatttgcttttttactttgaaaaattttttatttaagaagtttgttatcgcggaattggattctatttacaaaatagggctaaccagcgatggatggacctcaaaggataaccgtcactctttaatctctgttaccggacattttttggacaaaaaatttcgaccaacattttatgttcttagtacaaaaccaataaagggtaatttaaaaataactaacaaatcaaaaaaaaaacaaaattaagggcgacatacagcagatgcaatttctgcttttattcgtgaaagcttgaacgaatttaaaatttcggaggacaaaatctcagcaataacacgcgacactgaaaatacaatgaaaaaagtttcaaaagatttgggatttgaatcaatcgattgcgctgcccatgtacttcaattggtaattaaaatttaaaaaatttaaatttcttttttaggtgtgacttaaaaaaattgatgaagaagaaagattgaaggaacttattgaaaatgtcaaaaaatttgttcgaaaagtacgaaagtcaagggttttgacagaaaattagctgaattccaatccaatgaagaaataccacaaacggttttgctaaaaaacacagaggtaattatattattttttaaaattaattacaaaaaatcatttactctgcttttacagaaccgaaacgcttcaagttccattatcattccactctttaaagttaattatttaacaatatatcttaatctaaatagcatttaggctattacgtttgcattacgtaaagagggggagaatcgattttcaaatatcaaaaatacaattgcattggccattgaaaagagactaaaccaattcgagaaccaaaaatatttggtgatttcgacccttcttgatccacggtttaaggctgtttatttggattgcaatcacgtagatggctacaaaaattggctaatcagtgaaatcgagagttatcacaatgaaaattacgtaatgaaatatttattttgagtttatattttaatttttagtataccgatgagttgttagttgaaaataatgcaagcgggtcaagttcaaccgacattttttctcaatttgaaaaagatgctgaattcgaccaattaattaatacagtaaagctttctttttaaacaatcgcattattgttcatttcacaggcaccatcgcccagcccatcagcgttagaa

SEQ ID NO: 84573 - DNA, 1877 bp, Heterodera glycines
atgtacgacttctgtccgttggcgttgtacagcggcgtgcgcgcgcgaatgcagcgggcgctgcgctcactgctgcaccaaccgcaccacaacctgcgccttttcgtcgacggcaacgtggtgcacgaggacggctgcgcgttcgaaccgcacgcactcggcgccgcacttttccccgccggggcctccgacggcggcggcggccatgggcccagcgacggagcgaacattgacacttttgtgtccgcggtgtgtgtgctttgtggtttttatttcgcaaatatttggtgatcatgggcaggattttcggaattttacgggatttacttgaattgataattaaaacgattattaaaatgattgatactcactttctctgtttgatgcacgcacacactccattaaaaaacgaaaaatggcgcgaaattcacaaaaatttttgaattaaaaaaaaataataaaaaaatatttcaggaaaaaaaattaaactatgaacgatgggactttggcttacaaatagaatttctttcacaaattatatattttaaaacaaaatatatataaatatatatccttcagatctgttgcattttggccggtgttgcggacgaccggcgggagaagtttcggctgaccgagggcagtgtgctgaacaatttgctgaccgctcaacgcattgacaccgtcggaatggtgcgggccttcgagctgtacaagagtttgccggacgatgtgcaggtgaacacacactgatgttttttcaatcctaaccattaggccatggaatttttattcaaaaatcggattttttttttgaaattttaaaaaaattttgaaaatcttatattattagtagaaaaaaagagaaaatttaggaaacagaaaatgtccactacgaagattttttctgattacggaggccatacaattctgtcacatttcacaatattattcgaactttttccgtttacgtcattttttttaaatttcaaaattcttagtaagcaaatcttttgggttagttttaaaaaaaactaattttaaatgcttatttgaatttagaatcagttgcgcagaaaggcaaatttgttgacgcgctcctacaaaagttttccgtcgttgccaataaattttttggaatttctggagaaggaggacccgcgctcgttggtggagcgctatttgctggccgcgacaatcaaagactgctcactgatggtgagcacatttacacgtttaacaaatgaaactctcagttttttgccattcattttattcactgtcaaaaatttagcgaatttcccaataaaaaattacaaaaaaaaaaattaaaattttgtccgatttccatttttttttatataaaacaattcgaattgggaattttgctccgtcccggctgctaatataatccaaatccagacacattttagcatgcattataaaacaccaaataatttgtttaggttagcattcggcttgtccatgagcatgccatcacaaatgaaatggttgctcatttacggcaattaaataataaattgtttttttaatcattttgtgcattttactgtagatttctgctgtcggcgacaggggttacattcgtgtgcatgggctggacggacggtcatttcactttgcatattcggcatgtgctttatgggggcattttaaattttaatccaattttttaaataatttttttttttaattcttcggccgattacaaattattttggttttatttacagattcgtatcgtcgatttggacccgaagtcggcaaagaatttggagaacagttacaagcgtttgatggccggcatccgtctgttacatgccaatccgcacattcatccgccatgcgttgcctaa

SEQ ID NO: 84574 - DNA, 1543 bp, Heterodera glycines
atgagagccgagaattcgttggttgctgtgaaaatgttgcctggtcaattttttattaaattaattaaataaaaatatttatttttatttgtgatttatagaatatgctgatgatttgtcaaaaagtgattttctgcgtgagattgggctgatgaaatcgttgggtttccatgaacgtcttgttaatatgcttgcatgtgtcacacaatcggagccatattgcttaattgttgaatattgctgtgatgggtgggtcaatttggtgctaggtcgtttcgtaaaactgccaattacagatttttcgagaaaattcaccataatttttcttaagcacaataaaattaaataatcttgatatcatacgattcagctggataaagaaatcattaaaataaattctttaaatcaatttaaaactaaaattaaactccttaacgtataaaatgaccggaaaagtgaattatctctttaattaaagatattatatattttatatagtgatttggttttattaatcattgacctcattcttatatttaattttgttgtgatttctttttttgtttaatgtttaatccatattactcgaggacgatttaatctatgacacgtccgcagagtaagtggattactcccttttgtggacttttttctttttttgcataaataaataaataaaagatcacttcctccgtcccttttgagcgttacttcgccaaagttttgactatttttaaatgaaaaataaatttatttgccccattttaaagggcttcccccattcggcacggaatggaattgcttttggtggactcggatttgacaattgttgacggtgaagtgacaccaacagcagcagaagcattagcagtgggaggaaacggtgagcgaaaatggaaaaaatgccgaaggacaaaatgtcaaaggatggttattaatggcgggcatttaaatttcaatttttctcatttctaattccctattacaatcccccccccaaccaaattccagcagaaaatgccatcccttccgttgctgctgtcgttgtgccatcgtcgccttcccccgtcgacgccgccgtcgttttcgcgttccccgtttttccttcaccgtccccgcttttgccatgtcccgccttcgatgttgacgtcgtgccctgcgcgtggtggaaacgcccgtcggcgagtgcacacgcaacgcgcgcttcatgcagcgcgtgtgcaggcgcatgtgcggcttttgcgacgcgcggccgacggaaaaacatttggaatttaaatttttgaaattcaattagaaaaatttatatgcaaatttatgattttgatcaatcaatcactaattcataattgatatttgtacaatgaaaaaagtcactcataaatcagaaaaattacagaatattttaaacagtaagaaacagaatcagcagaagagtggcgctagttggaacagttactgtagcttctttgtttcacaacaattgttcacattcaatttacctttacggagagaaactaggcgtaaaatgaaggagatgaaa

SEQ ID NO: 84575 - DNA, 812 bp, Heterodera glycines
atgtcgtcgtccaattcacacaatcagtcgttgttgttgtctgctgctgctggtggtggtcatcagctacaaaggccgccgccaccgccagtttctgtccaatccgccgccacacattcatcagttgcgacaaatgcaacaacacaacaacaccagcaacaacaacaccgtttcctcacaaatcatcaacagcaacaaaatgtttctggaacaactgctgcggttgtcaagcaacaacagcaacaagcacaacaacagctcctgaacagcagcagcaccatgggagcagcagaattgagcagtattttgcagcagacgcatcagcagcaacaggtgtttgttgctttgtgattggagttcggttttggagctggaacctgaatcaagattcaaataaatttttggcagtttggctttttttttgctggatcaagatttttgtccaggatagttcttgttcaatctgaaaactcaaatacggaaaaacaaacaaacaaatgaatagaaaagtcactcattcggaaaatacattaaaaaggggtccggaaagcggttttttaaacaaaatctttaaattttcaaaatttttgatccccaacccccctattactgaaccatttgaatgttttatttgaattttcttcaaatccatcgcttgctgatttgcttctgttcatagtttcagcttcaaaatgctggcgttccattgctcggtcttcccgcccaactgctcgcatcaggcatagagaactcgaacattcttcaaccaaatgctctgcgtatggtgcccggcacccaatacgccataatgg

SEQ ID NO: 84576 - DNA, 112 bp, Heterodera glycines
atgttcggcatcaatgccaaaattctttcgtccaaaagtggtgctgatttggcagaacatgcccgggctctcatttatcattttgagaatggcggagcccctgtgatgattg

SEQ ID NO: 84577 - DNA, 1040 bp, Heterodera glycines
atggtctattggacggacaatgccgaggcacggctcattgaatggcaaaagatgacggtgtacggacgacgggtcattttcccggaattgaagcacgattggttctatttgtactgtggtgagaagagaaagaaattatggcacaatggacgaagtgccaaaaaaggaaaatgccaatttaaatttcaaaggctataaacggagcggcgggtgtttcattttaattggcatttaaattagcaacattttcagctaatgcctgctttcaaaatggccaacgttcgcctctttcccgtgcaattttcgtaaaaaccgataaaatggaaacgaacaaaaaatgtgagaaggacggcacagaaaaagaaaggattcccttccctcccattcattcattgccaaggcattggccattcgcgcaccatcgaagtgatggaagcgattggacagcgcgaggaatgggcggacgaaagaacgccgctgctaaagcgtgccaaatacgcctcattcgccgcgtgacagcaaattgaaagagaaaagcaagcacaaagcgagaacattcccaaaacaaaacaagttttgcattttattcacactttttctaacttgcgtataaatcggactcattaatttgtaagcgaaagttaattagtgccaaaaagggacattggcactgacaatgagtgaattagcagcccgggaaggcagcagaaggggtgggtgggcaagtggaattttgaaatcaaagggaaaaactttttttacaatgacaacaaaattattttcaaacaaaatttagggaagaaagtccggcggtgccaatcgaagcagaagaaatgctttttctttctcgaaaattcttaaaaagataaagaattgctaactgatttttgtaaaaatgccaatttttgtggttttcaagtcaaattcatcctgagatttcttttctttttttgaattttgttaaatggccaaccaaaggacaaaaatgaatatataatttattcatttgaaaatggggaatcgggggcaaatgaaataaa

SEQ ID NO: 84578 - DNA, 135 bp, Heterodera glycines
taaaataataatgcacaataataataatatttatttcatttgcccccgattccccattttcaaatgaataaattatatattcatttttgtcctttggttggccatttaacaaaattcaaaaaaagaaaagaaatc

SEQ ID NO: 84579 - DNA, 239 bp, Heterodera glycines
  unsure (1)..(239): unsure at all n locations
gatgggtctgcaattgctgtcctccgttttcncgaccgctctttgggtggagacgctcttgggcacttgtgcgacggtgtgccgcccacgccgttcgtttcgcccactgaactcggcttcaccgtcttcaagcatctgtgtctgtcgcctgatcaaagggcgctgtactgtctggccagtggtccccggagggcttcttctctgatcagattggacttgtccactgattgtcacacagt

SEQ ID NO: 84580 - DNA, 162 bp, Heterodera glycines
atgccggacgtggacggcactttgctgcgccatgcggacattgccgcgcacggtgacttcgtctacgcggtgcaagagattcactcgaagaaggacgaaagtgcggaaccgacgaacaaattggtgcgagtgaatgtgcgggacggacacagcgaagtcgtg

SEQ ID NO: 84581 - DNA, 80 bp, Heterodera glycines; identical to SEQ ID NO: 51817

SEQ ID NO: 84582 - DNA, 80 bp, Heterodera glycines; identical to SEQ ID NO: 51817

SEQ ID NO: 84583 - DNA, 800 bp, Heterodera glycines
atgaaaaatacggtaaacaattcgaaattctattgtaagtgattaaaaattgaaacaattttagattattccaacaatgaaaatgaggagttggcagaaatgctcatgacctttttgaagggtgttgctttgaatggctttatctcatcagattttgaacggacttttagaataaattcgacaatttgctttttgaaaagatttattcaagaaatgatcaatttggagtctagccaaaacagaaaaatcagcaaagaaaataccaaattgatcaacaattactgggcagttatggtgaaaaaagagacggaggacgaaaaaagggaacaaatctgtaaactgtggcaatttggggcgcaaatgtaccgaaatttggcacaaattatggcacaaaatgaaatttttgagaaattttcattcgaaaatcgaattgataaaatatttggcgaggttattttcgcaatttatttttattatcatctttttgaattaattatttttctataaaatttagttaaataattcttatgaaaatgactgtggcacggccgggcaaaaacagcaaatattcaacagattatgcgaacccgatttaattttcattatcaatggtctaaatttggcaaaacttctggaaattaacgaaaatttgcgttactttttctgccacgaaattgaaatgggaaacgcaaaaatgtttttgggtaatttcatcgaagacgaagcgatgacgaggctggatgaccaattcccacaaataatgcgactaggcatggattttaatttaaaaaaagggatag

SEQ ID NO: 84584 - DNA, 65 bp, Heterodera glycines
ccgggactcaaatgtcccgctcaggccaagaattttttctatttccgggaaaaaatagaaatttt

SEQ ID NO: 84585 - DNA, 2425 bp, Heterodera glycines
atggccgagttggacaaactcggtcaaagtgatggcgatgacggaaatgttggtgcagcagagcacggtgccgcagacgcaattgataagcgatcattgttgcttagcgagcctgttgaaataaccgtcacatgcctaactccaccgaccggggcaggccggccacgtttctacccttatcagcattggggatacaatgatcaacatcgcataaggattaaaaacttgggcgacaactattgtctcttccatgctttggtcgctgttcgggcgtaccatgaccctgctttgttcaaagaatggatgtcagcggggcggcaactgcaacaaccccaacagcataacatgggccaattgacgctgatgctcgatttttgcgaaaacaaagaagcatttgagctcatgatcaacaaccggcagatgatgtgttccgctgttcgccgtctgatgaattatgctggcatagctgaaggtctagctgcatatggattggaccacattcaaattgtacaagactattgggtgagtaagaaatgttgagcaaacagtacgctttaatttttattacatcaggaccaacgttttaccgacctttatcgcattgtgctcttcgaagaccggtctgaggagttgcccaagccaatttggaagggcccatcagggcgaagtattgatgttgtgctgtttctggccaacggtcactatgacggcatcaaaaaaatcaactgtttcttcaagctggccaaacaatattgtgtagactgtgagtgttcgtacgatcgtgctttgaaacacactcttgagtgcatcagacgctgtccccaatgcgcaaagagttagcttttgtgtttgattcagtactttatacttttacataaaaatcgattaagtcggaccagggcatccatgcgcaaaggaacctggcgtcaaaattctatgtcccgcatgcaatcgtttctttttcgctcatggttgctatgatggccaccaagggcagacatgttcattgctcaaacgatgcaattgttgcttgcgcacgtatcagcgggatccaaaacgtccgcataaatgtttcaccaagtactgtacccgttgcaaggtcagagtatcaagccttttcagttgttatacaacaatattacttcattaccaggtttaccatggcaaagacacgggatgctacattaagaaattacgcattccaatggaaaagcagcggtatagaatggtcttctgggatacggaaacgcggcttgagcccgcggaaggtggtcaacaacaaattcacaaagtcaacttcttgtctgcacgtgttagctgcaccgagtgtgccgattccaacctgggtcaatttgatgattgtgaaatttgcatgaatgaggatggggaagtggagcgaaacaaatattggtatttggataggttttttcctaaaaactacaccatctctccaaaaaggagtgaagctgaagaagatgagcctattgccagctttgtggaatggataatgagggcatggaatgaaaaattcaacacttatatttgggtaaaaatggaccattgctagcaatttatgataccaaaaaattattcccaaggcacacaatgcttccagatttgacggtcatttcatccttcgttatctgggtgagaccagaagaagaccggacgttgtgatgaacgggctaaaaatttttgaatttcgtcttcaacattcgcgcggccgttcacttctaatttggcgtgactcatgcctgctcctaccaataaggcttgatggactgaaagggacatttgaccttgactgcccggacaagccctttttcccatacggtttcaatcgaaggtttctcatcatcaatgaatcggaatttatgacgactgatcacatacttgttaagagaaaattatgctattcggttgccgcatcttccaccgaaagagacctattttcccggatcaatgaagcaggcaaagctagaaaaatttgaccaatggtaaatttccatacaactgctgcaacagcagcaaaatatgtttttcccaaaaggtacgaagagaatcgacagacgcccttctttcttcctgaagagctgcgttactactgcgaaaatgacacggagattctgatgaaatccattcttcaatttcgtcgaattttgttgcgtgacgtgaccagtggatatgatgcgttgcccattagttgtacaattgctaggtgacataaccgtgtcttttatccacaattcatgaacacaaaatttagcctttgtatgaacatttttcgtggaatgttcatgaaggacaatcagctggccattgtgccagaggccgggtacgaaagaaatgacagagcaagtgttctggtatctttggttacgttttcatgaaactagctctttattatcataattaaggcaataaa

SEQ ID NO: 84586 - DNA, 366 bp, Heterodera glycines
atgaaacgacactgggacttccgctcaatgagctgtccgcctgctcaacagtcagcatcattactgccacaacaacaacttgaagaaattcagcaaggtgaggggagcgcgacaggagcggaaggcagcagccagtcagacagcagtgatcagtattttcggcaaatcgcccactcagtgcacaaacttgaacgtttctctgtctcacgccacatcaccgaatttgtgctgaatgcccgggtcgaagaaccggatgaggtgttgcgaaatgcgttagaaatgctgatggcacgcgcaatccataactcggagcagcaaagtggacgaaaagttgtcaaaattggcatcacgttgcagggcagagga

SEQ ID NO: 84587 - DNA, 804 bp, Heterodera glycines
atgtcgacagcgttggaccgttttaaactcgagagtggcactgccggacaaaagcgcaccagcgaaggaataccagctaagacaaagcagctgaaggaagtgatagacttcaagagcccgggaatattttttgttgaggccaaaattgcaaatcttcagtacaaaatttataatgtaagagggaggaggagcgtctgttcctgctgatgagctcctatttgcaggcgtgccccttaaagcagcgaggattgtgctgtcgacggaagttaaacgacgaaatgtattgtgagacgtgtgaacacactgcaaaatcgccgctcaaaaatttgtttttgaggatcgagtttaaagattgcgctcatcccgaatgcacgcaatacgcgaccatgtttgcccactcggctgaaaaatatttacagcttaaggctgtcgaaattgccgaaatgagcgaaagggagcctgagaaattggctaatgcattggaagccaaactggagaagcaagtggtcgccaaattgactatcaaagtttgtttatggcaattctttaaatttatttttgagtacattccgctgtcaggagtcaaaaggcgattttgaaaatcgcgatttcgattggataatcacgtccatcttcacggacagcaacaacaaagaccatgaaaaggcagcggaagcgacaaagaaaacggcggagaaagaggatggagaagaatcggaggatgaagatggacaagaaattcaattggttggggaagtaaaaccaatcaattccgaggcctttaaaaaagcaaaaaagaactga

SEQ ID NO: 84588 - DNA, 384 bp, Heterodera glycines
  unsure (1)..(384): unsure at all n locations
atggtggtgcgtctcaagatgtacattgagacagcccaagaaaacttgggcaaagagctggcggaccaaagtgtccgtgcagatctaatcgcggagagacaaaatctctgcaaaacaatttctcttttggagaaatacaacggaaaatgggaagccattttcctgagagtgaagggacaagctcttcaagatgaagagcaaaattacagagacttcaaaccagaaggcaaggccttcatgcattgggggtcgaccaagcccngagggcttgtcgacaccattgaaggagctttaggcctctcggagcttgggggatgcaattccccagccaaatcagccagcacaagttgtgcagcaggcaccagtggtgcatcagcgtcatga

SEQ ID NO: 84589 - DNA, 1163 bp, Heterodera glycines
aaacaattgctgataattgccaagagggaactgtcgaaagtgaccaagaaattgttggatgatgaactgtcactcatatccgcgtccattggatgtagcttttacgttggctctaatcacggagtcacgggaacggactttctcggcctgacgtctctggaagtgttcaacaaaaaattggaaaaagtccttgccgaacgtgtcgattacgaagacccaaatgagattgaacgcgcggtgagaagtgagttttggcatattctttaacaaattgcgttcaaattttactggatcatcataaccccatcaattctctctctctctctttccatttcccaactaatattataaagttgcgaccccgacttcggggttggaaaagtcggggtttggggagaaaattccccgactaaatttgtcggggtggcaggagaaatctaaaaaatgtcgggggcaaaattttcataaaaagtcggaaaaagataaagaaaaatttccagaacaaaaatgtcttaaaaactcatttaaggacttttccattttatttgaagtgcaattgacgactttcgtaaaaccccgacatttcgggggcccaaccctagattaaagtgaaacgaaaaaaagtcgaattttaaataaactgacattcgataaacagtgaaatttatgagaaaattttcgataaatttacctccttcgccaattgccactggccatttttatctcttctgtataaagacaaaattttgcaacaaaaattgaattaaattaatgataattattttaattttcaaattccagttcttgtctgtcaagtcaatattgggattggttttctcgacattcggactgagacggattttgtcaatggacctgagcatatttttttacattatccgtcgtttttgtatcttccattttcaatctacaaaaaattcacaagattataattatctgaacacccgaactatataaaacaatatgaaattctgaaatgttcagttttatctagggttgcgaccccgaaccctgactttaacttttgagtgtactgtatgcttcgcaaactgtatgtaaatcactaacatttaaataatgataatacttttacgaaaagtttgatatgttttaatttgcaatgtcattgtttttgttttatcaca

SEQ ID NO: 84590 - DNA, 455 bp, Heterodera glycines
aaaataataataagcttgtactaccatactaatcagaatttttagaatgtgtgctgatatatgccatactgctgtgaaaaattgttataactccattcagagaagagatagaaaaaaaaaaataaaaataggtttagagagcccatgaacagctgaatcggatgcaagtaccgccgttgctgtacgcctaacagttggtgagcaatgacggaaaattgcttaaaaaagaaaccaaacaaactcatcaattgtttgctcccgttgacaaaccgaagggtacattggggcaatggatgttgggctaccgtatcagttattaaaatttttgtttttcaaaaaggatactaaaactgggataaccccattcagagacaagtcaaaaaaaataataataggcttggactaccatactaattagaatttttagaatgtgtctgttaaatgcaaaactgttg

SEQ ID NO: 84591 - DNA, 712 bp, Heterodera glycines
atggtcaacggcactttggcaaaaatgattcattttgtgccaccatcgaatgatgacaaaatgctcccatttttccaaattgaaaaacccaaatattcaaaattcataaccaaccgtacaaaattgttaccctaccaagatgatccgaacaaattcagtcagtaaaaataaatttaattttttaaaaattaattttggcactttttaagacagacctgacccatgtgatgaatacggcgcagattgcgtgccgatcagaaatttgttgttgaaaattgaggaattggaaaactgtggaaagaacgaaagcgaaaacgatgcggtaaaataaaaataaaaatttaaaaatatatttaaaaattattttagatgttcgaaatgccagaatgggccccaccacttccgccaccgatgaccatgaaaaagccatccgaaacattaatatgtgaaggggatttgttttgtgacaaacaaacgctgcgagaacagtacaaccgattgagggagagtgagttaaatttaaaaattcaattaattaatttaaaattaaaaataaataaaattaaaaaatcgaaaattaaaattcacagtttgtggaatgaagcccgaagaggtggaaagtcagcgcgaaaaacgacaatacaacccatacgaaaaatggaccgaatcaccgatcaaaatcgcattcgacgaaagagctcgtaataattaa

SEQ ID NO: 84592 - DNA, 350 bp, Heterodera glycines
atgcccttgcttatttatccttgtctgaaatccgttaattccccaattattattattattattgtaattattactcaaatgtgccgagctcttatcctttcggggtcccctgattcatttgccaggttataatgaatatttacaaatttgaaaataaaccgttccaatttttaaaatatgcattttaggtacccaaaatgggcacaaaccttcgaaaatgaacttagttttgaattcaaaacgcgcatgcccaatgcattactgctgtatacagatgatggcaagtttaaatgataaaacaaacagaaatttatacaataatttttgataaatatttttatcaattttta

SEQ ID NO: 84593 - DNA, 436 bp, Heterodera glycines
atgccattggattgttttgttggtggctttccgggcagcttttcctatacaggagatggatatttttggaccaatgcttcctatagagggaatatgctcccagcattttcgcgagatgatgtcatcggatgtggcatttgtttgaccactcggcgctttattttcacgaaaaatggccaacgattgggttggaataattgtaaattaaacagacaaatcacttaccaattgattaagccaattagactgattgggattatttaattatcatagtgaagtaatttttatataaaaattcagacaccgccaaattagccttctgttcttccattttgctttttccatgcgtttctttgcgtgactccgatgatacaattgatgcgaatttcgggccaaccttcaattcaatctttccgcatgaaaattttgtaataaa

SEQ ID NO: 84594 - DNA, 220 bp, Heterodera glycines
atgtcactttcaaatgttcacacaaatttggtacaaaatggaaaaggtagaaaattaaaaaatattacataatttatgaaaattttttcactttttttatatttcagaaactaatgacccattcgctttttcggctgctgaccacccacaaaatgttggcaacaacgaatcatcgtcatccattgagcagaaaagggtcagcaaaattgtggaaaaataa

SEQ ID NO: 84595 - DNA, 1044 bp, Heterodera glycines
atgaggaggagggagggtaccatccgtaccataaccgagtggggttttttaaattttctacttaaaaatttttcacattttttaaaattaattttcatttttcagcacttataaagtgcaaatccgctaagggaagtgaggaagggatgattgaaggaagtgaatatcagtgctatgatgattcaaaatgcggtgccattttctgttcagccgataaaaatgaatttcgaagaatttttttattaactttcgggaaaaatgggggccaaccgaagaaaaaaaaaactagacgattgagtcgaatgggtaacgccaaatgggcgccaaatggaaaaatctttcgttttttagattcttatttattttttttttttcgcatttttcgctcatttttaggcaatattttggggaacgaatggagttgctacattggttactacggtgaacaatactatatcggactcagaacggtcgaatttaaattgcggccccgtgccaacaatgattagtggaagtgcacagtccactttggagcgatcggtgtgaacatgagcaatgcattgtttgtgccgccgttggtcaaaagtgtgtaaacagtagaggtgtgccgtgactgaaaaaacccgtgaaccgtgaccgtaaattggtcccgtaaatcatgaccgtgaccgtgatccaaaaaacccgtgaattcacggtaaccgtgaccgtgaccgtgaattttttgagtttattttttctcggtcggtaaattttttgctttttacaccgtctttttttctggtatgattttacaaaaaaaaaatttaaaaaagggggtccaggggagctgatagacgctgccgcaaaaaattttgaaaattagactctaattgtgcgcaatttttgtccaaaaaatgaccaaattttgcgaatttgagccaattttttatgaaataatatgttttgggggcccggcggtgccgatatgcgccgccgggggtaaaatttaaaatttgagtgcggcacacctctagtaaacagcgtggaaaattataaaattaa

SEQ ID NO: 84596 - DNA, 855 bp, Heterodera glycines
atggctggagggggtgagctgctccctaataaaagtattatttcatccgatttgaaaaatgtctaacaatgatcagggggtgataaaaacgatttgacactttatttaaaatttaattaattcactcatcacagcaatgaagtgcaaaaaagccaagcaaagtgaggaagggatgctggtaaaagataatgaggaacaaatcagcagcagcaacatttgctacagttacaatggaaaatgcggcgtcattttctgttcagcggaaaatggtacaataaataaatttatttaatttatattttagtcggaaagcgaaaaaacggtggaaatttactcgcaattaaagcacaaaaattgggcactcatcgattaaaaacgtggcttttgtgaaaaagtgttaaattttcttaattatgccaaaaaattaaaataaaaaatataccaaaaaaaatatttccaaattggcgacgccaaaacggttcgtcaggctggaatgtccccgaccgaaggttccaattaaaaaaaggattggaattgggagggaggtcagtcagctaatgccagtgttgaatttttataaagttttataagaaacccgtccagaattggtcaattgagttttttgaaacgtttaagagctttaaaaaaatctcaaaattacaaaaaattcgtaaaaattacacattactgtaattggcttattgagatttttaaattattaaaattaaattgttattttttaatttgttgtttaattgtagaatgcgaatgcgcgggcattcgcaacagtgttgaaagtgcattgatgatgatgatgatcgggctgatcactagtataaattaatattttttaaa

SEQ ID NO: 84597 - DNA, 876 bp, Heterodera glycines
atgggtgctctatgcacccacaaagtttcattcggaaatcccacggacacctggggaccttcctttgtaagcagaattttatctaattttatttaaaaagttaagaggaaaatattgtaaatgtaattcattacaaatattatttttaattattcttattatagaatgcaagtcaattaatgcattatgatttcagaaataaatatttgttatcaaaaaatgcaaaaattgttgcttcattagaattgattcagcagggcaaaacatcgcaaaggaactgaaattttgcagcaaaatacgttggcacaggggcaaagcttctaaaatttcaaagataaatccttcttttgagatttgaacgtgaaattttcaaaacagtcggaatttcatagcgtttaaaatattaagattgggatggcctttttgatgattcaactattttttgcgactttcgaaggaaattatacgaaaccaaacactcattttttggcatttttctataaaaggaaaaaatccttttcaaaaaatcaatttttaattccggcggaagagagaatttggaaatctatgaaaaaaatttcgtagaatctttcaaaaaagttttcttttaagaaaattgagaacattaaaactcgctaatttttcatttgttatttctctgtaaattatatttttgagtgcttttggctcacaattttgtcacctgtttctttactttttcggacttttgtgtcaccgttttgtaatttttggtgcttttcttgactatttaaaatgtgtactcgaaaaatcgtttccaccgtcataagcactgatttaagccgtcttaaaaattaattctcctcaaaaatgattagttttgatatgcataataaa

SEQ ID NO: 84598 - DNA, 1563 bp, Heterodera glycines
atgaatgaacattcgatggaactgagctcaaagtcggacatttgggccattggcattatcgccatcgaaatggcggcaattgggacggaattcaaagggacgcacgacgaagagccggagaaggatgccaaagaaattgtaaggcgaaaacaaaaaatggaattatgactaagctattaaaataattaaatttaattaaatcaaaattttatttttaattataatttgtttgtaggtgccaaaagtttacggagtgatcgaagtattgtggcgaatttacattcaaaatacaaatgacatagacgaacgaatggaaaagaattgggacgaattctatgccaatttctccgtgctcctaagcatccgagcgcattttccgcgcctttttcatatcgttacagtaattattgtttaatttacatattttttagttttttaaagctattttatttctatatgattgagcttgtttttttgcatgtttcaggccgttttggtgtacgatcccgagcgaaggccaacggctaatggcattttggattttttggacgggaaatgccgcttcgagtcaatgcaaaatgcgccgaggcttctcccatggctaacattggaccaattcaaaatgcatttgcggaagcgaaagattttgctcaaaaaagagtcgaaggaatctgatgggtcaagcagcaaagaattgctgaaaaaacagatggaggaattgaaaacactgctaaggttggcaaatgccaaagaatgggtgccgggagagaagcagagggaaaagccatgcgacacaacgacaaacaaagcgatgaacagccaacggcacaaccagcggaagaacggaggggacacgacgccgcgggcaacgaatgcgcgaagtgccaaaacgcaaagcgcgcgctggaaagacagtgaatggagggaaatgggaggggcaccagggcagggcgtaattacttaaattacggctttttggactcccgtatatacggatttcggtaattgaaaatccagttacgcccagtcttgcgaagcacacacattttatgtacatttttaagggctcgcaaacatcgagaaaaccattgggttgagtctgtcgccaagaattcaatacgaactcgacaaaatcatcaccgaagaattcttgggaatctttgaaaatttgcaagagtcattttacaacagcaattttgaagtaaagcgaaaaaagggaatatttaaaatggccctatttttcagatattcgaactgatgggccaaaactttgcggcacttttgtggtcaatgggctacggcaaactgctggaacaattggacaaagtgagcgaacgaaacaaaagtgaggcggaaatgctgaaaagtgttgtggactcagtgcgcggacaattggggacggaatgggaggaaatttaccaaatggcggcgcaatacgaatgtgacgagggcgacaagacgtacacggacataatccaccagatcagcgccctttacctgtacgaactgatgaacaaacagttgctggaccagttcagcgccggaagcgaacttaatgacgcg

SEQ ID NO: 84599 - DNA, 674 bp, Heterodera glycines
atggacgatgaagagggaaaattggcgcctgaatctgaattggactatgacgaactaaaccgaggggatttctacctaatcggaggcgtccatggtaagtttcgaacttttttgtgaattggtaaacatataaaatcttgaaagttgtgaaagactgaattactaaaaacatataaattcaattttagacccgatcagtcttcgttttgaagctgcgatccgtgaccaaaatgccgtcgaacataaaagtgccgaacgctactactggtacaaaatggcggaatgctttggcgacgaggaagccatgaagaacattctgcacgcgcagaatgtccaacaggccgaagaggccatgaaaaacatcaaaggcttcgacgttgccgaatgggacaaagtcagttggaatgagaaacattggtggaaaggaaaagggttttcaggtcaaacttaaacattgggaggacggacagcgactgaagcttgagcaagtccgttggatcgaaaatttgctggtgctgaccaaaaccacctacttggccattgcctctgaagacaaagtctcccctcccccatcggtccactttttactgtccatttttgcagtttttcggcactggatggcgcaagaatcgcgacgaggccaacaaaccgatcttttgggatgggaagaatga

SEQ ID NO: 84600 - DNA, 1141 bp, Heterodera glycines
atggcgtcggcgctgggggcccttccgccccaatcgctgccagcgtaagtgccaaaacgaatcagcagcagcaaccaacgctttgtggcagcggaggagggaacgcgcagcatttaatggccaatccgttggacagttccgccgcggccgcaactttggcagccgcggcaatgcaagcgatgcagcaacaacaacagcacaaccacaacaacaacagcaggacagagacaaacggagaagcgggtggggggacaagcaacagcaataacacaacggcagaggcacaaagtgagagggaattggacaattagggaggggagggaaatggacggatcacttggggaaagaagtcaattagggaaaggggaattaaggaaacaggtcaattaggtaagagtgattcggaaaaggactgaccaattagagaaaggatgaaaagtgatcaatgaaatatcttacaacggcgcaatttgagatagaggaaaggattcgctgaaaataattttggtggcctttcctttccctcccaattcattggttcagttaggacgatgaaacaatcgcaacaaaatgacgacattttcggagaagcattgctcaaagggacaatggcacagttgcaaaggacgtgcccatcgggagaagaaatgttggagagaaaagcaccgacagacatcgaaaggatcgcgggaagcggagaaaatggcactggcgtcattcggcacggcttttgcacaaaagcgatgaaaatggcaccgacggagagaacaaatgacggcacaacggaaagccgagggatgggagcaatggaaatgttcagcagaatgccgccaactggagaaatgggcgccattttttatctaagcaatagcaacagaatcacggaaaactgaagacaaaacgggggagaaaaaatatatccgaattttatataatttctaataccctgagatggacaaatcaattgaaaaattgatccttttaaacgaattcaattagcccagacagttgaccaaacccctggcacagtttattcaacagttttcgttttgaacagtcagtctttgaccagaaaataacataatgtggtgaaaattggctcatcctttcgttgaataatgtgaaaatgtccaataataaa

SEQ ID NO: 84601 - DNA, 330 bp, Heterodera glycines
atgccaatgccaatgccattgccatcttttggcttcattgttttctccgtgtcaacaataacgatcattgtggtgtatgtatgttgtagtttatgaatatatatcaattattattgtagtgtctattgtaatttatattatatatatcagggatgttggtcgtttgtatttcgtatttcgagtttttagggcgtttcgaatacgtatttcatatttttgtatttcgtattttcgcatgaaatacgaacgtattggggtgaggtgttgagagaaaaattattatttacagcagattgggagaaaattaaattttattaaaaaaataataaa

SEQ ID NO: 84602 - DNA, 391 bp, Heterodera glycines
atgaacgcgcaattcgctgctgtgccgatgctgacaactgttttgctggtttgtgtattgctgttgttcccaacaatttgtgaagcgcgtcccaaggaagataaagcgaaaggaaagactcacaaaactgagaacacagattcccgcccggttattctcgaaagttgggattgtaatacaaatgcaaaaacaacagcaccatccacatcagaaaacttacaaccacatcatacaacaaactcacccgttagcaatcaaattaatggcttgccaaaaagcatgttcatgccacgcaaatagaacaaatcaggttagtcatcagtgagtgccaaaacagttatcgatcccagaaaatttttggttcaactcaggcacagccgttttgatgaaa

SEQ ID NO: 84603 - DNA, 791 bp, Heterodera glycines
gaaagttttcgatgagaattgtttgaacaagaatgcggtgattgatagggcgtcggaattttataaaattgcgtgtgatcataaaattgaattatgtgatattgttgaatattcggaagaggcgattagattgatatacagggacaaggaggactttgtgatggagcacaagtcgagcaacataatcattagtttatggtgagaaaaaataaattttatttttatttaaaatttttcaggacgacgagtatggcgaggttaaaattattggaattcatgagagaagcggagagccatggcggggagattttgtacacggacacggacagtatttttgttaggcacgatcgggatgtggagccgatcacgacggggaaatatttgggagaaatgagcgaggaatacggtggctatgagattgaagaatattgctgtggaggggcgaagcagtatgccttgaagatgagaagcaaacagacgggggagattgaatacgttatgaagattagagggattacgttcgatgtggataataagaagactttgcactacgatacattcaaggagatggttctgaattatggaaaaggggaggtggacccggctttctttgtctacaagaatgattttgggttagtttttaaaaaatatttccaaaattaataccaatatttaggccgacgagggattcaaaactggtgacgagggagaagcacaaaatgtacaagccggtctgccagaaggggataatcgatgaagaacttaatgtgatgccatttggattttgttaa

SEQ ID NO: 84604 - DNA, 1023 bp, Heterodera glycines
tcgtcactttttcagtcttttcaatgaaatcgaccaaaacaaggacacctatctcaactcgctgggttggatgagaataaacaattgctgaaattcggaatttgttttccaattttcccacagaattcaacgacattcgtccgcttgtgctggccaaagcggagaacgcggcgctgcgatatttgcaaaatgtggacacggaccacaacggacagctgagtctgacggaagcgcagaattacattctgaaggagtacgggatcagcaacagggacgtggaacgcatctggcgattggtggtgccgagcagtggggacgaggtgggaagggcacaacaggaggaggaggaagggagagcagagggaggggagagagggaagagaaagagagataaactgattaaactgtgataaatgcgctcaagatggatgccgtgctgttcagcaagctgaggaggcgcattcgcggcatgagcattcgcttggccagacaaatcttgaaggtgatccgttgtgttgaggaacggtgggctaagggaaatggccaaatttagggggccgatcgagacgaggatggccaagtcaatctgagggaggcgcaactgatcggtatcattttataatggagggactcacaatgaccaattgaagcatgccgttaattcagcatttgagcaagagggcatcggaccgggcgaagtggtggaaatgttgggtgagttgaggggaaattgggagagagggaggaaacatggagggatgaaatatgtgacaaaagtgagagagacagagagagacagagagaggagggaatgttaatttaataataaaatataatgataaaaataattattaaaaatggattaagatttaaaccatccgatcagttctaaagctgtgtttctcctatcgtttctcttttgcttaagccagcgttgacgacaacaatgacggaatgctgaacgcacccgaatttgcggactttgagcgaattgtgcgggcgcgggcggggaaacgtcgaaaa

SEQ ID NO: 84605 - DNA, 752 bp, Heterodera glycines
atggcttctggccttcaaatggggccaacttctcccgtgccgctttggcctccaaattggcgcccccttccgtcgacggtgatttctctccccttttttctgctttttattgtccgccttcagttaatggccaattccctcgtcgtcctccgccgccgccccaatttgtggccaacaatggtccgctgatccgcgcacccgacggacaatttgttttggcgtcagtcagtaactttttgggctttataggaaattattcaattcgcagttgatttttattttctggacgaaattctcatagcttttgctttgtccgaatgggcttatcagatcaaatttattttctgatcgctcaaatgttttcgaccaaatgccgtcctcctccccccccccctctctttgtgttgacttttgttcgttcttcgctcaaattcttcctcagattcttccccaacaacatcttgctgccttttctaatggccaaatccaacaacaaatcgcctcccaaatttcagcgtcaaataatggtaaaagaaacgaattcccgatcattttattggattgccttagtatctgatcaaaatgcatcttcgtctccacctccgatcgacggtgtccccccgtcagaagtgccgccttctccgcccgatgagtcggcttcaaccactgacactttgccaacttcgcccctctcggcgccagtggacaaaagcgtcgatttggacggggacggggcattgtcactgggcgaa

SEQ ID NO: 84606 - DNA, 330 bp, Heterodera glycines
atgaattccgggcaggccaatttgatatcaacatgttcagtgatgcaaaaaagcatttctcacgccccacgagagccatcaataaaggaggagccgatgggcggtgaatcggcaaaggatgacgacaacggcagcgacaaattctggtcgatggcaacgaagacgacgtcgcaacatggggaagcgccagcaattccaacgatgaccaaaaaaagaacgtccattgaattgtgcgaagcaacacaaattggacacagggaagaacttggccaattggtttctccaaaaccagcgaccgatcgtacagcaccgaccgccgatttcatgtaa

SEQ ID NO: 84607 - DNA, 1828 bp, Heterodera glycines
  unsure (1)..(1828): unsure at all n locations
tagatccgtgcacaggtgaacatgggtgatcgatttgaatacgttggaataatttttaaatactaattaattctaaaaaatgtatttttttgccgtaaaaaaaactaataatctttttgctcaaatgccaaaagtatcctggataagatttattgaaacacagatgatcaacgagtacaagaagatggcaggaggtgaatatgttggcttcaacaatgccgattttctatccgaagctgctactgctgatcgcaattttgcgcttgcctattttatgaaggttagttactgtaaatggcatccaagacgtgtagaaatttctaaatttacaaaaaactatataaaaattttctaaaatttttaatagtcctaattttgaaagtggaaatcgctaatcaactcccaaatatttatcggaaatcgaattccggaaaattgaaatagagaattccgcactactgctgtatagatttgtaaaaatttttgacaaattttcaggaaaatggctgttttccggaggagtcaaaacacacaagcctcaaggaaacattggatttctattttcaattgtgttcattggaagtcaattgtgagggggcggcagtgattgctgcaacattggcaaacggaggtgcccaaaattatttaattggcattaattgaaattcaaaataatatttaatgaagcttgtaggtcaattaaaactttaacattaatttgttggctctgtaaagaaaagtctttttctataaataataccatgaataaattttacgaagaaattatttaaaatacttgtagctaccgactattttttgaatactgttctagttaaggatactgtatttttattcttatgtcaaaattattaaaatataatataaattgtaaagagatacaatgagagactaacttcaagagcgtgttaggagactcgggtcttgtcagggttttctcaggatcccaatccgggtatttttttttgaaaaatgcacccagactagaagtccagaaaacaagatttaatccggatgaaatttccaaatttaaatttttactaattaaattcccaaaattatttaattaggcgtctgtccgttgaccggcgagcgttgcattggctcccgcccgtgccgcgatgtgctgtcgctgatgaactcgtgcggcatgtacgactactcgggccaattcgcgttccatgtggggctgccggccaagtcgggcgtgtccggcgtgaccattgttgtggtgccaaatctgatgggcattgcgctgtggtcgcccccgttggaccgtatgggcaattcgtgccgcggggtccatttctgcaaaaagttgattgaccgcttcaatttccacaactacgattcgttggcacataacgaatcccaggtgttttttgatttattggtctatatgaatgttaagaaattttcgaaaaattgatatgtaagtgtgctagtgcgtttcttaaaaactgcaaaccctaagttctataactcagaaaaatttttaaaaatacagtaaaaaaattttttggcaaaatttagagaagactttaaaaaagttaagaatttttatttttttaaattccaatttctagaatttctctttagaaaattctaattttctctaagaaaatttttaagtcaaaatttctttcatgaagcttcattaaaaattttacacttttcagtcggggtggtccaccnccattttccgtgcaacccgagtaaattgatttaaaaattttcgtcattttttcatataaatttaattgaaaattcttccgcgcaccttgacggcactgctggaataatccacaat

SEQ ID NO: 84608 - DNA, 1522 bp, Heterodera glycines
  unsure (1)..(1522): unsure at all n locations
atgaaattaataatttctaatgtcagtagcgggtgagagctttggttgccccgttcggccagttcaaagaatttctattttttgtgaataggaatacaacgatgaaaaagcattttaatttaaatttgctttaatatcattaaatttaaagatcaagaaaataggcatcgctttggaaagtgacgccaattaaccgatgagaaacggataacatttagttgtgttggtgagcatcgcttgaaacagagttaccaattttgcaatttaattcattccccaccaatgcatatccaaacgcaaaaaatgaatatttttaaaatttattaaaaaataattaaagctggaatttttttttattcgaaaaattttctgcagaaattttaattcttattcacaagcaatgtcaaaaaacgactacgccctcacaaagaaatgtaaataaaattgaaaattttggaaatttcatagaaattcttcaatttttcagctttatctgcggcgactgttggcttttggtgttcgattttcttgcgccttctcagctcggccttgaaattgcgctggtcaaccgccgttttaactgcatcgtcgacgaacacttcaaaacacgcaaatggaaattgggcggaatgcaaatttaccacgaaattggagagaatggcaccaaacaaatgcaaattgtcaattccgatggaaatccattgccaatcctgcaaaatccgttgtcgaacaaagtcatcggattccgaggcatttcgatcgcgtaaaaaattgattaatttggaatttttcatctacattctctttttttcagctacatcgatcaaaatgtcatcgcatttcttcgccgttttcaccgttttttcgccatttgttcaacggatttgtacattaccactggcaatgaccgcattttggaatttattttgctcaacatttggccaatgcttcgccattctatgcatctgatgatgtttttgaataccatcgcttttcgccgtttgcgccaattggccccgtcacttctcaacgattgtccatcccttcactatgtttctttcggtgacgtcattctccccgaatttccgcccgatgaaagtgccaatgcgtcggatggacaagcggtgaccaaatggttgttcacgcctcgtccggatggtctgcccaagtggctcagatactctgtgaattcaccggtgaatcaatggtcgtcaacgatggaacagtttaaagcggtgattatccctatttaattggattttctatgatttttttgtcccattttcaggcattttccaatgcttcttctccggttacttttcgcatttgttttcactttccgccttctccgcttgactccgttgtgccaattgatcggatcaacgaagtgactggagagaaattgtatcttctgcaatcagcaaatgacttttggctcacccgttgtccaattggatgggatggaagaaagtgggaanatatgancgatgcattcaaagctcgacagaacccatttgacatt

SEQ ID NO: 84609 - DNA, 474 bp, Heterodera glycines
atgtggtcaaatcccccggatgatgatcataatcatgccgacccgaccgaccattgccgatgttttggtgaacgactgaaacagtgccatgagcacggagctggtgttcccaaagtcctgatcatcccacggcgcggtgcccgaatcgcgcatgatcagcatgaaggcgaacgcgaacgtggcaagggttgggatccaaatgatggtggtcttaaatcggatggaaaaatttcggacggagaagtcctgaagactttttttttgcccttcgggtcaaaaataaagttcctaaaaaaagttttctccagtgtattttaaaattttcagcgccgggagaaaaaaaaaacaggaatttgtagccatttttcgccaaaaaataactaattttttggcattttgtgatcaaatttacgaaaaatggtaagattggggtccgacggtgccgtttggggaggcattggaaataataataaa

SEQ ID NO: 84610 - DNA, 1425 bp, Heterodera glycines
atgatcggtgaggttgaggccaacgacattttgggccgtaaggcgtgggtggccaactttttgctgattctgttcgaaattatcaccgtcattctgctgatgaatttgatggtgtcgctggcggtcggcgacgtcaacgaattgcgaatgaacgcggaggagcgaatgttgcgaatcaaagtgggacaaatagcaatgaaaaaaaaggaaaattttggaaaattgggaaaaatttatttgggagaatttgattttcaaggttagcctaactaagtgaaaattatgatttattttcctaaattccattgaaaaatgctaattttcgtccaaatttttggtattaattttaaaaaataaaagcaaaatttgaaaaaatggctagaatacgatttcggagccagctaaatgaaaatttcaaaatccaattgcttttaattattactcattaaagttttttttaatttttgccaaaattcgtagtatatttctatttttttaaataaagtaataaaaaaataaaacaaattctttgcattttaattcaaaaataaattaatgaattttttcaatttaaaatccaattaattctatgtgttgtaaataattttgagaaaaatatttttaaaaattttggaactcaatgcttaaaacatactttcaaaaatgaatagtaaaatccaaaatttatttaaatttaaaatccatttaatttttacgttcgaaatatcaaattttaattgttttggaaaaataattaggaaattttggaatcaatgcttaaaattaattctttaatgcaatttatttaattatgctttaaaatatgtttttgttactataatttttttttgaattttagacttaaaatccgtttaattcttttgctcaaaatactaaatttaattagttttagggaaataatattatgaaaataaatatttttgggtgctgtaattttaatttaaaattttttgaatttaaaatccaattaattccgggaactaaattttttaattgatttgggaaataatgttaaaaatcttagagttcaatgctaaagattaattactttaaaaggaaatttgtttaattatactgtaaaattttgggttactgtaataattttttgaattttaaattttttgaaggttaacttttgcatcgaagctcttcatttgtccgaacaaatctcatttctgaatggctttgtgcaagtgcttcatcggagccaaaccaacaacattttggtcatttacaaggccgaaaacattgtgcactctcggctgatgccaaacattcgtaagaaatgccaaaaaaaattgcctatcaaagaaatccgacggaattttgcaaaattttgtgtgttaaaattcggatttttacaaaattttcaattctacagaatttatggtttctgaaacctaa

SEQ ID NO: 84611 - DNA, 2218 bp, Heterodera glycines
  unsure (1)..(2218): unsure at all n locations
tccatttacaaagaggtcgagcagtacaacagcagcaacaatgctaacgatgatggcattggctcgtcggcacctcccnccactcttggactgtgtaaagcgtgtgctcgagtttgtcaacaaattgaacagcgaaaaggttgaggtttatggagttgttgaggcaacattttgtttattgtggattgtcgttgttgtcgttgattgtattttaccctggaccaccaaaaaattcaaaagaaaaagtaaatcaaaaatagatttttttttcaaaatcaaattttatgaaagatcatggataaactcgatttatcgtgttactcatgcactagaattccgatgctctcaaaattttgaaaatcgtaattctattcatctctggtgtcatatattttaaaaattttgtttgtttgtttttgcaggtgcttactcaattgtacgactggttcctttccaattgctccgttaacaccacaatttcatcgccaatggtggcggaccgtctcgccaaggcgtacacactggcacatggactcagttcggcgttgtgccatctccaccatcacattggcacttttgttgcccaattggcctcattccatgcccattggagcgcggtcggctgccatctgttgaccaacggctttgtcaatccaattccaattgcggacagacaaaagggtggcgatgaagcggatgctaaacgaacggaagctggcgatggttttggcgatggcgatttggcaccgaatgccaccgatgtgtcttcccaagtggagaacatggaacaaattgaggggcttaaggtacctggattatataatttaatcccaatttctgtttttattattttattgacacattattgagtcaaaagttaggcatggagataaaaaataaataattttgtttattgtaggaaaaataggcttattgttaggcttaaaaatttttcttttttaccaaggctgtacattacggtttgatcacaatatcaaaaattgtaaggaatttgcatagttttcataattttcaaagaagaaaaaaaacatacaaaaaaattaatgtcatggagaggactcgaacttgcatgctttttttttcgtatttctgactgatccattctcaaatttgcaacagaatgacggaaatgatcaacaacaacagcaacaaatgaatgacgagcaaaacaatgctgatgctgatcagcaacaacaacaacagcagcagaaaatggacgaaacggaccaaccaattgatgtggatgatgactttgccggctgtttggaggcattggacgcaggggaagacgacgagcagggaattggtgggttataataacgggggcaactcattttccccctcctcgccgcggtgcaccccaaaacacagccgggaataaatttttaaaattttttaaacttagaattcttagaaaactaagaaaaaaaatttctaaaaattttcaagcaatttttttttttttgtaatttaatgatgaatttaaaaaaaatttgtttttcaaaatttttattattttttttttactagacttaaaaaactaaggaatttagcgaaaaggaatagtgaataaataaacaagcaatttcccaacgcagatggtgaagacaatgatgatgaccagcagcaacgggaagacattgatgatcgcgctgattggaattttggtgaggttgaggagccggaagagacgcagttggacccaaaattgtgggaagatgagcagaacgacgaacagcaagcggaggagcgggagcaacatgacaacaatgagacaatggatcacgcaaagggtcagtaattgggcacaaaaagggcattttgaatgattttttcgctaaatttaggtgatcagcgacagatgttggacgatgatgatgcatgtgccaagaatgacgacaccaacgctgatcagcaacagatggatcaatcacaagtggaaggggcggataaagcggactggacagctgcccaagatgaggctggtgacaaggcaaaacccacggcagcggatgaacatgctgatgaagaacatggcgatgcggagggtgatgaccaacaacagaacgaaggcgatgttgacaatgagcagcagcagcaggaaatagacgaggcgaaccaacagcagcagcagaaggttgacggcgaagacaattttgccggtcaattggattgtagggcacggaggagggaaatg

SEQ ID NO: 84612 - DNA, 712 bp, Heterodera glycines
atggcaccgcctaagcgcacaaatgcttttaaaagtgaatatgccaatgaatttcaggggatcacaaaaagcaaggcaggagatgaatttgcgcattgcatcccatgcaattttgacatttctttgttgtccactggaaaaacggccattcctcatcatctgaagacggaaaaacacaagaaagcagcgaaagctgcaaattccgcaaaggcaattacggcattcatgccaagcaaatcggcaccaacgaatttggaccgtcaaacagcagcagcgaaggttgaattacaaattaaatcagaaataacttttatttgtttaggtgcttgggcatatcacaccgcgcgccatgcgcaaagctttaaatcggccgattgtgtctcagatttgttgtcaaaaatttttcctgattcaaaaattgcggcaaattacggatcaaaacaaaataaatgcgcagcaattattacaagttttcataaaattaaaggataaataaatcgagaataatttaggagtacttgctccgcattctgtctccattacgttgcaggaaatgactgggcttccgttttcactttcgattgactcatcaaatcataaaaccaccaaactttttcctttggtggttcgttacttcaatccaaaaaaaggaattgccgtcaaattgatcgacttagaggaattgagtggagagacttcggccgaagtttga

SEQ ID NO: 84613 - DNA, 1366 bp, Heterodera glycines
atggattttatattgaccaaagtgccaaatgtggaaatttattggcaatgtgagattgaggaaatgctgaccaaggaccaacagatgaagcagaaattcaatgaatatacgggagatggcggaccaatcaatattcgtgcttgttttatgggtggaaggacgggtgcgctgaagctttaccatgaagtgaaagcggatgaggaaattagctattatgactttaccagtctctacccatttattaagtaagataatttttttatatcaaaaacaagaatttttagttgcgtaacaaattatcctgttggacatccgacacttcatgtcccatgtgaagaagttgactggcagagaccagaggacaatccttatcctcttgcaattctcaaagtgttcgtcatccctccccgcaaaatcgatattccagtattgccagtcaaagtcggtgataggctatgttttccgctctgcatgagttgttgcaaaaaatacccaaatggaggtgtcaaagaagcatacagttgccagcatactgacaaacaaagaggatggatcagcacatgtacctcattggaggtgcaaatttgttttaaatattaaaaaaaaacttttgtagcttaatgtcgctttggaggagggctacagagttaacatgcttttgcgcgttctcgagtacgacaggagtgacaacaaactttttcggccatatatgagtgaatttatggtccaaaagatacatgcctcggggtttgatgagaatattcacggaaattttgaagtcgaagaacagttcatagcggaatgttgggaccaatttggtataaaaattgatcgaacaaagatggtacccaacaagggaaagcgggctttggccaaattagctgtaaataatttatgtaagtttaattataattaaaaaagtttttttaaagataaaattttagggggtcgtttttcacttcgtaattacggactctcccaaactcttataactgatgacccatcagaactgggaaattatctagacaaccggaaaattgaagtgacaggacttgacatgctgactccagagaggattttgatcagctataaccagaagaaggattgggtccaggaacatccctgttcaaatgtggtcatttcacttttcacaacttctgcagctcgcctacatttgttaaaagcaatgcagatagtcgctcgtactcctggttgcattcttttatacactggtaaatacactttattaattataatttaaaaaaatttttaagatacggattcattgatttatgttcatccaaaaggaagaaatccattgaaaacgggacctcacttgggtcagtttactgacgaattcccaaag

SEQ ID NO: 84614 - DNA, 2243 bp, Heterodera glycines
atgaaaaattcttcttcttctcctccctctaaacgttctcgtcgtttttttattgaagagttacttcgggaaccatataatgaactttcacctccccgaaaaaacccaaaagattacatcaaaaaacttgattcggaaatcgagcatgttccaaagttccaatgggtcaaaaacaaatcgcgcttcattatcaaagacgtccctgctgaccccgaagcactgctaagcggcatattccagcactgtatggatgaggcaattgttgacagtcaccaaagtggagttgagccaactcatctcggctgcattgtttccagccagctgcttacgtcagatatttggattcctattcgacaacttactcctgatacaattaacacgattttaaatcgttttaacgacgtagctcaaagcaaaaagcaggatggtgtgacactttggggcgaaccatttactgttaccgtgacaacagttaatcgaaatggtctaccagagaaaagacaactaaaaggaggtgcagcacggaaattggcgcccgttcaccatagaattcacccaaactgtctaattaaagtttctaataaaataaatattttatttaaaaaattttattttagatacaaaattttgatgctgacaattattgtttattttattcgatgcaagcagcaatggtccgtgcagttggtgatcttgattttcgtcgctttcacgactatatcaatggcaacaatggaatgaggggaaaacttaaacatgatgctttggaaatgatgcgtgccattaatgcaccagccggtcaaccaaattacgatgcggaagtttatgtgccgagaattgttgactggtggaatggagaaaaattttctgatcagtggaaagttaaaacgtttgtcttcggatcgacgggccattacaaacctttattcaaatatggaccagtagactatggtgtgccgattattctttactttgaagacggacattttaacggagtgcaaaaaagtgggaacttattcggtgtgccttattgtctgagttgtgaaaagacttatgaccgaccaaaaaggcatatgaaaagttgcaaggctcgatgtataaaatggtaattacaaaaagattaattatttatttgagaattttagctcccaaatgggtccaaaattcccgtgtaagccaactcatggtttccgacaaaaatgcaacggatgcaataagttattttttaacaatatatgctatcagcatcatctttcgtctgaatattgcaaaatgagcaaagaatgcaaacattgcggtgtagtttgggacttgagaaataacactcagaatggacgagaggtgtttaaactaatatgatgttgaataatagtaaatttagggacatatatgcaatgaacggtggtgcgagaattgtcaaattttccacaatttcgagagagggtgtttcattcgtcctttggagccaaatttaaaaaaagaaacacaagactggcgactggtcgttttcgaccttgagacaatgcagcacgaaccagtaaattgcgaaattcctgagcgacggaaacaccaggtcaactttgtcaccgcaaaagttgcctgccccggttgcatttcttccggacaatggaagaacactttgcgtggaaaaaaatgcaatatttgtggccatcatcggacgattacattcagccaaatgccctttcatggcacaatggtggacaagcaggtcattgaccgacaccccctagtttccttcgtcaaatggattctgtataatttaccaaaacaatgcgacactattgcctactcacattttggaggacgttttgacatggttttggtgttccgtgaattgttcatggaaggacttaatccatcaatgattaaaaatggcaacagattgctcgaaatgaaggtaaaaaaatttctgtttaataattatttttatttttgaaggtcaaatgtcggaagagtttaaacccaaatgtcatctttcgagactcgtggaatttggttccgggtccattagcctcaatggtcccaatgtttggcttggatgtgcaggacaaaccgttcttcccacatttggcgaaccggccggaaaattacggttgtcaaatatttccaacgaaagcgaattatttggccgacggaatgaatcctgagaagcgtaaggaatttgacagatggcattcccaaaaccataatatgccgttcctgcttgatgaagcattggccag

SEQ ID NO: 84615 - DNA, 1132 bp, Heterodera glycines
atggcttcgaagtttattctcgtaccagaagaaatttatcatggcttaacaagcagtgattcgggaaacataaacttgggttttactaagcatgcgctggaaagaacaaaaagaaagagggagaatgtgacagcaaaaaatattcattataaccaagaattgtctcgttatctccacctgagagatgaacaccaaaatcatccatcaaaagtagaaattgccaaagggttgaaggcactaatcaaaaagggagatgagagtgatgaagacgaacaaatttttaatttgggatcagaaagatcacaaccccctgcttcacaaattcgcagacagcgccggcctcatcatcattaccacgacgatgaggaaatgccattactaccagactctccacccttccaagctgtaaataggggtcaaaaaaggaaagcaaatgagtattattcctcatgggaagagggagctaagcggcaactcatacagcaatatgagccggcttcttcctctaaaatagctaaaagacaaaggagaaaactgccgccaatctcatggcgaagtgaagaaaaaattccagcagaagttcaacaggaagaaccatttcaaccagccccccaaccatctatccccatacactctcaagttaacagaaaacgaaaagcacagcaaaatttaaatgatgttcgagaagcaaaaaagagccttattgattcggaagagttaagacatcctcctcttcaacaagaggcttctcttcgttttaaacagaaaacgacaaacaaacccagagtaacacaaccgcagcattcaacttcttcgaccttggcaacgagaagtaatcctccgagggatttactggccgaggcagccgctgccccattaccggatgatgatgaccatgatttggaactcttacaacaacctaataattcgactcagaaccagccactcccacctgaacctccattgcctagtaaaacaaaaaagcggaaaagcagtaaaaatgaagaagaaaccgaaaaaaaaagaatcagagttggctcaagaaaaagattgtcttcaccaaatgttatcaaaaatcaaccaaaaagacaaaagaacccgtttggcgaagcactttccgaagagcagcgtc

SEQ ID NO: 84616 - DNA, 285 bp, Heterodera glycines
gcaagtactcgaataaaatcaaaatttttatgtacaatttctccaattttacaaaaggccattttttggaatgaaaatgatcttttttccttcttcttcgtcgtctttaaatatgccgctccttaatcgcagcagggggtttgaagcagcatgcatatcaacaacgagatagccatagggtttattagtcgcaatacgataggcagaaaggaaataatccagttttcccggaaaaagttgcactccaatgttacgaatcgccagtgcggaatttggagctcgcat

SEQ ID NO: 84617 - DNA, 1865 bp, Heterodera glycines
atgtcttcaggacttctgtacgttaattatttcccttttttctaatggttcacatttcttcttttgcttaaattttaaattttcaaaattcagaggcttacaattagcttcattggatttaaaataaaatttcacttttggcttccctccctttccattcaattcatttttcagttggggtgacgtgtgtcttcttctgctgttggtcgtctgtgccagcattctttggttcttttttgagcatgtcaaaaaacgacggcgccctcccaaaaaagaaatgtaaataaaattaaagcaaaaaatttttgaaaattttgaaaatattcttcgaatttttcagctttatctgcgccgattgttggcttttggtgttcgactttcttgcgccttctcaacttggcctcgaaattgcactgatcagccgtcgatttgacttctacgtggacgaacatttcaaaacgcgcaaatggatgttgaacaaaaaattgctaattacatggaaaattgtcggaaatggccccaagcaaatgcaaattgacgatgccgatggaaatccattgccaatcccgcaaaatccgttgccgaacaaagtgatcggattcagcaaatgcattcagatcaagtaaaaactgattagattgaaatttttcataattttctgcacttttcagctacatcgatcaaaatgtcatcgaatttctccaccgttttcaccgtcttttccccatttgctcaatattcttggacattaccactgaaaatgttcgcattttggactactttttgctccacatttggccaatgttccgcgattccattcgttttctgtttttgaacgccttcatttttcgccgtttccgtcaattggccccgtcaatgctcagcgattgtccatctctcttcggtgttgccgtgtcaaataacgacattgtgcccgcttttccgcccgatgacagtgccatggcgtcggatggtcaagcggtggccaaatggttgttgacgccccatccgaacggtgtgccgaagcggttcaaatgctctgttaattcaatggaggaggagcaatggacgtcaacgatggaacaattcaaaacggtggattatccctatttaattgggttttcgatgattttttgtcccattttttaggcattttccaatgcttcttctccggctacttttcgcattcactttccgtcgtcttctccgcttgacttcgttgtggaatttgatctgatcaaccaagcgactggggagcaattgacacttgaagaatatgaaggtggtttttggctcgagcgttgtccaattggatgggatgataagaaatgggatgtattgaacgaaacgaacccaattgacatttggatcgaagatggcggatacgacgacgggtgaacaattttaaaatgattttacatatgagtccaatcaccatttttgcttacaattagactttgtgctttcaaatgttaccaaaaaatgtacggttaatggacagaattatggtagaaaaaaagggatggttaagtagttagttggttggacttataatagttgttgaattggcttaaagttcaatagaatcatcgttttttttcagtcttcccgacgccgcttctcccgggccgagtgatcactgatcagcaacagaagcagaaatgaattaattgatggttaattggtgcgattatgtaacctaaatgatgtgggcactttgccatttcaatattgtattatgaccaatttgtctgtttgtatttgacctttgcttgctcgcaaatgcgtccatttccattgtattttatttgtatgtgaaattcattgtgaatgaattaatcgttgataaaatggctaataataaa

SEQ ID NO: 84618 - DNA, 93 bp, Heterodera glycines
atgccgaatccatttttatttgtgcttttcacgtgcccactttccgtcatctgggctacgcgaaaatcagctactcgtaacacattcgaaaag

SEQ ID NO: 84619 - DNA, 300 bp, Heterodera glycines
gatcatccgatacgtgaagttgggcttctgatcacagtgtgattgtgtgtgtgcgcttggcatttgactgacggacggacgagtgtttcttttttttcttggtgttgtcattggcgcattgtttggcgggaaattcggactggatacacacacatttaaatgaacaaatgatgatgatgaccgataattggttgacttccctttaacttctactctttcgttctctctgtccattcatttccatccatttgtttcacaatttcctaacaaatcgccaacagaaatttaattatttctttt

SEQ ID NO: 84620 - DNA, 861 bp, Heterodera glycines
atggacttgcagcacggcgttgcgttcactcgccaaggggtcgtagtgaatgccagcattggtacgttgttcgtctggactgtccctttaacggtgccgaaatcagttgatttttgccatttttagatggttattcgggcactgtcggctctaaagtgtgtgtgatcaccgccgggtgtcgtcagcgtgagggcgaatcgcggctcaatctgatcaaacgcaacgtggagatcttcaagggtactgctgcggcaggtgccaaagtgctgggtcattgcaaatcaatttcaggcattgtgccggaactcgtccgttactctcccgacactatcattttggtcgtttctaatccgggtcagtcagtcattcccgatttactcccaaaactattcaataatgcggtttcccccccccctttagttgatgtgctcacttacgtcacttggaaactctctgggctgcctcggtagtttttctgttttcccttttccaatgccctccccccttggctcagtgagcgtgtgttcggttccggcactaatctcgactcggctcgtttccgctctttgctgtctgagcgtctcaacatcgcccctttcaattgccatgcctatgttattggggagcacggagactcgagcggtcacttggaattattaagacatattcctttttttttattttgctaggggtacatcatattggaacaaaatgacgactttcagttgccgtgtggagcggagtgaatgtggcgggcgtcagtttgtctctgttggacggtcaaaacgaagcgacaaattgggagaaggaagtccatcagaaagtggtggacagcgcctacgacatcatcaagttgaaggg

SEQ ID NO: 84621 - DNA, 101 bp, Heterodera glycines
atgtttgttgtgacaatggcatattgttttgattcttactgtatctcacttcgatgttcactgtttttggttatttttccttactaataaaatttgacaga

SEQ ID NO: 84622 - DNA, 918 bp, Heterodera glycines; identical to SEQ ID NO: 19865
  unsure (1)..(918): unsure at all n locations

SEQ ID NO: 84623 - DNA, 185 bp, Heterodera glycines
caagcttaatgagtgaatggacgaggaccgatcagactgattgcgagactgatcacttctttcccaacccgaccaaatatttttttaacatttttgcccggctattatcatttctaaaatcgtttgttcgttttaaagtgaagcagtgttgttgattgattcgtttgttgatttgtcataatcta

SEQ ID NO: 84624 - DNA, 967 bp, Heterodera glycines
  unsure (1)..(967): unsure at all n locations
atggatgaagccattgatcgcaaaaggggaattctctntagtccccaagaagacaacgcgttaatctcggcttatnttgctcgaaaatccataatcgaaggaagtttttcggcaactttaacaacaaaggaaaagaaaaatgcgtgggatgaagtcacacaagcagtgaatgccgttgtaagaaaaaaagagctaaacttaagcaatattctatgggtaaatttaggacgctcgatcagtgcgtgatcaagagcaaattaagcaacgctacagaaacaagctgaagcaatacaaaaacttcattgctgaaacaaaaatgccaccaactggtggtgggagaccgactgagcggaagcctttttttgatcaatttatggcggaggacacgcgaattgttggcatcattggcgaaaaccctattgaactaggttaaatctcaatcaattgacatttttctaatttataaattggcataggggaacgccccaaatcatctcctgcaattatcgactcaagcttttgctccggatcggagacttattctgctgctgctgttccgccatcatttacagatttgacaccgattcgtcatcaatcgggcggcgtgatcagtagcaaaaaacgaaaattttctactgcttctgctgattacatgtctgccgaaagaaaagaaattgtggaaatatttccagcagcatcatcaacagcaactgcacgcgatttacagattaaagtgcttgaaaaagaaagtgccaaactggatttggaaatggagaagcttaagcttgaaatagagcttttgaagctgaaaaaggatcgagaaatgcgccatcacttgggatataatattgaggagctttaatatatcaatgttcattgattttggatatattattccaattacaatttcgttatttcgttaatgaaataatttttaattccgtaataatttatatcatagacaaaa

SEQ ID NO: 84625 - DNA, 2277 bp, Heterodera glycines
atgaaaatctgtctgatcggaaaacaagcatttggggcggaagtgtgccgtcaattgatcagttcggggcatgacattgttttggtgtgcacggaattggacaaaaatggccgggctgatttactaggtaagaaaaaacaaaaatattttaaagtaaaaagaatttaattaaattttaagccctggaggccgagaaacacaaaaagccaattctgaaaacaaaaagttggcgaagaaaaaacaaaaaaacgggcaaatttgagttggaaaatgaggtgaaaattgggaggaaaagcacaaatggaaaagaatcattgaatggtttagcttttcaacgagtataaaaagtacgcggccgaagtgaatgtcgtcgctttttgtacccaattcattccgcaggaagtgatggactttcccaggcacaaaaccatcatttaccatccgtcgattctgccaaagcataggcaatttatttaatttaatttacccgttttccttttttgaatttggaattgttcagaggtgcttcggccatcaattggactttgatcgaaggagacgaagaggcggggctaacggtgttttgggcggacgaaggattggacacggggccaattctgctgcagcggaagtgtgccgtggaagagaccgacactttgaacactctttacaaacgctttttgttccccgagggggtcaaagcgatggtcggcatttttcgaattggcatttaacacataatttgcatttgcataacaaaacaaaaagttaatttagtgctgcatactgtattgtgttttcctgtaaaatgaataattttgcattttattcacataatttgaggtcgaatcagtgaatttaatcgctgccgaaaaagcgccaaaaatccctcaaccgacggaaggcgcttcctatgaaccgttcattacggcaaagcccgaattggcagaaattgtgtggtccaaaattggcactcaacgccaattgcacaattttatcagagggaatgattccgtgccgggggtttgttcgaatttagcaaatattctgattttgagttaggcgtggactcgtcttaatggagaaaaagtcaccttgttcggctcgtcattgtggaaaagaatcgaaccaccggcgacggcgcgcgaagtgccggcggaagaagtgcccgggggcaaactttgggcacacccccggggcattctgttgagaacggcggatggaaaatttgtaaaaaaataaaataattataaaaatacaaaaaaactaataggtaaacgtagacacaatgcgaatgaatgacggtcggacaattaaagcagcaaattatggaatggtggaagaaattgcggaggaaaaattggaaatgagcaaagaggagaaggaaatggtgccatcgttgaaggcactgattatttagttaaataaaaactaacaaataaattaagaatatttggcgaggcattttgaatttctcggcgtccgatcaaatcgacgaccaaatgaattttttcgacgccggggcgaccagcgccgacgtgacgcgacttgtggaagaagttcgcacagtttgtggcgttgagatgcgaaacggcgaagtcatctcggaattgaaattaccaaatttatttttatttttttagattttcatgaactcccaattcggtgactttctaatcgcaataatacgcaaaattaggggagaagatttggagagattggaatttgaaaaggtaaagcaaaacaaatgaagcaactcaatgctattcaaatcaaaattcagtttgaatcggagtttaacggcacaaaaatatgcgtgcccacgcaaatgtacatcaatggcaaattctgtgagagcaattcggcacgacgaatgcaaaccatcgacccgagcaacgaaaagtcaatatgcacagtgccaaaagttggcgaacagcgccaaacttaaaatttaaaaatgccgttcagggagatgccggcgatgttgactttgcagtgcgatgtgccgaagaggcattttaccacggcgaatggtcacgcatttcggcacgagaacgtgggaaaatcctttacaggtgaaacgacaagaaaaggacaggttgaccgaggaaaactgtcagactcgctgatctaatggatcaacatcggactgagttggccaccatcgaatccatcgacagcggcgccgtttacactttggcacttaaaacgcacgtcggcatgagcatcgatgtgtggcgatactttgctggatggtgcgacaaaatacacggaaaa

SEQ ID NO: 84626 - DNA, 921 bp, Heterodera glycines
agtaatcatgtaattgcccttcattttctcccaaagttccgtcgtcgtgtctcgctttggttttgagctgaagcgcgactcggcacgatatgttgccgaacggtacatgcccagcattttggccatgatcttctcctgggtggccccgtaggttcattgaccatcattgtccatttccattcattatgctcttaatagcccaattaagctatgtaccgtacaattacgaggaagtgcgcatcatcactccgatcacggtacaggaagtttcttttttgagaattaaattgatcagagtgggaaagccttgagaatgggcgccactaaattaaaaatattatttttaatttgcataaacatataatagtgatgatgttcaggttctgctcactctcgtgcaaatggagaaagggaatcaggaggtgaccaatgaccacccaatttcaaaaaaaaacattttatttttcatttaaattcaggtgatcacttcctatttgacttctctcgacatttggtgggcctttctttcctcaaattgatcacattatttaattttttgagcattttttaggttcgtcgtgatcaaagcgttcacagtgctttcactgatcgagagtttggcggtgatggcttacatcaaaaagggcagggccgtggtgagtgagtgaattgatcctgcttcacaaaatcatagttcaaatgaaattttatctttgatcgctcgggtccatttgaatctccgtatttttggtgccggggtttgcggcgtcccttttccagtcaaaatgccaatcgcggagaattaatgacctttaaggccgagctttttttaatgtctaatcattacatttaatcaattggaaggaatcggaagcgcaacgggcgcccagtgagtatcggcgcgatttgctccaagcggag

SEQ ID NO: 84627 - DNA, 1050 bp, Heterodera glycines
atggaagatggcgaaacagaaacagcagaagaagattatgacgacgacgcagaggacgacggatggacaatcatcgaatttgacaattcggaagaaaaaaggaatacgacggaggaaaagttaaggaaacaaaacgatcggataaatggaagtggaagggatgaggatggaaaatggaaggaatgggacattggaagggatgaaaaagaagaaagagggaaggaaaaaggaagagatggggaggaggatgcccggaggaaaattgaagatgatcagacggatgatgctcggaagatgaagcaaggaagggacaaggcgaaagagggagggagggatgaagagaagggacttttggcaaatgaccagagaccggacgtggcacttttcaagcagctgattatcccttgggttccccatcgtcttcggcatcaccatcatcctcttcatcactctcattcatctcaaatccaaggaacacacactgagcaatcatccaatggaacaattatcgttacggaacaaaatgtcaacaaaactatgccggaacaaaatgccaatgtaagcgaagaagtagcgcaaagagaaacgggcagcacaaaaacgccctcaacaaccggcggcacagcaaaagcagatgtaaagctgcacttggaagacattctgatcttcggcgcttttgtgactccgtcgggcgaagaaacaaaagaaacggcgaaggcggaaacggaaaatggaaatggcacaatttggggtcaagacagggaccaaaaagatgacccaatggcaccattgcgcaacgacttgtcaaacagtgggcaaaaagtgctgctgaacggcacgtcgttggggaagccaatgcccgccacgacgacgacgggtacaagcacaacttgggcaccgatcaacgaggaggaactggcgatgaaccagcacgttgacccgctgggtcgggacagacagcaattgctggcacaactaattgccaggtgggcaattgattggataatgaaatggtttgggaagcggcgggatggattgccttccgactga

SEQ ID NO: 84628 - DNA, 993 bp, Heterodera glycines
atgttggcaatgattgccaaggtcatcgcctccggcatcattatcattgtcggcctttggctgctaatcagtaaaggtcactcggcacttactaaatctttttttgggttttactttttttttttttttgcaattttcagaagttcaatctggtagttttcggcaacccttcgccaacacaagcgataagccgggcaattgggtattggcactgtttgccgggctgttcagctacgacggctgggacattttgaattttggggcggaggatgtgaagaaaccgcacaggtgtggctgaccgggggaaggcattggcataataaattatcaaacgataatttataaaatttaaatttaaaatgctacaaaaagttaaaaattattaaaaatttgaggtcaatgcctttcgccatcattgtgggcatgtccacggttgctgcactgtatttggccatgaatgtgtcctattttgtggtgctcagtgtgaccgaagtgcaaagctccaatgccatcgcaatggcaagtcaatgccaatacataaaactcaaaattgcttattttgtggcattcgttgtgcatttaattcccttccccaaattgcctcattagcattaacccattttacctaatgacccataacactcgacttatttgttgcagacttttgcggaacgaaccctcggcggctttttgcagtatgccatgccatttttggtgtgtattgtgctgatcgggtgggtgccgtcatcatggcccatttacaattaattaattaatgataaatggttattttcacaggtctctgaatgccactttgttccaaggcagtcgttacatttgggcatccgctcgggaacggcacttcccatcattcatctcatgcattaatcggcaacatgacagtccccgggcggcactttttgtccatgtaaatgccaaaacaaaatcggatataaatttttggatctgcagaatgtttggggatcggaatga

SEQ ID NO: 84629 - DNA, 282 bp, Heterodera glycines
tttgggccccggggtcgtttgggccccaacccaaaaatagaaaaatgtgcttttttaaaaattaagattctaaaaactaagcctgagggatccctcgccacttggcataagttaggtttaattaacattcgctcattttttacaattttacttattccaaatcctattattttttaatagttaaccaatttgatttacattctgatttggacatttttcagaaatggctaacccaattgcaaccaaaaaacaaaaagtaaaattgtcttacgaaggccacct

SEQ ID NO: 84630 - DNA, 1776 bp, Heterodera glycines
atggccactgccaataattatcagccgcgcgtttcctctgcctcgtcccatgctccacaaatgtttatgtccggtcagcagcagcaaatgccgggcggtggcgcacaaattcgcgccgtgacaacgacggcaccggggacagtgaaccaatcgcagcaatttgtacagcaacaacaacaagtcagttgtaaaatgaaaaaagcattgaatggtttggcaatttttaccatggaattgctgggctgacaaaagaatgtccatgagaaatttggacccacaaaaatcgttcccccttttgagatgagtcagcaacaattccatcggcaacaacaacaacagtttgagcaaatgtccgttcacatggcggcacaacaacagataaagtctgacaacggcatggtcggcagttaccaaattgggacccctacggcaccttccgccggggacagtggcgccgcctctcaaaatcgcatgacaacgtcgacgattgttgtgaagacggaaagcgggcttacaacagcgatggggtcgacgagtgttcgaactccggccggaggtctttatttgttgttatataatgcccaagcttttctcaaaattttgagaaaattaacaaaaaaaaatagagggatgggagcgaattttagggttgtttatgacaattcaaatacgtaaaatcgggcaattttctctccgctcgaatttgatatttgcaatacaatctgataggttgttccctttttaattgactttccgaatttcaatttctgtcctccattctcttcatttttgcatttttctctaactctcgcttttttccagccatcgatggtccgccttcggccgactcccatccgccttcggtgggcactgccaatggcatggcgacgggtcgtccgggctctgttcagcaacagttcggcaccgccgcttcgcaagtggacacggaggagcccgagtacaaaatgttgctgaaaaagttgtgcaaataccacgcggatgtaaagcgactgttgggccgtttcgagttggacacattgcccggggtggagatgaaaatcaaagcgtcactggtcaacgtcatccaagtgatggaaggcacgcggaagggcgggtgcgtttttgaggggaccggggagggtaattccccctttcaaaaatgaaatttttattaaattttcggaaatgaaaacctcataaacaaattttataaaattacaaaatttactttttcagtccggtgacaaagactctgctgcaaaaattgctatcaaatgtgcagacagtgctcgaacgtcaccacatttcccgtcatctgttcagcatagcgaagaaactgagcacattggcacctccacacaacggcacaagcgcaaacggtggcggagggacgacaccaacgacggcaccaaaggaagagccatttgagacggacccgtggcgaaatgttcgacacatggccataaagtatgaattctcatcgattaaacatttatcggaattaagaaaaggttacaagagtgactagtccaattgtttctcacttttcagattgcccgatgccgtgctgaccattttggaggacgagaagaagagcacggcagcagagaaacaacagaaaaaggccgacgacggtgggcaagaaacggccgattctgagagtggcgggaatgagtggacgggtcggaagcgaattcgacaacaaaacgagcaaaaggaggacgagaagggcgaaggaccaccgaccaaaaagagcctttggaaagagggccgaat

SEQ ID NO: 84631 - DNA, 470 bp, Heterodera glycines
attacattcggccctctttccaaaggctctttttggtcggtggtccttcgcccttctcgtcctccttttgctcgttttgttgtcgaattcgcttccgacccgtccactcattcccgccactctcagaatcggccgtttcttgcccaccgtcgtcggcctttttctgttgtttctctgctgccgtgctcttcttctcgtcctccaaaatggtcagcacggcatcgggcaatctgaaaagtgagaaacaattggactagtcactcttgtaaccttttcttaattccgataaatgtttaatcgatgagaattcatactttatggccatgtgtcgaacatttcgccacgggtccgtctcaaatggctcttcctttggtgccgtcgttggtgtcgtccctccgccaccgtttgcgcttgtgccgttgtgtggaggtgccaatgtgctcagtttcttcgctatgctgaacagatga

SEQ ID NO: 84632 - DNA, 1294 bp, Heterodera glycines
atggcggtgcaattgcacttttggcatgccgaaaaattccgcataatttgtggccaaattgcctatgtggcctatctggtccaaaagaagagcatcccattcacattttggcgatcgcccacagaatgttttttaatggatcgcgaggatattttgtcctcaatgcgtacactactcaaaccttcccatttgaactttgtgatgagccgagtgatcggcacagtatgggatactatatcggatacggtacggcaaaagcgtggcgcgcttgcattgctggagaagctaattgggggtacagcactggttaaactgtgggagaacaaagaagccagggcgaagttaatggaggcaaattgtaagtgaaacaatgatggaacatacagacaaaatcaatgcacactgtcttcaacagtagattaggaaatagaatgctattagtacctcaacaggaagaattttggtttgagcttaaagtctgtattactgtaccggatcttttgtatttaaaaaaattattattggatattaaagtattggttctggtaataacaacccaatcctgtacagtaacaataaatttgattttcccatccgtaaaatttttaggccttttcaaattcctgtaaaaaatgacatataaaaaatgccatttaaatacttttttctccattttagttttcttcgacaaaaaccgactcgttgatcattatgtcagcattttgttgaacgccaacattgtgcctgattccgttgatcggatgcgccgcgatataaaatcggctgatctgatcgtttgggcccaatggttccaatcactcattgagcagcagcacaagggaaaatctcggtattccttacaccgggactacgtttggatgtatttacgcattgcgtacgacatgtacgacctcggaacggagaaaagcgaatttgaacacacttttaccaagatggaaacaatgatgagaagtaattagcggggatttgattgattgggatttatggaatgaatgaactaatgagagaagtaattagtggggattcgattgataggaattatggaacgaatgaaagaaatgatgataagtaattgttgatcaagttggtccctgattttagtcgtgaaatagcgattgataaggtgacccgaaaattgagcaccggaaaattttcttgggtgtctaatgttccggtatccaatgtgagggggatgtatctttaaatgggtatccgtgattttgtctaaaaaagcctttgtttaccttagaacaaaaaagtcctaaatgattca

SEQ ID NO: 84633 - DNA, 357 bp, Heterodera glycines
aacaaactaaggtcgcatttcatagtttcgggaaacaccagtgagaaaattgataatgttttcgggattcacattggcattggcataattgtgatcattttgggggaggtgaatgttattgatgtcgttatagagtgcgccgtcatgttctaacttaactttgtttcgttttgttttaattttttgctgctggtccatattatataatttaaatgggtcggggtcacttcggcgcggaccatttcggcgccgcaaattttgaaatgctataacttttttatttgtcagttaactttagccaatctggcatcatttgaaagctctatgtgtgctctatattcacatgtcaaaatagaa

SEQ ID NO: 84634 - DNA, 1198 bp, Heterodera glycines
gtacattgatcattctgtgctcacttttcttcgttccaacaagcatatttgggacagaagtggcaccaaattggatttatatgcggtgtttaattcagaaaccaacgtccagccaatttgggatgtttttgtccgccaaatttggcccatttttgcgacaaacattcaccatttgggttttctctgtcacaaccattttgacactttgtgtcgccacatttcgccgacatttctcactgattgcactcgactgcattctgtgttttccgatcagctgtgccccggtgtaattgttgctgatcagtttgatgatgggcaaccaaatactgcaactgcttcttcggctggccaagcgttgtcaaaatggttgcacactccgacaacaaatggacaaccgaagcgattgcgttgctgtgagcatcaaatttcaaattttgaatgggtcaacaatttcaaaggggtgtgttgtcggccatattttcattaaacgatctgactaattaattaattgcttttttattgcgcttcctttttgtttagatatttctccgtgccaccaccaccacttctgttagttacacaattcgttttggagttttgtggccaacaacacaaatcgtgccatttgaattggagaatgaacggaccaaagaaaagctgacactgaaagagggtgataacatttattggctgttggagcgatgtccaattagtgaaaaggcggcggcggttaaatgggaagacgacgaaaatttgaacaatgtcgaattaaatttgtgggctggcagtgattacattgggtgggcagtaaaagcaatgtttgattttgtcaaaaaatgaaaaaattaattaattttagtccattgtcgccaccagcggaagaagaagacgaagaaacggatgaaagcaacgaaaattatatttgagaaatgatcgacgcgatctcaccaataggaatttgatttgatgctctcgttttatgtcagaaatgttttatatgtagggcttcgatttttaggtgctaaaaactgccaaaataagtaggttttaggttctaaaaaacccccaaaataggtgctaaaaatgggaaaataggtgccaaaaagttccgaatttggggtgtaaaatcgaaaattttcttcaaaaagcaaaaatattatgccaaatcattaatgagatagataattttcaaaataaa

SEQ ID NO: 84635 - DNA, 76 bp, Heterodera glycines
tttttcctgagctccccgtggcctgaaacgcacgaaaaacatgtttttttgggctgttgttaagctacttttcgag

SEQ ID NO: 84636 - DNA, 78 bp, Heterodera glycines
tagcaagcatgcaacatcacaattaaaataagtctgcctatttatagtcgtagctcggcttctgatcacttccatact

SEQ ID NO: 84637 - DNA, 579 bp, Heterodera glycines
accaaaaaaaaattgaaaagttttttatctatttttccaggcgccaaacattcatcatatattcaatgatgaaaatggaattagtaaaatttgtttgacgccaatttcagacacttgagacaaaatttgcggacgaattggccacccaggagcgcttctacggcgcggacggcggcacgacagcggctgcggcagcaatgagttcatctacctccacttcgtcgtcgtccaacggcggtggcggcatttgtcccccggccgtgccgcaacatcagcagttttcccttagcggaggcagtcatcaacggcacttttgatggattaatgatggcaaaaaaaagaaaaaaattcctgcagaaattattgccttattatttttattatcacattattttgacgcatcattccttcctttgtttccattggttttgtgtcacattttcgcatcaattttagcccaaaaatgattgttcagaaacagtgaaaagcacacacactatataagctattgtaaacaagctacatacaaatgcatctttttcattgtaatttgccagtgtttaagtgatcaatccgtct

SEQ ID NO: 84638 - DNA, 490 bp, Heterodera glycines
  unsure (1)..(490): unsure at all n locations
attaggaggggtttgttggtacggtggtcgagatgnatgagaccaaggtgtatagggcaaaataccatcggggtcgaatgttaaatcgcccatacgaatgggtctttggcatgattcaaagagggtctaataaggtccggttcttccctgtgcccgaccggtctgcagacactcttctgcccattatcgctgaaaatattgaggtggaaagcacgatagtagcggatggttgggcggcatacggagggataaataatatgcagcagcaatacaaccacgagtggataaatcatcaaatttacttcgtagatcccgccaaccctaaaatacatacacagggaattgaggctacctggagggctttcaagcagtctgaaacatttacatgggaccacccccgaacttttacctacttatttgtttcagtacgcatttcgtcgatatcaacaaaacacaaaaatatttcagcatattttggaagaaatgcgcc

SEQ ID NO: 84639 - DNA, 1060 bp, Heterodera glycines
atgacacattttggaagtggaaaaaacaaatgctgccaaatgatcataaaagtaagggtttttctttttaagcatataataattttctattcagataagtgtttttcctactaattagagcatggagaatccaggaaaaaaatatgcatttgcataaaattgacatccctacgcataacaaatccatggtttcgtgcaaaaattgactcaaatgaatcttattgttcataaaatgattcaggaatcggacgttgtacgtagcgaatacggcgcattttctgttcaatgtacagcaaatgtgttcatttgttcattggacgaaagcccgcatcccacgacctggaaaggctcaacaacatgccaacataatgtgtccacgtgccagttctcggccaaattgtccatcggcatccaaccgactgtggcgccgtttaaattttgaagataattcgagctaacttacgtttaaatgtttaaaactgacaatttaccaaaaaaaaaatttcttaacaaatctaacgcaaattatcttaacgcgaaaaaatatatgcagatgattttataagttatttaaattttcattatgtaatggtatttttgaaaacaggcagatttaaaaattctttcagtttgcctttatttaaacttctaaattcatcagatcgttcaatgaattctttcttttttaatgggtttttctcttttaatcggtgtaaaggcaatgaaacctggatgaaatttttcgtaattattggatgaatcacttttttatgcctattttaggtagcttttaaaaaattaaatatccaaaaatctgatcaaaatgttattctataaaccatattaatgggattttttatctttcgtctaatttcaggacttttttgcattttatcgtgcttttttgaatctttttgttacatattggtgattttttataacttttttagtcgactttttgaagatttttagtgacttaaattcccagccctagttatatctaacgttataagtagggacgggattttggtgtgctaaaaatctcgaaatatgtaataaa

SEQ ID NO: 84640 - DNA, 1717 bp, Heterodera glycines
atgatgaatcgtcaaattgatacaaaaaagcaaaagcctaaaattacctatgaaggccagctttacaccttcgataaatcaagtgcggacggaacgagaaaattttggagatgcgaatacaagaactcctgcaaagggagaatttggagggatttggacgatcaattcattcgtttggcaactcctcatacctgtccagtgaacgcagcaaatgttgaggcgcagaaagtgaagacggcaataaaacgacgagcactcaccacgttagaaccgccagcagtgatccgatccgaagcacttcagaatgtgccatctccagctggacttttggttacgcaggatgcttcaaaactggtactgtttagtcgatgatatgaaaagcaatcacgaaagaaatcttaaggtaattaaaagggcacggcacgaagtcaatgcaccacctgcggttccacaaagcgttgaccagctattgttcctcccgcataccagacgtacgagtcaactgacggcgaagtggagcagtttctgttggctgactctggtgtgtattacgaggccggaaacgaaaacccgcagaggtaattttttttaaaaactataatccattttactaattttttcaaggattctgctgctttggacgtgaatctttcgggcgatgggctgatcgaatgaaagactgcttcggggacggcacattctcattggcacctccgatgttctatcaaatctacacaattttggccaagtgctgttttaatttgatttcacgtgaaaattgttttaaggcgtgggtcgtgggttatcgtcgtgtgccattgcttgctgacgtccaagtcgcaagcgtcctacgagaggatgtttggacttctccgtcaagcgtggccgacattctcgcctgcctcgttcaacatggacttcgagacagctgcgcgcaacgccgctgttgccacgtttcctgcatgcgaaatcaaattttgcttcttccatttcgtgcggaatttgcaaaaaaaaatcaaggaacaaaatctctggcaggtcagtaagcatattcagtttgtttttgtaattttcgtgtctattcagagatactgtactgacacagtgttggctgagaatctgaggatgctcacttctgtcgcgtttctaccgctcagtgacatcagaacagcagtcatcgcattagacacggagttcgggaacgtgactgcactccgtccgctcattgactggttggttatattattcagatgcattcaatttctgtgcaatttttaggttgctcaacaattacattggacaaccccggccaaatggaacttggtctcaaccactcttcccaccagagcagtggaacgtctacactcgcacactgaacggggaagaaaggacgaacaaccacgcagaggcagaacatcaccgtcttcaaggcgccttcaactgccgtcatccatcgatctggcacttcattgacgttctccgccgtgagcagaagggcaccgatgggaagtatgcgtcatttcttgctggacttgagccaccgcggaaagctaagaaataccaagcggctgatgagcgcctcttcaatttggtgcagaattacatcccggtgaacccgaacaatgaaaatgatcacaattaccacataaatccaaattttcatattattttagaatttctccgtggaatttcgcgcaattatcatatgaacccataa

SEQ ID NO: 84641 - DNA, 738 bp, Heterodera glycines
atgggattgccaacatgcactgcccaaaccaccgcaagcgcagcagcgactgcgtcctcaacaccgccgtcgacgaccgttcggcctggcgcggctgccgttcagttggccgcactgttcgacccaaaccgaccaccgccgacactgacgccggaaatgctttctgccggtgcgggtccaacaacacaaccaccaacagcaacaacaccggcagttacggctccaacgaccactctaatcagtggcggggtcgccggcggcgctgtgctctccgcgccgccgccgatgtattccacgacgacgacaatggcactttcggcggaggactcgttgtccgtttgggagaactttttgaagcgcaaagagaacgaaaaggcggagcgcaatttccaactgatgcgcaacaatagtgccggaggcagtggcatttatcagcagcagcaaccgcaccaacacaaacatcaccggacagagcatcgagactatcaccatcgagaaagggatcgagatcgggacagggagcgggattatcatcaccggagcagaggaggcgaagggagagggaccacgaggagggatgagcagaacggaggcagtggaagagaagggaacagcagcagtcaccagccgaaaatgaccgtggaggagaagagcacggtgtggaagctgttcgagaagcactacgagaagaaggacaagaaaggagaagaaaagaatgaggaagaagagagagagtag

SEQ ID NO: 84642 - DNA, 622 bp, Heterodera glycines
atggctcaggaccaacgacaacagcagcagactccgcctccgaccgttgtgagatagaaaaacgagtgcttttaaatgaaaattcaaaaaacacattaaatttacatttaaaaatgaaccattttaccaatttcagtctggtgccaacaaaccgagtgtgctgaccgacactcattcgttgctgcacaaactgttgcccggactggccgctgcgcaagcacagcgcgagttggacaccaccaccagaccgacggcaacgtcaacagcggcacccgacgggacgccaatggtgggcaaaacactggggagcagggcactgggaaaagcaagaaataattaatttttgttgagaccggtgagacccgtttgtagttatggacacctactccaattccattcctccgacccccgagggcattcgttcgtaaatggtcagaccgccccttccccaccagggacgggcgaagctcggctcggcactcgaagccgaaggcgaagcccaatttttttcgaagcacgaagttcgaagcccaaaaaccgtgaagtttcgaagctttcgaagctcgaagtttttcaattttttaatccaaaaaatttatccagatagtaaaattcaattaaa

SEQ ID NO: 84643 - DNA, 204 bp, Heterodera glycines
atggccgccacagaattatcagccggcgtttgggcctccgccgccgctgcttacacagcaacaaaatgtaaaaatgaacatatgttgatttctaatggctttctccttttcgagatccttcagccactctctcgtccgtcaacattcaacacttatcgccgtccacgcaccgctgctaatttttcaggaaaactcaaaaaacag

SEQ ID NO: 84644 - DNA, 63 bp, Heterodera glycines
cacttgtatatttcaaattaatataggtaaatattgaactttataaatttacatgtaattaaa

SEQ ID NO: 84645 - DNA, 823 bp, Heterodera glycines
atgaaccgttgtaattataatcagaaaattaaaacatcgaatccattgtacggacgtggatattttatcgagcagaaggaatacagtaattctaacggttgcggatttcgtaaggcgaatagaccgcttgttccgagtaatgcggccgacattgagagttgggagccaaaggtaggtcaaatacggtagttttaagaaatgtttatttttttacaggtaatgagcacccaagaaattagcaaattgactgctcgttgcgtgggtgtcactgatgcgtttatcaaacttgacaattacgtggacagtgtgaagaagtacaacccgtcgaatcatgatttgcttcgggttgtgtgtccttttcactgaccatttgatcaaagcattccaagttcagatgcaacgaatgcagcaccagtcaaagacattgacggaagacccggacaaatacgccgaacttattgtccaatgtgttgcaaatccaaacaagtttaatgggactcgccactgtttggagcttgtcattggcagacgagcacttgaggaatttattagtcgcaacgaatggacggaggaaagactgaaggactacgacattaagtgcgtttggccatccgatggatttgtttagttcgtttctaacagactatcttaaaataacttttttttctaatttagtgcaaattggaagttcgagcccaatgagttgactgtcccgccgattcccatttacaccgggtcactttcttctgcttgatatatttgaccggttaatgtgactattgaatatattttcaatatttgttttcactttttgacgctcata

SEQ ID NO: 84646 - DNA, 994 bp, Heterodera glycines
atggcatcggataaacaagcggtgactaaatggcttttcactccacgtccggacaatgtgccaaaggtgttcaactgctacctgggcaaggatgatgcgagtttgacgtcgaaagttgaagcattcaaagcggcgtttatttaattgattcatttgccacttttacgggctttgggattctctgacaaaagcatttgcctaattaaacattgtgtggacaaaaatggtctctttctaagcgaaaagtgccacatttctcatttctttctcaatttttaatatttcaggcttttgcctcggcttcatctcctgccaatttcatcatttacgtttggtttccttcgtcttttgctgactccgatgtgccatttgaactgatcaacgaattgactcgtgaacaattgacattggaaaggattaacaatagcaaccgttttctgctgatccgttgtccaattgagcgagacgaaagcaaatggacaaaatgggaagaggaagcgattgattggcgaatttataatcagtgtaaccttcacattggaatttataatgatgataacatcggcaaaaggttaagcgaatgctttttcaaaaatccgattttatttggttttatttttaggcttctcaacgcaactcttgaaccaagtgatcagcagcagaagtgaatgtttgttaagaagtgatcgatcaatatgaattgcgttgttggataattatttttgttgcggtgattcaattgtattatatatatgtgtgggtatatgcctttaggataaattagagatttcctgaaatcccaggctcattcttttgatctaatgataaagtcggtagtcactgttccttcaataactgggtcgtcttaagtaccatttattaaacgatgttgacccgtttcgtttcattgtgccccccccctcgattttttagcaaagtcagacaaattaggacagttggctggatcagagaaatgtggacgattggcctacta

SEQ ID NO: 84647 - DNA, 422 bp, Heterodera glycines
atggccaccttcaaaacagctcctctcatcgctgttgctcttctgatccattttggatgcttaatgtttttgatggaagtgaacggtgaagtccatgttcaaaggtgcggcaaatttgtgaattcaattttttgccaaataccgaaaattttctaaattttcggatgatagaccacgtgaaagatgaaaaatttaatttttaattaaaaattttgaatttttttttagctctctggcaccaagtcatcaagtggtaaagcgtcattgctcttgtggtggcagttggggcggttggggtggcggcggtggagcatgtaaaacaaattttttataaaactaaaactcaaattatggtctggaacagaccgggccgggattggatttgagaaatttagggtttcacacaatccaattctaaggga

SEQ ID NO: 84648 - DNA, 285 bp, Heterodera glycines
atgttgccgcattggccacaggaacagcctgaaattgtagcaacactcgacatgcttggcgcccttaaattgtgagtgccaaggacgtccttgggaatcacggggatttcaaaaaatttagccatctgagccgtttcaatttatataccaaaggggattgggcatctccaaagccacaaattttgaaaattcaggctcgcatacttcagacggtctattccagaaccgaattcaccgcctgaaattatagcaacaacccatatgctcggtgtccttaaattgtga

SEQ ID NO: 84649 - DNA, 532 bp, Heterodera glycines
atggacattttgaaagaggtgggacttcacgggaggatggcgcagtgggttaggacgaagttacccatgaggcattctcgggttcaattccgctcaatgatggacaaaatttaccaaaaaactgagaaaaaatgcggaataacgacgacgaggcatttgtctgagagcaacgaataggccgcgcttttttaatgtttaaaaattaaattattttaaatctaaggacatggaagccgaattgcttttgtgccacgaacgaatgaacgcgttggagacgacatgcaataatttggcacttttgttgggcggtcatttgggcggtagcgaatcgaacaaaagttgcgcattggaagaaaacgaaaagggcgattatttggcacaatttgccaatgaatgcagccgaattcggaaggaattgcagaaactgaagaaaaggtggagagaaaggaaataaaggaattttaacaaaaaaggaagtgaagaaagaaaagagagagaaaaaaagagaaggggcgaaaaagagcagtgagaa

SEQ ID NO: 84650 - DNA, 699 bp, Heterodera glycines
atggctgttcgttcgatcattttactttatttaaaggtcgaacatttgcaattgactaccaatggtacaacttcaaagtgcgaaaaagtttttcttatcgataatgacgaaagatacaatagccaaccggacgaactcacggaagaagtgagccattggaatttttaacaaaaatctacaaaaaaaaacaaagaaattgagattgacgggttgtggccaaaaaaaaattactcgaacaattttttttttgttgaaaacttacaggctataggacttgtaaatcgcctttaatcatacaataaacttttatttaatttgagtgaaaaattgaaaaagttattgcgtttgactgacgccaatgtgacctgggcccgaaatttgctctcaccattttgtagtttgagtttgtcgatcactgcaataacaacaacaactccaatacgctcaacaatttgtgtgaacgtcggatgattgtgagctctgagattaaagcggatcatcactttaacgagtcagtgtccattttcccattgtctgatcgagagcatagtctagttgctgttgtaaattttgggcctttttggcaccggcatcaaaagtgatcagaaaaaatcgatcaactttaacaccttggtaggagccacaaactttttttttcaaatgaacagaaagaaatctcttttttggattttatgaata

SEQ ID NO: 84651 - DNA, 580 bp, Heterodera glycines
atggacgaaaacgaagatgacggcaacaacaccgactgttctatttcacgccaattgttccaaatctgcttgacgcttctacaacaggtccaaagccaacagagtgaacttttcactctcaaacagcggcaaattgcggacgaagctgtgcaagatcatgagcggcggcgaagcgttgtcgtaatgggtctacccgaatcgcagaaacaaaagccatccgagcgagtcgctgcggaccgaacggccatctcaggcgttctcgatgagcttggcatcgagagcccgatcactgtttacagaatgggttccccggaccaagcaaggacaggtcaaaaccgcccgcggttgatgaaagtaattttcggctgctcaaaacatcagagacaaaccttggcacaatggaacaaactgcgcgctcaaatcaatcaaaaactggggatgagcaacatcaaaattcgcccttcactcagccaagaggaactcaaggcccggcccgtcgtgtgctgcaggaagagtgcagcagaaaaagaaaggaagatggcggcgagtgggtggtttacgctgacaaagtgatgctgag

SEQ ID NO: 84652 - DNA, 125 bp, Heterodera glycines; identical to SEQ ID NO: 77866

SEQ ID NO: 84653 - DNA, 382 bp, Heterodera glycines
atgacaaacaatgagatggctgagcaatctgcatttcaatcgaaattaatgttactacggttgaagaaggttacccatttaacaattgatactgacataaaaggaaatggtgagaaggaagctgaatttgtaagagagtgcaaagagaaattagagatcttaacccaacaaagatagctgtgaaccaagaagagtaggattgttaaactatgcttgaacaatttgtgcgacatatttctttacgaaattacagcctttaacagactttacttcaataatgatgtacttgattttggagaatatttgggataatcgttcaatagacgtaatggccatcgaggattgaaaggtgtatcatgttttgattacctacgaaaataaa

SEQ ID NO: 84654 - DNA, 717 bp, Heterodera glycines
atgctaaacatatccgcttacttctattgcagttctctctgtttccaactattcatccacagaataatgatcaatttgccaagtgttcagttgaaaagttattgatctagaaatatcgcatacaggccttatactagtcatacattcctttagtacatcaatgggtactaaaagacgctgccttcccttaataatgccttagttcctttgagacatcaaataattccctcctaaacgataccagcaatgtcattaaaattttcaatgtcattacattttttctcattaattgcctctgtaaatacaaattttccagttgagaagatagttgtggtagaatttgtacctagacccttcattatatttgaaagatttatgtggttgtttttagtggatggggatattaaataaattgaggagaaaagttttactatttattgtcagtaacaccataaattgaatttaattttaggtataatttacttaattttaatcaatactattgtatttattatttttattatattttaatacaactttaatttaattttaatttaattttttaatttagttttatttatttttatttatttaacatttattttcttttaattttaatcttatttttattttactttttatttgaattaatttgaattttattttactttatttattattcagtaatttaaaggagttgttcagaacctctatcca

SEQ ID NO: 84655 - DNA, 987 bp, Heterodera glycines
atgaattctgtgccgagatatggcatgccaaagtttttggcatttataattggaaaagaactaattattttcatttcagtaagaagccattggtgtagagatagtgcgttagtcaagtcttttttaagtcacaggttcgaatcctttgcgtgcaaaacctcaatttgaagaagcaatttaatttaaaaaaacaataaaaattgaaaatcggatgattccatgaaattgaaaagaattatttcagatttttcgtcccaatttgtcgcttttcgctcctatttacgtccataaattttttcaatgttttgcccctaaaaacccgcgccatattaatgagaaaagcattataaatatttatcaatcagcaaaatgctcactgctggagggcgtgggttctattcccagccgaggcctaagattttgccaattcttattaataataaaaactcatatactttgtaagagtgagtcgaaattgtcgggtttttactcgtttaactgccgaagctctaggatttcattattttcacatttatttctttttggatttaatttccctttttactaattgtaccgctctcccagcgattcacttttcacttgtatttaatgttcgccttttcaagcgaacggagctcagtcgtcccgagaataaagccacttattgtgtgaccagcgagtgtgggaaggcaaccccgggcttgatcaccccgtggacccatccttcgggaatatgtggcactttccctttccctccccattccgaattccaattcccaacgccagcacgaccaccgcgcccggccgcgctactggtagcaccggatggttcacttttgtgaacttttcatcaacctgggcggaacaggaacagcgaaagggaggtgagtttgagtgagggacattgaggaggcgcctggtgtgaaggaaaaggagaagaagaaaaacgcttcggcgatttaaatgccccggggatgaaaaatgaaa

SEQ ID NO: 84656 - DNA, 929 bp, Heterodera glycines
  unsure (1)..(929): unsure at all n locations
atggaaatgatttggctggggaccaaacgaatcggacccccattaaggagattgaaaaagccaaatctccaattggctgaagtcaaaatgcgctgtgaacatcagcacgtgccaagagggcacctcagcgattggacatggacacgtcgaagccgaagtacgacatcgtccggccatgacatctcgcgcaggagggacttttccaaagaagggaggtgttggataagggaccacactgattattgattatattttccctttcactccctctcttattgtctctctcccgccccttgaccagccccataaatatgtctccctttccctcactcggggcattctcccattcattccaccatttcattattttatttatttattccctgctgtcctccatatttatttgtttaatanattatttatttatttatttgacaacatttgttttggtcgaagaccaaacatttttattgttgtagtaaatacacaacacttacataaaaaatgaagccctgataatcaatccaaagcaataaattctcattttttcatttatcaaataatttcacaattcctgtcatcaaattaaattaattaacagaattattgtcaattgaaaatgcaatttcccctgttcttcattttaattatatttttataatcgatccaagcaataaattctcatttcttcatttaataaataattcataaagataaaatttcctttttttagaattgtaaattattactaaatttattgccaattgaaaatgaaattctgtattttattatttttatttttgattgccctaattattccaattgaatcagaaaagaaaaaacttcagcagaaatcatttgatgcaatatttggagaaaaatgggaagaaaaagaagataaaagggaaataattgaaaaatattataaa

SEQ ID NO: 84657 - DNA, 406 bp, Heterodera glycines
atgccaattgaatcagctaatgaaaaattacaacagaaatcatttgacgaaatatttggagaaaaatggcaagaaaaagaagaagaaagacgaaatgaactcaaaaaacgagaaataattggaaaattttataaaataaaagagaaaataaagcaaaaaggaagaaaatattcagcaaaagaatggaataaaattggagaaaaaatagcgaaaaaaatggggacaaatcgaaagaaaatttataaatggattaaagaatttggtcttcaaaaacgcaaatcttacaaatcaaaaactgatgaagaaaaaattgaaattgtactaaaattcattgaaatgacaaaagaatataagcaaaaaagtaaatattcacaaaaggaatggaaccaaaattatgccgaaattt

SEQ ID NO: 84658 - DNA, 268 bp, Heterodera glycines
atgcagatagtttggattacggtatgaattttccgtaatttaatccatcactccaatttaagttgatttccattaatcattggaaaagttaattacggacggagtgagaaattgattttgcaggtcgaagccatgactattaaagcatgtaaatgaaggaaattaattgttaattcgtgacatttgtaacacagttttcagagagtctctgcctttttatgccaaacatttgacagtaaaatattctgataaaatttttctcagttca

SEQ ID NO: 84659 - DNA, 764 bp, Heterodera glycines
atggacccgagcaatggattgtatgacaaaaaagagaacaaagtgacattggccattgatgtcataactgttgatgagccaaaaatggagaaattcatttccgatcccaacaaatccaacggcacactttcaatggaaattgaaaaagtgtcggaatttgcgcgagaaatctttgagagtgaacgtaaaagcgaaactgtgcacatcaaaggattgccatgggtgaaaattactaataattaatatatattaacaacaattaattaattgatattgagcagaaaattggagttgcaaatgttcttcaacttttcgaattgtttcgcaaaagagcggcgtaaaggatttaaggagagaattaaatgacgatgtttttgacaataaaaacagaggctggggatatgccaatttcatttcatttgctgtgagtgacaattcaaataaatagtgcccaattaaattttaacataattaaggaactgatggacccgagcaatggattgtatgaccaaagcgaggacaaagtgacattggccattgatctcagtgtgaaagaagcgaatattgaggagaattcataaatacccaatatgatctggcaaaaatctcatcattgaattatcatcctatgggcctgctgtgtttagcttctttcttattgtttatcttttgggttttacaatattgatctatggattattaaagcggctttttttaagcattgaaatgaaattggcatatcccctgctgtgctttctattcaa

SEQ ID NO: 84660 - DNA, 491 bp, Heterodera glycines
atggatttggccaaatcactgctcaccgagtgccaagcggagaatgtgcagcgaattgtggccgcactgagcgacggacagcaaacactgctcggccacgtggagagcgaacggtgtgccgtgaaaaatgccaactgttttttattttcaagccaaattccggttttttggactgttttaaaatgctaatttcgaaatttcaaaacaattttgtgtaaacgaataatattaattacctaactaataacggaacaaatcattttgtcagcgctcgattgacctcgcgcgacgcggaggagcgcagtgccgcactgaacgaactgtgtgccgtcgttttgcaaatgctaccttccgccgccgctggagggaagcaaaaggccgaagggcacgtcaaaattgtggcgtgggaaaatgtgccgatcactcgaccccaaattgatcagttgcttccctttttgctgtccaaagtgaggcaaaacgctggagattga

SEQ ID NO: 84661 - DNA, 1407 bp, Heterodera glycines
aattccacaagtatcttttcgggagacacttcgttctccttttcggaccacaagccgttgttgtccatttttcgcaacaacaagggaataaaggcttgcacagcgaatcgattgcagagatgggcaatcactttgctcggctatgacttcgaactcgaataccaaaatactgtgattttggtcaagcggaagttttgtcgcgcctaatcgcgaagacaccagtgccggacaacaaagtgatcattgcaaacattcgtgaaagcaatgaaacgggagtgttgaattttgttgcgaaaactctcccactggatcacagtgatttggctaacgccgcgaaaagtgatcaggtgatcaaaaatgtgaagaaatttgtctgctcacattggccaacaaagaacaaaatgaccgcagacattgttccgttccatcgacgacgagacgctttgaccatcgaggatgaatgtctgctttatgcggacagagttttgattccggcatcgcttcaaaaagatgtcttacaacttctgcaccgaggccatcccggaatgaagtgaatgaaaggtctccccaggcagtacgtttactggcctgggatggacgaacaaattgaaaattttgtcaaaatgtgcaacgaatgcacaatggaggcaaaaatgccggtgaagactgagcttcagtcgtggccgaaagctgacggaccgtggaaacgcgtacatttggattacgccggaccgttttatgggaaaaatgtttctaataattgttgacgcgtactcgaagtggcccgaggtcttcaaaatgcgttcatcgaattccgcggctacaatcgacaaattgcggtcactctgtgccagttatggccttcccgaaattttggtcacggacaacggcacacaattcgcttcaaaagaattgaaggaatttgtgaccgaaaatggcatcaaccatctgttctccgctccgtacaatcctatgtcgaacggacaagctgagcgttttgtcgatacgttcaagaggacatgccggaagatcaagggagaaggagcctcggaaatgttgaccacatttatggcaacataccggaccacgccttgtgaggctttgccggagtgcaaaagtccggacgaattgttcctgggaaggaaaccgcgcacgactttggacttgttgaggccaaaggcaaaggcaccgataattcgagacgaggccatagagaagcaatttaataggcgccatggagccaaaccgagatcttttgccgtgggcgataaggttctcgctcggcattgtctttcgcagccttggcgccccggaaaagtcaccaaatgtaaaggtgtcatttacgacgtcgaattttttgacggaaaattcggacggttccatgccaatcagttgcttgtgagaagc

SEQ ID NO: 84662 - DNA, 440 bp, Heterodera glycines
atgtctaattattatggaagaattggacatttggttggcttcaatccgccgtcaaaccgtaatgaagctgaagaaatgataattgaagaagatgcaaggcttttgcttgaacaaagtttggatgaaaatgggctgcttgttgatcaatactttgaagaaatgggtttgaatgaagtgcaagatgaaaactcgcctgatgttaattcagaggatggagaagtggatatcatgaattaattcatatgaatttttatttaacttttatatttgaagatgcttaaattttacattgttattaaaatacatgaaaattgggtcagaatcatttagactgcaatttattagcgctgagtcttgtttattgagcagtagcgtgtaatacataaaaattttcattgaaaatgaagtttttaaccaaaaaaacgaatcgggataataaa

SEQ ID NO: 84663 - DNA, 285 bp, Heterodera glycines
atgtgcgcgtttcatgtgaagcaagcgataaatcgccgaattcaatcaatgggatttatgcaattgtacagctcaaaagaaccaaatggacttgagtttgtttgtctctaacttttgtatcgtaaatgataggaactaagtcatgctgaagaagaaaccgcagtggccgttgatgaaggaagacaattgccagctcgcccgcttgaattactcttgaattggacagaggaattgcctcagcgaggcggatattttggcttttttgaacacggattactgcaatga

SEQ ID NO: 84664 - DNA, 183 bp, Heterodera glycines
gccaatcacaattggcaagggccgtcgtgtcacatcggcagcatttatgtgcggttacaagtctatgccgtttctgtcgcccgacagtccgctgaaactatttgttaagggcaaatctgagggatttccattgcccgaccgtccgctgtccaacaaaattcgcattaaatgccttcaaattaa

SEQ ID NO: 84665 - DNA, 414 bp, Heterodera glycines
atggagcttggaagccaaaaatataaattaaataaaaattcatcatcattatcaccatcaccgttgtcgaaaaagcggtggcttcctgttgaacttcaatttgaaattgcgcattggctgccgattaccgaaagcattgaacgcccattaatacaagcagcaaaatttccacttgttatagccaaatgtgttctgagtcggattgaaaagcgcaatattttattattccctgaagtttatttaaaaaggattcaaacacaaatttttaaaattcagcaagacactttttaccaaatcgagggcattgaaacatccagaaaaattggcaaaaaaagagaattatttataaaatgggtcggctatccttattcacaaaatagttgggaagacgaagaggaaattaaaaaggtttaa

SEQ ID NO: 84666 - DNA, 113 bp, Heterodera glycines
ctcaggtgggattgaacctgggactccctttttggtggcaaactcacagaccactaagacaaaaaatcaattagtttttgaactgggggctcaaaattgactcggtgtgttaa

SEQ ID NO: 84667 - DNA, 454 bp, Heterodera glycines
atggggattgataagacccataaagaaatggcggttatgatacggtagctcaatggtacaggtgcccacggaatcggtggacgagtcctacaaaatcccagttaaaccaaccatagggcatatttttagcttttaaattatttaccaaagcactgaaatttaaaaaagattttcaggaaatttttgttcggctctgtgagtccggcaaatgttctcccaaacattacggtatctgctgaacgacacggaatgcaagtcagaaatgcgttgggtgaaaatttaattgtgccgcacaccgcgcaaatgtaccaacgccaattggcacaaagttggggccaaaggccaagcccagcggcaacagcatcagacaatggccaagtggacagaagcgaagcaacaagccaactgcagaggatggcaagttttcatttctggtaaaagtcaaattaataaa

SEQ ID NO: 84668 - DNA, 1268 bp, Heterodera glycines
atgggcaacataatccaaccgatggaacacacggccaaaaattgcagcgacgcgtacgaaatggactcgactcggctcggcctttgcatattcgaaatgttcgtcaacgtttgcgtgatcggcgcctcggcaccgtttgccaaaatggtcaccgccatcacttcgttcaccggcactatgaaagtgcttttcctcaacatgcttttcgccgcctttggcatcgccgccacgcggtcggacatttgaatttgaatttaaattaagttttgaaatatttaggcttttcgtgctcatcccccagtacatttccatcaattcgctttacagcgccgcttttgtggcgcccgtccaaattttccacgatgtcagcataaacgtgtgcgtgaaagcattgcttaattgtgtaatttaattctattattttagcaatactttgatcactctggccatcacaatggaatttttcgtctattcaatttggccaaacccaacgaaatcgaccacaattacactcagcgcaattaacaccttttggccggtaatatctattaattaccatattgaccgtttaatttttggtaatttagtggtctactacaattgttatatattggttggaacaaaatggtaagtactttatatattatttaaaacgatttacaaaatgttccacaggcattattgaaacagtgccccaatttgctgtgctggaagtgattaacattatcagttggatggtagtttcatttcaattaaatatttttgaattaccttttttatcaaaataaattaaaaaccgtattttttctctcaaaaatgtaaatcagaaattttggtcaaaaatgattttattattgagttttttcatcctaagaaattggcagaaaaattggcattgccaaaatctctgacctaataatttatatattttaatattgctttttcatttaaggtttttctgcgcctttactttgacaattgtaaaaagtacaaaaacaaaacaatgcgttcgataagtttggacgaaaaatatcaagtaaaatcctgctggaactttaattaaaaaaagtaaaagttccacaccaaagaattataaaattttctcaaatttatcctttaaaatttattatttttttcttgacaaattttttaatttaaaaatgtaggtaaatattttctaaggaaatattagaaatgtttaaattattcgcttacacaaaaatagaaccaaaattttaccatttatttgcctttttccactaaataaa

SEQ ID NO: 84669 - DNA, 511 bp, Heterodera glycines
atggccaagtggacagaagcggagcaacaagccaactgcagaggatggcaagttttcatttctggtaaaagtcaaattaataaaatactaagaatggaattttttgaaatagaaaaaatgatttgattcgaaattaaatctatcagaaccgccaaacacctaattccttaatattcccaaacaattacggacgaggtgtaaaattctatgttcgtttggcaatatttcagaaaaattgaacgaatgaaaaaaagttacgtcaatttttgacattattttttcaaaatcacgcagcgtgacccccacaaatttagtttttcttacataaaattgtctcgtttataccataaaattttatccagaaaacaacattaaaagtgaaggaacttttcgtgatcaatttgcattcggacagaagcagaagccaatcggactacagaaggaaaagcatggccaacgtggaaatcgcggcgacttcagcttctctgcgggggtcttggattttaattaa

SEQ ID NO: 84670 - DNA, 481 bp, Heterodera glycines
atgagagagaaagaaaaattaacagagaaagaagagaaaagggagagaaagaaaagagagagaaaacatgcggatgagacaatggaacaagtgatagaagaggagaaaagaaaagaagaactgaagaaaagaatggaagagatacagagagagaaaagagatagaaagttgagacaacgacagttgcagagaaacaaagatagagagcccaaaaaagacaacgaaaagcaaagagacgacgacaaagacgagaagaatcgaaaaagtgaagacagagaaatgagcgaagagagtcagagtgaaggaaagagttcgaatttagcggaggattttatcataacgccaaaaaatgcgcaaaaaggaagaaaaaatagaacatttgaaaataagcaaacgagagaagaggagggaaaggaagagaaaagcgaaatattattcgaaaaagaatggcaaaaagcgatggaaaacacaaaattaatcg

SEQ ID NO: 84671 - DNA, 882 bp, Heterodera glycines
atgttggattggatgtctacccgcatcgcaaatcacatcataccggacagattgcgtgatcgtacaatttatgatcaaacagttaatggggaacaaatgatcattttttgttctcgttttgacctcgatcttttggtgaattatcagaatgaagtgccaatcgatggcacttttgacgtgaatgcttaaaaggctcttttcgcgggtattgcgagagccatataaaatatgccgctacctatgcaccacaaagttaagtaaaattgtaattacaattatatcttaaagacatgcccacggggatttactcaagtctacacaatggcagttgtcatcgatcattgtgcagttccggcagtttatggtttactgcccagcaaaactcttgccacatacacaagattcttcgaaacaattcgtcagtctgttggcaataattggttcccgtatcgtattatgagcgattttgagtcgggagcgatcgctgcggccgggaacgtctttccaaattccataagaaccggatgcttgtttcactttggacaagcaatttggcggagaattcagcgattgccaaatttgctcacgcgatatcgggacgatgaacttgtcagaacatctttgcggtctctacaagcgctggcttttgttcccacggactttgtttacaactatttttgcattgtcatgtcaattcttgagccgactcctgagcttcaagagctgatcatctatttcattaacacgtggattggacctcgccgaatcatacaaaacgaagaagttttggttcgcgatgcaggcggagcagctgataattggattcgggaatgtagtggacagagtagcagaagggcttggaagaacaaacaattcgcttga

SEQ ID NO: 84672 - DNA, 1295 bp, Heterodera glycines
atgtcctatttatttacattctttttcattttcaacctttcaattagcaatggaagcaaattgacacttcaaatagcgccgactttggttggccatcactcattcaggcaaaatcttataatttaaattatgtaaattaattaatgctatccgacaacaattaaagaacaagtggttaattgccatttaaaattcgcagttattttgtctctgtccaatgtattgaaaacggagatggcctcatcggcggtagccttttgtacagttcaatttggggcaatttgaaatcgcacgaattcattgacaatgccagcaaaaaagtgacggaaagagtcatttttgaattcaatcacacaaaatgccgtcactttgtcgtttcaataaaaactctaaaatggaatgtcaaagcaaagggaacgttgtcctacgatttggaattaatagaccaattaacgctcgtaattgcctttataaaattaaaaggggagattaataagtacaaattaagccattaatttacgatgggctaatcgacgccgaccaatcgcataacgccgatctcccaattgactttggcaaatacttcgtcctccaagtcgatccaatgcttgaagaggacgaagcattttacgaggtcgacgtcatttgccacgaaaattcggtgcgtttttattatggcgaaatgttttgcgatttaaaatgctcgacgatggttttctcgcaaaatgaaagctgtttgaacagcgagtttgacatcacaatttggaaatggcacaacaaaagagaggtgataaagcggttcattattaaacaaaaatgtgcaaaacaaaatgatttaaaaaaggaccaccgaatttaaatttaattgtaattttcggtcgacctctattttcaaggagtgattaagcgagtttcaaggacaggaaaatctgttatgcccaaggacaaatcaaaattgtcttttgaatataagaaaatagtacttgaaaatcagcactgtatttaaacttaagcattatttattatcgcataaattcagaaagaaaaagtcagccgaagggaccgcggcattcacagttccaaagtttacattggagacggagaagaacggacaattgagtacgaaatcgaagtcaaatgaaagcgaaaagagttccgagtgcactaattggtcagcaggactcaaatggcaatgctcaattttattgcaatttgtgcccttcaatcatttcccagtccaaaaaggacgttttcaacattttacagaaaaaaatcagcagatgctattaaattag

SEQ ID NO: 84673 - DNA, 1301 bp, Heterodera glycines
  unsure (1)..(1301): unsure at all n locations
atgttcgacaaggaattggaatcgcacgggacgggcaacaaaagcggcacgaaacatttggccaagttgttgccggaggcaacaactgtcagagacgagaccttacccagaatcggattaccaagcttggtaaaccggccaaataaggtgttcattgccaggcttagtaaaacaaaaacatgttaaaaccgaggattggtataaaatggtatccggacaatcatcagtgtgaaggacaattcaacaataaattgtttttttttgggcaatgattaaatttggcgatagtatttgttagaataaaattcgatttcacaatatttatatgaaatttcgcgtttcaaaagtcctgtttttacagtaacccgggtcttgttggatacaaaaacttacagtaggaccctggaaagcctgtacaggaaagattgacctctctctaatcaattcataattgttacttaattggtgctttaaggatgcaaattcgattccaagggggcctttgcgttcgctttttgtcaatgattcgcttacaaatgaccatgaagcatcatcagtccaagaatcaccaaccaaagatgaacttaatacccaaatgtgtggcatttggtggcttaccgtatttcttctaatagggcctcggggttatttttaggtatttttgccgactccccccctccccccncccccctcactcaaaggggactttatttttcaactttccacgggatgggcttttattagagggggtgttttaaggggtttttcaaccccctagaaggggggagagaggattgtaatagaagaaatacaaattcaaattaaatatatttttataaattaaatttaaattttgtaattttttaaagttcattctccgatgataagccacaacgattgcggaaatatccttcattgcattctgttgattatgactatgaatatttggaagaggcaaaaattcccgaaaaatttcggtttgtcctgaaaattttttcaaaaaaaaaaaaactaatttaaggtctaatattgatgatgtacaaaatgatcagaaacataaaattgtaaaagattatgaggccagcagcatagaacaaggtcatcaacaaactcaaggaaaggtgtgggggcgaaaatttgaagattgaccccttaaaggcgaaaacttaaatttttcaattaaaattggcaaaaaaaaattttcaattttccatttaaaacaggcaaaagatgccggcggccaaattgaatttgtcaaacggcttccttttcttcaagaatcgagcccagaagttgtggag

SEQ ID NO: 84674 - DNA, 369 bp, Heterodera glycines
atggtaccctcatgggcatattatgcatatgagggtattaccctttatctgttagtgtcatgtattttcaaaagttcactttagggcatctccgcccgagtgccagcagattgtttacagacgacatcgatacgagttgtgccttccttttgtacgagttgtcaccaagacacggaccgggtcagtttagtctggccggtttagtctggccgttttagtctggccagtttagtcagagggtcggtttagtctggcaagctgtttttgcccataactcttaaaatattttttttgtcaattataaaaggaaaaacttaaaatatctatgtttagctacaatataaatgaatatcccaattagaaaataaa

SEQ ID NO: 84675 - DNA, 522 bp, Heterodera glycines
atgctgatcaaaaaaggtagcaacaccaagttgatcagatcactccttcatggtgatctgatcagcccattttggctgggaacgaggggtaaatttcaaaaaaaatttctagggggttgagaaaatttttctggaaattttgagtaagccgggaccttgatttacaaactgacatggattttctggacaaaaacccttgcaaatccaggtccagaaaaatccaggcctgtatcccggcccacatcgagctctagtaaatacattttttcctgggttctcatgctttaaatagtaaaaacattttctttcacacaggtctactcaaatatttcattttcttaaaaaaaatgcctcaaattttcaaaaattggctatttttgggcataatctgacaatgtattgtatttaaatattcaatttttttccctgcgccgcctatcggcaccgcggcctccctcttccaccctggtcaccaccaaaaagttttttcaaaaaatatgccgcaaaaaattgttaaaatta

SEQ ID NO: 84676 - DNA, 575 bp, Heterodera glycines
atggagggcaaagggtcaaagaaacggcgtgccaccgccgccgccccaccgttgaagccactgtttagcaccgtcaagcatggcactggtggcactattgttgttgttgttccgctcatccgtcccgctggcaccgttgttctgctgctgttggtgacgccattgcttagcggtccacccaatggtgccgccgggacgatggtggggttgatgatggcacatttggccatcattatggctattgtctccatcattgcactcctcactgctcggcgagcgaatgttcagtctgtccaacttgaccacctgtttgtgcgttgtttatgttattgtatataagggaggaatcggaggcgggcggtcccacaaagagaaatttcggcatccagaaatatggcatcataaaaaattccgaaccgacaccagtcccaatcctgttggtggactttcttcccaaaataaacgaaacatattagaacacatcaatcatttcacattcctcctccccgccccgcttcccccgaataaatttaaaaaactgaaaaatttttagatttctaatttcttagttttaa

SEQ ID NO: 84677 - DNA, 844 bp, Heterodera glycines
atgttcgggtggctccctccattccatcattttttccggagcaggacatttctttcccgccgtttctttcccgtcatttctttcccgccgttactttcccgccattcttttgtgtttcatagaagggtgaaaagagttcaaaaaaatcgtgacaaattatacgaagaatttgttcggggagatgatgcagcaaaaaaaaggcttgtgtaccaaagaacagatgagcgtattagaaacattgttgttggcggcctcggagaacggactattgctgaatatttacgtgggattgcaaacaattttgaaatggatcagtgagcaattgagtttttttgtcagtgattggtcatgatgattgttattactgcttatattgctttataaatttatttttaatatttaggattaattctaattttgggaaagaaaagtcccgggaaagaaacggcgggaaagaaatgtcgcgtaccgcattttttcccattttaaagggaagaacatccgctgagcatttccgtctgttcgtccaccatcacttcctcctccgtgccgtcctccgcttccgtgtcagtgccgtcgtcgtccgccgcggtcgccgcatccgtcgatttccaccaccacaaccaacaacaacatgaagacgacggcgaccagcacaacagcggcagcaaagtgttccgctttgatcaccaccaacacaacaaccgccagcagcacataaagccgcccccatttgcgctagaagaggtgcttttgccttgccgataggcgcccaatcgatagtcagcggcggggacggcacaaattctcggcgccgaaatttttttttaaacttcgaaataaa

SEQ ID NO: 84678 - DNA, 542 bp, Heterodera glycines
atgccttcaaattctttttatgttgtcgttccgtcgaacaccaatattgaaggaaataggacaaattcgttcctagtgcgtttaccgcgcaaactacaattcaattcggaatgggaggtgggtttggcggtgattgtgtatcccccccccattcatggccttccataggcaccgtggagcaacaatttgttcagattgagtggcagacggggaataaggtgcggattgagcttccaccatcaaatgtcaccaacccccatgagcttagcaaaaatttgtacagactcctgggagatggaagtgatccgttggcaaaaaaggtacgctcaacacagaattctttcatgcttacgataaacaaggctcgccgctgggccagagaagagtacattaagcgaaagaccaaagaaaaacggggtgttcgtgacgaagagctgctcctacaggccctgttgacagatactggaacattggttgaactcaacacccgcaaggacttctggcacgcgaaaagcatgctgaaacgagcaatatcgcgttga

SEQ ID NO: 84679 - DNA, 996 bp, Heterodera glycines
atgcttattttgctgcccgttcaacccgcatacgcccaaaacgcatggcccctccgccgccggagggaagacgcggtggcactgacagtgaaagtgccgatgacattggcactttcgatgtcgaaagtcaggcggcacggagcagcacatccgcggggaatggtggtgataggtttaaacaattaggccgttccctatttgtggtagaaattgcggtctttttgatgattggctcctgttttttcgcgcttattacccctaatttaaatcctacagcggtcatcccttttattgtcatcaatagcatttttatactcattatcattagtcattcattatgtattttttttaaacgaagacattaatttttcggggaaaacagtaatttaagtaaaaaagaaaccctctggcgactcctctgatcagctctataagaccaaaattgtttgttgctctattattccttatctgttcatctgtcttacacattctgaacaccccccactgaagcagatactgtttaggtacggtagccaatgcgaaccaaattttaaaaattgttctttcaagcttcgtatttatgcataaattgattggccctagatttgttcaatttatgatattttatgactatttttggtgatcatttttacttgcgggactaattacataagcgtcagcaacatttgctgaaaagaaactcgaaatcagaaaatgcatttgttattccaaaagggtttttttgaatattcctaacaaaattaaatcagagaccttaattttgaaatggcagagaccgggacttggaaaaaggagttctttgtccagtctgcatattttttaataattattatatcttcaattcccagtaaaaaactgacccacggactccgtcagttgggccctcacgtttgggctccagcatgtttttggttaaacttttttatttatcatccaaatccaacaaacgttttctatgggttctattttttctag

SEQ ID NO: 84680 - DNA, 2045 bp, Heterodera glycines
atgttccgtcttgcctgttctgccccggccagcattgggcctcagagtgcagcaaagttacagatgcagagactcgacggaccgatggccgttatccttaacggagaattccatcgccgcataagcagcatgcaggctgggacaacccagattcctggctttggccagctgtacattctggacccagtccaggctatggaacagcgtcgaaacaaccccacatttactggggaaaaaatcacaaacgaagatgagtttgtgcagggtcatgagcttaatgaagcgaccctcgagctcttggaaaaaatgattcaagagcatcaccccgctgcgcaagcgtataagcaagcgcgtgagcagctccaggagctcctcaaaaaacaaaagccagaagagcttcgctttttccgcatgactttgttgaatgagcgcatgactcctgctgctctaaaagatccaaagctccatcctcaccaaataatcaccccttcaacgggtgaggggatgttcgctattcacgcggatcccagtggagcacccccgccaagggggatatgggttgaaaacaagcaaggtcaattgaatgaaattgccgctttcagtccttggactgacagcctgacatacccattaataaagccaatgggtgatgatgggtatataaccggcattaaatatgcaaagccgtcttcgcgtaagcgaaaaagtgatcaagatgtggctggcctattcgactctgaggccgagtccgacaatggctcgtgcgagactcagtctgttgcatcttctgatgcccgggtcggtcgcttccactttcttcactttatggccgcattgacaaatcgaaaagatttgtctccctgcgggattactgtaagtattatctcgccataagggacgaaaatgtggagttgcaataccaccacattctttcgtgtggaggtggtcttggtcagcgctggatacttgatcaggctgctaaaatcgattggcaagtagccacatttttgcgcagacctgacatgaatctgcggatcagcactccaaaaaatttgctgcagtatttggtcaaccaatacaataaacagcaggcacggcagaaccccaatgctcaacagaaaactgttgatgacattggtagtgtagttcgattttccgagcacaatgtcaattctctccagtattggaagaaaatgtatgaagattgcaataccatatttgcacggcatcatgacgctaagaaagcgcgcctcttcatcacattcacgaacaacagggaatggcctgagttcaaagagaacatgtacaacaacggtcaagtattcactgaccggtttgatttgtggatgcgtgtgtggtccagcaaaattgctgagttccacgaagagctttatgaaaagaagttctttggaacaatccttggatcaggagagtccatggagttccaaggccgtggaggtccgcatgcccacattgtagcccagactgacctggacgcaattccagatgttattcagcaatacatttgggctcatattccacctttgccagacaaaggcgatggcacaccaattgcgcaaatgcatcgcgaagtgcgcgaattaatgcatttccaactgcacagatgcagtgacagttggtgtggcccacgtgacccatatgggcgatgcaaaaagggcttcccagccctgtactcaaaatgtacgattttgcggcccgacaggcctgcgttgtattaccggccttcatcagtggatggtggtgccaatatagtggttaacggcttaatatatgacaactcgcaagtcgtgccgtacaacccttatattttgctgcgttaccgagtacaccacaatgtactatttgcgtatggtaacaaagcaaatataaaatatgcgcttaagtaccctttcaaagggcctggacattgttatgtcgagtgcaaagaagagtcaggcaacaaaatcggaatcgatgagccagctcagtatgccaaaatgaacttccgtggtgctacggagctttatgcagttgttaactcatag

SEQ ID NO: 84681 - DNA, 1584 bp, Heterodera glycines
atggcagtcgctaaaaagcgttcgcccgccgaatattacgcgttcagcaagttggccaactgtttgcatgccgttgggttggccaatcggctcgcctcccccgccgtcgcgtgctcgttccgtgacgtcaaagtggtcgcgatcaggtgagtccaggaatttcctctatctcacaagcttttttaattgtttaattcattttaatttttgcgatacctgcaaaattggtcaatttgaattttcataaaaaaaagtttgtttgcaaatttttttttcataataaatcattgatagcttcttaaaaggttttcggggtcgcttaccacgaaactgacagatctcgaacgaaaagtcggaatttttttttttgagacagacatcggcttacaaaatttttgaaaccataaattcacgaaccaaaactttgtgctttaaaatgagctatcaaactcttatttatgttatgtttacaaaaaatatggattttaaattagcaaggtcaataaaatttgtcaatttttcgatacgaaatttattattttggttgtacaaatttgtgcgttttattaaagtgttttttttctcaattatttgatgttgttgttttttttgaataggcctggctttgtacgcggcactgagcttggacggcacacgaattttttgctcagaatgctcgcctacccgctgatttggatggttgccaaggatttggaccaggtcatagtcaattttgcgaatcacggcgttttttccgggtgcacttcattatttggaaattttcaagaaaaaaattccttggaaatgttttatatggaaattccaaggaaaaatttttgaaaaaattttttagcgattttttggaaaaattttcgaaaaaacttactaactaatttatcataaatttcaaaaaaatcggcgaaatttttttctaaattttttttttaatttttgcggcgaaattttgtcccggcgaaattacggcggcgtaatttcggtggcgaaatttcgccagccgaaattatgtcccgtccccgtcgttttcctccccgcaattttttttttacaaattaacaattaaaagttttttaaaaaaatctaggaaatttcttttataaaaaaattcaagttaaaaatttattgaaaaatttttcagcgacttttgaaaaaacttagtaattcaaaataaaatttcgaaaagcaagaaaacaaattttctgtttcttgcatttaaatccagatgcgcgacccgatccgcgggtattttttctatccgcgcctcaaccctgccacttactccagaaattaagaaaaaataatcaaattgtttgccacggcactttccagggcatttcgtccatgttgcactgtgcccagtgcgacttggcccaactccaaaatggtgcgctgtattacgagggacgcgtggtgccgtacaaaaatgagatggtcaccaatgaagaggccgaaaaattgtggcaaatgagcgaaaaaatgaccaaattggaggaaaatggtgaaaaagggcagccgcagcagcaaaacagtgaagagcagcagcaacagaaatcaccaattaaataa

SEQ ID NO: 84682 - DNA, 405 bp, Heterodera glycines
atgccgcaggtattattggccaaaaatgcactcagacataattttgtgggtcaaattatgcataacgtgccaactaagacatcatcccactccggctcatcatttcctcccgataaaggtactgttggaattggagtcatcactgcaatattccttttccgttgcagtatggggtgttcacctttatgtggggagtgccgtaacgagaacttcaagcgaggcgacaagcgcttcctcctaaacaccggcagtggccaagagaagctcgagttcacccaaacattctgccaagactgtgccaagttgaactttgactgcaccgacctgatcatgaaacaccaaaagaaggatgacgtgccacagaagaacgggggacggaacacctatttcaagatggaaaagtga

SEQ ID NO: 84683 - DNA, 820 bp, Heterodera glycines
atgcaccaaggactccatcgccgccacaaccaccagcagcacatcatcatcatcatcaccatcaacaagttcaagcagtacaacagcagcagtaagttcaaggagtgcaacagcaacaacaagttcaagcagtacagcaaccgagacgacggacggtcagggacgaccgcctttatgaaatcgcagcgatcgtttgttcgcgccgggcggaggatggtcaaacgcgggaattgaggatccattggcagtcttttccttatcgcgatgacacttatgaattggcagtggatatagcaagggtaacatttttttaaatttttgcacaaaaaaataaagcattgaataaaaaataattcagcaagcgcctcaatccacgcggcatggcttcaagtgcacgaccatgggaacacgccaccgcatgacgtcgagatgccaattcggcctgcgacttggatgagcactgttcgcagtggtcggcatctgccagtggtggagtcagtctacccagggcgaaaccctgcgcgccgtcgacttttcggtaaattaattaatcaattaaacattcctttgtaataattaattaattaaagatgcgcaaccagcagcagaaggaaaagaagcacaaaatttgctgagggcaccagcagcagcagaagaagaagaagcagccttaatcgtcgatcaaatgcagccgcaggctgcagcagcagcaatgatggaagatgaggacgacgacgacgacgaaattgtctttatcaatgaagtgcaaagagaagcacgccgccgccaccaccagcagcagcagcagcagatgaagtga

SEQ ID NO: 84684 - DNA, 1739 bp, Heterodera glycines
atggacacaagcaaagggttgtataacaaaaaagaggacaaagtcactttgaccattgatgtcattgtggagggaatgaaaacggacatcgccgacccaccaaaatctaaggggaaaattttgtggacaatccaaaaattgtcggaatttgcgcgagaggttttaatgagtgaacggaacagcgaaacggtgcacttcaaagggattgagtggaaaatttgcgctgaagtggtgaaaaatggcagcaatgaaaaggctttggacatttcacttgcgtgtgtccccaccaaaggtgtgaaattataaaaatagctcttaaaataatacaatatttacaattagacaccatttgtaccggcgaatgtacggcgatacttcgatttgtttcacaaaagaacgaaacgttacaatttgcaacaaaaactgttgaaaaaagtggttttagcactgaatatgactgcgtggcgcttttcccctcgattacttttacggtgagcggaggcaaccaaagcgtaacaattcttacatcggcttaagctaggcctaatatttaatgcttatattaagctttataattttttatgtacgagttgccactgacttatcagaagaacgtctttctttgcttaattaaatggttttaaaacaaaggaattgatggacgccgacaaaggattttacgatgaaaaggatgacaatgtgagtttggccattgattttaacgtgaaagtacagaaagggacgaagtgcaataagttgactgtggaatgagcaaagcaacattttgttatcattattattcgattatcctttacaattttacactttttacttttatttattttttattgaaaatgatgatcaattgttatcactcgttatctcacctttacaaaataaaaaaatcgaaaaaaatttatctgacctcgcaaacaattaaaagagggattataattggcagccttagtgatcacgaatataatattcattttaccaaaacgaggggaaaaagcgtttttttcaagaaagttcgggaattgaccaaaatacagttaaagattggtgaaagcttcccaggttggaatagactagtcttttaaatttaatcaaatttaaattttttggcgctttttttaaatttgaatttaattgactttccttttttgcttgctcccttttaatcttcggttcgcaatagtacacccaagatctacttccagatttattgtgcacatctttgtttttcttcatttaaatgattcgtcgatcaaaatagcgataatatagatcatattttgctttccatttcttattgatttatttgttcgtttaattcgatgttttctttccaatttttgtattaaattatttctatttttttagaatcaaaaaacaataaaaactcacgaatcctcaacaaaatgagcaatcaatccgcggctgaacttgctgacgaatatgagaggtgcgtttttagagaaaaatctctgttggaatttaaaaatgccatattttgtggttggtggcacttatttcgttgttgttattgtaataaatattttagggttgacggtgaagccatcaaaagcaacgaggacagacgcaccgaggccgagcaggtcgggttgttgaacacctttttcagtaatagtttggaaaataggagaatgacaacggacagttcgttgtcagtacgccgtccaaaatggacgaatcggaggacagcggcggagaagtga

SEQ ID NO: 84685 - DNA, 2509 bp, Heterodera glycines
ccgctcctttgctctagacaacgttatgatcaaaaaatggccaaaagcagcacggaattggtgttgcaaacagccgatgaaggcgaaaatcgcgaggcggaaggaacggagcgggagacatggggtaaaaggagagaatgagaggggggaagagagagaatgcctgaaggggagaggggagggggaaaagcgggagacaaaaagatgatcaaggcgaaatcaacatctaatggaatgaatgttgggggatgcctttgtttagagcgcaaaatcgactttcttctctctgtggtcggttttgccgttgatttggccaatgtttggcgttttccttatttgtgcttcaaaaacggtggcggtaagtcgcttaaattgccgtttcgttctccccactttttgccgcttcttcaggcgcttttctgctcccttacacaatgatggttcttttggcaggtataaacatccaatgagcacccaaatcagctttatttggcttttgtaaggcattcctttgttttacatggagttggcacttggccaattccatcgaaagggtgcgatcacaacttggggccgaatttgtccgctcttcaaaggcatggacgacggaaggtcccctttttgagcatcattcgctgttttaggcatcggctactgcgtcattatgaccgccttttacaccgacttcgtaattttgctaattgccccccccccccctcttttttgctcactttcccagttttacaatgtgattatcgcttatgcccttcactatttctacgcctccttctccacccaacttccctggtcaagctgttccggaaaacgttcttaattaattctgctaattgccctgtgatttccttttgagacaattcgcccgcctgttacgagccgagttggagcgaccaatcgcagcaatgcgcggacggccccattttccggcagaatgagacgagaaatggcacttcgccgcgcattgaccgacccgtctcagccgcagaggaatatttttagtaagaaacagaaattgggagagagggaaaagaaatgcatttgcagcaaatatttccttggactacacgccgaaaaagaagccattccccacgtcacacaaagcgtgggacaactcggaccaatcaattgggaaatcgtggtaagacagtcaaagaaaggcaattaattggttaacgatgactcattaatccaatctcagactaattgggttgttgtaattctccgttttcccaaggcttgtctgtttgttgtctacatcatctgctatttttcgctatggaagggcatcaaaatgtcgggaaaggtccgtccgttttcttaccgtggttcccctcgtgatgctcgagagtctcggccaaagaaaactgttttctctgatgggttcagtctcggatttgtttcagtcccccgccctctccccccccccccctccccaccccttcccatgctcatttgtcaggttgtgtggttcaccgccatttttccctacgttgtgctcttttgtctgctcatccgcggcgtcactctccccggtcccttttccctttccctctccctttttcatttttcaattataaatttcaaaaggttccgaaaaaggcatcgaatattatcttcggcctaatttggagaagctgaaggacccaaatgtgtggcaagatgccgcaacacaagtgcccaatctgtcgcgtataaatttgttaattttccatccttaaaggttttcttttcacttggcccaggctttggcgttttgatggtttgtactttcatttgaatattttttattttaaattttaggcttattcttcttacaacgaattccacaacaatgtttattttgacgctcttctgacaagcacaataaattgcgccacgaggcatttaatttaaatgcattaaaatttagacaattagacgcattccaacccaattaagagttgattgttttacattaatattctaatagttttctggccggtttcgtcattttctctgtccttggttatatgtcgtgcaaaagtggaaaaccaattcacgacgttgcgcaggaggggccggggtcagcagtgccttcatgactccggccattagtcggctcatttctcagtttagcctcgtcttcgtcgtttaccccgaggctttggccacaatgcccggggccaccgtttggtctttgattttcttcctaatgcttttgaccctcggattggacagctcggtgagcaaagaaacaaaccccgcacccaattccaatccattttattgttttcgttcagttcggtgggtccgaggcgatcatcacggggctaagcgacgaattcccagcaattaaacgcaaccgcgaagtgtttgtggccgtactgttctctttctatatgatcattgggctgacaatgtgcacaaaagtcattttgctttatttggccactaaatgtgccaaaacccaggccgaattaagggcggaatgttggtgatggagtggctgatg

SEQ ID NO: 84686 - DNA, 2313 bp, Heterodera glycines; identical to SEQ ID NO: 3438
  unsure (1)..(2313): unsure at all n locations

SEQ ID NO: 84687 - DNA, 599 bp, Heterodera glycines
cttgaaatgggcctttcgttgctcttccgaagcgaaacccaacgggcagagaaagtcgcgataacagcacagctcattcagtggcacagcttctgcacaattattaattgcaaatggtggtggctaattaattgtctttgctaattacccattttccgtctcagacgcgccaattcgacggccaatccgtggcccagcaaatagcaactgtccgtcaacaccaactcctcccccccttcgctttggcattccaaaattgcattttctctgcgaatttcctccgccgtcggtttttgcagcactctctgtgctgtttggtgggcaatgtttcttaaaatggaaaaaccttcaacttttggctttgtccgttgctgtgatttgaatttccgtcgagtaaataaacgccgtgcccttcggccacttcgaccggcgattggtgcgcgatcagcaaaagatcgccaggaaaagaggggacggaaacggcgggaggaaagtgttcgagcacatcggcagaagcgacgaaaacgaagccgagcgacgaatggacggagagaaggagaggcccaaaaacaaaagaatggcattttggccaatttttg

SEQ ID NO: 84688 - DNA, 696 bp, Heterodera glycines
atttcggctgaaagctttttggaatggtgcgatttgaatgaaaattgcgaagttggcaaagaatgcattttgagcggattggtttatgacggggattcactgctgcgcattggcaatggcatttgtgccagcactttcccaatcgatcggaaaccttcgggaggacacgcgggtcggagtttggcattttcattgaaaaaataattcatttgacaaaagaaaaagaaaatatcggcacttaaaaaacaagaagcccttattgcgtttttcagccttattagcatatttttccgttcttcagttgacaattccacggtctctgcttttgttacggtggcatttcaccgcgacgacgacattaagcgaagttcggccgaatgtccgctgctttggtttggccacagattggccaccatcgcccaagggcatgcccaattccattccctttggcactttccccttttctcggctcacccaaatcccagcgaatccctgcaggaaacattggacacaatcaatcgactgggccaaaacgaaccacaaaaaagcgacaagacaaggccgagaagcgatcagcaacttttgtcaattgaagaagtactgcaaaaagtggacgcaaaaaaactgagggaaatgcgcgaaaaattcattaaaatgccaatggaagagaaagaaagcggaaaaccatcaaaatga

SEQ ID NO: 84689 - DNA, 1664 bp, Heterodera glycines
atgtcagaccgccgtaaagaagcggaggagaaaatggcaaaagcaatgtaaaaaatttaattaaaatgccaattttcaatttcaattttaaatattttctttccttttttttcagtttcatttccgccgactgttggctttgtgtgttcgatttgcttgagccttctcaacttggccttggaatttcaatgatcagccaccgttttgacttttacgtggacgaacattttaaaacccgcaaatgggcgctaaaaattattggaattcgcatcaaaaatggagaaaatggcaccaaggaaatggaaattgtcaatttcagtggaaaacaaataccaattccgcaaaaaccgctgccacgcggagtcatcgggttcgaacgcgtcgatttcgtgtaagattggcgattatgcaaagatttagacaaacttcccatgtttagttatatcgaccacaatgtgatcacttttctcggctattttcgcccacttttcgccgcctgtcaaatcaatttgttcatccacacggacagtgatcgagttttggagttgattttgcgcaacatttggccaatgatcgcgaccaacatttgtgccattcaattgtccaccgaaatttttcgctgtttgcgacaaatggcgccatcaattctcgacgactgtccatcgcttcgcgttgtcaatgcctattctggtcgtttcttcgctgaatttccggccgatgactggcttttcactccgcttcaaaacggtgtgccaaaagtgttcagatgctggatgggcaacgatgaagggacttatccgtcgatcattgaagcccttaaaacggtgcttactaatccatgtatttagattttttgggcatttctataatcagacaaaaagggcgttagtacggacaaaaatggtattttccttcgatttttcattaggcaccaaaaatggaccatctaaaccgaaaaagtgcctgccaatctctggatttttgtcccatccccaatcgtaaaaatgtcattcatttcgtttttcttaaaccacccgcattttagacttttgcctcggtttcttcccccgtcaattttattgtcgtcatttggtttccgtcgtcttttgcttcctccgtcgtgctcttcaatttgaccaacgaattgactcgtgaacaattggcattgaaaagaactgacaatagcgatcgttttctgttggtccgttgtccaattgcgcgagacgaaaacaaatggacaaaatgggaagaagaagcgattgattggcgaatttataatcagtggaatcaaattctcatgctaattaatgagaatgatatcggagatgggtcagtgtgaatgttttttccatgagtcaaatttatttgcgtttatatttttaggcttctcgacgcaacgcccggcccaagtgatcagcagcagaatgaatgaatcaattgttgagaagtgattgatcaatttaattattgaaatcgaaaatgaattgaggctattttaaaatgctcgtaaaattgtttttttgttttgttggaatgatcaatttatttattttctgcttaaattggtatgttcatgcttaatgatgagcattgtgttgaatttagcattttatgcttaattggcatgttttcgaaacttttgactaaaacaccgtcttccagca

SEQ ID NO: 84690 - DNA, 1713 bp, Heterodera glycines
atgcaacccccaaaatcttggtgagtaactacttgattctgttacttttcgacagttgtgattccgacaaaattgattttgacagtaaaattttgcttttaaaaaactttaatggtacatatatgtctcggaaattttgaaaattaaaatgctaaacacggctctttatagaaaaagagaaacgctaaacagagtatgtttaatttaatattaattgtgtgccagaatatgggtggggtaaattgttattcaagttaaaataattattgataaaaaaactatttgcattccttactgtaattatatttttgcccagattttattgccataataataacgattaatagtttactccgataaaatactttggccgaaaatagtgataaacaactattgaattttcataaaaattcttaagtttttcaactttgtctgcggcgattgctggcttttggtgttcgattttcttgcgtttttttcacttggtccgcaacatgaagaagcaaataagggccctgggcctcactcgtgtaattttagaattttttattattccattcccattcaaactcattaaggtttacaacactgatcctgccttcgctgagaagtctaagatgatcacatcattggccttcctgcctgtgcaccaccttcaaaatgcccttaatgctcttcaagcacaaattccgccacaacttaatggcgttttcaattggttaagtccgaagacgaattttatgaatttttttttctaggtttctggacaactacacgggcagaatgcgcttcaatgttccaatgacggcgcctctatttgacccacacgaatggagtgttcatcagcgcaccttggatggtgctgatcggacgaacaacttcgccgaggcattccatcggaaacttcagcggcaatttagctgcactcatccaacaatttggcgattcattgacacgatcagatgtgagcagaaggcgcttgatgctgatatggcacgttgcatgatgggagaagccgcaccccaaaagaaaaggaagtatcgcgatgccgattcacggattcttcgtctcgtccaacgttataacgatgtcaatattgtcccccaaaatgatcacaattatgccaatcccaatgtgaatcccgaaaacattaacaattttctcgccggtatttcccgaaactatgagatgcgaccctagtttgtcccattttgttattgttaaatttatgcattttttacattaaatttatgaatgggaaattaaaaaatgataaaattttggttcgattagttagtcataagtttttctaattgaatctgacgcttgtacaagaactcgtacgaaaacgtcccccgtacgaaaacggcggtacgaaaacgtcccccgtacgaaaacggcggtacgaaaacggcggtacgaaaacgtcccccgtacgaaaacggcggtacgaaaacgtcccccgtacgaaaacggcggtacgaaaacggcggtacgaaaatggcggtacgaaaacgtccctgaccgagattataaatatatttaaaaaatcagaacaatttttgtcgctaccccaaaattagaaattcttataaataagaacaaatggaagcccctggtttaaaggccagattggactcactcttgctggcgctaacgaaatcagatgattaaagtgagaaaaaggaagatttacgagcatttaaaaataaa

SEQ ID NO: 84691 - DNA, 1066 bp, Heterodera glycines
atgagaagaagtacggttttaacctcaaagcaacaatattacgaacgcgaacccgaagagtatttaaagtatttatttttgttttttgtttattttccaatggatggatttttagggcgtagaatttcatttaagtagcgaagtgcaaccaaaatatgaaattatccgaaggttagttgaagcagccggtggcacagtgcagaaggataagccaaagaaggaataccttttaaagtgtattcaggtgagtaggagcaaaaccagcctagggggaggaaagtgaaaatgaccgttccatgcttatttttggagcttattcttgtgggggtagccgctggaaaatctcacaataagctattttttatcggaaatttttttttacaactttcccctcgttcagaaaaatgtgccattcttcattatttgtgataaaaacacactttgttcctaccaatttcttatggattcgaactttcgtaagtcttccttttgaaaagattaaataaaaaataatttagctattttcaacgaggatttcattctggtggctatccttcgacacaaaatcgacgtttctgaagaatttcatgcgttttcattaaattcaactcaaacttctaaacctaaaaaagccgatgaataaatttttgttttatttttatggataaattttaaataattagcgttagactaaaataactcaaagcgaagttttatcgctttgatatatttaaatcacagatgtattaacaattaaattaattttcatgattaaatgaaccgacaaaagcgccaaaatttaaattcaattttcaaaaagaaggcaattgacttggccctcaatcagtcccctctctcggtacgcttatcattgagctgtttccatctctttctcacagtttgttgttcatatttattccaaccttaaaaaggaatttaggcagaaaaaattaatgagcggaacaaagtgaaagtcactcttttgtcaaaacctcagtgtgatgcgaatggttatgagataattgtggactataagctaattgtgggaaattggaccaaattggta

SEQ ID NO: 84692 - DNA, 189 bp, Heterodera glycines
atgttcaaggaatggtatgaaagagaatgtcaaggtaattaacgaattctaattgagaagggtttataagacaatgcgactattttaggggagaaaaacgctgtcatccaatcgattgacgccaatgaattagaagagttgctccaaacttgttgtgcttacgggtcaactccaacgatacacaggtga

SEQ ID NO: 84693 - DNA, 87 bp, Heterodera glycines
atggccgtgcttggttctggcggacatacgaccgaaatgctcaaattgcttgctgcccaggacgaccttttccctggaaggctgtac

SEQ ID NO: 84694 - DNA, 427 bp, Heterodera glycines
ggaaaattttggaaatagcggacaaagagaaaatttcagggtttgtgagtttttgtctttttcgttaattgttaaccaaattaagccttttgcgcattgtcgagtcttttatcattgattccgaatgcatccacccaattaggaagcttgaatatgcagcaggtcaaaactgaatctgcagggtccgacaaataactcaaatgttctttcaaaaacagaatatcggatgagccgactcgctgacacagtgcttcgattatttcctactcaaattgaccggctcgattcattattcttatatttagcagaaaatggagagacattggccgatgttcacttggatgtacttaaaatgcttgacattcatgattcatacattgttatgtaaaacaaattcttgctcttgacaagattttatctcttataa

SEQ ID NO: 84695 - DNA, 741 bp, Heterodera glycines
atggcggttcacactgttcaactcgtgggtgaagccagttacaagggtcgggggcccaaccctagtttgagcaatgcgcatacatacaatgctggatgcaaactgggatctcgcaaaatccttcgcgggatccgtcccgctccgtgccctactaattattgtttattctagcttctattgatgtggagacagttaccggtatgccaagggcgactgctatattataccagcaaagaaaggtgaacgaattgacaaaaaacacaaaagaatggttcggggtcactttggctatgaaaaaaattgactgaaatttttactacttttaagcattggcgtcaaaaacccgttttatatgggaggaatggcccatgccaaagtggaaattttccaaaataaacccctttaacaggcaattttggcgaatgttttgacagcgagcgatgcggagcaatttgcaaaattggagtacgagcaaaacaaagcgcagcaaacattggtcgatatcaaattgaaaagggaaattaaagctctacgagtggaaatgtacgcttcggaacaaaaacttcataaacaactcgttcacgcggaacagaaacttcatgaacagcaacaaaaacttcatgaacagctcgttcacgtcagtccatttacagaaacataatataatacaattaattggttttaaaattttagctaacaaatgccgtccaacagattcgtcatcctgagaacaatacgtcg

SEQ ID NO: 84696 - DNA, 959 bp, Heterodera glycines
atgcgcgacagggcgtccgacagttacgaggatgctaagcagggggcgcaggaccgttacgagcgtgccaaggagtacggcagtgagaagacggagcaactgaaggactatgccaccgacaagaaggtaaagcccatcggaattggaaatgacaaagcggagaaaaccaaccatgaccaacccaattcaggaggaagcgggcgagaagatggagcagaacagggagaaggctgctgagaagtgggacgagacgaaggaggctggaggtgggggcgaaagggatagcaaacgggaagcatttggggagagggcaaattggcaatcaatgggtttgaaagttaggggcgttaagtagttgaacaatttttcggctaagggcacactgcggtttaagaatgtgggtgatcatgataagaatgaaagtgggtgtaaaaataaaccgaattatttaactagctaattaattctttataggcgagcgtatgcagcgcgccggtgacaaaatcaggggcaaatagaaaggatgtccaacagaatgaagagcaaatttatctgatctgatcggactctgtgagcccaatttaactgctctttttattggaatatttgttgtccatcttctcatataaaattttcgtgaatgaaaacaattcactataatttgtgtcaatgcgttaaatcaagcaaccgggaagaaaaaaacagcttagatgggtaaacagaatctatgaaattaaaaacggggagtttcgaatgcgttagggccaaggcaaagtttgtctaattagacgatttgctcattttatgttcagtttggccaatacgtctttgtccgaattgttcaggagaatgaaggtggcgaatgcattgagcaaatccttttccttttcgaagagacgagaaaccttcagatagacctcgtcgagagtcgatttctgttggaaatgattggcacttaa

SEQ ID NO: 84697 - DNA, 1114 bp, Heterodera glycines
atgcgtgagattgccgacatttttgaacgagtgttccaaaggtacacttcggcagtgccgtgcaatgtatttggaccgcgtgacaattacaatttggagaacggtaagagaaaacgcaatggacagaagagcacagacaaatctttacggagagggaaaaactgggcaatgcacgaaaatatgaaaataataataaacccccacaacaattttttgcgccaaaggtactcgctcggccgcttcgcggcctcgtactggggccttcggccccccacaattttctgcgccaatccaccatcatttaatcactgggactcaacccaccagcattccaatcactgggactcaattctcctgcatttcaatcactggcactcaacccaacagcatttaaatcaacaggactcaaccctccagcattcaatcactgggactcaacccaccaacattccaatcaacaggactcaaccctccagcattcaatcactgggactcaacccaccaacattccaatcgccgggactcaacccaacagcattccaatcactgggactcaattctcctgcatttcaatcactggcactcaattctcctgcatttcaatcactggcactcaacccaacagcatttaaatcactggcactcaacccaacagcatttaaatcaacaggactcaaccctccagcattcaatcactgggactcaacccaccaacattccaatcaacaggactcaaccctccagcattcaatcactgggactcaacccaccaacattccaatcgccgggactcaacccaacagcattccaatcactgggactcaattctcctgcatttcaatcactggcactcaattctcctgcatttcaatcactggcactcaacccaacagcatttaaatcactgggacttaacccaacagcattccaatcactgggactcaattctcctgcatttcaattactgggactcaattctcctgcatttcaatcactggcactcaattctcctgcatttcaatcactgggactcaacccaacagcatttcaatcactgggactcaacccaacagcattccaatcactgggactcaacctcagcaaatttctttag

SEQ ID NO: 84698 - DNA, 786 bp, Heterodera glycines
atgaacagaaaaataatgtacaccgaccggatccgaacttgccccccgccccctcaaaatgatgcctcagaatccccaatcacacagggattctgaggtcttaacgatgtcaaaagtaaaatctgattgcgtattcgtgatcagcggcccaaataacccataaagacatatttttggatgatttttgattttcaattaataaaaatatgtaaaaacagcaaaaaatacaaagaaaataatttacacagtccggactcgaacttcgccccccccccaaaaaaagatgcctcagaatccccaatcacacagggattctgaggtcttaacgatatcagaagtgaaatctgattacgcattcgtgatcagcggcccaaataacccataaagacatcttttttgaaggtttttgtgagaaaaatttttccactcaaaaatcctggtcacccaacatgatttaaaatttaataaataaggaaattttttttattaaatattaaaaataaaatgcattttaattttaaattattaataaaaaacaacgttgaaaattaataatatttattttatttaaaatgaaattaatttttttacaaattcagaaaaatattaattgaagcaaaatattcgatattttataaactttaattttgaccagaagcagtttcaagcaaatatgaaaagatgtttatcttattatttgttacatgaatttataaaatgaatggtatttttaatattaaaaaaaatgagtacagcagttgattcataaaaaaagtattaattaaa

SEQ ID NO: 84699 - DNA, 1841 bp, Heterodera glycines
  unsure (1)..(1841): unsure at all n locations
atgaacggaaaggagaagccgacgaacaaagaggaaatgctgctactgatcggacatgatcaggatcggacctgtcgggtcggcaaagaatgaatgaattgattgattggtgttaagcattcccagtcatttgaatgatcagccatgatcggagcgcacttttgcatttggaaacagaaacaagaagcaaggccacaacgggatatatgattatcattanaaataatgattgacggatggttctgctgatcgatagacgggactgatcggaattggaatggaagcattagagcacatgatcagtgagtgatcagtgagtgatcagtgaagcaaacagcgacttaattcgattattgaagtaatatctgtttctggattgaccgacactttcaattgaaccctttgagtgtttggagtctatttgataatcaatttgaaatccgacaacatttgatcgggatcatttctcactcgagaaagtaattggattggtcgggataaaaacaggcatctcaagagttcagttttaattttggtctaaacaattcgcaattcggcacaactcaaatgttcgactgagtttgatcggtgaggaatccgaacagaaactaatgccacccaaaaatcagccccctggttggtacataaagctcacaaacgcgcctttgttgggcggtcgtccgcatcggaatgggaatgaacggtcgtcggtggccgacaaaggcacgagtccggcacggcaccggcaaacagaggacgacggttggctcgaagagattggcacacattgggccgaggacgggtcgcagttggacgagtcgcagcggaagaagcgatcgacggaggagggaccaatgtccgctgaaaaacaaacttaagccaaaaataatgccaacacattttttagcgctaaagtttaaaaaaagtcgcgaaaatatcgaaaaaaggcatttttcttatttgttagttaaaattatgacaaaacatctattaattgagaattccaaaaaatcttttaacgaaaattaaaagaaggaatttttcagaaaaaattcgcacataaaaagaatttcttcgactttaattaagcatacggcaaaaaaaacatttaatttatcaattattcctcaacaatttctatcagcagaatttctatttctttttacgtacattttttacaaaatatttcaatccaatcaacctaaatttgaagatcaattggaattggggcatgccacccgcgcagcggggctaatcagtgtcaccccattgacctctttagttggctgatcagcattgataagcactgatcagcttaagcttgtgaatgtgagcaaaaatcataaaatgaaaaatttcaacaaaaaactacccataactttgctcgaatcgaactaaaattttaattttgatatcattcttcgttaagcttcaaaaaatttatggccaaaaatatttgaaaacctgagttgttgtatactttatcgcctcaagtgtttcttttacaatttttaaatttacgactttatgggcttttgtcccccccccctcccccggttacgtctgatcagttgtagcgatcaatcactgataagcttactccctttaaacaacattatccatcactgtctgaacactttgttaccttgcgtttcaaaaagtgcagatgtgttttttgctgtgcaatttcgtcccggccgatcaccaccagcagcagacgacgcagcgtcgatcagtccgtccaaacattcgcaacgaaatccgtccgtcaaatccacgcaagtcgcaagcggatgacagtcgtgcagccccagcaaacattcatcgacccctgttgatca

SEQ ID NO: 84700 - DNA, 296 bp, Heterodera glycines
gtgttcaagttgaaaggcaatgttgaaatgaatgaagctgatcgaacagccaacgaagtgggtttttttttttttgaaatttttttaaattcaaaattaaaaattttttgaggaattggacaatgtgatcaacatcagtgccaacgccaatgccaacaatcggaccaatggtgatgaggtgaggtattgtaattgaaatttaataatttaaaaaatttttccattttgatttaaggcggcagcggcggtgagcgacggcggggcccaatgccaacaatgggacaaatgccgaaacg

SEQ ID NO: 84701 - DNA, 1859 bp, Heterodera glycines
atgaattctgacattggctcacaaatgaaggacttggggggaaagtaccgctttctacggtacctcttcagtgacctcaaaaatatgacgctcaactgtacatcacgcatcgaattaatggagaattgggctaataatgaagtgagaaattcaattacattttactgattttatttatttttctgtaaattttagcgctattctccatacacatcaaaccgggctacggtagtgtcgccagccatgttgcgtgagacgtttgaattgctaaatcagcagcaaaaacaacatgaggcaattgcaaatcgagttctgcaatatggaaatgaggaggtggccaccatagcagcttcgtccttaaaacgtgctatggcttcgtcctcatcatcatcagcagcaacatcagccaaaaagccaaaattggtctcggaagatgaccggggtataattaatgtgaaaaatataaatgcaaattaataatttttaagaagtggcagctcttgcactggcggcgttcacacagatcaaaatgcgcttggctgaagacattgagggcctggagatgcgcactcgaaagcttgaagaaggtgcagccgcgacaacggaggcgcagatggaaacgatgcgccaacaaatggagcaagaattccgccaaaatctgctggaagccgagcagcggattgatcacaaatgggcgacgatgctgaacaaagaacaacaaaggactcagcggattgcggcacaaagcgcggcggtgattggacaactgatgagtaagcgagtcgcagaggggggagaagaaaaggaaaatacgagagagacagaggaaaaaaagttgataataagtgatcggtgcaattggtgcttagagaaaggtgaagtgttattcggagttaggggatgcggacatgtgtttagctgtccaccgtgcactattgcgataatggccgttgaccagccaaaatgtctgatttgtttccaaaaattaactgatttggaatacttaggatcataaacgtgtaccgaatatttgctttggatcctaattatttcgaatatttgtactcctataattgtactcctacagtatttcctcatgatcactttttttcattgtctacagtaatcgttaacattttcatttctcattaaccaataaaatttgccacatttatttgctttggatcgcatgtatttacaatatttgtgtaattgtactcctactgtatttcctcatgatcactttttcattgcctacagtaatcgttaatattttcatttttcattaaccaataaaatttgccatctttatttaatcacactgtcattgattgaattattagtaaacattaagaaaaactgaaaatttcgaccgtgaattttgtaatttgatttattgaaggtaagcacaaaaataaataaatgaaaatgcataaaaataaatgtgaaaatgcaaaaaaaattattgttgttgtgatggtggagggggaggaggcgggaaggggaaattgaaaggcatcatcattggcatcatcatcggcatcatcattggaaacggcatgtgcgggttgttggtagtagcagcaggtgctcttggttgagcaacagatcgctccttcgctcttcgcttggctgcccccgaacgcggtttatgaaaaaaaaatttttttttattaaatgattaatacacagcagggctcacagcccgtgagcccaatcagggctccaaaagacaaaagggacccaccatgggcccacaccccaagggtgagcccaatctgggcccacacctcaggggtgagcccaatcagagcccaaaaaacaaaaagttgggcccaacatgggcctacaccccaagg

SEQ ID NO: 84702 - DNA, 451 bp, Heterodera glycines
atgaattctactgaccttaattcacaagtgaaggacttgggaggaaagtaccgctttctacggtacttattcaccgatctcaaaaatttgacacttaacagtacatcccgcatcgaattactggagaattgggctaataatgaagtgagaaattcagtttcatttaactgattttaatttatttttctataaattttagcgctattctccatacacatcaaaccgggctacggtagtgtcgccagccatgttgcgtgagacgtttgaattgctaaatcagcagcaaaaacaacatgaggcaattgcaaatcgagttctgcgtcctggaaatgaggaggtggccaccatagcagtttcgtccttaaaacgtgctatggcttcgtcctcatcatcatcagcagcaacatcagccaaaaagccaaaattggtctcggaagatgacggggtataa

SEQ ID NO: 84703 - DNA, 411 bp, Heterodera glycines
atgaagagatccgctgctactctttctactgctgctgccgctccaaatcagcatgagaataaaattgaacccattccgacacatgtggaaactgaaccagatcatgagacaaaggggccgccgccaacaaaaaagcgcgcggtggaggaccgagatttgtggaaattagcgaagggaaaatatttgcttactacatacctctgcccgggtaaattaacaatagacaattttttattttaattaatattttaagacgactggaaccgattgtatcacaatcagcagaaggtgaagcgcctggacgacgaccgcttttctatcaactttgagctatgtcaggaatgcgtgcgggtcaattgccgagcgactgacttaattgcacccatgaagaaaaagccaaacaatgaatga

SEQ ID NO: 84704 - DNA, 1059 bp, Heterodera glycines
atggtggtcaacaaggggaaacggtccctggcaaagctctgcctgaacaatttatgtgagttttgacatatgatttggacagaaaatgtaatttttagggggacgtttttcgcttcgtaactttggcctgtgccagacactcatcactgacgacccggtgacgctggccgagtacttggacaacaaatcgatcgaagtcacatcgattgatcagctggacgagacgcacatcctcatcacctacctccacaaaaaggactgggtcgatgagcacgcttgctcaaacatcggtgagaataaacttataaaattgtgctaaattgataaatttagtcatctctctgtagaccacttccgctgcgcggcttgttctgctcaaagctatgcagaaggtggttaggtcgccaggctctgagctgctctacaccggtacatatgccctaacaaaattacacaaaataaattgcaaatattttttagatacagacagtctcatcctcgtccacccggaggagcgatgtccgctcaaaactggtccacacctgggccagttcactgacgagtacccggaccacgacattgtgtagttttgcagtgggggtgcaaaacaagtaagtttaatgtttatacattaatttgtattgattatttcacattttagtatggtctgtgtttgcgacgaaagggagctggggcggatgccgaaaaggaatacgtgctcaaggtgcgcggattgacgctgaactacgacgtgatcaacaaccaaggcatgcgttacgagacgttcaaagaagaagtggtgcggtacgcaacaacgggtgattatgagccaatcattgtcacttatcctaacttcctccgaccgaacattcgggagggagggagggtcgtatccatgcccctacagaaatgttaccgaccatatgttgggaagggaattataggcagcgatttcaatgtgaagaattttggccacactttgtaatgtttttgttttctgatgtatctgtctttctcatcaatacaccataaattgtatttaactcgtttttcaataaa

SEQ ID NO: 84705 - DNA, 1703 bp, Heterodera glycines
atggtggccaaaagccgtggctgggcaagttggaagttccatcgctaccttcacagccaacacggccaacagggctgccttcaaagggatgctttgcaactgatgcaacaaattggcgcacggcctggactcaatgcgtatgatgctgaaattgttgtgccccgggtggtggaccattggaacaacagccagcaacgacatcgttttgctgtgtttatttttggctccacgggtcagtacaagccgctatacaagtacatcaacaactattacgacacaccgattgtgctctacctaaacaacggtcattttgacggtgtgaagaaagagtatggcttgttcggtcaacattactgtctggaatgcgaaaagccttatgaacggccgtcacgacaccttaactcttgcaaggcgcgctgtatgctctgttctcgtgttggacctcgcttcccctgctctccgttggatgggtttttccgtgaatgtgcggggtgcaacaaggcatttcgcaacaacgactgtcatcaacaccatttgacatcaaacttttgtgctcaatcaaaacgttgcaaagaatgtggagtaatttgggacacacgagtgcacaacagagatgggagaaaggtaaacactaaaattaaataaaattttcagttattgttggatttagggtcacaaatgcgacgagcgttattgtcagacgtgcaacaactttcacaacgtggaacgcggttgctacattcagcaaattgaaccgaaagaaaacgacccctaccgaattgtggcctttgacttggagactatgcaacaccaggcgatggacccccaacaacctgagaagagggaacatcagccaaacttcattgctgcgcgggttgcatgccccgactgcattgaaaacggcaaatggaagagggcaactgcaagatgtcaaatctgcggaccacatcggaccgttgtgttctgtcaacgccgattcatggacacacaagtggacaagcaagtggtagctgacaacccgctggagccattcgtgaattggctcgtgttcgaactgcccaagaaatgcgacacctatgcctactcgcattttggtggtcgcttcgatatggtgcttgtcttccgcgagctgtttcggattggttttaaccccgaaatgctgcgacgggtactcagttacgaatttttgtgtcaaaattttaaaatttcagggaaataaaatgtacgaaatgaaagtacagaagcagaaaaggcgcaacccaaacattgtattccgggattcgttcaacctgatgccgtgttcgttagctgcactcatcccttcttatggtctggacgtggaggacaagcccttcttcccgcatttggccaacagaccggaaaactacggcagagaaattcgcccaacgcccaacgactatttggcaaacggtatgatgcccggaaagaggcgacagttcgacgaatggtatgccgcgcaccaccaagagccttttatgctcgatgaggcgctagccaggtaaaggggtttttttaaaatgtacaaattaaatttttctgtttcagttattgcacgaatgatgtcgagattctgatggccgcccttgtcgcattccgtcgggaattcttcgagatttcgcgtcgccaggagtacgtggacgggatcgacgacagagagaaccatgatggtatcgacgtactgc

SEQ ID NO: 84706 - DNA, 552 bp, Heterodera glycines
atggtccaagaaggtgctgggacctcctcatctacatcaaaaactgcaaaagactacgttagaaagctggacagcactatcgagcacgtgccgcgcttccagtacagcaaagccaagtcgcggttcagcattgaggacgtaccagcagcagcaaatcctgaaggacttattgctggcattttccagtacagcattgatgcggctgtggcagacagccgtgagcggggaattcatcctacacacctcggctgcctcatcagtagtccactgttgactggcggggacatccccatccctatccggcaaatcacggacaacacggtcaacaccatcttaaatcaattcgtcaaagtggcacagagcaagaagcaacagaacgtcacactgtggggtgaaccgtttaccgtagttgtgacgacagttaatcgacctggactgccgaccaaaagaacgctgaagggaggcgcacgacgagctctagcacctgttcaccatcgtattaatgatcggagtttgattaaggtccggtacatgataaagcaacagttttga

SEQ ID NO: 84707 - DNA, 1169 bp, Heterodera glycines
caactaagtctactaccgccgcccctgttaagtctacaacagcccctccgccaactgtaaaggcaacaacagcccctccgccaactgtaaaggcaacaacagcccctccgccaactgtaaaggcaacaacagctcctccgccagctgtaaagacaacaacagcccctccgccaactgtaaagacaacaaccgcccctccgccaattgtaaaggcaacaaccgcccctccgccgccaaagacaacaacacctgtaacacctgtggtaaagagcccatctgttaagccgacaatttcggcaccaccagctcagctaaaatcgacagccaatgcgccacctccagcttcggtttccgctgaattggctcctcgcgctcctctggcagactctccaccgcgttttgacgaaggagaagaagaaaataaaacagacaaattaaccgccgcaaaaccttcaactaagacgacaattacggcgcctccggcgcaactaaaaagctcggcaacgcctcatcaacaaaaacagcaagtgcccgtaaaaccatcagctcccatttcggttcccgcaaaaccgtcaggctctcaacagcgttttgaaggaacggaacagaaacagcagccaccaccaccgccaacatcagctgctttaacattagcagatttgaatttaccagaaaataccctcagcgttcaaatagaccctctctcatatgtgcccaattccgtctcaattcaatatcttgagaacatggaacgattcaagctggtgttcaatgaggcgatcgtcagtcatgtgtccttctcaccgcagttgggctatgtgcttggctttgaaaaccctcaacatgtcgtgtcaaatgaactgtcaaaatatcctgtagatttgcgcggaggcatctcaagctttgctgtctactcgaaagggttgaccgaaaacatgatcattggcaattcactgagttcgctgcttcgtgttgtgtctatcagcggtgccatcccttgggagtacaacgagaagatttacgactcgccaatatttgcccgtgtgttaccacgggagatcaatgagattgagattgaactgcgcacaatggacaaaggccgtctcgtgccgttcgcctatgggacaacgatggtcgtactgatatttaagaaagtgataaacttctga

SEQ ID NO: 84708 - DNA, 1324 bp, Heterodera glycines
atgtcagacaaccgaaaagaagccgaagaaaaaatggaaaaagcaatgtaaaattaaaatgccaattttcaatttcaattttaaattttgttttcctttttttcagtttcatctccgccgactgttggctttcagtgttcgatttgcttccgccacgtcaactgggccttggaattgcacttgtcagccaccgttttgacttttacatcgacgaacacttcaagacgcggcgttgggcgctcaaacccatggaaattaaagccaaatttgaagcggacggcacaaatggatgggaaattgtcaatttcaatcgaaagccgttgccaactccacaaaaagcgttgccaaagaaagtcgtcggattcaagcgcatttcaataaagtgaaatgaatgattgattttttcttttttgttgtaaaacgattccttaattttcacagatacgtcgaccaaaatgccatcgcttttctctgccgttttcgccaacttttcgcctcctgtccaattaagttggtcatctacacgggtggtgaccgcactttggagttcattttgcgcaaattttggccaatgatcgcgaaaaacatttgtgccatacaattgtacggcagaattttctaccgtttgcgacaatccgtgccgtcaattctaaacgattgtccatcgcttcgtattatcaattcctattctggtggctttttcgccgaatttccggccgatgacagtgccatggcgtcggatggacaagcgttggacaaatggctgttcactccccgtcctgacaatgtgccaaaggtgttaatggatgatgggaatttgtcctcgagaattgaagccttgaaagcggtgatttgattttatttgtcatttttacggtctttgtggttcgctgaccgaaatatttcttttggacggcactcaaatttttttttttttgcttgaataatgttcctaaaaataagttaaaaaatagaaatttcgaaattcatatttcatgtcgccacaacatttaagtgtcattcatttcatatttcttaaccaatttttccacatttgaggcatttgccaatgcttcatctcccgtcaatttcattgtcatttggccaccgcgtcttgctgactccgttgtgccatttgatcagaccaacgaattgactcgggaacaattgacgttgaaaggaactgactattgctatcttcttctgttggtccgttgtccgattgcgcgagacgcgagcaaatgggcaaaatgggaaaaggaagcgattgactggcaattcaatgatcaatggaacagaatcgacattcaaatcaacaatgaac

SEQ ID NO: 84709 - DNA, 546 bp, Heterodera glycines
atgtctttatttgctatgggattattgccatccaaaacgacaccatcgccgaatggcacgactccatcaccgccaactccaccgaatggcacgactccatcaccgccaactccaccgaatggcacgactccatcagcgccaactccatcgaatggcatgactccatcaccaccaactacaccgaatggcacgactccatcaccgccaactccaccgaatggctcgactccatcaccgccaactccaccgaatggcacgactccatcagcgccaactccatcgaatggcacgactccatcaccaccaactccaccgaatggcacgactccatcaacgccaactccatcgaatggcacaactccatcaccaccaactccaccgaatggcacgactccatcaccgccaactccaccgaatggcacgactccatcgctgccgcagcaacctccgccagtcgccacagctccgtcaccgtcgccaccggttggcaatgtgttgccgctgctcgccaacggacagtacgcagttggatgtgccgacattatg

SEQ ID NO: 84710 - DNA, 1460 bp, Heterodera glycines
atgaccaaggaccaactgtcggagaggcggaaactgatcgaagaatgcgggaagaaaaggcagacggacaacggtgattgggtgatttatgccaatcaggttgtgctgagacaggacattgaccatattcgaaaaaatttttaaattgtccaaccaaatcactgcaaattacctataattattacccaaaagtacaaaaatttttccggtctgtaaaaaatttctaccaaaaaattactcatccaaactttttaataaaaaataaagggaatgttaaatgctgcctaataaacattaggtcaataatgaataaaatcgatgaaatagcacttattttagaaactgaaaaaatagacattcttttaattaccgagacctggaccaaagacggggaagaaatcgatttttgcccttgggtaaaagagaattacaactatattttttcatcaaggaaatcgaaaactagtggaggtggttgtggtattctaatcagaaaagaaattggattttttacaaaattttcggattcaaaatttaattctgaaattttagttattcaacttcaaaatttacaatgcatcagatttgttttggtgtatcgaccacccaaaacaacactcaagcaaacagaaaatttgttcaaatttttacaaaaattttttaatgaaaattcagtgactttaggagattttaatttaccgaataaggatttggtatggaaaaatgggcatccctattcaatgagtaaatatggtgaaatattttgtgactttttcaatagattttcttacgttttggccacaaatgagccaacacggattaattcctggctagatttgatttttacggccaatgaaaaaattattactgattgtactgttaaaggaggcatattttcatcggatcatttaacacaatttttcacattaattactcctaaaacaaaaccgaaaacaaagatcgtaaactttcgttggttttgtccatcgaatgtgttacattttaatatagtcatagcatcaaggctaaatgccttgtcatatgaatgctttagcataaatcaaaaatattccgcctttaacagtatgttgttagaaattttaaatgagtgtattccaataaagcgtttaacaaagaaagatttgactcctaaatacccacaacatttattagcatccatcaaagaaaaggctaaattattcaggcaagctaaaactgacccatccaaaaaagcactatacgatagcatttctttacatataaaaatacaaacaaataaataccatagccaaattgagaaaaaggctatttcaaagggaagaaattcaatttataaatatatacaaaaattcaatgtcaatccctttgaaatacctaatctaatctatgaaaataaatgctatcataatagtgctgagaaatctgaattatttgccaccattatttgccaattcatttaa

SEQ ID NO: 84711 - DNA, 333 bp, Heterodera glycines
atggccgcgctggtggagcagtgcctggcgttggccaacattttgcgcggctacgcctttctgccgggccacgagcgaacattggccgcccacggcggactgttgcgtctgctgtccgcactgatgatgctgatggttgacaagaaacaacagaagcgggcaaagccgacaacgaagcgtacggcagaaacggcagcgaagagtggcagggacaacgacgagatcgggacggacacccccgtcccgggggatcaccaccagcagggcatcaagttgaacaccaattgcaatgatacaagcatagcaaccacgttggaggagggagtggagcag

SEQ ID NO: 84712 - DNA, 724 bp, Heterodera glycines
atgtacgaaacacagctatttttcaaatgtatgtttcttcgtttaattcttggtttgactttttattcttttaaaggattgttattttattctcaaacaaattaaccaaatttttatttttcgtgtaaatttgaaattattatgcaatggtgaatttcaatattaaaattaatttacttttaaacgaagaatataaatcgatttgttcaagcacataattattttaatgagagcgcaaatgtcttttttgttaggcggcgcaaatgtccgcggcgcaaaagtctatttttactggccggcgcaaatctcgcggacgcaagtgtcgaaaaaaatcattttaaatattaatgttaacaaaaaaacaaatagaaaattcgaataaaatcataattttattacctaaccataatgaatttttcattgatgaaaataaaaacaaaaccaatttccaacagaaatgataatttaaaaaagcaagttatatcttctaattaaaatttaaaaatatctttattttagcaagtatattttgtcaattaacaaataaattttaaatccaattttatagtcttgatttaccgccgttgcaattcaagagcagcgacagatgaaagaatattaatttatatttaatttaccaaaatttaaatacaaaaccaagtatatatttatatttttaaatgatttaaaaaatatataaatctcaatccgaaattttagatta

SEQ ID NO: 84713 - DNA, 2006 bp, Heterodera glycines
cccgtcgcttttgcagaaggcgtcgtccgacatgctctcccattacctccaaagcggcgtgttcaagttggacttgctgtccctgctcccccttgatgccctgtacttcttcaccggccccgtctccgcgtggcgattttgccgtctttttaaattgcactccttctgggagttcttcgacctgttggacagcgccttctccaacccatacgctgtcaggtgatcaaatgagagaaagaaaccacgcaattaggcgacggaggggcaatggcaattagcactaattaatggagcaaaaaataaataaacgaattaatgcgataaaataatgcccattcaaagaattgcaaagaccttctgctacatgatctacattatccactgcaacagttgcgtttattatgtgctcagtgcgtggcaagcctttgggtgccatttttacattttattgcttttttaaatggaaaattttaagacaaattccctatttttacaaaggcaaatggtatctgaacaaatgggtttataacaacgaaggtaagcagaaaacgagaaggggagagagagattaagagagacgagatagaagagaaagagagggagagaggtgaaatttattaatgagcaattaagcaacatattagggctaattgccaaatgattccgtcgatttttcatttttccccaaatgcttcttctttccccccccccccctctcccaaggcaatgcttacattcgctgcttttatttcaccgccgctgtcgcgtgcgttttttgttctttgacttttttcacccattcaatttttagcacttcgactggtaacaatccaatgccgacaaatgtgagttccccgaaaaatttttatctttggaatgcccaaaatatatgtgaacatatccaccagggatgtgccgagccagacaaaatccgattccgattaaatcgccgattccgattatggccaaaaatccgatacggttttaaaaccgattacgattatggcccaaaatccgattacgattccgatttttttaaaataatttttcccaaaaattttattcataatcaaaatcataaattttaagattgtgatgcaaaaataaaagtttgtccacattctgaggcgttttctcagatctgtcacaatcaacccagcggtggagaaaagccgttcgctttcagtcgatgtagctggggctgagaaatatttttttgatagcttagattcggaaacgaaatgtcttctgcatacagaagcccaacaactgttttgttttgcaaaaacgatcaagcatttggaaggtagatgaccaacgcacctgataggaaaattgcaacttagtaataattcattcatggttcttttctgctttaatgtcccaacaaattttttcttcaaaatttcgacttttggttcgaattcgggtccgggattcaaaaataggtgaattggctgccatgttctttaactgacaccattaacaacccttcaaagactttgacatttttgctaaataacaaaaaacttgattatatcggggagaattaatccggcactgctttgtgagaaaaatttaatttcagtcattatcagggcggccaagtttttattttcaaaataaggacagatgaggctaaaactaagattcggaccccaaaaataagattttttctaaaactgatagtagcgcgaaggataataaaaacatgaaaaaacgacttaaaacaacattttattagcataaaaacgaaggcctgtcaactgaaaattttgtaaatcagcattttgaaaaattttattcaaaatttaaaaattaataatgtttttgcggcgtgctttttccaaaaaacttttgggaattggggggccggcggtgccgataggcgccgccgggaaaatttttgaaattttgtatgtgatttgttaacagattttgtataaaaaagaccaaatttcgagattttaaactaatttttttaagaaaaattgggattttggtgt

SEQ ID NO: 84714 - DNA, 1287 bp, Heterodera glycines
atggacaaattggccaccacgttggaggaggcggacaagaagtggcagctgttcaacctttccaaggagttcttcgcggacggcgaactcagcgcattccaacggaccattgagacagtgaaaaattggtttgagggggccaagaaggaggcggaacagctgaaggacaaccaggacgccacgttcagcacggacgacctgaagacgaaggtgggagagtttggaatgggaaacaagaattttgttttatttttccgaaaatttccactcactagttagtcattccttcctctaattgaaaaaaatggaagaatccagagactttttttttgctaatttatgatttatgccataaaaattactgattttaacagatagcggattgttttatgtcatttttaaacatattttctgtggatttcaatcagctcgtctctccctctctcgaaaaaattttttttcatcttttttaagtacttcgaaagtgtaataattttttttctttttaaaaactctctatgaaatttgagaaaggatttttattttaagatttatgtttttttcgaccggattcgaaggtgctgcctatgaacacttcgaaattaatttttctcaaaaattctcaaaatcccatgacagcaaaatgttttcattgtgtgaaccatttttcgaaaatgtttttaatttaattaataaaaaaacaaattttaaaattttcagacaaattcgatcattggcgaagtgcgtttcctaacgtccaaatattacgcggccgcgctcaaacagcgcgaggaggcggaagcggcagccaaaaaggccaaggaggaggcggaagcggaggcaaagaaggccgaggcggaagcaaaggaagcagaggcggaagcggtggaaaagaaggaagaggaaggagaggtgaaaaaggaggaagtggaggcaaagaaggaggcggacgaggacaaaaaggaagcggaagaggtcaaaaaggaggaagcagcggaagtgaagaaggaggcggaagaggacaaaaaggaagcggaagaggtcaaaaaggaggaagcagcggaagtgaagaaggaggcggaagaggacaaaaaggaagcggaagaggtcaaaaaggaggaagcagcggaagtgaagaaggaggcggaagaggacaaaaaggaagcggaagaggtcaaaaaggaggaagcagcggaagtgaagaaggaggcggaagaggacaaaaaagaggtggaacaagacaaaaaggaggcggagaaagacgaagctgtaaagagtgaactgtaa

SEQ ID NO: 84715 - DNA, 1124 bp, Heterodera glycines
  unsure (1)..(1124): unsure at all n locations
atgggtcaatcatcttcagagtccaagagatctgatgacaaaaccgagcaacaaaattttaatgaaatggctgctttatcatcaccgaaagcatcaaatggaatgccaatttctgatttttgctatgaaatttttggggatgatcaattcaacaatttgacgtcatatctcgatgagattgatggatttgagtcaaacctattcgacggccttttgcaagaaaatgatgaacaatttccaatcactgattttaagattacagaaaaacaattttccggatcgaatcaaactttagccgaacagtatgatgaagcaaacactagtcgtactgtaagcgaacaattacagcagggggaaaacattgaaaatacccaagaaaaatcaattggatctgatcaaggaacaaactcgaactcggaaaactttcaaggaccaattccggatcacaacatagttgttgtacaatctccaaaacagcatgagtatactgtattgcaccaagaacgagaaaaggaaataaaaattgatactgtatcggttcagcctaaacgcaagagtccaaacaaaggtgcatctaagaagatcaaagaaaatcgtaaaaaagcatttgatgatagccaaacaaaaccgacccaaaaagtaaagccaaatgcggaaaaacaacatcaaaaaataaaacaagtactcagcgtaactaaaggtgtacaaaagtcaaccagtgccatggcaaaccatggacaaaaattgaaaaagtctaattcattttcaaaaatgctaaataatgaaaatgttgaacatgttttgacaagaccaattcctggcagttctcatacagcaaattaccaaagacagagcaatgcttcaagtccaattaatattcaaacggcacatatgacagtgtccagtccagctaatccaacacaaatacaaactggcacatcaaacagcccggatttaggctggaaaacgcagaaatccttgccaaaattgaatatgacaaaagtcgcaaaattgcttgacataaaccaaaacagtccacaatactcgaacagcccgacaacggtgctaaatcctgngacggttccgaactcaccgctgatgtcctcccagccacgcacgccaac

SEQ ID NO: 84716 - DNA, 1383 bp, Heterodera glycines
atgaggcaaactgaaaatgacaacattgtcaatgccgataacaatacgtcagaccggctacaatcgcaacattctgtttccgattacttgaagaactcaccatcatatcccaacttggagactactgtagcatcaacatcacaaagtgtttcatcaacaaacaataattatgctgaagctggacattacaatagcatttcgcctactgtcgatgctacagtaaaatctatgcccccaccacagttttcaaatcctttcgcgtcaaaatcacaaaatatgaacgcaacagatcaacttttggctattaataaagccgcgagaaatctttggacctcacaacaaaattctactaccaatgttaccatctcaggcttacgcctgccacagttgccaattactgatgcaaatgtcaggcaattaaactcacaaccaaataatgctactgtatatatgcccccacaacaactttcaaatcctatcgcgtcaacatcacaaaatctgagcgcaacagatcaccttttggctattaatgaagccgcgagaaattatttgagatcacaacaaaatcctactaccaatgttaccgtatcaggcttacgcccatcgcaatttgctgttgcagatacaaatgtcaagcagttaaactcacaaccaaacaatgctacagtatcaggcttaaccacagagcaaatggctactgctgatgctgcggttaaacgcttgaattcacaaccgaatactgtaagcaatgctaccgtatccgacttaacccccgagcaatgggcgctcgttgaagcatcagtgaaacgtttgacctctaaacatgctgatgatgcaaacattgctaccgtcaaagggcaaacaccaacgcgtgtagctactgtaattgataataccgtgcattcatcgcaaattcaaagcgcaacaaacgccggaagggacgcccaacccattaatagccctcaaaataatgtgctcacgcggcagtcatctttggaatttataaatgaacaaagctttattactgctgccaacaaaacagctgcgaagggcacgtatttacgaaagtctcattcaactacagtacctcattcaatttttaccgtaccacccgtacctcaatttggtaaagaacaatttcctaattgttgtttctcaggaataattttctgacaaaaatatacaaaatattaatattttgatcatggatttttcggaaaatttattgcttaaaaattctatcgacttttagactaacttagggtgttatgctagacaaaggcccgtaaaaaagatggaaattttaaaacgaaagattcactaaactactttttaaggccacacactatacttaaggtaaatccgaagtgctgagtcgaagta

SEQ ID NO: 84717 - DNA, 904 bp, Heterodera glycines
atgccacgttatgtcgaaaaaatcgctaaaagggcagattttaagaaacgacccagcaccccaccccaatatataacaggtttttttatactttttaaaaaatttggtttacttttaggggtgacaatatttttaggaaaacccaatcaataattgtttaggtaaatcaacaccaatcggaaacaatcctgctgaggctcagattcaaaaccaaataattgaacctctcaacaccgtacccactacaataattccatcgttggcagttggtggaaaagttggcgaaacttcggacaatttaaaaattgagcaattatcaattggtctggaattggccaaattggcattaaatgccacaattccaccacttattattggcacaacagcgacacatgtaaatgattataaacagattttgaaaatgaattttgcctgtctaatgctgaacaaatcagaactggacattgaccaactttatcaaaatgcaataaattcaaattttaggtaatattacaataaataggaatgggatttttagtttaagaaaaatcccgaaacacctatttaaataggtacaaaaaaactcaaaatacttattaaataggtacaaaaaaccccgaaattggcagagaaataggcaaaaaaaaatttattaataatttttaggtagtaaaacatataaaataatcaaaaaaaatttaattttgaatatttcagtcgtaaatgcaaaaaatttaaagtttttttcgaataaaggacaatttttaaacctaaaattcttgtcaaaaaaaaaattttagaggataaatttttgagaaaatttttttttaagtaatcggtaaaaaaaactcccatatatatagttaaaggataggtgttataaaactgggtccagaaactcaaa

SEQ ID NO: 84718 - DNA, 332 bp, Heterodera glycines
atgtctaaaataaagtccttagggtaattacaatccaattttatcaaattttccagcagctcttcagggtatttatttctttttttgagatctgatctcctaaaatttttgcaccatcacctgatatgaattttttaaattaattacatagaacactttattaattatcatagttattaaggttttgtgatagctaatgtcgtacaaattcaattaaaaaaattttcggatgctttattcagataaaatattatataaggatttatccagtattaaagttggtaaataattgctatattttgcttacaagggtcctcacaacaaataataaa

SEQ ID NO: 84719 - DNA, 264 bp, Heterodera glycines
atgtcaaatcgatgcgcacataatgtggcatttgtgcagtgcattttaccacatcgagaatatctgttttcaaaagttagtgcccaaattaaatttcaaaatttttttttatcatttttgaaaaaaatattataagaaaattattattttaaatatttcagtaatatatatatataaatttcatttatttctgaatgttatgtatttttttatattaaattcgttatttttaatatatatttgttttattaaagattaaataaa

SEQ ID NO: 84720 - DNA, 678 bp, Heterodera glycines
atgggtcatcgctgtaatcaatgttcagcgtgtccagtccgaatgggttgtgcatggaagcgccaatttcaatgccgcgtttcccatccaacaaacgatgtgccaatttactttcgttgtattgtattcttacaactgcggaaggtcatggcaaaaggtaaaattgaaaacatacaaaaatttatttaaaaagaaatttcacctgctaaaatcctcaaaaattttaaaaaattcgagagaatatgagaaaattattgaattttttggtatgtcttttttcaatgcttttttaaatttttctgcaatttttgagaaaattttctcagggccggcacgatgccgatgggaaccggagaataaattggaaattttcgtggagagaatttgttctgacagatttggtgcaaaaaataaccatttttgtcgtttaatttccaaaaaagcgaagatcttaaaaataaagatgacccagttcaatttcaaaatattgcaatcataaaacaacaattaattaattatattccagctgtaaaaaatattagacggattttccgaatctgccggaccgggctggtattttcaaaaacgaccggattccggatccagtctctcaaaatccggtcaatctatgtaatccggtcaatccctatttttcaaatttccggatccagaacctga

SEQ ID NO: 84721 - DNA, 992 bp, Heterodera glycines
atgataggaagagccgacatcgaaggaacaaaaagcgacgtcgctaatgacgcttggccgccacaagccagttatccctgtggtaacttttctgacacctcttgctggaaactttacacattcaaaaggatcgataagccacgctttcgcggtccgtattcgtactgaaaatcaggatcaagtaagcatttgcctttttgctctacgagaggtttccgtcctctctgagctcgccttaggacacctgcgttacgctttgacagatgtaccgccccagtcaaactccccgcctgacactgtcatcggcgcgggtcgccgggccaccgggtggcccgacttaacaccaaaatggacaccctttcgggcgcactcccgttttaccgattaagtaaggaatcgatgaaagtagtggtatttcactggcgccttgcggctcccacttatgctacacctctcatgattcttcacaaagtcagactagagtcaagctcaacagggtcttctttccccgctaaatttgccaagcccgttcccttggctgtggtttcgctagatagtagatagggacagtgggaatctcgttgatccattcgtgcgcgtcggtagttagccgacgaggcatttggctaccttaagagagtcatagttactcccgccgtttacccgcgcttaatcaagtttccttggcttaacattcagagcactgggcagaaatcagacacggtcaacgtccacaaggaccatccgtctcctctgttttaattagacagtcggattccccgagttcgtgccagttctaaactggtcgttcagcgccaaccgaagtgcataccctgacgagcatacacgcagctgaagcgctccacaagcagctctcaccactagtccacgcaccatccccgaaagaacagcacgcagccacgggcaaaagccgcctgtttcacgcaacagcccggctgacccgacctttagagccaattcttttcccgaag

SEQ ID NO: 84722 - DNA, 672 bp, Heterodera glycines
gtacaaggctttgaagtggtcaagaccgggtttatggccgcccttccgccgcttggccaggcggtgatgaaagaatgtgccgggctgatcaatgatagaatccccgcgcggataatgagcgaaactgtcaaaaccaaactgttcaattccatcgccttcatgagtatgtccgctgtcattgtggccgtctctttcgtgccttccggctatggcaatctcgcgctgtttctgctcactttctcggcattcactctcggctttaacattggcggattttacaaaagcggtagggaatcaaattttaaaaaattatcctttccttcccctctgggagaatgcctatctttccattaatttatgtgccaatttaggctcgatgattgccgggccctattcgccttttgtaatgggccaaatttccaccgcaatgaccgtcacaatgtttgtgtcctcctttcagctttacctttcccaatcccttcttcgtttaggctgactgtgccggtgattgtcaatccgttgaccataaataacacccgcgaagaatgggcattggcattttatgtgaacgccgccattatcgtcgcgtgtaatattttctacgtttgtttcgccaaagcggagctgcagccatgggcaacaattcaggtgcaaatgaatggaactgaattc

SEQ ID NO: 84723 - DNA, 796 bp, Heterodera glycines
atgaatagcggcgtcagcccaactccgttcctctcgctccgctgtgtgtgctcagtgctggtgctgctcatctgtgcgttcgatgtgtcactggcagcaaaagacaaggagaagaatggcaaagaagaaccaggaggccaatttaatacgctcagcatcattttgctgattccgctggtcatcgtcaccggcgcgttcgtctacctgctgtttatgaagccaaagagcgaaggaaccggcgatgacgacggagaaggcgaaggggacgcggacgtggagaagggaccaaccgaagagacgaagtaaaacacgggcagagccgatttggctaaacaaccaacaatatttttcgcatttcagaacggagcctcgaattgaatctccagcaactcttttgggcgtgacagtgccgttggagcaagacgaagaagagcagaaaaaggacgacgaggggtaagtgcaaaggcggcggatcattttttactcattaaaatttaccatttttagtggcgaccaaaccgcggagaagaaggaagaggacgcggcggcagcggacgaacaaccgaaagaaggcgctgcggaggcagcggaagcggagaaaagtgcgacaaaggaggagacgaccgaggacacggaggagaccacggaaacgacggaaggatcgaccacagagacttccgacagcggctccgggtcgtcttcagcatcgggctctgactctgaggggagttctgggacttcggacgccacttctgaagccacagaggacgcatcatcttcatcggagggttcttaa

SEQ ID NO: 84724 - DNA, 996 bp, Heterodera glycines
atggtcactgattccaaagaggacattgtgttctttgccagagtgtgtaagaaggcgcgacgctacgatgacatgaccgaggcaatgaagaaggtgtggtcgatgattgaaagcattgcatttgatttgttttcattttttattttcagatgatccaagcggacgccaatttgaacagcgaggagcgcgagttgctcggcaccgcctacaaaggtgcgattaatgcgcgtcgtgcgtcgtggcgttcgctctgttacgcggaacaacgcgtcgctttggaccttacggaccagcaaatacaggcggagtttgggcacaagtgtcagcagcgagttcctttttgacgtttcccctttttacaggtggcggaagagtaccggatgaagatggagtcagaactgctcaccatttgccacgatattttggtcagtttttgttgttttttttcccttggattttgaccattttcccatttacccccgtttaggaagccatcaatgaaacgcttcttccgaaggcgagcgacgctgaggcgaaggctttctacttgaagatgaagggcgattactaccgctacatgatcgaagtggcgccgggggaggagcgccctggtaatggtttttttgctctcttttctcccacaaattcgctttttttagctgtcatggacctctcaaaacatgcctaccaagatggccttgaaatcgccaccaaggagatgaaaccgtccaatccgactcgcctgggcctggcgcacaacttcgctgtgttccactttgaagtcttaaagttgccggcggaagcccgtcagcttgcgcagaaagtcattgtttttgactttttttttggaattcgtttgcaaaattttaggcactcgacgaagcgatggctgaaattggcacaaacgaagtggccggggaaacggatgctgatcttcagttgattcgggaggttttgaacgcgtggaagctgttggatttcgctgctgacgcgtag

SEQ ID NO: 84725 - DNA, 93 bp, Heterodera glycines; identical to SEQ ID NO: 55936

SEQ ID NO: 84726 - DNA, 601 bp, Heterodera glycines
atgctcagcactcgttttgccgtttttgtcttcatttttgcattgcttattctggaaattgatggttgttatcggcgtcggaaaaaggacaaggacagtaacgagagcggagagaaaaagcacgcaaaaaaagaggataaggagtcgaacaagtcaggcaaacgcggaccgcgagggccgcctggtcgaccaggaaagaaccacgaaggaaaggaaggaccacccggaaagcctggcaaaccaggacaacctggcgaacctggacagcaccacgaaagcaagcaaggaccacctggaaagcctggccaacctggaaagcctggccaaccaggaaagcctggccaaccaggacagcaccagcaccacgaaggccaccaaggactacctggagcgcctggcgaacctggagcgcctggcgaacctggacagcaccacgaaagcaagcaaggaccacctggaaagcctggccaacctggaaaacctggccaaccaggaaagcctggccaaccaggacagcaccagcaccacgaaggccaccaaggactacctggagcgcctggcgaacctggagcgcctggtctaccaggaacgcacggaaatg

SEQ ID NO: 84727 - DNA, 205 bp, Heterodera glycines
atggaaatctacgcatgttttcggttttataatataggtaattaataaattattaatttccgagtgcaataaatttttgagtgtcacccattccgattatcaattatgactgctgtttatacaaataattccaataaaaaaaatttttaactaagtttcagtgtttcggagaatggaagtctacgcatttttttttaatttttaa

SEQ ID NO: 84728 - DNA, 366 bp, Heterodera glycines
atgaaaaatgaatttaaacaaaacagaaaatattcgcaaaaagaatgggagaaaaattatgccgaaatttgtaagaaaattggagttggctatgtaacaattaaaaaatggaagaaacattttggctttcgatatatgagaataacggaaaaagaaaaaatggaaaaaataaaaatttattggcaaatgaaaagaaaaaatccaaaaatgactgacaaagaaattgctaaaacattgaaaattcatcaaaatagcctccgaaaatggaagaaacagtttggaagagaagaaaaatgagaaaaaatatttgaaaatatgaaaattgattaaaggaagaaaagtttagaaattttttgaaaaatttga

SEQ ID NO: 84729 - DNA, 663 bp, Heterodera glycines
ccaaatttaatatctaagcaaaaaaataaatttattgaaaaacaatttttcgaatttataaaccatttttaatatttatacattagagtgcctttaacgtgtaataattaaaatttggtgcgattttattaataatagaaagagttaggttcaaaattaattaattactgaaaatttgatcatcaacaactcatttgtaaatgatattttatttgccgaagggaaatttagccaatgataaggaataaactatcggcatttgaaataaaccaaagactctcgcataaaataattaccattaattaattgggcttatttgggtgcctaatgaaagtctaagacaatagtttatggaaagctcgattggatttgtttaattaatcagtttttttaaatttcatgtttatgccattaaaaaagcgcaaaattaatgcttgaaagaatattaaaaattttgtcaaaaaataaaccgcgtttttaaatcaaattgtgtacttctaaatcatctgttcatcgccaaattttttttcaaattttcatgatttttctatgaattttcaacatttttacaattttttttgtcattcattttttgtttttctttttttatttgtcaaaactttttaatttttttctttgataaataaaaataatagttggaat

SEQ ID NO: 84730 - DNA, 868 bp, Heterodera glycines
atgcctctgtacggattgtccggagccgcggtcattgagggtccggagaatccgtcagtgaaggacaatccgttagcaatggacaatccgtcatggataatccgtcagtggacaattcgtcagaaaaattttttggcaatgattaaaaatcttgcaaaaatgattcttaaatttaataaatataatttttataaatttttaacattttagttgctttgtacttcaatcaatggaccttctcgtgaaattatatttaattcttttaaaaatgcttatttatttataattttttaaaataactcaaattattaatttaggtttttagtgacttattaattttcacatgattttaaatagatctgggtgttttaaatctaatttgtttttgtgcagatatttatttatcctttttgattttgttagcaaaaatattcttattattgtgttatttttaattgccctcaattcgggcgttcgccgaaatttcgatctccaagtcgacttttttgccggttgagtaaggtgtctcatagctaatagacattatacggaattttgacaaaaataacattgtgtagatttgtcatgttttaaaatagacacaatattataggtggttaaattcaaatgattatatatagaaaaaaaaatagtgtagatcatttcgtaaaaaaatgtcaatatgtgcgtttcgtaaaacggcaaattttagagatttttcgagaaaaatctgtcataacttttcttaaacacaacctaaaaactaatcttgatatcttactattagcttaaaaaatttcagaaaaatctgtaaaattggcggtttttacgaaacggccctgcacggaaaaaaattgacaaaaataaa

SEQ ID NO: 84731 - DNA, 2016 bp, Heterodera glycines
atggaatcaacttccaaatttaatcatgtatgtattatatattaattaagacagcacaaatgggttaaaatcggagtaattaaggagaaagtggaaaaattttgaaaaaaaattaactcattagagaaaaaggctaactccgatttttttgcaaatttcggcataattttgtcgccattctttggttgaatattttattatttgcctgaattcattattcgctttaatgaattttcgtattcagttttctgtttatcagtttttaatttatttatttctccaaaagcctctcttagaattctctcggaaaattcgattttttgatttaaatatttatttaataattcggtatatttacgacatttgaaaaaaacagcaaacctaaatgattttataaaatttatcaaaaaagttttcatgttaattctaaaatcgaatgattttattcagccacaaattgttttttccaattggaaatattctgttgagaagtgttcacaatttttgcaatttctttgtcagtcatttttgggttttctttttttgtttgccaataaattttcattttttccattttttcgttctccgttatttgtttcttgctaattccaaattgtttcttccataacatgccttgcgacgcgcgctgtctaccttgaggcaacattggacctcacatcggaatcattcatcaatgttctccgtcgattcataagtcgacgaggaaaacccgacatcatttggaccgacaacgccacgaccttcaaactcgctcagaaaaccctggagcttctcagtgctccgggtccggatcaggaagtacaaaacttcctgactcagaacagaatcaaatggagcttcattgcccaaataagtccttgggcaggaggcttttacgagcgcctcgtgaagctagtcaaagactgcttcaaacgaactttgggtcgaaggattctttccttcgaccaactcaacacattcgtggccgaagtggaggccaccctcaattacagaccgattaccgcggtctcagacgcagtagatggaccagtcccactgcgtcccatcaatctcttacaaccagagattcatatcaattgggaaacaacaacggacccaattgattcagaggaaatgttttcctccacacacaaacgtttagcttcccgaataaaagcactccgggaagccaacgacattttctgggccaaatggcactctgagtatttaacattactcagagaaagagcccagtgggaccacaaaggcccacgactccaaaacttcggtgaaccgaagaaagggatggtggtcctaatctctcaggacctcgttcctcgcaatcaatggccaatgggacgaatcgttgaaacacacggacggcctggagccatccgaagtgttaaagttgaaatccctgtccgagggaccaacaacaggaaaccaaaggacatgccacgaaagacagtccttactcgtccagtgaaccgcatcttccctttggaagcgggtcctgaaatgacggacccaggaactgaagctgttgctgcaactgaacagccaaatgaaaaccatcccaagctcgctcgagagccgggacaccaaatggtcaccagaagaaaagccaaactactggaaatgcttccagtggtggctatgaccctcctgacacttgcccttccatttgcaagtggtttcccaatcgggaaatgtgatgagtgtggcctcacttgttacacgaaaggaatcgtcgtaacagtgccacccgaaatccaaaagttcgaaatatgctgtgcagaaagctgcatagttcggcaaggcatcaaagccttgaacttcgaactaccaatcgaagtcctactcaacaatcatcactgtgaggccagattgtttcttccattttctaagtgtttcacggcttactccaattttcttgcaaatttcggcataattttggtcccattcttttgctgaatattttcttttttgcttatattcaattgtcatttcaataaa

SEQ ID NO: 84732 - DNA, 600 bp, Heterodera glycines
atggcaatggctgatgttaagcccaaccatactttgtacatcaacaatttgaatgaaaaagtgaagaaagaaggtgactcactgcttttctaattagtttttcttttttaaccattatttcaaatttgcagagctaaagaaggcactgtacgcaattttctcacagtttggacaaatcatcgacattttggccttcaaacacttaaaaatgcgtggacagtcccatgtcattttcaaggagataaattcggccgccactgccctccgttccatgcagggcttccccttctacgacaagccgatgcgcatccaattctccagggaggactctgatgtgatctccaaagcgaaaggcacttttgtcgaacggttgcgcatttcatattacaattttttctttcaaaaaaatccttgtaaagaaccatagtttgtcgttttcttttttgcaatagcatattgcaatccaaaacggttgctgtctgttttcattgtagctcatttccttgccacttcgcaaaatcggatagtgtgttacaatttaatttctttgagccatttttcaaattcttcgtcagagagtgccaataccaacacttttga

SEQ ID NO: 84733 - DNA, 1012 bp, Heterodera glycines
tcaatgatggtggcgtccaggacgaggcaattgtggaaggacagcaacttgtggacttagggaacatcgacgagcttttggccggtaatttgtttttttctctttattgctacagttttttgttagtttgtagcaagtgaaatctctctccgctgttttttctccccccccccgccccacctcctctccctctccttcgctctctttcttttactttcttctgtttttctctctctctcccttattcttctctctctctccctctctccaccttcgttctctttctttagcttaaaatcgcaaaaattggccatatattgtgaaaatctggtaacaaatcacaaccaaagcttcaagaaaattttcccggggacgcctattggcaccgccttattcccgcatttttttggaaaaccgcgccgaaaaaaactatttgggtctttaaaaagcaaaaaaatgtcatcggtggccgacccccccccccccccacttttttaatgtatgattcttttaccactttgcttttttgtctctcattttctctctctcaaacgcggggggtctgttagtgccgttaggcgccgccgggaaggaatttacctttgatttgttaactgattttggggagagtggggggggggcgggacaaaatttcgccgccaaaaatttagaaatttatgttttttgattttaattttttttttgtattcaggaattcgacatactcttgtgaacttacgtgatagcgccaatgcggaaattgaccgaattgatggccgtcttcaaggtgggtatgctgcttctggggtttttgtcgggattcgagaatatggcatccccttttattaatttctggttccggacctggtttgtagtaaattccaatctttaaattacacatttatttgtgtttgaactaataagggaacctcgcgaacttacagttaaaatgggtataaatgtggtataattgaacagagtcgacttgaatattagcgatatgtgaaggaaa

SEQ ID NO: 84734 - DNA, 671 bp, Heterodera glycines
atgttcctagtcttcaacgtaatactttgcaattctttgcttctcctgtcaattaatattttttcacatattaaattgaaattaaggcattaaaatcaattaattaagaattatataaaatagttgtggtcttttgtctgtgggtattttttgagtggtttttttgactgtggatcttctgtcattatgcctaatattttgagcccaagaattcccgagtcagtctctttatgtggtattaattgcttaacttcttccctatcgcattcctacaaaattatagagaaaatgaaacaagcaaaaacttcgcccaaaaagataacaacatttcatcgcattatctgagcaagtccatccgtttgatgcctcaaatttgcaatacttttaaatattttctgatcatttttcgatataaaatttgttcatttctcagcttggcttcggctggactaatggcgctgtgttggaccttttggtcaaatatggcgacaaaatgacgctgacacagatgccggatgttaactgcagcaaaatgacgaaggatcccgagcccgaagtattcccaccggaataaatagaatggaagtgatcagagcgaaagtgatcggaattttaaacttggctcccccgccacagaaatatgtccatttattaatccttcattttataaa

SEQ ID NO: 84735 - DNA, 173 bp, Heterodera glycines
gggtcgtttcctaaaaaccgccatgtggtaggaaaacaaaaaaatgtaagacatataaattcataacttggtccattttcaaccaaattaataattcttggtataattcaatagctctaggtgtttctatagaagtataattttattaaattttttacttaagtatataaaaa

SEQ ID NO: 84736 - DNA, 2021 bp, Heterodera glycines
ggtgacgatgcggtaacatactgtgttttgactggcaacggacgggtggaggcgcgcctttcggtgaacccggccaacacaaagaacaatgtgccggcgcctgcggtaagcctaaaaggaattcctggtaaattaagcataattaggcaccaattctttaccatgttggtaattattttgcaagaatcgcgttaacgagactaagagtgggatcttgtgaactaaaaccggaattttaaaatacaaatacctaattgggatgtcaatcacttgtgttttggtatataaaaatgcttaagggggcggagaatggctttctcgagctgttggaaggaaaagcggatgacaacggcatttactgtaaagtgagagagttttctgaaatgtctatatatttgctggcattttgccaattaaaaataaatttgcgtttctcagtttcggcaacactcaaacaatgggccgggcaaagatttggcacggccgaacctgcacaaggcgtactatctgttcttggccaagggaccggcagaagaaccacacagtgagtaatgtgtcaacaatcgcaaaccgtccttttcctttgagtctaaaacttttataaatatgaaagttatgttatttttaaaaaatttcgaaaattttatgactcaaaatattttattatttttatatatttttacaaaaaaaaaagaaaataaaatcattttcgcaagaatgcttccgatcattagtgatgcgagtttttactctttattctgctgaattctgagcgcgaaaaattcagataaaatttttttgattggcttgaatgatcattaatcacttgaacataaaaaatagttgttttacagcgatcggaattcactcgttggacagcgatgatcacgcggtgttcccacacatttccgcccgtccaattgtgccattggacgcttcatcgctgactaagcagccgaaacaacaacagcaacaacaaccagcaccaccacaaaatcatggacatggcggtggtctgacactgatcgatgtacatggtgagagggatggaatttctaggccaaaaaaaaatttggaatctacacgaaaaagattttgaaaataggattttgcactttcaataatgttgaattgaaaaaattaatacattaaaaaaaataaatttcggaattttttaattttatattaaatttattttttaattctttgtaaataaattatcttaaattttatttttataattacctattttttaatttctttcttgaacctgaattgattaattgaaaaaaaatgttctcaagtttattttcaattaaattttatttctttcttcagcacaataatttttaaattctatgcaacagaatatatagaattgaaaaaaaacttctatttaaattttgcgaaatttttagttttccacaattaaatttgaaaaattctatacaacctgctgattggattacgtttggataaatttttcgtatttttccaaatttaagttacctaatctttgcatcatttttccaattttttaggcataatgatggtgatcgcgtggctttgcctcacttccgttgcgctgtactcggcccgcttcatgcgcagcgcgtggccccacacaacaataatgggactgaaaatttggttccatgtaagggttttttgggtcggggtcaattgggcgcggacagtttcggcgccgccattttttaaacgttgaactacttttttcaatttaataaaattgccatcatttgctaaaatgtagatatgttccacatttaaatgtcaaaatcaaaaaatatatttttacccttaaggaatttcttttttaattttatctatttcgaatgatgcaaagtttataaatttggttgtctgacaaaaaaagtttatacagtacacattaagtgtattccttcagatccaccgtaccctcaactttctgtctgttattgtcatggtggtctccgttctgctcgttgtgcttttcaaaggccgttggacggcccatg

SEQ ID NO: 84737 - DNA, 502 bp, Heterodera glycines
atggccgatgatgatgggcttgacagcagtgggcattcctgcgcgagtgccggcttcacaccgaaggtccaacatggcggcggtggtggcaccgtcggcactgctgccgctgctgcacaggcgtcggcctcgtccaccggggtggcaccggtccatcggctgaccatcaccgacctgaaagcgccgtggactattgaaaaccgccggtgggtgtgaatgtggaattggaattgcaaaaatataggcatttcatcccctcgtgtcatccccatttcgttaaaaattcttcaattttttaatttttatctttaaacagtttttttcctaattccaattttttttaaataaaaaatttttgcgcggggggaaatatagtgtaccccggaaaatgaatatattttttgtttcagtgacaattgtttggtgattgcgaaaggtgttcaaaaggcgcacattggcttttcatcgtccacatgcatgagcctgttggcgtacatcgtcg

SEQ ID NO: 84738 - DNA, 694 bp, Heterodera glycines
atgttgctggcgaaacgttagtcactggctcaatgaatgacattggaatagcctcagtaaaaaataattttaaattgttttctaattagtgtttaattaagtatcagtgcagcagcaatttgacggattctattttgcctacgcttatgaatatgatatatttatcaacaattctcatttatttgcttgttacgattttaatttacttcagaaaagacgattttaattgtttgaataaatttaattctacaattttaattaaatattttcagctcagcccaattcaaattccaatcaattgaatattcgcattttccgtgcattattttttataatttctgttaatgttggcggttattttttgaaattgattcacattaccatgataattcctttgttgaacaatgatattattgaaatttggaaccaaaatcaaatttttggcattttgttaaacattagttgcatttcaaatgcgccgattcttttttggacgaggtaagcctttaaatttaaaattttaatttagcaataaatgtttagtagcgaatatcgccaagcatttgtgaaagaatgcagaagatccgaaataaattcgaattgttttattcgccacaaattctgtacaacccttttgatgtcatttcatacggatgcaaaagttcgaaaaaatttttaaaatatgaaaaataaa

SEQ ID NO: 84739 - DNA, 631 bp, Heterodera glycines
atggattacaaaatgattatgatgtcatgctttttccattacggtaacaaataaataaacataaaacttaataattttttaaaattcatttagggaaacaaaaagtattttaatctatgcattctcatttatttgcttgttgcgattttaatttacttcagaaaaggcaatttagtttagaaaattaattacaattttaattaaatattttcagctccgccaaattcgaattccaatcaattgaatattcgcattttccgtgcattattttttataatttctgttaatgttggcggttattttttgaaattcattcgcattaccatgataattcctttgttgaacaatgatattattgaaatttggaaccaaaatcaaatttttggcattttgttaaacattagttgcatttcaaatgcgccgattctttattggacgaggtaagcctttaaatttaaaattttaatttagcaataaatgtttagtagcgaatatcgtcaagcatttgtgaaagaagggcagaagatccgaaatcttttattctctacaaattctgtacaacccttttgatgtcattttatacggatgcaaaatttagaaaagatttttaaaatatgaaatataaaataaa

SEQ ID NO: 84740 - DNA, 401 bp, Heterodera glycines
  unsure (1)..(401): unsure at all n locations
atgccttcggcgattcattcgttgcccaacaaaaaaccatttttggccactctttgcgctctggggctcgtaagaatgcctcatcattggctattgtgagcactctcatcggcaaaatntaattgataaaccctttcntgtctttttttagcctgtttcggagtcctttgtttgagtcttggcaatgatggatgtttgccattggcaatttgttgctttaaacacttgcttttttaaattccattccggcatttaaattattttcattccttacaatttcgctctctcactttttgtcattattttccattaatttcacttcctttctcttttgcattggctggacttgttgaaaaaatttttataattattttatattttccagtaattaatttaataaa

SEQ ID NO: 84741 - DNA, 758 bp, Heterodera glycines
atgctttcatcatcagaggcaccacattcatcagcggcagcgagttcatcaacagaaaaaaacatttcaaaagaaaaaaatatacgtaagtgcgggccacagacaattggacagaaatggaaatatggacagtgaacaatatttaaaaaattataaaaggcattagcaaaaaatgatataagttttttgaattcttagaaaaattggaatttttttaagtaagctcgacggttatttgataaaaaatgactaattaacatcattttttaaatttttctgtcaaagtgtccggattcttttagtttccatgagcttgtttctatttctgattggcaatgaggggatataaaaaaataaaagaaaatttgaacttttttggttggcttacacgaaaacgaatgttaattttgaagaaaaacagaccattcttaggtcaataaatgctacaaataacaccttaggtagatatgacgattttgtgaaatttaagaagcattccaaaacagattttctttcctttataaattaggtttttagcaattttcttttctcagtttttaaacccactaaccaattatctctcattaagaaataaaactcttccaaaagttgagcaaccgtcttgctgtttccaaaggtcaatgtgcaatttgtttgggtgatttagtggatttagaggccaacacaactgtaaagcagttgccgtcgtgtaatgtaaataagctttaaaccttttaattatttaaaactaatgaata

SEQ ID NO: 84742 - DNA, 662 bp, Heterodera glycines
atggcaaaggtaagcatcctgcataaaaagttcgaaaacaggttgaataatcccgcatgcaataaaaaggaaaaatacactgctacgaatcgacccaaaaatttctgaaaatacttcgctaataaatgaaaaattttctcaaaaattcttctccaaaatttattcaattattttcatgataaaaattttacatttaaaaattatatatctcaatattgatttggcttaatattgttgacttttgaataaaattttgccattttacaccctaaatttgaaactttttagcagctattttcccatttttagcacctaattttgggttttttgaaccgaatttactgtccaaatgtccgattacgtttgaaagttagaagaaatacggataaaaaccgggtacccgaccgggccaggataccccgacttttccaagacctggcctcagtacccagacccgactttttgaaatccaatacccggtacccacccgaactggtaggtccgagtccaaccgggtcgaaaaatacactgctatgaatagggtttttgattgtttagtaaaattaaaggaaagaaaaatggaaaaattattattacttatttcaaaaactttcttgctgttgtggcctagtgttattatctttagtatacaaagttgacta

SEQ ID NO: 84743 - DNA, 774 bp, Heterodera glycines
  unsure (1)..(774): unsure at all n locations
atggtggatgttgatgatttagaagtgaaatttgaggctttaaaattaaaggtgaatgatttggaagataaattggcaaataaaccggcaacaaatttgccagcgggggtaaaaacaccgaaatatgatgctacaggcgaccttttcaaattcttacgagaatttaatttaatggccactgccagcaattggcatgccacggactgcgtccgaatgttcccattattccttgagggagaagccaaagagctttttctaaatattccgccagataaaaagaaaacatggcgagatttaacaaatgccatggcggatcaaacaaaaaagattgacggtccaatgtgggcaaaaaaattgttggccagagcaaaaatgggccatgaaagcataacagaatatgccaataaaatacgtgagttggtggaacaggcttcccccgacccaaattacacgagcgaggcccgagaatgtgagagtgtgcattattttttaaatggacttccgactttcctaaaaaggaaaatattttttatgaaaaagccaaaaacgcttgttgaagcaatttcaatggctaaagaagttaatcaagcaagggaagaacttgcaaatgatgaaaagggagacgaaattaaacagcaaataaatgagataagggagcaaataagtgtaatttcgagtcaaaataatgggaanaacgaaaatcaaagagaatttgttaaccgttcttggcgtaacattttgaaacggaaattcttggatcgtggagagaaataa

SEQ ID NO: 84744 - DNA, 2589 bp, Heterodera glycines
  unsure (1)..(2589): unsure at all n locations
atgaaaatttgtgggctacggataatcccgaaaaaatcgaatatgtttggtcaggagaaaaatgtacaacaacaggtcaataattttattgaaaaaggacatggaggaattttggatttttacctcattacttcttttggtcataaaatgaatccatacagaggatgggaggaaatgaacagtcaaacatttatttgggagattcccgagccaactgacacttattgggccacccactttccagtgggcaattttcttgctgaaattacggatgatgcaatagtgattgagagtgagcaaagtgtgttctatttcgaaaaagaacatccggaagaaagagaaggaattattggcataccggatgacgcttttaaaatgacaaacgatgcatttataacaattcaagtaaaacaaaaggcaaaaagagaggcaaaacaaaaaattgagcctaagaaaaaagagagaccagtaaaacaggaggtggtatttttcaaatttcgacaaaataagggaaatgagagtgttgtaaaccctaccattcaaattacaagggaaccgaacattagccaagaggagattaaaaaagaaagagaaaatgcgaaagaaattatttcagaaattccaacaatgcctaaaccggaccaaccaaaagagaccaaaattgcggtagcacctacaaattttcccataacaactacagtaagaaatgtactaactgaacagacaaaaattacgacaagtacgaccccaaaaacaaaaatggcggcagtaacaaaagcgccaaaaacggtgccaaattcaaaagttgaaaaccaacctttttcaaaaggttggatcaaattaaaacagaccgagcagaaatatatgataaaaggagtgaattttggaaaaattgatacaaccataattccggttaccaaaacagctaaaaatatggaaaataccacagcaacaacggccaaaactccgttaatgagttttactacaataaaaccaaaaaaggaaaaaacacccaagaatatttcgaattccgtttttgagaatgaaaagtcaaaacagggaaataagacaaaaacacagacaaaagggacaaaggaagaaaaacatcccaaaatggtaaaaattggcaaagaattagacggaaaaacaatgcctgaggaggaaaaagtcccaaaaattgtgaccaaccaaaaaccaaaagaaaaaggagtaacgaaaaacattaccacaacacaaacacctaaaatgaccacaataaaaacaatttcaaccacaactcctaaaccaaaagtggaggagataaaggcaaaaaaggcattgccgaaccaaaatacaacactttcaacgatttctgttacaaatttttctaaaaattctgaaaaggaactaataaaaactgaaacaattgaaattaaaaatgaaagcggagaaaaagacttacaattccgaaaattgtcagaaggcgatgaaaaagaaagtgacgacgtaatttttgaaaaagtgaaagacaatttagaaaatgaaaatgagtcagatgagtatgaaaatatggaaaattctgcagaaattgaaaatgaatacgaattggacagaggggaaaatcagtttgaatttatggaaattgagagaaacaaacgaacaacaattactaccccagacgctaaatggctcagtaagcttaagaaaagcgaaaaaaggataaaatcagggcaagagaacaaaaatttaaatacgcgtgttaattatgcactttaccgactaaatgaggacagaaagaaacagtacgaaaatatttttctccaagcctgtgaaaacacaaaattccaattacaacttgcaaaggcaatattacaaataaacccaaatgagggtgtacggaaaatttttgatcgggatgatttagtcgcccgatgggttggtgaaaatttggaagttgggttttgtgtgccaataacaccggaaaaaatattttggagcaaaaaaattgggaatgagtgctacgaatggacgccaattttggcagaaaatacaacttttttcgtaaagccagggtcccgggaactgagcattttgggtaagaaagttggctgtgccgaaatggaagaatatgttatgaaaaatgacacacaaaaagaagcaataacaaaaatcagtacaaattttgagaaaatccgaccaaaatacagaaacattcaaaatcctttggtcttaaaagcaggaactctttacgagtcggaaaccaagcgaattgaaacagcaatgttggaatacagggcaagaatgaatactttaccttctgcaactctgcgtataattcaaaaaccgaacatttctgaggtcataaaagtaatcaaagaagaagcaagtgaaaccatggaaatagtgatgggaaaaacgggaaattggttcgaaatggttaaaaatatcccagaaaaagcggaggaggcagtaaattatttaaagggcgcctcatttttgcttattttaatacccattttaattttgttggcactaattgngtatgtgatggtaaagtaccgattgattatttttgctggttttcgcgcgggaagattcttaacagaataa

SEQ ID NO: 84745 - DNA, 2870 bp, Heterodera glycines
attttggaaaatacaggatttgcaagattaatcctgccggatcctgtcctgtaaaaattttgaattccaatcctgcacacggcgaatcaattttgggctccaagtacaattaagttggttttttcgtcttagtggtctgtgagttagtcaacaaaaaggggtctcaggttcaagtcctccttatgttgtgtgttaatttcaatttcttcttttaaagaagaaggcagaattattttttcattaataaaagttttcgtgtcataacatcgacaattttatgaaatttttttagcttataacttggtgaatactagagcaaataaaaccattttatgctcattttgaagggaaaattctggagaatattgtaaattttatttggtttggccttaaattgtggacttggctaaaaaagaattaaaattattgaaatgttcgtccctttcaaaaaaaatttctagcttttaaaatttcttcaaattttgcataggcccatatttcgaccccctctatcgaattctcttttgttttttaaaagtttcttttctatctcgagatcggctcttccatttttacaagggaaaatccccaataaattttaagttttgcaaagttttggcgttctgattactaaataaataataaacttatttgcactgggagcccaaaattgactcgccgtgtgcaacaggacccgcaaatttgaaatttccggtctctaattttaattctgtttaagttaaaattatgtacaattagcgcaacaaaaaacatccctattctttataggtccaatacttttggcaactgatcattaaaagttattaagcttctctaatgctttcaacgatggatcctaagctgaaaaggaaaagggtgtgtttttcattttcttttattattgtatttagtcgatttttaggaaaaggaagagaaagagcgacttgaagaagcgtttgaagaatttcgtgaaacatttgaggagaccagtgggaccaaaaaaattgtaaagactttcatcagaggagacgttgttaatgccacaaatcaggttaaaaagcaaaaaaaaacttgtgtttaatacattggtttagtttcttcctcctccgttgtttataagccatcgcccattaatctcaaaacgctgtcgaaacccccaccgttagaagctgcgaaaaaaattgcagaagaaactgccaagaaaataatgatggtaagacaaaaaggaatgaataccacctttctattcagagagcaattcgatttaaggaagctgccgataaaaatagccaaaagcctgacccactaatacttcaaacaccggtgccggatgcgactgttccatcaattggcaaaccgccaaaattgggcattaaaaaggtggtagaaaagccccgtctgagcaatttggagatgttcaaggaagaattgaaacagtacgtgaaaaatgaagtttattcatagaggccttttgttatttgtaaagggtattattcgaaaagctttttaggatgcaggcgatgagagatgagcgcaaaggactgagacagcatttgaaggagcggttgaatatgccagaagaggaattggaccgaatcgcaccatctttagaccaaccatacgggccgagcatctccgacccctacggggaggatgacccgaacacgaccaatttgtacgtctgcaaccttccagcagatgtaaaacactaacaaatgttcattacaactctggcttattgtcaggcaaaattggaagattttttcgacacatttggcacctttggaccattagcatccgcacgaattctctacccacgtccagaagacgaacgccgttatcgtgaaacgctcagcggatttgttgcttttatggtgaaaggcatttaaaaaaaaaatttgtattttgacacactcagagccggacggatgctgaacgttctaaatgtgcaatgcaccaagaaacaatccgaaattgtgaacttcgtgtgtcttgggctcgttccgtgaacatgccaccgctggtcagataatcaaaaaccctgaaagcaaaagcaatcggccaattatagccctttttcgtcccgctgcctcttcgtgagcttgccatgcccgacccaccttcgggtttgccgttcaacgctcgacctgtgacggaggagctgcgttcatttctgcagaactatggagatttgccaaagttgggagtaccgctaactgaggaagagggcgaaagagacacacaaatgctggaggactacaaaaaggttggggccacaccttttctggcgccttttcactccaccaaatctgatctgatccgattaattcgtcacgttcaactagcagatgattgagaatgccactgtgcgcgttgtcattcccacagagaggtttagggaacatgcggccatttttaaattcagccctctttctgattcaggcctttattgacacttattcaccgtgttgtggaatttcttgtacggagtggccctctttttgaggcaattttgatggccagagaacgtcaaaacccaatgtatcggtaatgtcttttttttttttaccaaaaagatggcaaaaaacaattgtcgcttctttagttttctgttcgataatcatcaccctactcatgtctactaccgatggcgtctttacacaattttacaaggcgatgaccgtcaaaaatggcggctggagaagttcaaaatgtttgaaggagggagttggtggcaggttgtagtaacataactttccttatgagacacattatttacagccaccaccgcacgcgctttttgagcagggaatgccgccacaactgtacggaggagcgtatgtgccaaagagacgtcgtgacaaacccta

SEQ ID NO: 84746 - DNA, 119 bp, Heterodera glycines
gttgaaagcattagagaagcttaataacttttaatgatcagttgccaaaagtattggacctataaagaatagggatgttttttgttgcgctaattgtacataattttaacttaaacaga

SEQ ID NO: 84747 - DNA, 545 bp, Heterodera glycines
atgattctgtacgtttttcacatttcttctcaacatttatccttttccttctcttttttgttttagtctgttcgttgtgccattgtttgtcgggtttgtcggatgttgtgccattctttggctttattgggaccgcttcaaaaaactaaaaaagaaaatgtaaaaaaataaacaaatttcaaaacgtcagatttaatttttcagtttcatctccgccgactgttggctttgtgtgttcgatttgcttacgccttcacaacttggccacggaattgcgatgatcagtcaccgttttgacatttacgtggacgaacacttcaaaactcgcaaatgggcgctgaaatttattcaaattcacagcaaaattggaaagaatggcaccaaggaaatggatattgtcaattacggtggaaaagcgttgccaattccgcaaaatccgctgccaaaagaaagtcgtcggatttcaacggatcagcatcttgtaaaattggcgaatatgctaaaaaattatacaaattttccctatttattttcagtttcattga

SEQ ID NO: 84748 - DNA, 1125 bp, Heterodera glycines
atgctgaaagtcaatgggccgtccttcaatgtgcacatcattccgctgagccgagaggcgatggctatttccgacattgaaaatccttacgcgccccaaaaattgtattccttggcaaagaatgttgcgctcgacagtttatgccattttcgagacgaagaaacgaaccgatgcattttgaattattttgaaacttttgaagaaaaacaaagtgccgttgttggctttctgtccaaatggcctagaaattcaaattttgctgctggactgacagaaaaggtcaattttcttatttttagaaaaataaaaatgcacaagtataacaataaaaacataaattattaatttaaaaaatttttatgaaattttcacataaaataacattggtttttggtaaatgaaaggaaaattaatttctttaactttgacatttacaaatttagggttaaacagaacaacaattgtccgatttgtggcgcaaaaacattcataatttcattaaaaaacggtttagttattttaatttgaaaatacagtaattttttaccatttatttaattaatttagcgaaaccaaacgcaaatttgaactcagaaattgttggcgatgaaaatgtgtgatttctgagtttgttcattttttgtttgtttttctctgatcattcattcattttgctttgttcgggatggcatttgttgcttgttttttttgaccaagaaaaactatttgcttcttaattttcaatgattttctttcttatttaacacggccaaactgatttatataatttttgaaaatcttagaaatattttattgattgctcataatattcaataaatatgtaaagcgtagaagataggtgaaggtgctataatagtcgataagataaagtgcatataatgttattcattctaagaataatttccttagtttaacaaatccgtcatacttttcagtgtcattttaatacttttcttcaagaaataactcattaacataatgtcaaagcatttgaattcatttataaggcaaaaaaattctattaactgaaatggtgagaagtttcgattttaagaaatatttattccactaggaattgcaaaaactaaacgcgaaagaaataaa

SEQ ID NO: 84749 - DNA, 442 bp, Heterodera glycines
atgccctttttccaaattctgttggaattgtgcgccgcgttggcttccgtcccggcactgctcccaaagattgttttgccgcaagacgcacacggaaaatcaatcgcgaaacagctgatcccgcagtttcggaacaacctgaacaattaccccacactgatgagtggaatcagcgaagctgacttatcattcatggactttattcgcaaagtcaacgattattcggaggttggggaagacaaaaaaatgatttccaatttaaattttaacttttcaggtcatcattcgtttggcacggcaatttgaacgtcaaattccagcggaaaagcgcgtcaaaacgtcccattcccatcgctatttcacccgcattggcgccgaccgcgtgcgacgactgcgtaacgcgtcggcgactgtgccatcgtcgacgggtccgagttcggcg

SEQ ID NO: 84750 - DNA, 523 bp, Heterodera glycines
tttgtccgcgttcgtttggccgtgccattggcaaattcctcgacttcgttatgggttccgcgcactcttccgccaacccttcgtcttccgtctcttcttgctcatcgcccaccaattttcgggaaaagcacacgcccgactcgttggaggacaaaattgagctgatctttgaactgttggagaaaaagcccacccgattgggctacagcatccagtgggcagtgcaggtgagggagggggagggaacggccggcacaatgccatggagcatggcacccaactgatcatttaaatcatcaaactcattaggaaagggaaggaatgcgagggaaatggcacggcgcaatgccattgcatccacccaaagtcccaacatccatttcttaccatttcattttgtaagttgttggccaatgcaacagaagaagagaagttggagatgttgcggtgtcgtgtgctcagccgaatctgtgccttaatcacccgctacagtaacgtcgaagttgcggcgcccccgggcaca

SEQ ID NO: 84751 - DNA, 1232 bp, Heterodera glycines
atgggcaaaaggaagaacaaaatctgcgaaagcatcggaaagggcacaagtgtggtcagtccggcgcaatggtgccaaaagtgtcggcctttcccacagattttctgcacgtgcacctcgggacaggcactgcgctttctactcaagcgttggttctgccccgacttggtcgtgatggacgaggcgtcccaaatggtcgaatgcgccagttggattatgctgcttcacgtcctcccccccccttttcacgttcttgccaaatgcctccttttaaggctccccgtttcgtaattgttggagaccaccagcaattgcccccttttttgctttctgctcggaactctccggtgaactcagctgaaagactgcacatttcgctgttagaatatatcaacgaaaccttcaaaaatgaggtgctgcatggaaagagtgtttaaaactgtgtagaacatcacttttaaggatttctaccattttctttctgtccaatatcggtcaaatgaactaattcaaaaatggtccaacaaaatattctacgacaacaaattggtcacttatcagttgacgaaaaacattcacttgcgccaaataataaaccaacaaaatggtaagaaaacgaacagacatttccgtccctaataataatgtacgaatttcggctgatctctcctctggtcctttgtcctcaaaacaaaaatttctgatcgatggtccgcttgtgctcatcgatacggtgagctatcgccgagacatttcgggatatttcgaaattggaaaggccacttttcgcattgagttgaagcattttcgcataatttgtaaattctctcagcaattttataaagtagaatcattcccgattaaggacaaaggcatttctgacagtaaatggcagaaagtctacagcttgttcaagttgtggtatcccctctctttccgcgagggtcagaatgagcacacgcactcctaccacaacattggttggtttcccattcttttcaatttaactttttgcttaaggcgaggctttctgtgccgtccttcacctccacgcgttgaatttattcggcggtttggatttgtcgaaaatcggttgtattacgccgtactcggcacaggcggaaaagattcaaaagctaatggccatgggaagggacgagggaccacgcttcgaagtcagctctgtcgacgcccttccagggcagcagcgagaagccattgtgatgtcattg

SEQ ID NO: 84752 - DNA, 718 bp, Heterodera glycines
atggaaaaatatggaaatatggacataaatcgtgaaatatggaaaaatatggatatggaaagtcatcctagaagcttcaaaccaagcttaaaacatgtttttcgtgcgtttcaggcctcccacagtccaggaaaaaaaatatggatttccatataattggatgccctattattcataacaattgaaaaaaaaaaaaagtttttcactagaaatcggtaccctattaattaaatatattgcactcaaaatatggccccctgttcacaaagttttttttagaaaaagctcgccgcaaaatttgtttttatttattttagtatttggaataaattttccaaattagcaaattaacactggccctaactgatatttttaatttcccttctttaatggactttttttaaacaaacaaacacaacaaaaacaacggtgaaaatgatttatgaaatcaattattttcgcattgattagagaatgggctcgcaatttgctgtgctatttatttgtcattcgtccagcagcaaaattggtttttcgcgagcaaagaattttctcactttttgttgtaaaaaaatttacaatttcgattttcaaatttttccagggcctcggaaaaccattcttgtgtacattaactctctgaggattgaatatttaggcaaatgtcttctggttcctattttcaggaatttggggaaaaatctttaacaaaaatgca

SEQ ID NO: 84753 - DNA, 88 bp, Heterodera glycines
ctcatgctcctggcgagttcgaatcgcattgcatttgaagggcattgaatttgatcagcgcattgtcaatttgttgaacggtgatcag

SEQ ID NO: 84754 - DNA, 1173 bp, Heterodera glycines
atgccaaacgaatgggaggagcagcgaatgtgcggacgactgctgatccaagcattaaaaatggtgtgcaaccaccaatacgcgcagccgaacagaggtgggaacagacaaagggagacgattaattagtgcaattcattagccccaaattagcaaaatgattggtcgtcctttggttcccatcgaatgccctttcctctcaaatttccataagtctaacacctctaattgtcagccgaaagctcctcctgaccatttttgagcttgccatgcaattccattagctcattttcaaaatgagattatccgcccccttttaccatttcttttctcaataaaaccttttgtctttttatcatttattctttcaaaattcttaaaatgccaacaaacataacacccgccctctccattttaaatactttcaaaataatgttttttcctttcttacgatttactcaacataatcctctgttttgcccgacggggcgaaatgagacaaatatagccttcttctgccaacgcaaaatattttgcttttttcaaccgccggcaaaaggcgccggggaaattagcctcgtctgctgaccattttactaattatggctcaaaggcacaaaaatgggaagggcttaatgaggaggaaaatggatgacaaagaagagagagaaaaggaatgaccaaattgagggaaaggccaaagaagcgcaatttcaaattagcaccttttgcagataatttctacgaaaccaccggcgttttgttgcgcgtccgccgttcgtccgcctcccgcgcttatgtggtgaagcggcaacggtcgccgacagacgacggcgccgcgccaatggccgcgccacacggagcgatgggacggaacagacgcggcatcatctgggagtgctgcaccaacaaatgctcgctgaattacattcgcaacaattactgtgccgcaccgccgcaccaaagcgaacagacagaggaaaacgccgcattccaattggaggacgagcggaggcggcggaaatgatacactcagcaacggtggggaataaggacgagggaaaagcatacgggaaaagaaaacggggaaaagaaagagggaaaaagagaggggaaaagaaaacggggaaaagaaagaggggaaaagaaagagggaaaaagagagagggaaaa

SEQ ID NO: 84755 - DNA, 896 bp, Heterodera glycines
atgcttaaggccaacggagacgaatgtgcgatttgcttggatgcttatcaggagggacagatgattcgtcagattccgccatgtcaggtgaatgtttaagccgaataggggctaatgtacgaagtgattttggtaggaaatattgtaaatttgtcaacgcaaaagttatggtaggaattgcgtagatgaaatacggtagtaacattggctattgtagcagaggcacttaatttgttgaaagtttgttcttttgttgagatttcagctttactactgtaaagtttatgcgtttattcatttttttatgcgttcaatcaaatcgcatttaaatattttaatttaatcttttgagtgtttacaaaatgcctcacaattgctgttaaggctttttttaaattatattaatttgtttttccaaattacccgtcatatcacacaaattatattccgaataaatttccaattgttcgctatccgaaatgtaatgataaagcataactcataacaaatataagccaatcggaacatagcaaactgagtgccgtattgaggtggacgcataaataattgtaattgtgccgcaatttctattttgctgatttatttaaactatacttaaatactaattttgcatttagcacaattttcactcggaatgcattgatttttggtaaatgaaaggacaattaatttctttaactttaacatttacaaatttagggttaaacagaacaacaattgtccaatttgtcgcgcaaaactttcataatttcattaaaaaacggtttattttaatttgaaatacaataaatttttaccatttatttaattaattttagcgaaccaacgcaaaattgaactcagaattttgtgcgatgaaaatgtgtgatttctga

SEQ ID NO: 84756 - DNA, 799 bp, Heterodera glycines
atggcacgagaacaggtaatgagccaattataaaacaggtaatgaaccaattaaaaatacagctaataattaagagactaggcaatcagcgaataaaaaatagacaatgttgagaagccaattaagagaaccggtaatgaaccaattaaaaaacaggtaattaggcaattaaataattaggtcactcgtcgattaagagaagagctttttctgttaagagaaaatacataactttctaaatgtatttaaaagaaattcatttaaaataaaattaaaatggctttaacagctcggtggatgcggcgtcggatccatttgcataaatcttccgggctcgttcaaatgcgactgtttgcccggctatcagagagtggatgagcgaaactgtgtggatttgattcgaatctaagggctggctgatcagaatgaaacaaatattgtttattgtaagagtgtataataattgtatgaatgccccgaagtcatttttgtagaagaaagaatgggctacaagaaggtatacgaagataccgtcgttaagcttatatgttttaaaatttcaaaatttgtagattttacaatgaattttcatttatttgtattaattttttacatttttactttgtatttgaaatgagcttgtcaaaataagcacatttttaaaactcgataaaaaactttcaatttgcatattagtgaaccaaaaaagcaaagcattttaacccaacaatatttgagccgacggtgccgatagaaacgctggggattaatttaaaattttgttcgctttgttaataaa

SEQ ID NO: 84757 - DNA, 1409 bp, Heterodera glycines
atggcgtcccgacaaacatttggcgttagggtcacaaattttacgctggctgtcggcacaatggtcgacattcacacagacggggcaacaatggttgggcaatgtctcttgctcggcacagtccaacgggggacagagcgcggcatttctaacagtgagtggtacggtagtcacatagttacggtaagtaacgttaaaaaacgtaaattacccgtgcaccgttcgaattttatttaataaaagccggcaaattatcggccggtttctggtaaaacctcataacagatttgaaatgttaatgacccaaataatttttttaaatgataatttagcgctaaaaccttctaaattaataattggctcaagtctcagtgatcatttgccccaattttaattcactttggtccataattagtgtggcatatttgaactcgaaattcagaggccaggaataaattcaatttcaaattctcgcgaattcttcacctgaattcgcagttcattcgtccgtcgctgcactggcaaaatacgcacgactttggccaaaaagaggccccactttcgtatgtttgaccattgtaaaagcactgaaatttaaacttatagccaggccagatttttctggctaaacctctgaaatatggggaaccgcccacttcggcgccggccttttcggcgccgttgctaacaacttttttcctgatcaaccaaattaaaaatttttgttatcattcgatagctcttcagattctctattagcctgtaaaatttcaaaaaatttcgtcagtttacaaaaaagttatggccaaaaaacctcaaaaattaactttttcttggctttttcggcgccgcgtggcataacttttttatttttgaatcattcatttctatttttacatgtaaatatagagcacacatagagctttcaaatgatgccagattggctaaagctaactgacaaataaaaaagttatagcatttcaaaatttgcggcgccgaaatggtccgcgccgaagtgaccccgacccgaaatatgcctaaacaatttattattgatagagccaattggctctaatatttaaatattacctattcatttctaaaaaaagccaaaatatgtgaaatatgcatttttgggaaaaaatttattttatgcgccaaaaatccctttaattgattattttccataaaaatgcgaattttagcttcttaaacctattaaattaaaatattccaggtttatttttcatttctttgaatgaattttgtcagtttagcttctcagcgaccggaatgatttaagatgatttgaaagtttttaccagaaaattttgcaaggcttttctttcttcgccatgacttgcttttttaaatcgtctctttcattgagtgattttttttttcaaaaa

SEQ ID NO: 84758 - DNA, 373 bp, Heterodera glycines
atggcctcttttttatcaattcttccatttcttgttgtctctgctcagtttggacgcggaaattttctgttggatcatttgaaggtgtttttgtttaattttgtaaatgtttggtgattaaaaaatgtatatataaatgttttttatttttatattgtaaaattaaattattttttaagtcggctaaattgactgaattatttatggcaagaaatttatccctcgaatttgactttcgacaatcaaatttcactcaattcgatttgttcaacctcaaagatggcgaccaaaatttactgtttcgcattgaaagctcaaccatcacaacgccaaatgaagtgccaaattaaaaaaatcaattcgatgaaataaa

SEQ ID NO: 84759 - DNA, 931 bp, Heterodera glycines
atggctattctcctcccattcgaatattttgtggtacaaaaagtgtacacatttgcgcacaaagtgccacttgaaaatttgtgccaaggaaacaaccaatgcattttaaattattttgaatcatttactcagaaagaaaacgaactttcaaaaatcattgaccgttggtttaatgcaaatgaatttgcgtattttacagaaaaggttaatttgtctttaaattaaaatttattataaatttaggacaatttttttctgagtgctattttgaaagagttggtaaatgaatttaaaatcagtgaaaacaatggcaatagaattggtggggattatgccaatttgctcggcattttcagcaaagcttttattgaagaaaataacccattgatgaatattgtcaagttgagattggctgaagagcaaatgatcgacattatcagtgaaatgtgccaaacaatcaaaaagataccgaattctaaacagtttttgattgagcaatttaatgtatgcccttcaaaatgctcaataattggctttctttgcctattttgcatttttaattattatgaatatattattttttaaatagtttactattttttaaaaaacaattgattaaattttatagccaaattcttaaagtcaattaatttttagattctcgaattaaaaaatttctgtgataaatgggcccctgtacaccaaaaaatgttgcacttcagtgagccaaaaatcgctaacaatgcgcttgggcattggcttcggcaaaatgtcaatgatgggaaagaattggcggacgaagagcgacaaattgtcaatttttggatgacagttttgagctcaaaaatgcattacctgtgtagcaaatggatgccaaatgatataattatgctaacaaatattggttaattttcaaaattttcatcattta

SEQ ID NO: 84760 - DNA, 194 bp, Heterodera glycines
cccgttttttaattttgtggaaacattcggccgcttcgcggcctcaggacgggcgcttcgcgcccgtttttaattttgttgaggacattgggacgcttcgcggcctcaagacgggcgctttgcgcccgttttttaattttgttgaggacattgggacgcttcgcggcctcaagacgggcgcttcgcgcccgttt

SEQ ID NO: 84761 - DNA, 450 bp, Heterodera glycines
gtaacacccagatatgttcaacggcaaaattgtgcaaaggctttggtgaagttccaaagctatttggagaccttcgatttgaaggtttaattggacaggactaaatcctgtcaaggcaattacctttctcccagtatttctgagttggtaatttttgatgtttaatggaagtctcctctcaggactttccattaacttttcaaggttatgtgaacggcaattgcagttcactaaacctgatgaatggtcaggtatgcaatcagtgcatgcctgaacgccaagactgcaattgaaatcaattgcttcttgtcgacttttacagttaaagtcaattgttaatggctctctggttagagctatgttgctcccgtcaaaaacaaaatctgagtttaagacgggggcgggcggaaaagttactccgatcggagtaaggctgatgttgttccatct

SEQ ID NO: 84762 - DNA, 1548 bp, Heterodera glycines
atgctgggccatttggctgccaattctaacattccgatgcttgtctggggacaaagcatgtcttcaaagtgagttcgttcaattaatttgactaattaatcttcgaattctcatcagtcttgcctcctcaaacaatgccacctatccaactctgttgaacattgtgccaaattacaaatagtacactcattttgatttgtatattatttaattgcctgactttaccattagcatggcttccgggcttataagtcttcttcagtattttaattggacacaaatcggcattataatccaaagtgatatcatatcagcaagtggaggtaataattaagaaatcgcaaaattaaatttaaacatttccattttctttttcggttgtgattattttggcactgacattgacgtgagtcattttattgcatttttaaatgttttaaaaattattttagaattcgcttagcgaacagtcgaaaatcacaattaattataaaacacgcattttcaacattcaatcatccgacacaagcacaattgtcaatgcaattcgagaacgggcgaggagtacgcattttaaaataataatttataattagggaaagtaaaattaaattatttatttcttttttaaatttagtcgttttgctttgctttgacgatttgaagcagatgcgaactttcgcacttcaattgttcgatggaggactaaacacaaaagtcgtctttatttattttattcattttttgttaattgtaaatatttttaggattatgtttacataatggtggataatgacatgtatttatcttgtgagtttaattgaggaatctgaatgattttttccacaatttagtcaatttgacgagattacctttttgggtacaatcgaggtaatttatggtttcaaaaattagaaaaataagaatcatctcaaaagccaagccattgcttcatattaaaatatttatacattaaaaacaaatttgaatttaacaatgatgtggcccattttacttataatattgcataaaaaaatcctatggtaattctttatccattacagtaacaattcaaatacgctcgacggaagaaacgcggacgccgaagtgattggccgattggccttatgggtagaaattggcacattttgataggttaattttcaattgatgcttgcagtggcactacgacatcactttgtccgcgttgtccaatcaaaattactacggctttttcaaaagagtgatcgacagaacgggcgattggcccttttattgcgatgaatccaattgcagcaaagtgatcaatgtgaatggattattttttgattattcgctacatccaatcactctttaggcatccatctattcgcttctgttgtacgacgcaatttacaattacggaatggcactgaacgaatctttccgccaatttggcattcggcccgaagtgtaccgaaacggcactctgttggcacggaacaacagaaagccattcatgggcaagaaatgcaaaagaaagccgaattttgaaagcatttgcttaag

SEQ ID NO: 84763 - DNA, 1292 bp, Heterodera glycines
atgtcatcaaatttatttcgatctgtcgaaccgatggaaatgactgatccaattatctcaaatgaatccccgccaatggcacgagttggacaatgtaaaaaataattttaataataaaaaaataaatactatcaaatggtaattcaaacataatttttgttgtttttgtttttattttggaagttgcccaatactagagagcccagaaatttcaaatttgcggatcctgctgcgggatttgtgctcaaaattttgcgagacgggattccgcatgtataataccgcatttttcgactgagatcccgcaaaatcccgtcccgcgccggctctacccaatacacaaaaaataatttaagcatttttgttgctttttatccacttttattaaaatatagctttttgggtaaaaagacaacatgaccctgtaaaggaaaagaaaacattttctgatttttataaaattagacttattttttcaatttccagacagaggaatgcagagaaaaatgacgaagttcataattttgactgtagtgaacattacggtaacagtgggactgctcggcttcattacggtggtttaatttaaaataatataaaagttttttcttcaaatatacagttatattcaattatcagattgagaatgggcggaccaatgctgagttggaaattttgaagaactctgttggaaaattggaacaacatggaaaaggttggaactgcataaatcaaaagtctaaattcatatttatattaaatatttattcccaattaattcttatggggggttaggtatttataaaaaaggggtaaattcgaaaatttcgcgagactgtaattgaccctgagactcaaagttgtgactctcgggcatcaatatttggattaaaatgtgttgttcaaaatatatttgttaattaattttcatttgtggtcaaatccatcaaaacaaaagtcatcgcattggaggaacatcaaaagaaagaagaaacctttattggcgttttgaaagaccgatttggaaatggtaaaaatgaaaaaataaaataatttttaatattttaatttattaatttttcagaacttttaaaagctgtccatccggacattcgcaagaacattgctgaggtgaaaaagaaggaatagatttaaaaatacataaaaacggaaattattttagaacttttcgaacccaaaacaaaactgttgggacgccaatgccattcacaatgatctcgaaatctttggctcggaatctttgaaagtgcattacaaaggcgatggaagcg

SEQ ID NO: 84764 - DNA, 591 bp, Heterodera glycines
gttgtggcatgttcacaggtggcggcttcggatgtggcatcagcaattgcaccaaattcacataagtggtggagggcggctgatcatcttttgaataagaaaatttattgaaacgaaaacattttcggcggtaaaaaaaacgtttgaaaaaattccaggcaaaaaatggggttaaaattcaagaaagttttgcttcaataaagaactcggtaaatctcatgatactaatggcgctgcggtttagtcgagtcttgaagacaataaaatgtcaaaatgttcgcttgggccaagagaattccaggccagggaataccgaacaaaaggggacccaaagtgcccaaatttcctcaaaacccaattctcgaaagcatcgccaattttggcacctttgccgaactgactgctctccttccaatgccgtcggctgctggacatcattgaagatgatggtattgcttggtggtgctgctgttttttgaatccggcgccgactaagccggcgccgctgcgccgggttcgactccgaatcagaaacagtccgagcgccatcagcgcacatgcaacgccgcaggcaccgaacaccgccctgga

SEQ ID NO: 84765 - DNA, 336 bp, Heterodera glycines
atgggggaaaagccagtctcgagcatttggagagcctccccggcgactaccgaagagcaaaagttgctccaggatctttttcaaaaggaaaagccgattaaaaatgttccatgggaggaaaagccgttcccgaccgtgtggacagaggaaaagccgcttctgagcgaggaaaagctgacttatgacaacggacgacgccttcgtgacgttggcggtttggtgaagccgtcgcccgccggcgccggatggcagcagcgccggcgcctctacggatggcgcccgtcggcacactttggcgccgccgctgaaaatggacaaattcggcgccgtttttaa

SEQ ID NO: 84766 - DNA, 722 bp, Heterodera glycines
atgatggcatttaaatgtcattttgttctttctctgttgctgttcttctgcgcctcatcatttttggtttatgggggagggaaaggtaaaaatataaaaaaatatttgttttaattagggtagggtttcagatttaatcaaaacttgtaaaatattcacgtaaaaaactttttcaaataattacaaattaaagtgaatgagtttttcgtgctcattagcctattttgcctattcccttgtaattttattcctaatttgcattttttaatcctttttacagatgcgtcttcgggatccaataacagtgaaaaaaagtcgttggccgatctgatggtagaagaaagattggccgaccgggacggaaaaccattgaatgaattgttaaaatttgacaaaattgacaaaaaagaattggatgcatttttgaaagaaaatggggaattgcttgacatctcatttgatgattacaatccgcaaaatgtgcagcttggtgaccatgaccaagtcagtgttctttttagtccaccaagtgcggcatcgccagcagaagtgggaagcgaatgccatccgatatttgtgccattttagtggaccaattccatctgagtcaatgtattttttaagtgtcgttcaaatccaacaaactttgtatcattcaaaggctctttgcagacttttttagcctaggaatttcacacagaaaaaaaatttgcaaaaaaaca

SEQ ID NO: 84767 - DNA, 772 bp, Heterodera glycines
atgccctcttcggcaccggaaattccgcccgtccaatgcttccatcacatcgaattttttgtgtccaatgctaaacaggtaattaattaattaattgccccatttaaactaattattgcgctgctgaatatttgctattccattcattaattatttgtcccttttctttcctttaattaggcttctttttggcattgtttccatttcgattttcgtcgttttgcgcagcgtcagacggaaaatgcctccgaaattgccattagaaagggaccggtaattattgtattgtaattggctaaattcaagagtttctgcgatttcacagattatttttgtcttcaaatgtagcatttcgccggacgattcggagggaattggcgctgaagtgggaaaacgcggagattttgtcaaggacgtggtcagtcaattcgccactaattaattcccttttctgtgccatttatcttttgtccctttcagtcttacgaagttgacaatttggacgccgttcttgcggtaggccattaacactaattagtgagtattaattaattgccaaatcttttttcagaccctccaagaaaatggactggaattattggcacctaagcaaatgaccactgatcaaaatggctgtttgtttgtcgcaaaaattgccggttccgccgggtccattgcccacactttgatccaaaacattgactaccgcggattattcatgccaggcttccgtcccatcgctgacttttctctcaccagcactttgctgtaa

SEQ ID NO: 84768 - DNA, 289 bp, Heterodera glycines
agaggtgggcaaaccatcgttctgaactcgttcaatggcgcaaatgggggcaatgggatgaggagaagcggaaacggagcgaacggaggggcggaaaggggggcgcaacggcaaacgattgcctcgagaagcattcccgtttagagacagcgcaacggcacaagccaattaaggaattaattaacgaattaattaattaattaatgaacaaattagctaattaacgaattaattacgaatatttgttgatcagctcgttttgtttacttattaaatataattttgctca

SEQ ID NO: 84769 - DNA, 852 bp, Heterodera glycines
atgtattcattttttgacttaggcaagaagaatttcggctatttggtcagtgctgtttcgtttttggttttctacaaagtctccagcaatatcaagttgaagaaggcaatagaagcggttagtttttacgattgtttgcttatgcttttgtaaatgttgcattttagaaacagaaattggaaatgaagccgtacgttgttcaggacgcgatgacacgcagcggaatttaaagaaacaacgcattctaataggtgggaggcaaagtatcttcggattcattagttttaaactcagaatggcgtatttgttgtaactgttcacaagagtaaattaattctatgactaatattgaaactttcgtttttgtgaatttcaataattggttttgacaagttacctacctatattggttgattcgggaaaaaatagtaaaatttgattgaatgttaaagtacgggtaatttttcagaattgcggtcccgacgaaaagttaatttaaaaattttattttggttttttcagggtgaaaaatgtgctaattacgaatctgagctcagattttgcaaaatcattgattttatctatgatttttcatcaagtacttgattttttccaaaattttaaaaaaattaaacgagcgaaaaactcatgcatagatgttgtagagtttaaaaatagcttttgaatgaactattaaatttatgaagaaggcaaatttaaagttttatatgattttttgaaatttaattactggcccttaggggtctatgaaacgggtctggggttcaaatccgcttggctgcggattattttttatgacagccaatgaccgttcatgcctttcatataaaa

SEQ ID NO: 84770 - DNA, 66 bp, Heterodera glycines
atgccgttgaccattgaggagtatcaaattggccaattgttttctgtggccgaggcatcgcgacag

SEQ ID NO: 84771 - DNA, 864 bp, Heterodera glycines
ctataaaaagggatgaaatttgcgagatccactcattcttcgcatttgcgacttttactctctgctgaacaatttcttctctcgacgacactttgcgcattcaatccgagcacacttcttcacccatttgctagtcccatgtctctgcaatacgtcggcatcgctgcggtaatcctcggaagtaagtgccaaaacaattgttgttaatccatgttgatttgctgctaattaatcgccatttttcagctgccatcgctctgttccaaactgtgtcgctcagcaccagacgacaaatcgccgcacaaaatggccgaagcagcggcagcaaacgccaaagcaagtcgccgtcgtccgcaaaaaccttggcacacaaaatcgctgcgacggtcatcgctgagaagagcctgagctccatcccggacaaagaaatcttgcagctgatggacatcggctttcaactgctcgacgaggtgggctcagcctggatccgggatgaccagccagtgcctctgttaattcgtgccaccactgttttcaggagccggcgcgtgttgatgtgcatgccccttgctacgttttcggtgacatccatggcaatttgtcgtaccttctcaagtgggttttggactcgtcgactcggctttttaacatttcagcggcacttgcaaatccgttgttgttcaggtacttctccgacacccacatcgaaccgcagctgctcaagctccaaccgccgctgttccatttgctgttcctcggcgactacgtggaccgcggcgagttcagtctggaagtcattgcgctgctcgtctcgctgaagatcctcttctgggacaagatcactctgctgcgtgggaaccatga

SEQ ID NO: 84772 - DNA, 191 bp, Heterodera glycines
atggcccgcgccaaagtgaccccgaccctctgtctccttcttcactttgttccccttttgactgcacttcagcaacaatgctcatcagagaatagtgagttgcttttttcatcatcattcttctgacaccttaattaattacgttaattaattacgctttccttttttcagtcgcatcgtcatgccgttga

SEQ ID NO: 84773 - DNA, 1809 bp, Heterodera glycines
ctataaaaagggatgaaatttgcgagatccactcattcttcgcatttgcgacttttactctctgctgaacaatttcttctctcgacgacactttgcgcattcaatccgagcacacttcttcacccattggctggtcccatgtctctgcaatacgtcggcatcgctgcggtaatcctcggaagtaagtgccaaaacaattgttgttaatccatgttgatttgctgctaatttatcgccatttttcagctgccatcgctctgttccaaactgtgtcgctcagcaccagacgacaaatcgccgcacaaaatggccgaagcagcggcagcaaacgccaaagcaagtcgccgtcgtccgcaaaaaccttggcacacaaaatcgctgcgacggtcatcgctgagaagagcctgagctccatcccggacaacgaaatcttgcagctgatggacaccggctttcaactgctcgacgaggtgggctcagcctggatccgggatgaccagccagtgcctctgttaattcgtgccaccactgttttcaggagccggcgcgtgttgatgtgcatgccccttgctacgttttcggtgacatccatggcaatttgtcgtaccttctcaagtgggttttggactcgtcgactcggctttttaacatttcagcggcacttgcaaatccgttgttgttcaggtacttctccgacacccacatcgaaccgcagctgctcaagctccaaccgccgctgttccatttgctgttcctcggcgactacgtggaccgcggcgagttcagtctggaagtcattgcgctgctcgtctcgctgaagatcctcttctgggacaagatcactctgctgcgtgggaaccatgagatcgcggaagtcaacgcggagtgagtgccattggcgaaaagtgccattgtcgtcattcaattccccttttcaggtacaccttcgaagaagaactgagaacgaagcgaggcaagggccatggccgcatttacaaggtgtcaagagctaccaaaatgaatgaatttttaatgtttttgttcccctttcatttcagaggtgcaacaagctcttcaccaagctgcctctgtgtgccatcatttccaagacgttcctctgcatgcatggtggcttgccgcggccagaaggatgggactttctgatgggtgatgacttccatgtgcgtttttcgtgtttccctgtcaaagcctttgtcatttccaatttctcacacatttttcagaagccaaaaaccgacctggaaatcgacgaaaacaacacattctgtgacctgctttgggccgaccccactaacaatgcgcaggagcttcgcctttccaaggattttgagccggacaaaggattcctcggcgagtacggcaactatcgctttaatcaggtggattttggaggactgctgacccagcattttgttgaccgcttttttaatactttactgtcattttcaggaccgcgagacttcaattcagttcaacgaccgctttgcgcaggagttcttcaaccgctttccccacatccgcggcatcttccgggcgcacgaaaaccaaccgaaagggcacagcatcaacgaggcgcgtacaatttgcacggtgttcagctcgcctcgctacatggaagacacggactgtggatctgtgctgcgggtgcgtgctgcttttgccatgccatttttttgctttcaattttcaattccttttccccctcagctttctgccgacatgaaacacattcacttcgtcacgctgaaaccgaaggctactggagagaaattgagccaggaagaatga

SEQ ID NO: 84774 - DNA, 531 bp, Heterodera glycines
atgaccgccatgtctgtgcaggggaagggacaaaatggaaaacagaaaaacggaaatgcaaagaaaatcacgttccaaatggacaagaaaagcgatagtgccaagtgcgttaccataaaataatcattcaaatcatagaatcccaagtggcaaaacactaaataaaaatcaaaaactgttttatagcatttaaaagaattttttatgtgtaaaatcttaggctaattacgcgcctaattactaaaacatttacaacaattattaatttaatttgctataatgtccaattttcgagagacgttccgtattcccccccccctcctctccttcgtccgaatacgtctcggtcagctgctacctgaaacgggtcaatcggggcaccgaaggaggacgacttttgccgaacgctggccgccttcgcttggtgaagcgacggagcggcgccgccattctgccggggacaggccaacgaattgagccattcttcgctgcaaaaaaaaaaataaatttaattttagcaaaaagaattaa

SEQ ID NO: 84775 - DNA, 481 bp, Heterodera glycines
atggtcaccttcatggagacggagggtgccgtgctgaagtgagtgggggcagaaacgctggcaaatcgggcagcaaatggcacaggcgtatttattgaattgaacaccaatcaaatttgaggagttttgaaactggagtaattcgtgtttccccaccctgttgtttcataaaattttataaaaatactttgttttttacgtaaaagtttaaaattcaattttttaaaggaaagtgtaagagacaaaagaaaattaaaattttgtagatgaggttttctttcgaaatttaaaacaattttttcggcaaaggctttaattgggaaaatgcccacccaattgcattcgttaattaattgttgttacacaatttttcagtttggacaaggacagcaacagtctttggtcgcgtacccatgtcggccgacactgttaccgtatgcagccaatttgcatggaggaggagacggagtcgcccgtgtaa

SEQ ID NO: 84776 - DNA, 2028 bp, Heterodera glycines
atgttggaggacgctcagaaaaatggcaccaacatttcactcaagaaaattgaggaggagttaagggcaattcaacttgtcaaagagagcgcactttcgctggtcaacccgccaattgccaccaacgccattaacacaagaccgcggcaatggaccgacccagcgcaaagacaaagtggctccaatcaacgacaacatcacaatgcaaattcaaatggaaagcaaacacgtggtcgcccaacgcttccgtgtgcatcatgtggcaaatccgaccattggcgctccgattgctcattcaaggacgccatttgcctcaagtgcaacaaaaaagggcacatttcgacagtctgccgacaaaacaagacaaaggccccaccgaacagccaccggtcattccacacagtcaaagttgacacacattgcctacatgttggcacaactcaaggccgatggtggaaattgatcattttgataaatggaaggcaaacttccatgaatggcgacaccggcgctcaagccacaattatttctttgcaaacatggcgagagttgggagaaccgaatttgactccatccgacatcgatgccaaaaactgcaatgaccagccattagctttgcttggcaaattccaatgcaccgtccaatttgccgacaaaccaccgcaaactctgatcgcctatgtcagcggcgaagtcggacacaatttattgggactaccatggattgaagctttggagatcatcccacgccaaattttattcccgaccagcaaattggctcaggcgacaaaaatgattgaaaatttttcgacagtgaagccgccaaacaaatcgatcagtgatgtgacaacgctcacaacggcactccaaaaggattttccggaagtttttgaagatggattggggcactgctcaaaggcaaaggcgcatctcattttgcggtctgatgcaaagcctatattttgccgagcccgcccaattccacatggcgccatggaagctgtgaatgccgaattggaccgtcttcttcaaattggcgcaattaagccaatcgatttcagtcattgggccgcaccgatcttggccgtaaaaaagaaaaacggcaagacgagagtctgcatcgacttctcaactggcctcaacaatgcattggaattgaactggcacccactgccaaggccggacgacatctacgcttcactgaatggcgcgaaatttttctcaaatttggatttgcgcgatgcatatttgcaaatggaaatggatgacaaatccaagcaattgtgcgccatcaacacgcatcgtggactcttccaatgccaacgcctgccattcggagtcaaatcggcaccggcaatatttcagcatctgatggaccaaatttgtgctggcatccctggtgttttcgcgtatcttgacgatggattgatcgcaacgaaaaccctggagcaacacatcacggcactttacactctttttgggcgcataaaagagtacggtcttcgcatccaactggacaaatgcaaatttttgcagcccgaacttttgttccttgggcatattgtgtcagcaaatggcattcgtccagacccatcgcgttcagacgcaattcggaaaatgcccgcaccgatcgacaaaagcacgctccgatcattcttgggagctttgaattattatggcagatttgtcaaatgcatgcgtgagttgcgtgcaccgctcgaccgactcctccaaaaaaacgtagcttggaattggacttctgaacagcaaaatgcttttgaaaaagcaaaagaaatgatgacatccgatttattgctgacccactacgacccggcacgaccaatcgtcgtatcagcagacgcgtccaaagatggaatcggcgccacattaagccacacattcccggacaaaaaggaaaaagtggtcgaacacgccgcatgcacactgacagcagcgcagcaaaattacagccaaattgaaaaagaggcattggccattgtgttcgccgttcagaaattttaccgcatg

SEQ ID NO: 84777 - DNA, 1111 bp, Heterodera glycines
atgaatgttaccgatttgaattctacaaattttacagtttggcgttgtgttgtcgttgattgtattggcaccaaaactgtgaatgaaatgatcgaaatgacttttcgtatcacagaagactatgaaccgcagacagatgatgaagaaataatggtcaaagtgttgaagcaatgccatgaatattttcttaaagaaagatttatggtcaattttaaagagatcatggacaattttgttggagtaattgttcggattggctttacgaatgtgcacaaatttttggaaagtgaattcgagacgaagccgaatgatttctgggattcaataaagaagggcattgacgaaataaggtttttttttaaatatttatttatattcaaccaattttagtaagataaacacatcaatgcctttcatttttgttttgatgctgttcaaaattgaatgcgtttactgtatttttcactcctcattattccaggatttttcagttgttatgttttaaaatataaatttaaattttgtattcacttaatgtacctttttttaaaaaaagtacacttataagtaaaatatatgacaatatttattaaaatatatagatatatataactggcgctcaatattctccttttagttcatgttttgaatcggatgtaaagtcagaaatttgggaaccagtcaatgaaaaaagtggcaaacagaaaatgaagcaattatcatcatcctcttcatcatcatcatggtacgagaagcaaaatcagcaagaatttcttgcattagaaaagcatgacatcctgaaggaaaagccattgcgcggggaactgatgctccaagcggagcgggtcagtgctgcactactgtacacactgatacacatgaaaatgcggttgttgttcgaccgcaagcaggtcaaaaaaggaatcaacatatcgaaaaccaacatatcgaagacatccgcaaaggtcaaatcaaaaatgcggaaacagttaaagcgtctgcaaaaaacagtggtggaacgaatcaattcggtaccgtaattcgtcagtgtatgcatattttgggttggggtcagtcccaaaaaaccgattttttggggtacattttcaaa

SEQ ID NO: 84778 - DNA, 331 bp, Heterodera glycines
ttctggccgccattttgctggccaaaaagtctttttggctcttttccgccctttccgccggctccccttgcgcgccctttgtgtcctctgtcggatgcaaattccaagtttgccgttgacatccatcaaatctcacccaaaccatcaaaggaattccccgtggtggccgtttacttgcactcattggcatcatccttggcatttagtgtgcaaatgtacacaaaaagcctaaacgactctatgggttacagtgctgaaagaaacgcaccgaactcccccaaaaacattgggacgacagcaacagaaagacggcacgggcactggaaaagca

SEQ ID NO: 84779 - DNA, 199 bp, Heterodera glycines
atgtctggacaaggaaacggaggaaagggacgcggaaaaagaggggcaaaaggttaccgtaaagtgagtaaaaaataatttgcaaaaaataataactatcgaaatttaattagtttttaccaagccacttcatttaaagctatttatgagaaaattattttaaatttgacaaattttctagggcaactaatacttttaa

SEQ ID NO: 84780 - DNA, 622 bp, Heterodera glycines
atggtgatcatttggacaatttgcgtcgtctcaacaatttctgctggccaagcattgtacaaatggttgcacacgccgagaaaagatggccaacccaagcggttgcgttgcgcatatttcttcagacaaacggacttcgattgggtcaacaatttcaaggaggtgtggccataattcgacaaatcactgatttttgttttccaaattgtttagcaatttctccgtgccaatgccatttcttccgtcagttacgaaattcatttttcttttcttgtgccgtcaatgccaatggtgccgtttgaattggtgaacgaatcgacaaaggaaaagctgacattcgccaaagcaaatgaatgggacatcgattggataatgaaacgatgcaaaattgacgagacctcgtcggttcagcagcagaagaaagatgaaaattgggacaatgtgttcatttggctttttgctggcactaattgcattgggtgagcaataaaaaaaaggcatttaatttttatccgaatttgaattttgcgcttaatttaggccattatctcctccaccaccagcagaagaagatgaagcgggacaaagcatcacaaaagggacgtcttctgctgacaaatga

SEQ ID NO: 84781 - DNA, 1194 bp, Heterodera glycines
atgcccatttttctcctcctcctcctcattccattctctcattattttcaatctatttcccggtgattttgctgctgcaaatgtcttcaggaattatgtacgtttattatttctttttgaaacatttcgcatttcttttgcttgacttttgaccagaattgggagatgaaaaattcaaaatcaatttcgaaagattagcttgcatcggacactaaaattcacaatttatttcttcgtctttagcctttgatcctttcattggattttcattccccttcacagttggtctaccgtgtttcttctgttggtcggctttgccaccattctttggttcttttttggccatgtcaaaaaacgacgaagtcctcacaaagaaatgtaaataattaatcaaaaaatttgaaatttcataaaaattcaattttcagctttatctgcgccgattgttggcttttggtgttcgattttcttgcgccttctcagcttggccttggaattgcattgattagccgtcgctttgacgtttacgtggatgaacacttcaaaacacgcaaatggaaattgggcaaaatgcgaatttgccacaaaattggagagaatggcacgaagaaaatgcaaattgtcaattccgatggaaatccattgccaatcctgcaaaatccgttgtcgaacaaagtcatcggattcagatacattcagatcaagtaaaaaactgattaatttgtaatttttcgtctaaattttctgcttttcagctacatcgatcaaaatgtcatcgcatttcttcgccgttttcaccattttttcgccatttgttcaacggatttgtacattaccactggcaatgaccgcattttggaatttattttgctcaacatttggccaatgcttcgccattctatgcatctgatgatgtttttgaataccatcgcttttcgccgtttgcgccaattggccccgtcacttctcaacgattgtccatcccttcactatgtttctttcggtgacgtcattctccccgaatttccgcccgatgaaagtgccaatgcgtcggatggacaagcggtgaccaaatggttgttcacgcctcgtccggatggtctgcccaagtggctcagatactctgtgaattcaccggtgaatcaatggtcgtcaacgatggaacagtttaaagcggtgattatcccgatttaa

SEQ ID NO: 84782 - DNA, 1001 bp, Heterodera glycines
atgctttacatcgacaaaagtatgcctgtcctcattggagtcaaggcaatgcgtcaactgaacgcacttttcggacatttcacaacatcttggccaaatacatttcgaagactcagcccgacttcgatgaatttttggatgctgctaatttttgctacaacacgtcagtgcatgcttcaacaggtgagactccattttttcttatgtttgggcgtgacccaattttttgtgttgaccaaataattgacccaaaggttcgtgatccgatagcaatttcggatcgaaatgaatttaaacagaagttagtcgttgccataagacacgcgtggcacgccgcagctgatgaatatgcaaaagctcagcgaaaaatgaaggaacaatatgacagaaaggcaaggccacagcaaatcacaattggtgatcgagtgctgatcagaaactacgacggacgggtaggcacatccaaaaaattccaattaccgtggcgaggaatttttcgggtcatcaaaattgagggcatttatgttactgtgatcagttgcacttcgccaaattcgaacccaaaaagacttcacttaaatcaaatcaaaaagtgcttcgaaattttgggccctccctgcactatgccaacccaaccgattgaagaggaaaagtgccttgaaaataccgaaaatgccgataaagcaatttcgaaagggtctgaaattcaaaatgaaatggaccccgaatcccgggaaggcgaaaatttggagcaaatccacccccgagggccggaaacaagaccagaacttgaagcagatgaggagaaaaatgagcataaaaaaacagatacggaaccaaggaaatatgaccttaggaagaggacgagaacttggaaagatcttgtaaattattagcacagtaatcagcaacgtcaaaatttattttaacaaaatcaatgaaattattcgagatcgatctcgtctaaaacgaagtcagttcggaaaggtccgaaactagga

SEQ ID NO: 84783 - DNA, 397 bp, Heterodera glycines
gaacaaacggaattcgtataacacgacagaggagcagtgctcgcattaattggctgaccgaactcaccacgcgcgattcaactccagttacaaccacccaaacttcaaagggttttgtgtattattcatcaaaatttgagctttaattttttagatttttctgaaatcagcaaacatttagcgctcgttgaggacgaagacaatattaaaaggattcaagcaaaacgagaaaaaggtttttgaaatttccattttaatataaaagacgcctttattgatttcagaagcccacgaacgcgcgttggcttttgtcaagaatcagttattgaactcgcggaaagacgactggctccatcaaccaatcgaagaattgcttggctacgcaccgaaatactaa

SEQ ID NO: 84784 - DNA, 683 bp, Heterodera glycines
ggccaaaggaggccaaatttctcagctttttggagcagttcacactgtgcacaatgttccgcatttttgtccgttttgtcggcacttatcccattgcatttctgatcttctcattgatccttgcttcgctgtcaggttgtgcgaatttgcagtaaaatgtgggacgaaatttagaaaaaaagaggaaattacaatttccttagattcaatttcacccattaaaaaattgaaaactttgagaaaattacattcaatttctaaaaaaaacatttcaaatttcctcgaatattatacgaacaaattttcaatttttaaaggaagtttttttaaaaatccgatcaaattaattaaaaaattattttttataaaaagttctagagttcaacattctaaaagcctggacctgggttccatgtttgagctggacctggatttcctgacaaaaatccatttccaggaaaagccaaggttgccggaatagccagggactggacctggacccaggaaaacccagacctggatccaggtccgggtcgaactctacgaaattcgcattttcgaaccccccatttcctcccctttccagttggaattgagggaccgagttcgggacgggtacacgccgaccacgtccatgtcacgctacaaaacggacgtactcagcgaatttcttggctcatccg

SEQ ID NO: 84785 - DNA, 130 bp, Heterodera glycines
aagacggccaaatttctcagctttttggagcagttcacactgtgcacaatgttccgcatttttgtccgttttgtcggcacttatcccattgcatttctgatcttctcattgatccttgcttcgctgtcag

SEQ ID NO: 84786 - DNA, 504 bp, Heterodera glycines
atgcaattaatgatgacccaagcggcggtgctgttgatcatcccttgtacagcggaattgattccgtttattcaacagccggtggattgtcggtgttggcacttgtcgttttggttggcacgctattcggctttttggtaacaaatttaaaaaatatatttatttttttcttaaaaacgaataattaaaataataattttttttataggttggctggcgaatttcgagatggcgaatgctcagcgagctggcacgtcatacatcatcaggcatgtgtaaaataatattcaggggtcaagctaatagtcccaaaaaatacttcagatggagaaagcaccttttgtttttattttctgttacttaaaaaaatttcgacaaaaattataataacttttttttcaaaagcaaactaaacttatattttttggtattttgatagacctatttttttttattagacagaaaaatttaaaaaatttggcaaccttattaaggcctgaaaaa

SEQ ID NO: 84787 - DNA, 857 bp, Heterodera glycines
ttttagtgccagctttacagccgatgtgctaatgagccaaatttggcacgaccgtcgcttgcgctattcacacatgagcaattgtcatcaaaatttaactttaagttcagcaattgttgaccgtttatggcaaccattcgtttgttttgtggtaatttattttttattttttttgtttattaagtgccaaatagttagtgaagtcgtattttttgtatgaaaagtataatgaactgaaaaaactcgtaaaaatggttaatggcaactcgtacaaaggcgactcatacaaaaggcaaactcgtaaattgtacaaaataggcttaagcataagcctaaaactttggcctagcctaagccattgtacgagtgccataaaacctagaaactatatatccgttaaaaatttggaaaaaacaagccaaatgaaaaaaaatgaatgggtaaaatgtaacgaatttctttagattgattaattgattttatataaattagttgattaaaaattttccttaaatactttgtaaatttcaaaaattatttataatttattaaataaaaattttcaaaatttttaatttcttcttattttttgaaaataaaatgtttttatttgcataaaaaaattagccgcctagttaaagaatttaaatatttccataaataaaaaattaaaattgtttaaaaatagaacagcaaaaaatcggagctgcacatttcaccttcggcaaatacttttgtgttgatttatcccaatggcactgtgtggatgaattttcgactgcgagttgaaggcaaattaattatttttttaatttatgaaattaaaaattaatttaaatttgaattttaattttgca

SEQ ID NO: 84788 - DNA, 430 bp, Heterodera glycines
atgactgtcgtcgtattttttttatttctgctcgcaccgatatgcgaaattgctttagctgataacaaaggaaatgctcttcatctgaataatcatccgaaggatgtcaaaactaacactaaaaaggcacctcctaaaaattccattaaaaccaatggaatttctcaaaaagcaccgcttcatgaaaatgccaacgttttaactggaaggaatgagaagcatcataaagacaagaaacttccggtgcataaaaatggaaatgctttaccaaaaaacaatgattcttcggagttcgaagatgacttactgagtcaggcactaactcatcttcgtaaaatgaatggtaattattttttttaaattataattttgtttctccctcattttagaacaactaaagaatagaaactggccacaaaattcggagtaa

SEQ ID NO: 84789 - DNA, 447 bp, Heterodera glycines
atgcaattttccgttacattggcaatatttggcattttctcttcactgtcattcttggcaaactgtcgccatttgccaaatcaaaatttaaatttgccgctgccgtggaagtcacttttgttgccccaatttatgatccgaaaaattgagcgtgaacaaatggcaacgattcttgacgcggaacagcagataaaacatgcgaacattattgacaaagggcaaagtgccgaaattgaaaaagtgccgtccagcgccaaagacattttgaggtaaagaatttgaatttttttaaatgcattaaatcgtgcaaaaaaacacatcgccaaactccggttttgtattcatacaagggcgtagccagacgtagccagacccttggctttggggggggggggggctgaagtcaaaaaattgatttttaggggtgtatttttcatttttagttga

SEQ ID NO: 84790 - DNA, 1266 bp, Heterodera glycines
atggcgttaaatccgacaattgaccagctcgtgaaaatgctggcggatcaacagaaaatggtgcaggaccaatcacagcaaattgctcaactgattgcgatcggacaaaacgcaccaaatgcggcggcacagcccaatcaaggagcaaattcagtaccaatattgccggacatttcaccattcgagccaacggacgacaagagccgaatttcggaatggattgagcgattcaaattcgcgttggattgcacagcaccaacggcggacgacgaagtcaaggttaaatgcctgatgaataagctgagcgaatcggcattcagtgaatacagcagatcagttctgccgtcgtcggtcacagatttcagttttaaagtgacgaccgaaaagcttgagaagctatttgccaaggctcagtccatattcatcgaccgctacgagtgtttaaaagcggtgagaggagaaggcgaacaattcaggcagttcataaatcggcacagaaaattgctgaccgattttaaattcgatgagctgacaaaagagcaatttaattgcctcatgttattgatggcactcaaagcgcccaacgaagctgcattgcgacagcgaattctgacaaaattgtcagcagatggcgccaacatcagctatgatggagtggtggaagacttaatcagcttccaatccacaatttcagaagcaaaggcaatcgaagcgacaagttcttcgaggccagtgaattcgattcgacaaaattcaaagccgaacaattcaacgaacaaatacgtcaaggaaagtccaaagccaaataatttgccgaacaaattcaaagaaaggaccaacactgaggcaactacaatatgttggcgatgtggcttcggcgtgcatcgacctgacgaatgccgttacaaaacgagcaaatgccgcaagtgtgagtttgtcggccatttggacaaacaatgcgagcgtgtccaagagtggcgcaaacgccaaaatgccaaaaagaaaggcaacaaccgcgttggccaccttcgtattggaatgaccacgcatgccgtaaattccatttcgctgctaaaaacagcggttctgttcaacatgaagccagtcgaattccatctcgacacggggtcggacattgttgtcattgatcaattgacgcacgaatatgttggacgacaccgatcgaaaaatgcaacgaaattggcaaggctttcgacggcacaaaaatttcctttattggaaaaggattcggtacattcaaatttg

SEQ ID NO: 84791 - DNA, 60 bp, Heterodera glycines
atgctgttgttgctgctgttgaatttgttgctgctgttgaatttgttgctgctgctgttg

SEQ ID NO: 84792 - DNA, 1403 bp, Heterodera glycines
atgctgttggaaatgtcaatgcgcatgggatcgaaggtagaaaaaattcagtgggaaaatttcggcccacttttacgcgaaaattttttgcaattttttgaaaatttcaaattttcggaaccattttggaatcaaaatttaaaaaaaggcggtaataaaaataattgcgttaagcatgtcagcacggaggtgaacgaagtggcgacacgacgagcaaatcggcaacagcagcgaattctttttcaggtaaaaacaaaattgaacggcacttttaattatttattttttgacacgtaatttgttttgaaaaaatcttttttcaaattttttcacctttttaattactcaaaacagcgaaagtttgccatttttgaacaaattttcacatccaaaattttatttttacctcaaaatctttgacttttcctatgaatattttgaaaattatcaaaaggaatttctgggtcatttggatgctttaaattttaatgttttaaaatgtgtttaaatttttgaaacgaaaacttatttagaaacgatactgtatttttaaaaaagatacaatcaattttaaattatgccaatttttttcattttttcgaaataaatttatttgtttagatttctgttgtggccatcatcttctacctgtacatgtctggtaaaatattaaaaaaacattttttctaatttttaaatttttccctcacccattttatttagcctattatttgctttaccatgtgttcaatgtgtccaataaatggctggtgttgttcaactcgttcttttattccaccacacacatgatcaatcccgtaaaatggagaataatttcacatttaaatgaaaaaaacgatttatttttggcatttttatgccaattttaaacaaattttggcacatttttttttgattttcttactaaattttgggtgatttgaaaatttttgacattttcatcaggtcaaaaaaataatatgagaattttttaaatcaaatttttcaaaatttaatttattttttcaaattttttcgttctacaggtgatctacttttcgttgaacaaggacatgcgagcgcagctgatccgtgccattgccgactgtttgaattgggcttgttgtgtcggtgacgcggccggcctcagtcggttcggcggcattcactcgtccatctacggccgggccagccggcggacacagcccggcgctgagtcgtcttccggcggcagtgtgctgctgcacaagtcctcgtacggcgccggttgcatgacagaggcgaacaggtggagaatgaatgcatggcaggcacggcatggcaggcacggcatggcatacaaaattggtgcaggatggcttagtgccagccggcggttcggttctggcactttttgtgattaa

SEQ ID NO: 84793 - DNA, 420 bp, Heterodera glycines
atgcggatttcaactggtgcatcggttccatcgacaccaaacccaacaacgagtgaccaaaacagtccgggtccgaccgaaaagagggtcggcggagttggcactgttttgggaatgtcgaaacgaatttcgctaccggaaaatttggaattccaaccgcaaatgctgctcaatttgaagcaatcaattcatgtggaaaaacagttgacgaggtggagaaaacgaacctgaaatggagaaacaactgatcaaaataattttagcaactctgacacgagtgattccgcctcagaaatgagtgtatttgagaagccagttttgaaggcatcacgactgcaacattatcaacaccagcaacaacagaagaggaaagcggcacgtttgcaattgctgcgccaacaggcaaaatcattaaattaa

SEQ ID NO: 84794 - DNA, 727 bp, Heterodera glycines
atggagtttaaaatagttttattatttttattaatgctcaaaaatttaaatacaatttatgctggtggaataaaagaagaaaaaaactttgacgaaatatttggccaaagatgggacgaaaaagaggaggaaaatggagaaattgaaactgatcaaaatggaataaatggacaaacaaatgatcaaaatggaccaacaaatattgaaaattttgtgcaaagattatttgtagaagaatctaatcaaatttttgatgaaaatttggaaatgaaagatgagaaaagtgaagaaatgtccacaaattgtgatcaattggaacaaatgacagaaaatagtggacaaatttatgatcaaattccaattttaaatgataaacaaaagagagaaattgttgaaaaattccataaaataaaagagaaaattaagcaaatgggaaagaaattcacaagaaaagaatggcataaaattgaaagaaaaattgcaaaaaaattaggtgcaaatcaaatgaaaatttacaaatggaagagagaatttggacttataattaaagacagttactcggatgatgaaaaacttaaaatattgaatcaatttgatcaaatatatggcaaattaaaaatgaaattaaatggaaaattgcataaaaaagtacaaaatgccaaaaaataatagcaacacatttgggcataaatatcagaagcatttatcaatggaagaaagaattaaa

SEQ ID NO: 84795 - DNA, 1161 bp, Heterodera glycines
atggaactgaggtgggagaatgccaacgactcgctggtggacgcctaccaaaaattgttcgtttttattcccatttttacaccaaaaaaaaaaaaacgaaggacaattttatctgtaaaaattgtcacggcaaaaaaaaaattaattgtttttttttcttaatttacctcaatttttcgtgtcctccttttgtttttgaaatacaaacaatcgcaaataaaaacacttatttttcattcatttcgctatttacctaattggcttttaatgcctttgttttgtcagatgcaatttgctgtcacaaatctcccatttggcctcgtcctacaaaaatatggccgactctttgaagtgaaatttattttgcttttaatgaattttgctttattttatttttacaatttttaaagcaatggcgaaacattgtactccctttcatcggccgcttcagtccgactcaaactcaaagagctccaagagcaaatcattcgactgaggttcagagaattgggaaaaacacaaccaatttattattttgtataatcaaaaagaaaaaatccaaaaagatcaccaaaaaatatataaaaataagaattccgcccttaaaaatgtgtagttttgtgcgattttttaagtaattccatcgaagtttggtcttcctctccaagtcaacagaacaacaacggttcacccgctgaaactgttggagaagcaccatcacttcggcaaatgcaacttcaaaaaaacatcaaaatgcttgccctacacacactccatgtaaggggacagtcagcgatttttttgtaaaattttttttgtaatcgtcataaaattttgggaaaaaaattgggcgccgggaacgtagtgtatcaaagttaagtgaccaataaatgccaaattattgggattgtgatgccatttgtggctttttaatgcatttttgttagaaatttttaaattttaattccaaattttttccttcaggatgtggtcagtgttggccccgatttgcccagtgttgagcaatatgagcagaaaaagttggacaaccagcagagggcgatggtggcgatgagacggcacagcggcgctgtcatggcaccaacaaacaatcaacagcaacaacatggcacacctacagcagaccatgacgatttgttg

SEQ ID NO: 84796 - DNA, 1604 bp, Heterodera glycines
atggcgttggtggcctttgcttccgaaatgcgcatttccctcactttatgggccacttttgcgtttatgatcgccaatgtcctcgagcatttgatcagagcacgagcagaccaattccgattcggatcagatgcatcgacggggcgtgctgtggtgagacagtgagagaaccgacgggaagagaagcgagaggaaagggacgatcggacggaagagaagcgatcggtgggagaagcagcgcactgatcccgaatagactcagcgaaggtcagcccaattaagccaagttgtgggcaacgattaactggcactgatccgtcgtcccttagcattttgctacgaaggcactcgcactgatcgccagtgttttttgggtgtcgactgtcgccacgacgaaagttgcgttaaccaattgtgctgtccgcggggcttcgacgaaatgaattgtccgtcccattttttttctttcctcccctcctccttttgtcatgacttcccacaagaatatcatcagattcgtgcggaggattggccagcaacggaagctgcgggccgaatggccaatgcgtcgtggccggcagacgcctcgaatgcgtttcctcgggggtgtgttgcgaatgcccggcggggcaacctcagccgggggtcagcgaatgttcgtccgatcaggtgggcccgggggatggaattggccaaatggcgcaagaattgttaagcaatgccgtgaggggttctcttgccatggcaccggattttgttgtccccaatgccccgggggacaattgccctttggcagttgcaacaaaggccgttgcgccaaagacttcgtttggtacgcccttttcagcccatctgattttttttttgttttaaattttccattcagtcggccagggaatatttgttgtgaggaccaattcggagaattggcaattgggacaaaagaaaattggagggaacgccaaagaacggacggagggagagattattaaagacatttaattcaaatgatattaaaattataaaatttcaattgacagagaatggttgtaaatttccaattaataaacggcgcaataattaattctttaattgaataaattctttaattaattaaatgtctctgtttctttcgctcctttctctctctttttcactcactcttcctccccattttcattccctctttcttccgtcatccgtaccaacaatagatggaactttccacccattcctcgcgctttttgcgccgttctgtcccaattggcccttcgtcaattcgatttgccgttcccatcgccgcattatttggcactagcggaagtaaaaaagcggacgaaaattggagaaaagcggccaatacaaagggaattgtcaacagaaaaaaaagtttcattttcagaatgatcgaataagtcaaagttcacttcaaaaagttgacaataaaaagttaggacaatttgatggaaaaaaaggccaacgcgacggacagatgaacaaacagagggaaaaagacagaaaatgaagagagagagagagagagagagagagagagataggcgaaaaccaaagttggcacataatgggaaaagccgaaaattaaa

SEQ ID NO: 84797 - DNA, 758 bp, Heterodera glycines
accaacttggtgccctacccgcgcattcacttccctttggccacttatgcgccgatcattgccactgatcgagctttccacgaaaaatcgagcgtggccgagatcaccaatcagtgctttgagccgggcaatcaaatggtgaagtgcgacccgcgcaacggaaaattcatggcctgttgtttgctgttccgtggcgatgtggtgccgaaagtgtgccaattttgaaaaataaaaattcttttggtcaatttttgaggatgtaaattcggcaattgcagcgatcaaagcgaagcgaaccatcgaattcgtcgattggtgccctacaggtgtctctttcgccttaatcatgttggcacaaaaatctttcaggcttcaaagtcggcattaattaccaaccaccgaccgttgtccccggcggggatttggccaaaatgcaaagagtaattggcgaaatcggactttttatgtggggtcactcggccatttaggccgtttgtatgttggccaatacgacggccattgccgaggcgtgggcacggttggaccacaaattcgatttaatgtatgcaaagagagcatttgtgcattggttagtattgttttggatatttaaattatgcggctaattgttaaggtatgtcggcgagggaatggaggagggcgaatttacggaggcacgggaagaccttgcggcattggagaaagattatgaggaggtcggggtggacacttacgtggaagacgaagaggagtactga

SEQ ID NO: 84798 - DNA, 562 bp, Heterodera glycines
atggttccgccactaataataaggtaaattttggttaaatttttgatgaaaattttatttaagaaaatacgggatttatttgaaccaaattgtgacggtgtatttaatgtgtcggaaatcgctttcattagtccgatcgaacttttccaaaggtcaccataaatatcgaaatttattcaggtgagtttggcagataaattataattgtttaaaaatatttagagactaatttctccgtcgaatgtttttttgaagcaaatttggaatttcggcattcattgaattcgttgaaaatctttcaattgggcacattttgtaaaaaaaaattatttgattaaaaagtctaatttatttttagcgattggcaggaaaattttaagggcgacgaagcgaattcggatggaattcgaatgttggcatttttttgcgcccggtttgtatcggctttccctgccggtgagtaacccaaaagaaatgccgccggctgattatttttaataattaacattcatttcatttagtccgccctttattacttcgtcttccgaatggattcaataaa

SEQ ID NO: 84799 - DNA, 219 bp, Heterodera glycines
atgatttggaatggacaacaaatgaggacaaatgaacaacaattggggaaaaatgaacaacaattggagacaaatggacaacaactggggacaaatggacaacaattgaggaaaaatggacaacaattgaggacaaatggacaacaattgggggacaaatggactcgcgtggatccccccccccccctcccccgcgggcacatttttggcaatgagtga

SEQ ID NO: 84800 - DNA, 1518 bp, Heterodera glycines
ctgtgttaacaattttgtgctcggcgtcaccaatccgtttttcttgaaggcttttgcgcattggccccacattcttaaaattggccaacattgcaacaacaaaaacaacccgcagcagcgtcacaatgacagcgcctcaagggcgggaccaccggaaacaacaccaaaagaaacaattgcagcaaaaggcaacggaagagaggcggcggcgtcgttcttcaacggacgctgggaagttggacgcgtactcagaaacgcaaaaacaataaagtgttcgaaaattgaccatcacaagtcagcctccaaacaaaaatgccttttttagacgactctctggccatgcacagcttgacaaccaggccatgggcggttttttgtccacgcatcgtcagttcctctcggatgacaagttgctggcgcaaaagttgctcaaacgggtgccaaaaaaaatcagcattttaattaaagtgtgccaagttttagtccggcgactcggctttaaaaaggcacacattggaacggcatttcatggagctcactcagagcttcatcaatccgcttgaacggtgtggtgtaaaaacactttttgacttttttctgcacaatttcaaatatattacccaattaggtacatcgcttcattgctgcctctgcgacgtcatttatgcccctttcaacctgtgccatcaatgcgcccattttcattggatcaattcctgactaaattacaacattttgggcatccgggtgtcagaggcgattggcagggtgaattttctgaaaatttttttaaccatttcattaaaaattcccaaaaatgtttaccaggacggaaatttagaaaattgaaatttttggatttttctaactataaagttttttagtagaaaagttcacataaaatcttaattttttaaaaacttttgattaaaatggataatctgttaaataaataagaccaaaatttcaaaataaattgcgtttacaattaactcacagactcagaaaatgaattccaaaaaaaaaaaaattttaattattaattaattacattaaggcctctaccggcaatttgtgactcggtcgcccaactttatcggctggttgcaacaacgacgaaaacatattgaaaagcaactgaaggaggagtacctggaattattgtgcagtgcaaatttgtccactgaggttttatgtcatagaaaccaggtcaggaagacaccagagacatacactaaatttttttttgcaccctttttcatttttattatttctgtaattttaggttgaaattgtggacctggtattaaaattccgggatcatttggccgaattggagatgaagcatcggggcagtgaacagcgcgaaaactggagcttctcctcaactccgatgaaagtgattaaaattggaaaaataaattaataaattttcaaaaataaaattgttttgaagcagcaacgtgttctgatcaggcaacgagcgcagcttcaacaacagctgaactgcttgttggg

SEQ ID NO: 84801 - DNA, 875 bp, Heterodera glycines
atgggccatcagcgcgagcgaagggcggcgaaggacaacggcgacgcattgcgactgctctcattggacggaggcggcatcagaggattggtgctcattcaggtggtgcacagacgttcggaactgatcgggaaggacacggacgaaaccaacggctggagacgatttaaggacgcggggggggggggggggaagagtccctcaaggacgaaaccagcgggaatcagtttttcgaggccctcacaaatcaggatgtttcaggatttagcatcgtttttgggggttttgaatgggggcgcgcgtttgggaattcacctccatcagtccgttttcgattttcttgccgggtcagtccctttccctgcaaatctccattcggaccaatcaatgccttcttgttgatcacattggcatttatggtttgtaaatattattaattttatatacttttttcagattttgcttgaaattgagcgtttggtggacggcggcgacacacaaaagaaagggcagagaaaaaaggacaattttgttcagcgccatttcgattgggtcgccgggacaagcacaggggcggtaagttaaaaagaaatttaatttaaaatcatttgtccattatcgaattctcatccgattataatagtcttggataatagattaagctgaatttctcagattttggcacttgccctcgcggatggcacttctttgatcgactgtcttcggctttatttgcgtctcaaagacgacgtcttcggcccggaggcgaaagcaagccgttttggcggatacaagccggaatgccttgagaagtttttgcaagatcactttggcaagcagcgaaaaatgtccgacattcgatgtggaaaaatgaa

SEQ ID NO: 84802 - DNA, 385 bp, Heterodera glycines
atgttccattcgctgatggtcgagctgggatacagcttgtttgtaaaccaaaatttgactgcggatgtgagtaattcaaataatgaatttttatttatttaaattaaaaaaattaagggaatgatcaaagtggttcaacgatttgccgagtacagtaaacaccatgccgcagcagacaggtgacaaaaattctatgctataaataaatgggaagctcattaaattaggaataaaaagctaacaaattgtcaaataaattagttaaattttatcatatttttaatttaccggtactgaaattaaatgttgaataattttcagttgcgtagtgctgattgcgtcgcatgatctgtatgaccatgtctatggtaaggacatggcgctg

SEQ ID NO: 84803 - DNA, 894 bp, Heterodera glycines
atgattctcacctcttcatatcgtttccacaagatatttaggtcaaaattaaagcttgaataaggaaacaaaaaaggctttgctttcccagttctttcatatatgaaatcactagcattcaaaattttaagaaaattttattattttaattttttaatacatttttctagctcaaacaactattaataaaagtttaaaatgagccagtgttccaaccactcttcaaaagcagactgaaaaaggaacactgaagctgcatgtgaacgagttcatgtatgttttggttttagtaaattttttataatttttgcagtaaaaaaaattattttatgaagaatcagattcttcttcttctcccgctgatgaagcgtcgtcaagtgatgaggatgaaagcactgactccgagatgcaaaaggacgagtgtgtcatcctctccggcctcgtcagaaagctgaaagtgcatgtttggagcgctcttcgaattgagaggcgcccaaatcttggcagcaatttgttaggtttgaacatttaaaattttggatttgggatatcattggagaaaatttgcttccgcggttaattgccaatatgtttcagtaacatattgttaatttgtagggctataaatcgtatggtttacgtttttatgagcatatgctacttaattcgccaatagatcacaaaatgccatgaaggagtttatacaacagagggcaattaaaaattagcatttttaaagcaaaaccatttcttacgtgaacataaaatatggactaaaaagctgaaaaaggacaaatatggattaaaatatagactaaaaactaccagaatataagtttaaaacctccaaaaattctaaaatattaatatttattcaatatttgcttaaataaa

SEQ ID NO: 84804 - DNA, 1035 bp, Heterodera glycines
atggaatgctgcaacttgggccctgaggtgttggacgaaatctgtagcatgatggacttgcgcacttcggacgtcccttcgtgccttcggtcgagcgcacaatgggcgcagtttgcgtcggacggcgaatggtcgcgacagaaaggcaccgccggcggatgtcgcaactttcgtatggcatttgaatttggcatttcgtttcattttctctcttttcagccacttttgcgaataatcctcagtttgggacgaccatttcgttcagcatttcaccaaacaatggaacggaggatgacggaaaatgcacggtgatttgcgcagtgctgcagaaataccggagagaattgcgcgcggtcggattggacgaattggccattggattcgccatttatgcgacggacgaagggacggaggagggacagaagcaccagcagcagcaaaagcacacagcacaagttagccacgttcagcgacagaacgcagaagcaccggcgagtggaaggagcttgtcagtgggttggcccatcgtggcaatttggacattcattttgggaattaatttatcttagaggatttggacatttggtttattggtcattagatgatttggtgccattgggtgatttggactcatttggccaattaattaattgccttaggggatttgggccgggctatggacagccaaattcgtacggtagcgcatatgtgcaacagcaacaacatcatgttcagcaacagcttcaacccctcgtcccaaattattatcaaagtctcccgcaaatgcaatgccaaaaaggaaagtgagagacagataaagtgataataatgtgatcataacaaactgattttaattggttaagtttaagcattttgtacggccaaacgtatgaaacgcatttgcccaaacagcaaaattgccaatatcagacaaacccaaaacgaattggccaacagtttttggaaggggccaaatcagtggccaaaagtgcgtcattcatcaatttgagagaggtgatcagaaaaaaggagtga

SEQ ID NO: 84805 - DNA, 852 bp, Heterodera glycines
atggcgggggacaatcagaaactgacggagcaaacgctgcagcaaagggacgaggacggaggcggaaaggagacgggcagaggcggattcggacaaacctaccaaaggtacgaccgatcagtgcccaacagagcggacagtacatcccaggctaacaaacatccgaaaccgattgaactccacgctccaatctgtgcccaatgtgagtccgcgaaaagtgccaccggtggagaaggaaaagctgattttgttgagcgaatgtcgactgttcgttggcatgtacgtttttttgttcttttccccggccttactcattattaaccgtttcgttaagctgtaaagagatggtccgttgtccttccgcctcggtttgttcagcttcatcctccgtctcttctgctgatgattcttccatttcgtcaaattcgcttcgaattactcaaaatgcggtggaaagtgtcgatcggctgacccaaagcgtggaaatactcatccgcaagagcagctccatattccaagcccaacagctgactaccaatgccgaccaggtcagaagaagagtgccctcggcggatggccaaacaatcgcaaattttagcttttaaaaacactgacggacactttgaaagaagttgaaaagtgccagaaaggtggccaatcgcgcggctttgatcagacgagggaagtgattagatgcagcacatctttggccgtcacgcttgtccaatttacgcagttaattcacggcctctgagtcggcatttcggttgaatggaattggccataagcaccggttctttggaattttactttgttccctcactgatttcacaatttccaattctatcgaaa

SEQ ID NO: 84806 - DNA, 1336 bp, Heterodera glycines
atgaaaagacaagaaagaaatcaatttatttttataaattattttacatgcctaaatcaaaaaataaacaaacaattaaatggtaaaagtcatttaattaatggacagtcaaatgtttgtcgtttggaacgccatatttcgatttgtgctcttcgaatagctcattcaatgcattgcaatagcgaagatggagttggtcgacctgagcaggggttgggctgccaatgcgtttcacttcaatcggggcaccttaatcaaaggatttgtgtaaacattgtctcttcattcaccgataactgtcgtgatcgaacgacggcgtggcaacagaccaaagcgatcggagattccgcaacatccgttgatgatcggaatgcaaaaaccacacttcctcttgatggtggactaaatgaagaagtgcaaagtcagaaacagaaagagaatgcgttgcctgaactgtcctcagaagggaccctcgggggtttggtaattggtcaaacaaatcattttcaccaaaactgtacgaaggcacaagaggggtgctaaatcagaaaatattacttataaaattgcacattttgtgcatatttttgcgccttttccacttgccccgttttcaacgcgaatcggcagaatccgcgtcgtcccattatgttcaggtggtgttttcccgggtgtgcgtccagcacttcctcagcaccgccgatgacaatgccaatgagacggcctcggccggggttattcagcaagaatttgagactgtgcgaagaactttcgaccccaccttaaattgggtaaactttggacaatttgattgtccttttgccgcgtttgtctccgtaaacatgcccaatccgatgccaatttcgcgacgaaatggaaaccaaaattggccattcaatgtcagaatgttcgatttcaatccgggaaaaagctgcccaaaccccgtcgcagaagtgcaaagatgaacgaacgaagcggtactgaacactccgtgaggatggcatctgaaacaaacaatgccagtacaaatacacaatttaaaataagatataaattaaaattatttaatgaatataaattaaacagtgccctaaaatgtaattgttgttcggtggaaggtcagcagttttgatcaatttgattggaaaataatcagcaaaatgcttccatacaaaggaatttttgtaccataactaaaattatttgaaactttaaaaaaaaattaaattcaaaaagcacccaatttcttgatcctcttcttggcgtgtcaaagtcgtaaagaaaccaaatgaaatacaaacagacaatccaccaaaatttagtgtagaaaaataaa

SEQ ID NO: 84807 - DNA, 128 bp, Heterodera glycines
accgaggcgacgattcgtcggaagaaaagcacagaggcagcaaataccaacagccgcaacaaaatgcacagtcagtggccgtggcaattgccgtggccggcggcgcgacgggaaacgccgcggggtaa

SEQ ID NO: 84808 - DNA, 290 bp, Heterodera glycines
gcggtggagaaagcggtcgagcggggcggcgtttaccccgaggcaagaggagggagcaaatttgagtgtgggaagctaacaatgaagaagggcggtcaattatgaattaaatagtctttattggtcaacgtcccttcgttgtgcaggttttgtttcgagttgcccaccattggtacgacgacctgtacttggcccatttggagaacacccagcagcagcaggcgacaacgtcggcgcttccgcccccggcccatccccatccgacacaacgcattgccccgcagcagtgc

SEQ ID NO: 84809 - DNA, 670 bp, Heterodera glycines
atgtccgtaaaagacggagagattggcgcatttgcatcgacacaaatggacgacccatcgaattgggacgggaaagagtggggaggacgacggaatttgggggaatcgccgaagaagaaagggcggagacctaaaaaggaaggagaaggaatgtatacaaaaggacaaaagggcgacaaaaagggacaaaaggatgacaaaaagggacaaaagggcgacagaaaaggacaaacgggccaaaatatacaaaaggacaaagggtgacaaaaaaagacaaaagggcgacagaataggcaaaagacgagatggaagcccctgctactgattgtgaactgctttggctatcccaagaagtgattgattgtccctcacccttttgctgctctcttcccccaaatttgtcctcctccactttttctcgtgccgatgactgaggttcaaagtaaacgcatctgtccaccgacagagctttggacgtgtctccgttgaccaattcggcaattggcactgtgctggtcgaactgctgcccggaggggacgacagcgaattgcccttttgtgggtgaaaggaatggcgcggagggagggacggcgcggaggagggcattgaagagctaaaggaatggcaaatgaaacgaatttgggaggaaaaaaagaggggacaaataaa

SEQ ID NO: 84810 - DNA, 1301 bp, Heterodera glycines
atggatttggtcactttccgacgcgccctcaaagtgcggccaaagggaaaggcggcacatggaaaagcattgttttcttttttgaaggaatcggaacggatggaaaaggaaaggcaaatgttggcgggcgagcgcggagtgtgcgccgcgtgctgcgacttttgctgcggcggctccgccgtcctcctttggctcgtactcactttggtcgcgctcggattcctaagcttccttctcatcgccatttactttctttgaaattgaaataccaaatgcaatttaatcgccagcagaagaaatgcagtaaatacttcacttcaattttcatttccgattggacaatcaaacgcaaattgaactttttttccaataagaattataattactattttcgtttgttgaattatattcgaattttaatcaattttaaaatgacaaatccactcgttttcaaaatatctatattttgtttccgataaacatatgtaacatatatattagtataataaatagtctctgatcatgaagacccttcccccaatccatcatcaaaaccgaccattagttaaaatattccataaaacatttatagcgcaaaaacatgttaaaattttacaaaaaaaaacaaccacaaacataaatgaaaaaattttaaaatgttagacaaagcaaaaatcgtaacaaattttgatttaaaaatgttagtacaaagtaaaaaaattgttaaaaatatgatgagacgaagaatgggtttgtttaatagcctatttcacaaattgtttattccattctgtcgttgtcggcatgaatgtgtccttgtccctgtcctcctccgtcctccccgtccattctttcgtccatttcctccaaatttgcctccccaattgacaacgttacattatcaccccggcctgtcgcaaactcgaaaaattattccaaaatttcagccgttgcgccacctgtcgccggcgttgtccccccaaagctgaactccgccatggttccgtgcccctcttgccgctgaacagtccgctcggcctgtgccaaattggccggtgttgccactgcgctttccctccctccgctgccgtccctttcggctgttctccctctgtcgccgctcaaaaaggactgaactcgctgaatatgttgctgtatctgttggatgtgctgcgtcatcgacactgtccctcgcgctatctctacggatccctcggcactcatttcctccgcaatcgccgctgtgccttcctcgtcttcgtctccaatgctcaacggaacggtgccatcctcagacaact

SEQ ID NO: 84811 - DNA, 1399 bp, Heterodera glycines
atgagaagaggtacaaaagtgattagaagaggtacaacagtaaatagaagaggtacaacagtgattaaaagaggtacaaaagtgattaaaagaggtacaaaagtgattaaaagaggtacaaaaatgattaaaagaggtacaacagtgattaaaagaggtacaaaagtgattaaaagaggtacaaaaatgattaaaagaggtacaacagtgattaaaagaggtacaacggtgattagaagtggtacaacagtgattagaagagtgattagaagaggttcaacagtgattagaagaggtacaacagtgattagaagaggtacaacagtaaatagaagaggtacaacagtgattagaagaggtacaaaaatgattaaaagaggtataacagtgattaaaagaggtacaaaaatgattaaaagaggtacaacaataactaaaagaggtaaacagtgattagaagaggtacactgtgatcagaagaggtacaacagtgatcagaagaggcaaaacaaatgtgttaataattttttaaaaattataaaataaattccttcttttatttaaaaataaataagaaattaattttatattaaaacatttaattaaacaaacaatattaaattaattaaaataaataaataattaattttaaaacaaaacatttatttataaaaaaaaatttaattcaaataaaaaatgtaatttattattaataaaataaaaaatattttaaatgaataacacaatgaaaacaggaaaaaatggtagttattaattaaaaacaacgttggaaatttattcatttaatttgaaattaaattaatttttttacaaattcaaaaaataaataatgaaattctttaattaaaaaaaataaataaatttaaataatttataaaaaatatttgaaattaataaaacatgtaaaagtaatcaaaaatgcacagaaaaataatgtacaccgatcggatccgaacttcgccccccccccctcaaaatgatgcctcagaatccccaatcacacagggattctgagggcttaacgatgtcaaaagtaaaaactgattatgtattcatgatcagcggcccaaattacccctaatgacatgtttttggaagatttttgtgaaaaaattttttcaatcaaaaatcctggttacacacccctttggtcccaaattccaaaatcacttctatttctatatctttttttaaaaatgtgataaaaatgtaaaataaaatttatattatagagaaaaaaattgcggatttttgtagtattttacttttcccgaatagattttcagaaggcagctacgaatttttttctgaaaaatcgaaaatttccagaaattctggaataacttttttcatatttatgatacaaaagccaaataaa

SEQ ID NO: 84812 - DNA, 87 bp, Heterodera glycines
atggctaatgctagagggccgagttcatcgacctcaacctcaactaatgcatcggttggcgttcttatggtcgggccaaatttcaag

SEQ ID NO: 84813 - DNA, 423 bp, Heterodera glycines
atgagaagacaccacagtgccttgaatggcaatgtgtcgcaacagtgtttgaccgtgcataaaattcgtcatgctgctgcaacagatgcaaaatgtttttgcttatcaaagcaacgttagtagtatagggatcactttcttggccttttttttgccccccccccctccctcgcgcactcaacccatattcaaatgaaagccaaaaaaattgatgaaaacatgtaacaagtgatcagatatattattagtcggatgtgaatttgtcgattaaggcaacaaaaattagaaatgaatgtaatatcgattcatacgattttcaggcccccaaccacctcataaaagattaacatagatgatttaagaaaaatgcagaacgaattgattgaagacaaatgcagaatgatctgataaaaaataattgaa

SEQ ID NO: 84814 - DNA, 67 bp, Heterodera glycines
aagtcatgcgcacccgtccgatctggcagttaagcaacgattgctgactaccaaaagggtccgtgcc

SEQ ID NO: 84815 - DNA, 878 bp, Heterodera glycines
atgtctgccgaaggaaacgacgcaccgccagccgcagagcaaccgccaccagccgaagcagcaccagctgaagcggtccctgtccaggaggcggcggcaccgccagtagaagcggcggccgaaactgcaccagcggaagcagcgcaaccggtagaggaggcggcaccgcctgctgaggcgcccgttgaagcggcaccagcggaagcagcgccaccgatagaggaggcggcaccgcctgctgaggcgcccgttgaagcggcaccagcggaagcagcgcaaccggtagaggaggcggcaccgcctgctgaggcgcccgttgaaccggcaccaccagtggaagagccaaaggcagcagagcctgaggtgaattttgtgggaaaagttggaataacgcgcaattttaggcacccgtttcggaagctgttccagcggcagaagcgccagtggaagaagctgttgctgcccccattgaagtcgcgcccgcagaggcagagcccgtctctgccccgccagctgaagcagtaccagccgaagaagcgccggctgctgaggtcgcccagctgagtttggaggaacaagcgccagctgcggaagcaccggtcgcggaagaggcgcccgccgctgtccctgtcgaagaagcagtgccgcccccagccgaggttccagcggctgaatgcgctccaccagcatccgaagcaacgccagcggaagcgcccgctgcccccgaggaaacgccggcggacggcgtttcccccgcgccggaagcagccggtaagtataaaacaaaagaaaaaaccaaaaagcataaacaatggcagagcctgcagcagaacaaccgcccgcagctgaagaggcgcccccggcggaaggcgcgccgg

SEQ ID NO: 84816 - DNA, 1467 bp, Heterodera glycines
acgcctccgcttaaaaaggggtacttgttttgttatgccaaaaagggactgattgtgggactcacccggcgcgccttccgccgggggcgcctcttcagctgcgggcggttgttctgctgcaggctctgccattgtttatgctttttggttttttcttttgttttatacttaccggctgcttccggcgcgggggaaacgccgtccgccggcgtttcctcgggggcagcgggcgcttccgctggcgttgcttcggatgctggtggagcgcattcagccgctggaacctcggctgggggcggcactgcttcttcgacagggacagcggcgggcgcctcttccgcgaccggtgcttccgcagctggcgcttgttcctccaaactcagctgggcgacctcagcagccggcgcttcttcggctggtactgcttcagctggcggggcagagacgggctctgcctctgcgggcgcgacttcaatgggggcagcaacagcttcttccactggcgcttctgccgctggaacagcttccgaaacgggtgcctaaaattgcgcgttattccaacttttcccacaaaattcacctcaggctctgctgcctttggctcttccactggtggtgccggttcaacgggcgcctcagcaggcggtgccgcctcctctaccggttgcgctgcttccgctggtgccgcttcaacgggcgcctcagcaggcggtgccgcctcctctatcggtggcgctgcttccgctggtgccgcttcaacgggcgcctcagcaggcggtgccgcctcctctaccggttgcgctgcttccgctggtgcagtttcggccgccgcttctactggcggtgccgccgcctcctggacagggaccgcttcagctggtgctgcttcggctggtggcggttgctctgcggctggcggtgcgtcgtttccttcggcagacattgcggcaccttctttttgttgctggggcggaattgtgtcttctgcgacgggggaagactgctgctgttccggctgttgtttggagaaggggcagagtttagtccagaaaggaattttcgaggataaggagactaaaagtggaaaaaaagtgggaaagtgagttgatcatttgtccattttgaataaatggcacgacaaatgcaattgtcttgggtaaggtgttttgtcgcgggttacgcgttgccaatgggtcactctgtcccccgagggttcggatgatttgtcctttccttttgccattgcccaaagcgttttcttaaagagcgagcagagaatgagtctcatcagccttctatgcactgaacatcatcagaatggatgggccaaccgtttgaaatcggacattttattttgttcatgcttgtcagcctttccagcccgcccactcggtccattctcaaatgaaatgaaatgaacatttgtccgttcgttttccgtcatttcgtaccgggggaggggcaatg

SEQ ID NO: 84817 - DNA, 1950 bp, Heterodera glycines
atgcaaattttgtgggagagtggcgagtggccaggggccagcattgagcaggccatcaccactttgagttggactccggcggccaaggagggccggggactgctcggcgtcggatgcgacacgggcgcagttggcgtaacgtacaccgatttgggccctgaccacaactgctgtaaaaggtgaaaacattttaaaacagtgtgaaaatgttggatttttcccccaattttcttcctttgtaaatatttgtcattttctccttcctcagacacaatttcaacttacgcgggcatcaggcggcgattgctttggtggcgtggaacaaagcacagaccaaattgctttcctacgacatcaatggcgtcatttacttttgggtgccaaacgaagagcgatggacagtggagctgatcaatgatcggggattcaaagtccgtcaatttttatcccttttgacgaaaattgaaatgccatgtttaaggtccgtgacttcgattggagtccgagtggggcgtcagcattaatttgttatgaagacaattttgtgctaatcggtttgaatttggcagtttttgtatttttggttcctttttcagtttcgtcctccggccaacgcatttggtccaacactttccttttctccattctctgcggcgcgtgggcccccaattcgcaagaattggtcatcggcctcagcagcggcgttgtccatgtgctgaacgaccagggcactttgatcactgaacgcactctcttccaagtgggcgtccaacgggcggccttttccccgctgcgaagtgccgaggcgcacggagatggcaaatggactttggcgtgttgttcggtcggtctctttttcatttacgaataattgtaataaccaatgataacatttgatttctgctggtaaaattggggtttcaatgccaaaaattaatcaataattgcttggttcggcttctaaaattttatatgaacaaatttcttatttcatacagaaaaataataagtcgatttctgacacattaaatagcattcacaattctatcaccgattcacataatattttggacttttccgtttgggggccgcacattcaaatttaaaaaaataacaacgaatgctttgaacattcgtacgtttcccatattatattaggaaaagtaccaatattttgtttgacatgctaaattctcccaaggaaaggaatttttttgtttttaatttccattttttctcctcaggccaccgatcagattctcttcctgaacaccttctacgaggttgagctgtgctcttggcaagcgccggacccggtgatttcgatgcgttggagcagtgacggcacaatgctcgcggtcgtgtgcagtccgaatcgcattgtcattttggactacaacggccgtggcattcactctttctcggcacccatccccggcggcactctctccgcattcacttgggcgcacagcgatcaggccattgtcgtgacggcaaagggcaaaatcgccacgggccgtttggtgcgccgagtgccgtcgctgtcccaattggtgtcctattcgctgtgggaacagttgggccgctcctccaaaggggtggaccatcttccgattccgaagagagagcgcaaacagatcgcccagtttgaccatcacatcatccgagtgccaattcacacctttgacttcattcaaaaaacgctgtttagtgccgtgtccccgttgctgaacgtctctacgacgtggtgtgtcagccgagcatttggcgttggtattgcaccattgtgccggtgacccgtaaaaatctctacatgctttgcgtcgaggtttattcctcagtttgccctcctccatccttttgcgctctcttcagcacatgggcggtttcgtgccgattctcctcggtcgacagaccaaccgaattattccccaatttgttatttcgctt

SEQ ID NO: 84818 - DNA, 1264 bp, Heterodera glycines
atggaggagggcaaactgaggaataaacctcgacgcaaagcatgtagagatttttacgggtcaccggcacaatggtgcaataccaacgccaaatgctcggctgacacaccacgtcgtagagacgttcagcaacggggacacggcactaaacagcgttttttgaatgaagtcaaaggtgtgaattggcactcggatgatgtgatggtcaaactgggcgatctgtttgcgctctctcttcggaatcggaagatggtccacccctttggaggagcggcccaactgttcccacagcgaataggacaccaattgggacagcgacggcactcggcgcaccaaacggcccgtggcgattttgccctttgccgtcacgacaatggcctgatcgctgtgcgcccaagtgaatgcggagagagtgccgccggggatgggtgccgagaaagagtgaatgccacggccgttgtagtccaaaatgacaatgcgattcggactgcacacgaccgcgagcattgtgccgtcactgctccaacgcatcgaaatcaccgggtccggcgcttgccaagagcacagctcaacctcgtagaaggtgttcaggaagagaatctgatcggtggcctgaggagaaaaaatggaaattaaaaacaaaaaaattcctttccttgggagaatttagcatgtcaaacaaaatattggtacttttcctaatataatatgggaaacgtacgaatgttcaaagcattcgttgttatttttttaaatttgaatgtgcggcccccaaacggaaaagtccaaaatattatgtgaatcggtgatagaattgtgaatgctatttaatgtgtcagaaatcgacttattatttttctgtatgaaataagaaatttgttcatataaaattttagaagccgaaccaagcaattattgattaatttttggcattgaaaccccaattttaccagcagaaatcaaatgttatcattggttattacaattattcgtaaatgaaaaagagaccgaccgaacaacacgccaaagtccatttgccatctccgtgcgcctcggcacttcgcagcggggaaaaggccgcccgttggacgcccacttggaagagagtgcgttcagtgatcaaagtgccctggtcgttcagcacatggacaacgccgctgctgaggccgatgaccaattcttgcgaattgggggcccacgcgccgcagagaatggagaaaaggaaagtgttggaccaaatgcgttggccggaggacgaaactga

SEQ ID NO: 84819 - DNA, 1787 bp, Heterodera glycines
  unsure (1)..(1787): unsure at all n locations
tcgccatcaacaccaccaacaaactccgtgccacaaatacttctccaacagttcggcaaggattttgttgcgggcgctgtggccgcttgtgttgccaaaactgtcattgctccggtggagcgcgtcaaactgattttacaagtgaatatgcaaaaactgtgctcaaagagagaatccaatgctaatagtggataaaattaccataaattaaatatttaaaagagattttcaggccaattttcaatgatccctttttttaaacggtaaccgcaggcaaaaccatgttaacgcttaaaaaaaggcaaatttttgtatggacaaaattcgaaaaattccattgaaattggtggccgacgtgccatgccgacaggcgccatcaaaaaaaactatttttttgaacgtttcctcccgcatttagctccaaactgcccagcggaccatcgcggccgcgtcccgctactccggcatggtcgactgtttcgtgcggttgcctcgagagcagggcttcctctctttttggcgtggcaatctgtccaacatcgcccgggcggcgagtcaggcaggtgcgaagagggccaactgtgtcccggggcaagtttaagaagccaccaaatttcatcatttggcatcatgcgaaagtctccttaacaagccttatatctctcaagaaatcacaaggatttgtcgccatacaaaaaagatatgcataaaatgagcaaaatttcttgaatttttacggaatttcatgttacaattttttaaaaagttttttattcgcttaaaatagccttcggacctccattttaccttattttttgaaaatttaaccacaaaatctaaaaataggtcccttttttgacgaaaggcggctacatattcctgttttttgctctccggcgccggcaattttaaaattatgcgggaaaaattttttggttacggacctgatgtcaagatgataaaaaaaaagatcaactgtcttgagaaaaaaaagtcatggcttcttcaaattgcctgggcttggttggcggtacagagttgccatcgagcagaagacaaaccatttctgaacaataccaactcacngttttgacaatttataaagtgccaataattttgggctaaaaccaaattttaatttttccctttttttgcataaaatttgggctcctggaaaatgtctcctgtttcgtaacaagtcctattaatagaaatattaatttttaaggactttttccgagtccgttctcttcgaaaaacttccatttatcccttttttcataatcattttgtgcttttattaatattccatttcgctttttaggagtcgcttggcatggcttttaaggagttgttcaagcgttggtgtgtcactgagtctgatcgctctgtaaattatcgtcgttttgttgccggttggtcgggcaaaaaatatttccgaatgtctcaatgccttaggcaatttgttggccggcggtttggccggaagcgtcacctttttcttcatttacccgttggacttcgcgcgcactcggctcgctgttgacatgggcaaaggttgacccccagctccattctcacaatcagatggcactttttattacgggacataattttgcagaaatcccggtcttatgcccgattttggagaaattgaatgacccatggagtccagcaaaacgggactttttaccgctggtttcttgttcacaaacagcaccattttcgaaacctattcctccgtttctgcgttaaacgaaattccggcctaagttggttaatttctc

SEQ ID NO: 84820 - DNA, 644 bp, Heterodera glycines
atgaaaatttacaaatggaaaaaacaattaggattaagcagaaaaaatgaaagaagccaaaagaattattatgaaaagaaaaagagggaatttgttgaaagaattgatgagtttaaaagaatgtcaaaaagaggaaaacagaagcaatttgcgaaagcgttgggcattggcaaaacaacattaagcacttggaaaaaggaatttggcattgaaattagcaaaagtaaatattatttaattttattaattaaatattttatcatttttaggagtttattcgaataaagagaaaatcagcaaaatgaaagattattataaaatgaagaataaaaatccgtatttaagtgacagacaaattgctacatttttgaaaatctctccgtccaccctaaataaatggaaaattgaaaaaaattagtaaaaatcatatatttctaattattgtatgttatatccctccatttttattcgtatgacttttaaaaaattgttaaaaaacgattcaattaacacttttctcatgcaattactttcataaattataaatttatatatttttgagtctttctattttatcataaaaatccttttttgattgaatgattcaattaaaataacaaaaaaaaaaattaacaaaaaataaa

SEQ ID NO: 84821 - DNA, 1307 bp, Heterodera glycines
atgccgacaaacaatgtgctggtcgggttggcatcggtgcccaactttttgctggtgccgtcctcttcgcctcaaaatgggccccttgtggaacgaatcatcgaatttgttcaccgaatacggtaagccaattgggatacactgtcacgggttacggtgtgtatgttcctatccgatagtgttggattactataaattggattactgtattttatttttattttttaatttcagcgaagcccaaccgcccgttgagttgtgccccactgatcgtcagctgtgagttttttcaatttgtataatgtccgttttatcggtggtatacgataatatcgtgcagtttcgcccttttctaattcgatctctactattattaataaagtttcaccataatatttcaatgagttccaccccctttttgcttcctttcttttaccgtatgcctttctcttactgtggttcattactatagctcatgtaatacatgtattacaaataaatcaattattgagtgcctttaacagatcgctcatcgccgcgctgtgtttgtgccgttccgacggtgccggtgagcatgccgccggtgcgatgatgagcgcctcagtgccgaccgcaacgagcgatgacggcaccggccatgcccagctgcagttggccatcgcacgtcgcattcacgaacgactttggcaggtgtgcaaactgagcatggcatttttggatttttaatttttttggaattgaaatttttaattggatttggaatattttttaaatttaatttttaatatttaattcataatttaaatttttaaagttggatttacaaattataactttttaaattaaatgttaatttttaaaatttgattgatatttaaatattttaaaatttgattgaaaaattaaatgttttattttacaaatttaaatttttaataattcgttttaattagtttactaataaacatttccgaggttttaattattttttcattttaagggtttttaaattgtgctttacactaatcattctaatgacattcttaccgtaatcggaattgtaccgtaataataatttgccctccgtacagtcgctcaacgccaccttggccaccgatctgctcccatttggcccctcgttgcttcgccgtgattccatggaacgccaacatttggccgccatgttggaggcgttgcgccaactgcgcttggcacatcgccaatgcttggcacacacaaattgttacaatgtgccggccgaactgttcacggcacaacgacgaggcgagcaaaaaaagagcaattaa

SEQ ID NO: 84822 - DNA, 1204 bp, Heterodera glycines
atgctttacgaagacccacgaaatcgctgctgttgtgcgatcaaaattcaggtgattcgctaaaaacaaaagcggaaaatctcttataatacaaatgtccttaaatttgttttgattcaattcgaccattttattgcccaatgactgattcattccgtacactttaaaattgccacctcttttaagtttgaccattttctctcaatcattcttgcttagtctgatcacttttatattttttaacttcctcatcccaatttaaattattagtcaacttctcccgatcagtcaaacaacttcacttatgttccccattgactgatcagtccgatcacttttcaatttgcctttccccgttagattggtgctttgatcatcgcttgcattggcattttcgcctgcctttgtctgatgttgcttttgctcattttgggccgttttctctttgccactgttccattaattttggctgctgcttacgtaataattaccttttctcaaatcattaaattgatccaatttaaggcttccattttctatgcgcattatgccaaaacagcgcgcctttattggccctttttggtggccaatgtgcgcaaatgttttaatcgccaatacttttttaaatttatttaattccatttttcggcttttttagggcattgccgttgctgttggttcgctgtaccttttggttttggctgccatgtttctgctcgtcccgcacttttggcaacgttggctgaatgagttcagcgactttcaacatcaggagacaatcatgcgtatgagcaattgacggaaatgaaaaaattgagaattaataaccaattaataaactcatttcaacggtttagagtacccgcgtttggtcaccggatgtatcggagcggtaatgttatttgttcaggtaaaagcttttaggggcattttgttttttatttcggcacttttatattttacatttcaaatttaaatttaaatttacgccattttcatttttgtttatcaggtgattaacatttggtttgaattggtcgtgtacaatgccagcacatttgtgcaacgacagcatttcatttcgcaacacggggcgcacaaagtctgatcattcaatcaatggccgacagaagactgatcagccgatgcttttttaatcattttttgttttaattcgattttttttgatctccggtataataaa

SEQ ID NO: 84823 - DNA, 713 bp, Heterodera glycines
atgcttcttcttcgcgagagcgatgaagcggctgtcagcaaagagtgcccatgggcatttggagagatggaaaaaaggggaaattgtgaaatttggttttatgaagagaaaaacggacggacgaatggacgacgagaagggcatttggaggggaagaagaacaaaacggcaaaaataaagaaacaaaaaagatattcaataatgtatatatgtctacataagtacggtataaaaccaattaaagggcaattaagcatcgaatgggtcgggcacaattaacgccggggcattattatttccggttcgttccgacgtgtttttgttagtgtgtgaataaactcattatcagttgaatttagaaaatggctttttcttttcaaaaatcccttgctaatggatttgtcaagttttacaaattgtgaaaaaaactcattcatattattatatataattttaaaaaagtattctttattcatttggtcttttggataaagcaaaaaacaataaaaaataaaaagcaaattttagtgaattaaaatgacaatggcttttttatattttgaaattcgaagctaataatcttttaggctttgtatatgggaagaaaatataaggcaaagaagggcaaacaaaacgaaagaaagtaaaaggaaaaatgaaaatgaaaagcgaccaaaagaaaaaggaaagtaaaatttaaaattaaaattaaa

SEQ ID NO: 84824 - DNA, 290 bp, Heterodera glycines
atgctcgtcgaattggatgccgaacgcatcaccggcacttgcggtctcttcccgattgagcagaagacgcttcgactcacaactgacggattccaatggaatttgggtgattttgatcaaaacatttcttaattattatgtgatttttcttagccaatcaatgcgttgctttcggccaattggtttcctcctccaattgcattttgtgtccgcaaaaatcgcgcattaaaagcgacggcggtgccgttgtgttcacttttgaactgcgtgaacccaacaaaatgctctga

SEQ ID NO: 84825 - DNA, 323 bp, Heterodera glycines
atgtctccaaatgaattttcggaccgtccctttcaacaacccgacaatgttcaacacccgcatcaacaaccagatgaagacgccgagttgcgtgcacaaattgaagacgcagaggaggatttgctcttgaattggtggcgtgaagacctgaaaattgtaagcttcttttttttcaatttatcatttttttaaatttcatcacattttttcagattcgttttctttttggacaccgtcgagcacctaccatcgaagccgcgcttcttcagcgcgccgaacgcgaggccgagattttgcgccaatatgccgagaaccaacaatga

SEQ ID NO: 84826 - DNA, 426 bp, Heterodera glycines
atgaattcagacaaccatttgattcaaacaatgaatcgtggcgatgaaaggtccgctgacatatatttggtaatatttgcatattctttataatttccctcacataattttgtgaattaccacagtaattcatcaacaatttttattgctaccggaaaacacattttgtatttagcaagagcaaacgctgatgatcacctcaagccaccaacccgtgcaattgttatatgatggagccaatggacaatactttatacctgttcagaatgggaatgacggttctgtttgtcatattgctctgaccccaacacagtcaaaagtaattgagaatcaagataaaacgtctattggataagactgtagtttgttccccctttttgaaaaaaaagaatcaaatccacctaaacagtttcaaatagcattaaa

SEQ ID NO: 84827 - DNA, 929 bp, Heterodera glycines
  unsure (1)..(929): unsure at all n locations
atgtccaaagcttaagctgatttttaatgagtgccacgttggattctgcccgattccaaaaattatttaaaatattgtgaaatgctgataattcgatggcgcacatttccagttgacattttggtaaatttgtttgcgtgtaaaattcttcaacaacaatttcacacaataaaagcattntaattcagtattctccaacaccagtaattagctacacacatgctgcggtggaaacagcattgcaaatccatttgactgaaaggcgtcctggggatattttaatttttgtgactggtcaaaaagtaataatcattttatacctgaaagttgaatagaatatttaattaaaattttaaggagactgaaaggtttgtcggctaattcgcaaggacatgaccgatgagacagtttcacaatatggacaattagtaataaataattttaaatatcatatatatatatatatatataatttatttattttcccttttgtttaattacagtattgttttcctttgtatgcctcaatgccattggacaaacaacaacgtgttttccaacaatgcattccaaacaaaaataacacattgatcagtaataagcaataaatagtcttaataaaattttcgcaactttttttattagatcgtaaatgcattgtcgctaccaatgttgccgaaacgtcaattactattgatggtattgcctttttttgttgacactggcttttgcaaacaaaaaatttacaatccacaaattcgtgttgatgtaagtaggttgtttggtgtgtttgtataacatgaatttggttgtatattaattttttatatcacagagccttctggttacgccaatttcacaagcctcagcaatgcaaagagcaggtcgtgatgggcggacccaacctggacaatgctatcgtttgtata

SEQ ID NO: 84828 - DNA, 1398 bp, Heterodera glycines
atgataattcgttcgccgccattgacacgacaaagagcgttgaatttgcgaacctttgcgcaaaaccaaaacgcagcggttgaagagcagcagcaacaacaacaggttgaaggagttcatggtgaaaatgaaccattgtttaacgctccgatctcgccaggacttaaccgaaatttgagtttgtcggcggaggaaaacgaacaccattttagtgaaatggcagcagcagcagcaaatgacgatgaaattcggcggcgccttttgcatgtgtccatccaatcgaatttgccgccgcgagcaaacggtggtggcaacaatggcgccgagcagcagcaaattcgcaatgaaaatgttggtcacgaggactttgttgaaggtttgcgaccaaattttggaagctttttggtgcgtgaagaaggagtaaggatgagattcgttgagagtggcaccgaaaataggcgtttcgagcaaattaacagaaatttggttcgggaaacggcgccaaattcgcgtcatgtttcgcaaagcgaactcattgggcgtacatcgacgccaataaattttaatggcgaattgcacaactttccaattgtaaacaaccaaatccggcaccgagaaatttatgaggattttggcccttaccgggagcatgaaaattttcgctccagccaaattcaaattcgccaacaacctgcgttagcgcggcaacaacaaaacgcaaacttcggctttttgccatgcgaacggcaacacaacgaattcgtcggacgacatatttttgagggtgggcgtcggatgatgcacccaacggagatgccgaggcaaatgcatcaacaaccgccaagagaagagcgtggatggcagcaacaaaccagtgttttgtaccgtccggtggcgcgacaacagcaaaattttccgaattacgaaaaccaaatgctgccaccccaaagccaaaatttagcggttttaagtagtctggagtacaatatggtccttgaaaggatcccagacctcaacggaaaggaagggacggacgaagttaagcgttttttcaaaaaattcgacgcttacaccgacagttggccggatgaaaaaagaattaagggactagaaagcaaagtgtatggccgagctgaaagagcttttgaagtggcgaaagcagtcattccgataaagtatgaactgcttcggggtgaaatgatgcgacagttggaggaaacggactcaaaaaacttgaatgcttttgatgagctgatgttaggggtccgacgaaaacccaacgaatcgattgatgatttggcatgtcgaatttcggggttggtgaagagagcctaccctggtctttctttcaattgtcagacgatttctcatccaatatttgatccgatcaattggtga

SEQ ID NO: 84829 - DNA, 508 bp, Heterodera glycines
  unsure (1)..(508): unsure at all n locations
atgaatgtaagcgaggcgctggacaaattcattaactcgtgaaacaattgaactgtgagtagtattgatcatagattgaaaattaatgatgttaggcagacgatttataaacgcaaaaactgaagaaatatgcgcataaatatgtgattttgaggtgaaattgtctcaaattttaacaattaggttttagcttttatgatgaaaaaaaatctacaaattgatgacaaattttcacatntaaagcaaaagcagtcaaaaattcaatttaaagtaaataccaaataaaaaaaaataaagaaaattagcgagttttgcaaaatcttcgcatttctcaatgaatgatttttttttgaaatattgtaggaaattttgtatttaatttccgacttcgatccttcggactaggattgcgccccgctcctctggggcaaaagttggggaccggaccggtcggagaatgattaaattttccgaaaaaccagcattttttactttcaagaaaaataaa

SEQ ID NO: 84830 - DNA, 576 bp, Heterodera glycines
atggggctccgaattttgcaccaattcatccaatttgtgaaaagccggaaaaggttaaataaaaatcaaaaaaaaatttacttgcccgtcgtcaggaaggggaattcggtatatgtcggtgaacggggaatgaggaaagaatgaaaaacactttttcaaaaattttttgcagattttcatataaagagaattcaaaattatttaaaaatatagaattttgtggtacaaacggtggtgccgactagggttgtgacccgcttaattaaataaaattccaatttccttaatttaggtcaaaatttttgccgatgagtgccaaagaaaatgtgttgacattaaatcgccaacaccaaaagtaaaaatacaataaaattatttttcttttttccaaacttctttgagttcagagcaaagaatgggcaaaacgtgcttttcattgtgaaaaagttttgtgtaccgaaaatgggattaaatgcgatgccaacaaacgtctgataatgaaatacgatgaaacgctttttgcaagtcgacagcaaaatgtgcaaaacttttgcaaattttgataaaaaaaataaa

SEQ ID NO: 84831 - DNA, 808 bp, Heterodera glycines
gcttttcgggccgtccccctaccgatgcgctcagatttatggggagaccgaatcctccgggaatagcttccctatagcctgtactttaattctgcgttggatttttgctccccataattgtttgagtaccccaaacggacacttgaaaaaatcgatttttttgttttcggtgcagtccccccgaaccgatgcgcccagatttatggggagaccgaatccttcgggaatagcttccccatagcctgtactttaattctgcgttggatttttgctccccataattgtttgagtaccccaaacggaaaaaatcgattttttttgcttttcgggcagtccccccaaaccgatgcgcccagatttatgggagaccgaatccttcgggaatagcttccctatagcctgtactttaattctgcgttggatttttgctccccataattgtttgagtaccccaaacggaaaaaatcgattttttttgcttttcgggccgtccccctaccgatgcgctcagatttatggggagaccgaatccttcgggaatagcttccctatagcctgtactttaatttctgcgttggatttttgctccccataattgtttgagtaccccaaacggacacttgaaaaaatcgatttttttgtttttgggcagtccccccaaaccgatgcgcccagatttatggggagaccgaatcctccgggaatagcttccctatagcctgtactttaattctgcgttggatttttgctccccataattgtttgagtaccccaaacggacacttgaaaaaatcgattttttttgttt

SEQ ID NO: 84832 - DNA, 679 bp, Heterodera glycines
atgaatgaaacttttcgcgatgttctgttaatcaaggaattgcttataagacaaccccagagcgaagaatttcatcttttccaactgagtggagaggtaagtagcaatttttataggttttaatggtagtaatacaataattattaatattttacttaaattattttaattatttatttgtttcctaaaatacatctacctaataatttttccatatttttgtcattcgtgtttcacaaagcactcctcagaggagaatcgcagtatagcaatcatcctaatgtcatttgtattttgatgagcccaattgtttttcatggaaaatattttctaaccccaataaatttttctttcgaactaccccgatttttcagattttttatcgacaaaaactggggatgtaatgcattttggaaaactcaactaacactgcctaaaatccaggtttctgttgtgactgaaatgtatatactattattcctttgaatttataaaaaaaatcaaaagcaaactaacatttattttttattttaaaatgacaaatctgagtgaaattactctttataaaaaataatgaaataagcatttgtatttcccaaagaaattaatcacactaatgctttgctaatataattatgtttccttttttcagacgagctccatccctgtcagtagctag

SEQ ID NO: 84833 - DNA, 180 bp, Heterodera glycines; identical to SEQ ID NO: 51454

SEQ ID NO: 84834 - DNA, 872 bp, Heterodera glycines
atgtctttccgtctgctgggcattctctgcgttcttctcttcgtggcgcaactcacaaacggcgatgcagcgtaagtgattcgcttctgcactttctgtctaattgtaaatcattaattttaacaaatttctagttggaacgatgccaatgatgtgaaccccttcaaaggtcatcaggaacgcgctctggcattcaacgagaaactcaagcatgcggaagagaacacacccgaaaatgtcacccctacgccgacgccgtccatcaacgctacggagacgcctgatacgaacgcgacgatgactacctccgaggtgactggcgagacgaccgaaggcccaactatcaagacgaccgcaaagcctgctccgccctcgaccagcagcttccaaatgacgatcctcaatatcgtcttaatgggacttatcgccgtgtaagtgtgtacggagtctaacagatgatcataggggactttcacgctttttagctatgcaaaaacagttatccttatgtgcacgggtcaaattcttccttttttccgtgtatttattgtatgtccattctaattcattgtttacaggattcttcttgtcgacatcgtcctggctgtggtcaagtgtaagaagtaggaagaactgaaggaagaaggaaggaagagccgacctaccgctggtgtaaacaattgctcgataccaaataatctgtgtggcctgttcatcgtgatcttttatatccatgtgtcttgtttggagaccgtattctccctattctgttgtctaattgtatgtatatatacctataaacgatgtgcacacaattttttgggtactttccgttttgttcatacatctcaaagtttaaaaaagccaataaa

SEQ ID NO: 84835 - DNA, 273 bp, Heterodera glycines
atgggcaatgaatggcacggattggcacgggcgaacattgcgatggtgccgttggaacacttccaagttgtcaaggatcaggcaaacctttgcaaacaatggagcaaagcattggcgagagcggcagaacggacttaccaagttgattttgtcagtgttcaaaaggccgccgactccgattttggacgaaaagtgatcttcaccattgagatcatgcaaaaactgaacagggaaccaatgaacggccaaagaatcgtcggatggtcaccttaa

SEQ ID NO: 84836 - DNA, 1037 bp, Heterodera glycines
gctgaaggaggccggtgccattctgttgggcatcaccaatgtgcccgagttggccctgtggtgggagacgaacaacaccgtctacggggtcaccaacaaccgtaagccgaagccatcccaattttttaaaatttattttttgcatttcggggcggggggggaggctttagccccacaatttttgagtgtaatccttttttgttagcctacgatttgcgccggacgcccggcggcagttcgggcggcgagggcgctctgttggcagcggccggctcagtgatcggactcggcaacgacgtgggcggctcgttgcgcgtgccggcactgttttgcggcgtgttcggcctgaagccgggtccaggtaataattaaaagccatcgttctctctctatcagtctgtaaaatctcaaaagattaatggttatttttcaaaaaagttatggccaaacaattaagacactgcttttcgaaattttaggcctcaattttttaaaacctattctaaaaatgaccaaccttggagcttgagaaaatgtgtagtatttttgataaaatataaaaatttaagtgaaaaatggccattttttgagggttttgaacacaatttaataattatgcaatggaatgaatgtcttacattttgctcaatttgtaaaggaattttaacctttttccaactgccaggcgttgtgccatcatccggcattttgccgcgcgtccacggcggttatctgattcaaatggccactgccggtccaatggttggacagtttttttcataaatttttttaataaacaatcattttttccagacaagatacgcaagtgacctcactctgatgcttagggtacatttttttttacaaataagcaaaaaatttaaaaaaaaaacattcgaaaaacttttgggaaataacgtttgaaaatcaagcaaacaaaagatgatgaagaaagatgctattttcttcattgagttcaaataatttgtatggcatttaggccgcccgacaagggcgtattatctaggggggggggg

SEQ ID NO: 84837 - DNA, 606 bp, Heterodera glycines
atgcaacctgtgctggcctcttttccgagcaaagatgccacaaaaaaggtgggttaatatcaaaaacaattttgtaaataattttgttttctttttattcaggtcatcaaacgtttgcgccgtgaggaaaatgcaccgcgagtcgaacctctcaatttggagcagttggagattccgaatacctatcgtgtttataagcgcactgagattgacgaggagcaattcctgttggcggacactggcgtttttcaaattcacggatactgaggttgaattggacaactcaaaaatgatcaattttgatcattttccattgaaatacggtagaaaatagttttttttataatcatcaaattcaaccaagtataactttatgtacgggtcgtagccctaccattcaaaaggcaattcggtagacaattttgtgctctttctggcacccaatcaaaaattccaaaaaaatttcctagccccctaggaaatgaattatttcaggtttttaaatgaactttaaggtggtttttcatgtttgagtcaagacttttttccgcccttttttgagtcaagtctgatcaaatgaattaatctcgggaatgaataagtcaa

SEQ ID NO: 84838 - DNA, 342 bp, Heterodera glycines
atggcattcttctgtaatgaattttttcgttaccacggtaacggaaaggatgcgaagatgacgacgatgaattggcaccgccattgtgagactggagaaaaacaattttaaatttcattgatttaaaatagttatgaatttattaacttatcgatttggaggaaaaagaaaaaaatttcagttttcaggcaaaaaccgaatatttaacgtttgaaaaaaatctgacattttgactattgctaaggccgggtggcggagaatcaaatgacgcaaatgaagtgctggactgtaatggagcaacagtacaagtgccataaattgattgagatgactgaaaataaa

SEQ ID NO: 84839 - DNA, 489 bp, Heterodera glycines
tcatctcaatcaatttatggcacttgtactgttgctccattacagtccagcacttcatttgcgtcatttgattctccgccacccggccttagcaatagtcaaaatgtcagatttttttcaaacgttaaatattcggtttttgcctgaaaactgaaatttttttctttttcctccaaatcgataagttaataaattcataactattttaaatcaatgaaatttaaaattgtttttctccagtctcacaatggcggtgccaattcatcgtcgtcatcttcgcatcctttccgttaccgtggtaacgaaaaaattcattacagaagaatgccattcattgcctataaaattttagaaaaaattttatattttgaaaaaaaaagaattgcgtgctcggcttatgcgtttgctgtgctgttgttgctccaacaatgcacaacatcatcagcccatcaaccgggaaggacaagacgaattaaactgaagatttga

SEQ ID NO: 84840 - DNA, 185 bp, Heterodera glycines
gtcaaattgatacgaaaaaacaaaagcctaaaataacgcatgaaggccagcttcggccggtgggctgatcgaatgaaagaatgtttcggagacggcacattctcattggcacctccaatgttctaccaaataaattgtttccatttcttcattttgttaattattatatttaacgaaaaattcat

SEQ ID NO: 84841 - DNA, 671 bp, Heterodera glycines
atccctgcacaaggatatctgccacaattttgtcaagcgatgcaatcgaccctcagtgatgatgtggcgcgatctgctctcagagtgcttaaccaactctcagaaaatttggtaaatattaacgattggaaaattgtcacacaaattcattacactttgaaactagtcataaattttcaatttgggctttaaattcatttccgctgtttaagaattgtgcttctgcgttcgctgctgtcccctctcttccaaaagggcttttggtttgcatgcgaatgcagcccgagttggcccgggagtcggcccatgcactcaaaatgctctctcaaagatgtactcctgaaatggcggaacaaatgttgttgagcggaatggtcgatcacttgttgaaaatgttgggcagttcgttaccaggtgagtctctttttgggacattttccattcctttaaattcaaatcaatttaaaacgttattaatctcttttcaggagtaaataatccgtccgctgcaaaagctgaaattgccgacgcactcaaagcttgctcaagagacgcacactttggtgaacgtatcacgcaattgctacaaaaatcgcaaatctgggcacagtaccgagaccaacggcacgacttgtttttgcctaccatcactcaaacacaagccataacgg

SEQ ID NO: 84842 - DNA, 1977 bp, Heterodera glycines
atggcagcttttgcttttttgggtgtaatttttggtttatttaggatccgcgagaagctcggttcgctggtcatttcggtgctgaagcggcgctgcgaagcgattgaccatgccacggttgagctgttatgtgcactgatgcagccaatgcatgccaacttcgacttgcgcatcgagcagctgaacaaacaatcacttctctccagccgtgccttcgttgaacatttgcttcaacttgtggtggaacacgtggcaagggggactggtaaacaaatcaaatcaaccaaagttatcgtttttcaaaatgattgcccaggtgcgttggtcatcgcctcgatgttggactttctcacattcaccgtatgcgccccgtacagtgagacaaccccgggcgatacgttcgattcgattttggcgatggtcgcacagcggggacgaaccttttacaaacttttccagcatccgtctatgaccattgtgaagggggcggggatggtcatgcgagcgatcatcgaagagtcgggcagagatgtaagagacataactgaaaaagaggagggagtggcaatatcaaacataaaatgattaatttgtacattttagctacattttaaacataataaattaaatcatttaaaattaaattaaaaatttgctattggaccactgcggaacataaaaacaatccggttttaccaactttgtctttagatcagtcgtcaaatgcaacttttggccctcaccgaaggagcctttctcaaacatttggagttggcccttctttccactggcaaagaccttcgcgttcttaccaacaaacaactcagcggctatttggtggcactttggattgcggaaaaccaagcagcgaaggatttgctgcaacgatgcttggtataaaaaagccaaaatataaattttaaaaagtgctttagccccgagggctcattgattatttggattcgaatgagcatgtgcctgcctctgcggtggccgaggaacgtgacttgctgactattcgcaataatttggaaatggccaacaattcggagagagagcgtccgtttgcacagcttcaggatcaattcaggtctttcgagcaacttccggattatggccattttaaatgaaaaacaactcgtttcagaaatgtgcaagtgacgctggaggcaaggctcgactcgttgctgcaacattggaatttggaacagaagctcaactttttacagagcaatcgaattcgtgaggaacaccagcagcagaaaatccagcaaaggccagtcgtgcttcgcaagcgaaggcgactggtcaaagcgactgcaaattggaagttgttttggtatgcgtggcttctgcttcataattaattgcctaattattgtaaatttgttacattctttgattacgatttgcatttgttatttccgtcccattaacttattttagctatcaatttggccaaaatcacgcccgtgccgatttaatttggaacgaaaagactcgggatgaattccgacaatcaattgagaatgagtggcgccaattgcagcaggaattagaatttattcaacccggaactaccgtatcatggaaccactcggaatttacggtggttaccgttttgattaaaattgtcattttaataaagttattttattttaggtaacttatgactcactattggacgaaattcgaattggtgattattatcttcgctttttattgaccgaagagaacagttcgaacagtgcaacgcccatccatcgccccgaggactttttcaataaaatctaccatcgttttttactttctcaacgtaccgaaatgcgatgcatttgccttcgagcgatggcacttgtctacgaaaggcattgcattagcattggaccgttcgctgacactcgacacattgtggaaatgttggccaaatgcacaaatgttgctgaaagggaccacttcttgttccttattaacaag

SEQ ID NO: 84843 - DNA, 977 bp, Heterodera glycines
atgaccatgactatggctctgtcccctgcgcgtcccccgactcgggaatgttctcggcaacgcagagcagcgtctccatcggacaaaatgacatggcaatggtcgaaaatggtaacgaacacagtggagaaaggtaaaccaaaaagcattcgacattttttaacggtcaaattatagtaacttaatcaatcacaatatttattgtgcaaattccagcgaaggcatttggccattgcatagcgacgagacggacagtgtcacaacgacggccccgccaacgccgcccaaacacagagagacgggccttcaaatgtcagcggaaacaatcgattgccaagttggtagttttagaaaatgctgaaactaaatggaaggaacccttttcagggatttgtgaatgaaatgggacaattggatcaatccgtagagaccaaaacgaacatccaattcagacagaatgtcacaatggcagatacaaatggtaagtgacaagtttattcattttgagagaactttttgaaaacggtagaaactgtgggcctatttacacaaaaaactaaaattatttattagaaactagttaaatgctaagagaatggctaaattcgttatggcatagttttgttaatgaaatcgcaaatcctttttttaatttagggataagtcctttggattcatttcgacaagatgggaatttccatttgaacggccctcaacaatttcgccgtctttcaccaggcgcaacgatgacacagcgcaaaatgaatgtcgttgggtcggcttcggcgagtcccatccaattctgtgagcagcggaaaccttacggtcaaaaacagtattttagtcgagccgtcgttggtgaccgaaactcaaatgccaatgagtggcgcaatggccgttacaaaatgcaagaaagtcattctgaacgacgaggaacgcaaactgtgcaaaaaggtccatttttggttatgatttga

SEQ ID NO: 84844 - DNA, 757 bp, Heterodera glycines
atggctgcatttaggttgaatctacaaaaatcacttttccaacaagacggcgaaaggttattgggactggcaaatgttaaaaaagactccaaacggaagaaagagacgttttggtgccttgctggtcggtttggcttggattagggcgaaatgaaaacaaaaggattttgtaattcatcataacctatgcattgctttttagttacaataagtcaacccgtggcggtaaggttttatattgtcaaattggaaaaggacgacacttttgcgaagaaggagcaatttgcgttgagggaattgcgcgtggtcgacggagttcacccacgaaaagttttaagcagaaaatttcaaaactaagaataattcagcccgtaactgatattattctgacaattcgtaacaatgtgtaccatttggactcgaatacgctcgaagaaaaggaatttcttatccgtcaaattttcaaggtgtttccggtaatcctgtattttattggtcccataaaaaaaaagagattaaaaagttgtttttatgcatttcggagtaatactcgggggttttcgggggcgctgatcacgaatatgatatcaattttgacctatttcgaatcccgaacccgaattcgaacacaagtcggaagttaatttttcaccaaaattcacatgtattgtccaaaatcgattcaaattcactaaatggccttgaatctttattttctattatattccgttcatttgaataagtttgggacaataaa

SEQ ID NO: 84845 - DNA, 1107 bp, Heterodera glycines
atgtggagcaaaacgatggttggctacggaagtgaggacgaacactttgtgttggagtgagtgggggtgggggggggagaggtgaagaatgggcaaaaaggcattggttgggctgacccctacatgaaatcaaggttgttttgaactgcttgaaattgtgctttcctcattaaggctcacttacaattacggtgtccattcttacgaactcggcaatgatttcagtgtacgaatttaacccagggatttgcttccattttttagttcattttcaggccattctcattgaatctgacgacgttttggcgcgcgtggaaagtgtgggagagcggacagcagaagggactcttttgctgaaagaccccgacggacattcttttttcgtcgagggcggaagcgctgcgcatccgttgaccaaagtgtcactgaatatcaccgatttacacgaatcacgcggtcctttccgctaattcggttagcttttagtcccgtttcaatgattttcagaattttggtgccaactcctcgggatgaaattggtcgaagggacggacaacggaagtaaaaaatgccaactcgcatatgaccaaaatcaggttgaccaaacaatctttatttccatatttgctgacttttaagtgtcacctcgagctcatttcgttagcaaatggagaacctttggaccgaaagacggcattcggtcgaattgcttttgccacggcgacggaaaatgttttatttaaagttattaaaacaacacgcaattgccgctcctttcagttgaggccactcgaagagaaagtcggcacaaagcgcattcattcgccactcatttctttgggcacacccggcaaagcgaccgtttgggtggtcattttgaaagacccggttacttaacctcataaacgaatctaattacttgctttttaggatgagcatgaaatttgttttgtgggcgacgaaggtttccaagaattatcgaaagtcgacactgaagcggagaaactgttgctgagtgcgattgagaaagacgacagttgaagcagagtgataataatttatttaaaattgtgcttgtattttatataaatatatatgggtgagata

SEQ ID NO: 84846 - DNA, 295 bp, Heterodera glycines
atgttgcttccgatgggacttccggaagacgttgccgtggctgggttcggtctctccctcgagcggtggggagtttggttcggcttaaatcagtctctaagcccccttttcaggccaaccatgatcagatacggcatttccaacataagagagctttttggccataaggcattcaccatttgctcactaacagataaattttttatattttcagattgatctcgaaatgatctacagaaaccctttgtgcaggttggagcagaaaaactagtgacgaaatgggagtgccaataaa

SEQ ID NO: 84847 - DNA, 116 bp, Heterodera glycines
atgacaatggctttattgcccctcgccttggctgacctgaaccggctgaccatgtgggccgccttcgaggatctgaaccgggtcgaactgaccagtcatttggcgaaccccaacca

SEQ ID NO: 84848 - DNA, 968 bp, Heterodera glycines
actgttcgaccagggcgggtgccgatcggatgagcacggacgacaagtgggcaaacaaacacaccattaagcatattatttttctatgaaatttgcaaggttttcggttcttttggggaatagagatttttcagaacaaaaaaaattatgtcaaatttataaattaaaaaaataataattttatcaaatttatttaacaattaaaaatgatcggagaccaatagacaaaaaatcagccaattttgagttcaaattgattataaaaattaattcaaaaataattataataattccaaattcaaatatggtttcccttttcgctttttcttatttcctaattttctggccataatttattttgttctgactttccccccccccccctgttcaggttgccggcattgagttgccattcgacacgtgcaacgtggcacgcacccgttcgctgaacccgaaaggcgtgttcgtgtccaccaccgtggtcatctccttccacccgcaattcgtcaccaaagttgaccgcgcctatcgcatccaatgcttctacatggaggcggacaagaccgtctcctcccagttggaggtgtccgagatcaccacccaattccaaacgcaagtggtgccgatgccggtgtgcaggtacgaggtgagtactcactggttggggttcgccaaatgactggtcagttcgacccggttcagatcctcgaaggcggcccacatggtcagccggttcaggtcagccaaggcgaggggcaataaagccattgtcatgttgaaattgggcagttatagtcaaaaaacagatttaattacctataaattaatcaacatttgcgagtgttagatctatcaaaatttattaccattattaaaatgaaaaacccttttctaattgctttttattcccttcagtttgccaccattaaagacaggtgtaccacaaatggacttgcgactcggagacg

SEQ ID NO: 84849 - DNA, 486 bp, Heterodera glycines
atgataaaatcgactggctcggccgcttcgcgccctcgcatcattttcttggcttttctccaatctctgggactaaacccaccagcaattcaatcactgggactcaacccaccaacatttcaatcactgggactcaacccaccagcattccaatcactgggactcaacccaccagcatttcaatcactgggactcaacccaccagcatttcaatcactgggactcaacccaccaacatttcaatcactgggactcaacccaccagcattccaatcactgggactcaacccaccagcatttcaatcactgggactcaacccaccagcatttcaatcactgggactcaacccaccagcattccaatcactgggactcaacccaccagcattccaatcactgggactcaacccaacatcatttcaatcactgggactcaacccaccagcatttcaatcactgggactcaacccaccaacatttcaatga

SEQ ID NO: 84850 - DNA, 168 bp, Heterodera glycines
atggaggaccgacaaggccaattgagatcacgaagggcacaaacacaacagacagaaacaacggtggaaggaccaactgacaacagaaatgggaggactgggggagaagaaacgacggcgaggactcatcgaaatgggggaccgaatgaggcgagttttcatggatat

SEQ ID NO: 84851 - DNA, 710 bp, Heterodera glycines
atgtgccgaaaaattgttagaaatctggttttttgattctgaatgcactgaaattttcaaattgtttatgtttcccacaaaattgtttaaatcgattgacctataaacttagaaaaaaatcagaaaattttttatgaaaaaattccaaaattacatgttgtaaaaatttttgaaaaacttattaattcaaataaaaaaaaatgaaaacccccttcaaaattttttggactttttttccaaatgttatgttttttggaatttattatttcaattgactgattttttttcaagtttatcaaaaaatgataaatagatttaaaaacacattattattacgaaattgatatttttagacattctcaagcaattaattaattttttcaaagatttttttgcctttttaaaacaaatttcaaaaaatccaggtccaggcctggatccaggtctcgaggagcctggatttttcctggacctggattttcctggatttttgtccaggaaatccagctccaggtccaacatggaatccaggttcaggtccaggtccagacttttttcaaaatgtcgagcttgactaatgtatccaaatccaaatccaacatcaacactttttcctcatgtgccgcaacacaaactacacaatgagcgaaaatgtttatttgatgaaacgtaaacgcaaatttataactcatttaattatcaaaaataaa

SEQ ID NO: 84852 - DNA, 125 bp, Heterodera glycines
atgaaattgagtctgtccaacctgcttgttcaaaacgtggtgaaggtgttcgatgccctgttcactgatccatgcgaaccacccccagcgcttggcaaagtctggcccatgggcgagaagccagt

SEQ ID NO: 84853 - DNA, 416 bp, Heterodera glycines
gtttcactggcgaacacgcaattgcctgccgagaagatgaagtgtgtggtggagcattcgctccgagattatcttatggtctctctgctggccaattgagccaagactcagttggccctgcaggaaaaagtcacttcctcgtaaagttttgaccagtcaaaccgttgcggaaagagggaaagcggaccaataaacgtgattcgagattattgctttgtgtccattctgtcattgttttgttactccattttcgttattcgcagaactgttatcagaaattcatgtatcatatattatcattttgacaaaaattgcctaaggacaaaccgccaaaaaccccactaatttaaaaattttgccgatattttcccttgtaaaaactgaagagtcgatctcgagttaaaaagcattttgac

SEQ ID NO: 84854 - DNA, 141 bp, Heterodera glycines
gcgattttttgctgctttccgttgaagaattttccccaaaattaggggtgcatataagaacaagcagaaatgcaattttcaagggaaacattttggtggtttttgaatttggtggggaattgcaagcttttctcgggtatt

SEQ ID NO: 84855 - DNA, 1330 bp, Heterodera glycines
tcaaagaaaaagctggaaaccgacatcaatgatttggagttgggcttggacatggccaataaaacaaacatggaagcgcagaaaacgatcaaaaaattgattggccaagtgcaggatcttcagctgcaggcaagtgaaccacaaaatttggttttttttgtcgtgttaaaatttgttgccactagtgattaagttgtccaggcatgttttgtgctctttctgattttgggtgtctcgattatcatggagtggtctgatcaaaatggttttctagtattcccgttgatcactcactgatcaccggcatttttacttgaattacatttttggcggagaacggaaaaatttgctagttttttttcataattttttttttcaaaatggttcattcaggttgaggaggagcagcgtcggcgtgaggaacagcgagagaactttttgatgagtgaaaagtgagagaacaattaaaaatataattaatattttaatttataaattattcaacaaaaaaaaatcttccaaaatttaaattatttaataaaattaaaaatatttgtttcaggaaattgaacattgtgctgtccgaacgcgatgaacttgttgtgcgccgagagcaaatggaacgggataaacaacgggtggaagccgaagtgcaggaggaacgggcgcgcaagacggagctgcaaatggacaactcacagctgagcgccgcacgacgccaagtggacaatgacctacaattgacgaaggcaaaaaatataaaaataaaatttgaataaaatatatttcaaaattgaaaaaatgacaattttaaaaggctataaaatgaaatgaataaattttttttattaattttaatttttagatcagattatgtttcttaactttagcctgcaaacaaaaaaaaaaaataaatttaattttaaataattatatttattaaaaaaggttttttttattaattatatatttttttattaaattatgtttctttacaatagcctgcaattaaacaaaagaaatttaattttgaatttttgttaaataaataatagtaaatttatgtgaaaatttgtgaaatgttgaaatgtttaaaaaaaatattttgaaattaatttaataaattatttaaaaaatgaataaatatgcatttgaaataaacaatttttagactgagttggacaaaacgctaaacgaactgaaaatggcggaagaatcgtccaaaaaagtgagcgccgatgtgacacgacttcaagaagaatatcgcaatgagcaacaccacaatgaccatgtggagaggcaaaagcgaggattggacgcgcaattaaag

SEQ ID NO: 84856 - DNA, 229 bp, Heterodera glycines
aatttgccgcccatccctttgcaattccatttgctccatttggtggacggaaggaatttggccggatgcaacgaggaaagcggccgcgaaaatgaaatgtgagagagtcaacgtccgagaactgaccttttggctaacaattacccaagctctcatataacttacccttttaatttgcttccatcttattccaatttctgttccacttcctcccgtcccccactcattg

SEQ ID NO: 84857 - DNA, 448 bp, Heterodera glycines
atggttatgcgagacggcgttaccacggaaactgtgcaagatgaacacaatgataaaggttgacccgttgatcttgatcattgccaaatcagttttacgatcactttttatgaaattggattataaaaatgaaatttaaatttttatggaagccttgaggatagatgctaatggaaatgcccctctattttatactgccaaatttgttgtagacctacacatatacagatagactttttgctgattttttcacgtgttcttcaacttgtttactctgtcttcaaggagtatttcataaacatttcctttaatttattttttttaaataattttattatttatattttagcgttggctcggaagtttcctattttccacgcataattttttttatttgtctttctttggaatatcattttatcagattatgcaatattttcataataaa

SEQ ID NO: 84858 - DNA, 1163 bp, Heterodera glycines
  unsure (1)..(1163): unsure at all n locations
atggcattatacattttgaaggtggaggtgaactgcggtgcaattgccagtttggcattggacagcaaaatcactgatttgcacaccgcgatgctgaaaaaagttggcataaatgcgtccaaggatgttgtgccggtcaacaagccggaccaggagttcatcaacatgttgcacttggcttggtaaaaattaaataaacatttcttactttgtttattaggcttcgaattaatgatttttaattcgagactcgtacttaaaaaagcgggaattttctcgcctctttacggacaacttaaaaagagtcggaagacaaaatgaaatattcaatgaatttgtagagtcaaaaaatgagaatttttgcggccaaactaaggaattggcctacaaatcaagagccaaaaaacaatttctcgcatggatctttagacttcaaaaatagattttcatggattcattaattgctcagctaaaagcatttaagcaaatacaacgtataaatttaggcaaaaattcggtgatccaaatgccatcgttgtgatacttcacttcatcaattcctcgccatacaaccttgattacacaaatgttgaaatggaattggcccgtgtgtcgaatggccaaataaaaatggactttgtctcattgaaagagggcaaaaggtagcaaattcaaattattaataggaatcggattttagatgattttattaagtcgcaaaaataagtacctaaaaaatcaattactaattattagggctgtaaattatatggaagaaaaattttaaaaaatgcgcataaaatatgtaaaaaaaaatcccgaaatatataagaaatatgtacaaaaacctcaaatatgtaccaaaatatgtaaataaaaaattatatggttttttggataaaatttttttttacaatggcgtgaatgttgaaaaaatgccataaaaagatatggttaggctttgaataacgcttcagctttttaagaaatagtaatccctaaatttattttaaaaataatttaaataaattttaaatttcagactgaatcttgaccccgaaacattcacacttcgtttggatggccgtgttgttgctgttgtcaactccggaacatctgcacttggctatctagcgaatcgagccgaaatggaaactcgntaa

SEQ ID NO: 84859 - DNA, 911 bp, Heterodera glycines
atgcatccgcgaaacattcactggcatgtggcactggaaacagacgaccatttgaccgaaaaaataatacaggtaaaaaaataaatcaaaattaaatttttttaataaatgatttattttccaggatgccattcaaaatcccggcaattatgtgctcaaaccgaaccgtgaatgtggcggaaacaattatttcgatgatgagattccaaaaaaactgcaacaattttcgcttgagcaacgggcggcacacattttaatgcaacgattgcatccgttgcaagttaaagtgggtgaaagttgagcccggcgcgggaatttgtaggatagaaaaattttgaatattcgattttctcttcttaattgtgtccgggattcctaattggccgtaatggatgtcgggtttgtgatcaacgacccccgaaaatcctagaaagggtgtttttcacggcattttaaaatgtttaattttttcgaaatattgggcgaccaacgccagtataaaaaatttttggttccaattgctggaaaatggattttttaattagttttccaaacaatttagaacttctttttgcgaccatacgctaagccaacattgtgcaacaccagcggcgagttgggtgtgtacggttttctgatgggcaacatggtggacggtacggtagaccgtaatgtgcaaagtggtcatctgttgcgcaccaaattggcccatgtcaacgagggtggtgtgattgaaggcgccggtgttggggacacgccatacttattctgaccaacagtatacctcaatgctagcagcaaacaattttgtattagacaaaattttggcatttttcccgatgaaattagtgtccaaaaaatgatgaatattttgtattagtgttgatgttgttttgattactaaatattca

SEQ ID NO: 84860 - DNA, 847 bp, Heterodera glycines
atattgctatcttgcctaggcgggattctgacttagaggcgttcagtcataatccctcagatggtagcttcgcaccattggtctatcgaccaagcacatgaaccaaatgtctgaacctgcggttcctctcgtactaagcaggattactatcatagcaacaggtctttagtagggtaaaactaacctgtctcacgacggtctaaacccagctcacgttccctattggtgggtgaacaatccaacgcttggcgaattctgcttcgcaatgataggaagagccgacatcgaaggatcaaaaagcgacgtcgctatggacgcttggccgccacaagccagttatccctgtggtaacttttctgacacctcttgctggaaactttacacattcaaaaggatcgataagccacgctttcgcggtccgtattcgtactgaaaatcaggatcaagtaagcatttgcctttttgctctacgagaggtttccgtcctctctgagctcgccttaggacacctgcgttacgctttgacagatgtaccgccccagtcaaactccccgcctgacactgtcatcggcgcgggtcgccgggccaccgggtggcccgacttaacaccaaaatggacaccctttcgggcgcactcccgttttaccgattaagtaaggaatcgatgaaagtagtggtatttcactggcgccttgcggctcccacttatgctacacctctcatgattcttcacaaagtcagactagagtcaagctcaacagggtcttctttccccgctaaatttgccaagcccgttcccttggctgtggtttcgctagatagtagatagggacagtgggaatctcgt

SEQ ID NO: 84861 - DNA, 2110 bp, Heterodera glycines
aaaagtcagtcccggtcccggtcccggtagggtttcctataaagaaaatatgattcctcatagtttttttttaattgatacatattttatcattttttaaatgaaaatcctaccaatttgagcttaataatcgcaaaaaccaacctttttttgttgaaaatctgttaacaaattgcacccaaatttttaaaatttcccccggcggcgcctatcggcaccgccggaggggggacttctttcccaaaagttttttgaaaaagcgctccgaaaaaaagtgatgtgaaaatcaaatctgaatttctattaatattcgatgatttagtccaaaaatgattaattgtttgaaataattgaagaaaatttgtttgaaaattttcattaatttaatttattaaataaaaaaccaaataattttgtattattttcacttgatataaattaaaatttgaatttttttttaaatttttaaattttttttgaatttttaaaatttcccggttggtcccggttcccggtttttcttgcggtcccggtcccggtcccgaaaaaaaatcgaggtcccggttccgaaaaaaaatcgaggtcccggttccggcttctcaggtcccggcaagtcccggtcccggttttggcaaaaattcccggtcccgtggcactctaaaataaattgaaccacgtaaataattaaaaatatttaaataaaatttaattaattaaaaagattttaaattattttcgaaataaaaaattaataataaataattacattcaaaaaggtgtcaaatgagttgaagccccgtttccgtgtcacaactattttggaacggccttatgtgatgttgaggacaaacattgaccacaatgacaaccaccaagacgcacatgaacaacaaaatgcaaaattcgaaggtggcactcgtttttggcattttttgtaaaatattggaaataattaattcttaaaaataataatttatataaatcatttaattgttttgctaatttgtaagccaatatttcatttttgtttaaggcttttgcattgatttgttgtctgagttggcccaagatcttggctttacctacacggcatgtcaaaaataaatttttttttggcattttcaaaaaacaaatttctgtgaattgaagatccacgttgtacgggacaacaaatacggtaaagacaacggtaacaacagttgggacggaatgattggtgaactgttgagaggcgaggcggacatggtgatggcaccgttcacggtgtgtgctgtgacgaaaatatccggcataggttttggacaatgactgaattatatgcgtccgtacaccacactaattaaaggaatttgaaaattaaaatttttcaaattttattttgggatttaaaaatttttaaaaataaaaaattaaattttgactctgggagaaggaatgaactaaaaggggagctattatagtaagatttatcctcctaaaggcatgcagcatattttttaatctaaaaattctggttctaagaaaatatttgcgattattcattatgaaatttgaaatctattaatttaaattttattataataaaaataaataagtaaataaatttttgactgtgtgaaagtagatgaacgaactgctacggcatttcaggccaattttcggcgtgccgaagtggtcgacttcaccaaacccttcctgtcgctgggcatcagtattctgtaccgtatcccggaagactaccaaccggtacagtatgccagccattccttctcccctctgctgtaaatccaattattttccaggacattttttccttcctgaacccgttgtccttggaaatttggctgtgcattttgctgtcaatttgtggcatcacttttggaatgtgtgtggaattattcgggaagggaaaattttcaaaaaattctcacccctccacgatttttcaaaaattaggtatcttgtagccaacgtaacgccgtatgaatggaatttgaatttttcctgctgcaccgcccgtcggccccgtccggcggcccgattttccaccgttagtgccgcgactgctccaacttcttctgctgctggtggtgctgcaccggaagaaaag

SEQ ID NO: 84862 - DNA, 718 bp, Heterodera glycines
taatctctcatcgcacttcaactaaagaaccggaatccgcaaccccttcggcggggtgaccctcactttatacaatcccttatacttcaaatcctccggtctcatccaattaacattaatttcatcagtcttcggtataataatttcaggtaatccaatcgggtaagctgtaccgtaattcaccgacggatacagactcacaatgtcataaacactaatctttttcttctcatccgatttcgcatacaatttcatcggtccggtcctccctcccgcataagccatccgcggatcaataggccccttctcgttccctctgtcgtcgaagaagtcccgcatctcttcatcctttttcaactccttctcaatttgacagccctaaaaattcacaataaaaatgtaaatgtcaaataaacttacacaaacttcttcgacgtccaaagtcttccgcagctccgccaatctctcctgcgtctcatcattcaattcctgggccgtccttcctccaatcagttccgccgccgggtcataacagttcatacatccatgtatatagcatcccataacttcaatgcatttgtcgcgccctcccacattcgcaataaaaatccatccaatttatatttcccaactttgacctcccgtccgttccccgcgtgccgtatctcaattccatcccgcttgctccgccactccaaatactttattgccatcacgc

SEQ ID NO: 84863 - DNA, 1369 bp, Heterodera glycines
aaatacgtctgcttttttaatcgagggaggaagttttgtattgactgtgagtgcttttacgatcaggatgtttaccacaccttggagtgccgggcgagatgttattattgtaacaaagtgggaggagtgccatgtgaaaaggagaatggagttaaaattgagtgcccgaagtgccatcgctatttttacaattgggagtgctacaattatcatcagggacatcagacttgcagattatggagacgttgcatgatttgtgaaaaaacgtatcgatttaacccgaagaaggatcatgaatgcggagagacttattgccaactttgtagtgtgagccatgaccccaagcggagttgttatattatgccgatcgaggaaaatgaggacaaggatgtctacagaattgtagtttgggtaagatttaataaaacaacacgttaacaaaatagatattgattttcaggattcggaaacatcgcaggatacaatttacacgggggatcagaaggagcatgtaatcaattatatttcggtgagagttacgtgtacggaatgctgtgacgacaaacataggacgaattgtaaaatttgtggggaggagaggaccaaggattggagtgaggcggagggacatgacccaacgaaggattttgtagagtggatattaacggcatttaccaattacgatacgtacatttttgcgcacaacgccggacgatttgacggtaaattatcttttaaaaatgttttttattttgaaaatttcaggacattttgtatttaactatctctgccgtaccgggaagaacccgataccgcttatcaatggactcaaaatttatgaattcaaagtgcgaaactcgaagaaacattcaatgctgatatggagagactcatgcttattaatgccggtgaaactcgagtcgcttaaggcgaccttcaatttgggctgtgaggacaagccctttttcccgtattactacaataagaaagaaaattatggagtttgtttggaacatctgccaccaatggaggactattcaccggggtctatgaacaaggagaaatttgcaaaatttgaaaaatggtaagaaaagaaggacaaatcataataaaaattctttttcaggtacaacgagaacaaggggacgcccttttatttggatgaagaattgagaaattatagcagaaacgacacggagatattgctgttatcgattattgagttcaggaggatattgattaacgatattacgaaaggatttgaccccttgccgaggagctgtacaaatgcgggggttgcgatgaatatttttaaggcaatgtttttgttgacggagcagttatcgattgtgccggagaaaggctatga

SEQ ID NO: 84864 - DNA, 858 bp, Heterodera glycines
atggcccgcgctcacctggcggcgctcacctggctggcgctcagttggccgtgcacccctcccataggtatgggaggctaccgtaatccggaccttttgtgtgcactaactactgatggtttcaatctgcaagaaattagatcggcaatatgtggttgtaaaaaacttttgggtaatgaattattttttgaagtgagtcaaacaccgtattagtgctttgctgtgccgagaaccggcaggcaatggatggctttcaatctgcaagaaattagattggcaatatgtggttgtaaaaaacttttgggtatggaattattttttgaagtgagtcaaacaccctattagtgctttgctgtgccgagaaccggcaggcaatggatggctttcaatctgcaagaaattagattggcaatatgtggttgtaaaaaacttttgggtatgcaattattttttgaagtgagtcaaacaccctattagtgctttgctgtgccgagaaccggcaggcaatggatggctttaaatctgcaagaaaatggaaaatatgtttcatattttattgctattttaggtgaagggtttcttaaggcaagaggacggcacgagccaaaaagtggtcaacgaatattatgaaaaatatgatggactaaatggatttgctgaatttattcggaattgggcctttacttttttctgtttccatgcctttgatgatgatgacacatctgatgaagactaatttcgttaatatttattctatgctctttgttacaaaccgataaacaaatccatcagggttatttgaacgattcaaaatttgcataatattttcgaaacccaatccgacggacataaaataaa

SEQ ID NO: 84865 - DNA, 388 bp, Heterodera glycines
tttcttgcagatttaaagccatccattgcctgccggttctcggcacagcaaagcactaatagggtgtttgactcacttcaaaaaataattgcatacccaaaagttttttacaaccacatattgccaatctaatttcttgcagattgaaagccatccattgcctgccggttctcggcacagcaaagcactaatagggtgtttgactcacttcaaaaaataattccatacccaaaagttttttacaaccacatattgccaatctaatttcttgcagattgaaagccatccattgcctgccggttctcggcacagcaaagcactaatacggtgtttgactcacttcaaaaaataattcattacccaaaagttttttacaaccacatattgc

SEQ ID NO: 84866 - DNA, 504 bp, Heterodera glycines
atgaacacagcaattgggacaatcaatccggagaaggacacggtggcggttgttgaacagaccaaaaccggctttgcccatccgttggacttcgaatttgaggatttgggtcagtccgaaaagcatcgaaaaatttttgtttactcaaaatttccaccgcaaaaaagacatttctcggtttttcctcctatgggacacggcatttttatatttaaaatatattttttcaagtttatagatccaaattaggcattttgtattccccccccaccctcccgaactgtttcaggtgacccggctgatgttctccaggacggcgccgaatcatatgacggcgccacaatgaaacgcccgtcggacaaaggcaaaggtgccaatgggaagagcggcatgccgaggaaacagtcgttgaaattgttcggcacgtccaacagcaacggcaaggtgtcgttattatggtgctatgacgttagtcaaaaaccatcaaatgaaaatattttttga

SEQ ID NO: 84867 - DNA, 469 bp, Heterodera glycines
atggaatgttgggatggctatgctcttaatgataaggcgggagagggttgggaactcgctattaaggattgcggaactcctcaaaaagacatgcaaaatcagatttgtgcatattttcactgtacgacggcgggtaaatgttttttttttggcttaaaattgcgctcaggtttcgaaaaaattctttatcaaatatttttcggaatcggaattgctaggcccaaaaatatgtgcaattggaattcctatgccaaaatttttttcggaaaccggaattcctaggcccaaatttttttcggaaaccggaattcctaggcccaaattttttggtgttacaattaattaataattatgtatatgtgtagaaggtgacgaccatttggatatgtggtcatgtttcgctaatattaatgcgggaggaggatgtgccagcgatgcttttgctccacgcatcacacagcctgagtag

SEQ ID NO: 84868 - DNA, 84 bp, Heterodera glycines
gcgacacacactttctgcgacgactgctggcgacagcacattggccaatgtttgagcaacggccgagtgccaatcagctgcatg

SEQ ID NO: 84869 - DNA, 2933 bp, Heterodera glycines
atgagtgtaatgcttaataccgaccagcagaagcagaatttggacaccaaaacatctcaggtgaagaggacatttagtgatttaaacaacaccttatttatgggtgtaaagtctgttggccagggatagggagacctgaaaacaatgacattcagaaactcgaagtgatagaaaagtgatttaaaaaaacaaatttaggaaaacggccaattgtcagattcacacgaaacggcagttataaaagcgccgagtggagggaacagaaaagtgccaaagaactgctggaagaaggttaacattgacttggagtacaacacgagcagagaaatttcgaggaggcgacagttggcatggcgtggcgaaagacgcggcggcgaaacgtacggacggagggatcagccgaaagagcagaggaagggaagcgcaagagtggcggaagaaagcagcgccaggaaagacgaagcagccgaaaagagggacagaaacgaggcacaaaaagagacggcaggggaagcggaagacggacgagcggagggaggaggagacgaagagacggcacggaagaggacgacggccccgacaggcggcacaaagacgaagaacggaccgaatgaggacgggacggagacaggcacggaccaacaacagcaacagtcgagggactactggtaatggcagacggggaaacggcacggcatttggaggggggtgaaatatggtaattataaataccagtgtcatttgtcaatatttttaatttaagtgtcattaattttcgtttttttgcagtgccgggccaagaacgacaagaatgccttatcggtcgggcggcggcggaggcattggcggaccgagacggtccggcggcggcacagattattggcacaagaaaggcggaggaggcggcagtggtcaatcggggagaggaagtgaagacgacagggaacgacgtccgggcggcagttattaccaacagagaaatgaccgatggcagcggaatcaccacccaaatgcaccgccgccactgaatgttgcacaacgacgggcgcggggtccgttgcccgactgggacgaggtgaactttgtcctttctatgttatatcatttatcgtattgcctcaggtgcaagaagtcgcggaagacagctttgattacatggaaataatggagagccaatattcgtaagattgcgtatcattgaagttaatctaaaatattgtattaaattcagtcaatactatgccctttccgccgtttccccttttgacccttcgcttggagtcattgcttcagtcgcacatccctcgacacctatcatttcgtctgttgccgttaccgccgcgcatgccaacgtggtcagtgcgtcgaccgttccgcccgcctctctcctgtcccccaccggtctcatctcctttcctctgacttctcccactgcgcttcctccgaacgcggtcgtcgtggccacctctgaccaattcccgtcctctacgggcgccactcagttcactcccgtcgttctgactgcgcaattcccttcgaatgcgctattcgccacgcgaccgccgaccaccgctccttttatcgacgaacaaaaactgaaggacatcgtgcggtcgcaaatgtttgtacacctagccaggcccgtaaccgaaaaatggatttggcaagggttttttaatgtcaaaaacccagactggttatgggcctgatgccacgtagagtaaaagtgttcttttcgttaagtgagtactacttctccgctgacaacctccagaaggacttctttttgcgccggaaaatggacatcgaaggctttttgccactcggtttggttgccacttttccgcgcgttcgttcacttacgctcgaccagaatttcattgtctccagtttatgtgacagtgacaacgttgaactgagcgaggaccaccgaaaggtgctgacaattacagtctgatcaacatatttattaattttttgaaggttcgaccccgtctaaatccgcaacaatggcccctcgtggagtcggcgacgcacaccgaagcgcaaaactccccaacgacggcgagcggtgctgttgaagaaattgctgtggacaacgaggaaatggaacaaaaagaagaccagcacgaagaaaaggagggggcggaagagggaaaagagttggagcgaccgcagtcaaatgaacaacagcggcaaccgcagccaaattcatccgaagaaatggagacaacaatcggcacatcagaagaggaacagagacaaagcgagacagtcgaagagataatggaggagccaaaacagcagcaaaaacaggaggagaagggggaggaccaagaagggtggaaggaagtgcgcaccaagcgcggaaaccgcaagaaacagcagccgaacaacaaacagaacaagggcaaggagaacagcacacaccaacctcaggtcaaacaatgacataaaacagagacgaatcatctggaaaagtcccaattttcactttctttaggttatgcccgtcggttgggtgcaaagtacaaaatgattcgaagtttggaaattggcgttatgtgatggtcagcgcgggcaaatattattattttattctttttttgattctgacttgaaatgccttccgttgtttgttttctttccttttttgcgtattagcatcccttccgttgttgacttccatttccattattttatgctgtttctccatgaaattatcaccgctcatcgaaaagaaaaatcaaaaatttaagtcacattttactcagtctttcgagttttctttgctctgtatttcgagagaatgtcatggcaaaacataaattacaaaacagtttaatttatctccctcccctccacgaaaaatttactttcgattgccacccacatatatcatcaatttgaaaattgcctatcattgtataaaa

SEQ ID NO: 84870 - DNA, 1869 bp, Heterodera glycines
atgtgccagctggaaatggtactaccccttcactacgcgccgtttgcctccgattttgaactgatccctgatttccaacccgacttcaacatgcccacgaaaccgttcaagccattggagcagttaatgggtgtgtttccttctgctagcaggtgtgttgatatgttttgttttgttccccgactggcacttttataattattcatttgcagagctcatattcctgacgggtggcgttggctgatgaccgactcaagttcgccgataattgatttttacccggaaacttttgaaattgatctgaacgggaagaaatatgcttggcaaggcgtcgctctgctgccatttgtcgaggaaaaacgtcttttggatgcacttgactcggttttacaatttttttttcaaaaaacaaaaaatattttaggtgtacgccactctcacaaccgatgaaattgcgcggaatgccaccggaccagaccgtctttttgtcggcaataaacacaacttgttttcgctcgtttatgaggtgcactcccaaaagacgacaacttcgataaaagatgaactaacaaatgatgacacaaaagaaacaagcgaagggacgcgagaaactgaaggagaagccgaggaaactcaacaggcggaaaatggtaaattaaaattaaattttgactaccaatcatttgccatataaaattgttttttaattaaaaataggtgaaagcgaacaaatagcgaaaaccgaagaaacgacggcacaagaggaacaagcgaatgaagaagctatctcaaaacctgaacaggcaccgaaacagggtaagccatttaaggcatttcctctttaaatatcgagatttagaattcgagactgaaattgaatttgtcgatgacgaagaaaagaaatgggtgcacatcgacgcagtcaaagcgtatgggatgtctggcgaagtgtcttatgacgtcgaagcactcgcttttggtgaggcgcataggtcgctgttcagaaattcgttggagtttggcgacatcaaagtgagttgttttacaaatagcctatgtttcaataaattgcatctcttcaggagaatacctgcattatggttcggtttttatcatttacaatgttcgatttatattttttgtgcacaggttgagttccgagatccccaattcccaatgcacttcatcttcaaagccaacaggctggacggcatcaaggaattgcctcgtgtgctcaaaccgaacgattgggaccaacgacggcacggctccttccaaccccaaatcggattcaggttcatcgtcaaattgttgtctcgtgagacaatgagcacttgacatttacagtcgtgacatcccacgtgcaaatctctccatggcgggccatcgtacgctcaaccaccacataaacgacaaccgtcgcagttgtccggcctctcttttctcagtgcaaacatcgccaccagcgcacacacttccatggcacatgagcacaaactcaccacaacaacaacatcaaatgcagtaccaacatcagcaacaatggcagcagggtcaattttacaacgggcaacagcagcagcagcccgtgccgttgttcagttttgggcagatggcaatgcccccgcctccgccgctcccaccgcaaaattggattactagtcacccgccaccacaaatccagtctcacgtgccgtacgggcagcccccacctctaatatcacagccaaggaatactcagcatcaccatcgcagaaacgacaacaacagaacttacaataggaaataattttcatcaaccgctgaatagcggtcacgatgtgattaattttctacgaaaatggtgttgccagaccctttctgaataaa

SEQ ID NO: 84871 - DNA, 350 bp, Heterodera glycines
atgtgtctttcaacggctgcagctgacaataaagttgtttcaaaatatgacgactatcagaaggaaatgcgtcttaagcaaatcgaacgcgcttttgacgaggcggtgagtcaattgggcttaattttcacacattcgaatttgtcaaaagattagttcagatgcctaaactgttgcacggctcctacaacaatttgatggcgttcctcgacacgaattccttccgttttgaagacaaagtttggctctttgagtcagagtgagtgaattgcgttcttatgagaaaaaactaattaaaacaaaggcaattttagtagggtaatactggagaattggtgtcccggagaaaa

SEQ ID NO: 84872 - DNA, 451 bp, Heterodera glycines
atgctgaacttccgcaattttaaccgccagtacagactgaaaaatgtaagtgaaatttggttttttatttttccgcatttcgatcttttcagttgaaatggtacgacggttactcaattttttacgtcaatggcgagggattggtctacaaagtgaccatccagcggacaatgcccgacgactcgctgaaaattgcctcgcttaaggacaagacgaaggagttcgtccaacgggtaatgacagaaaaatggggaaagggaaaatacaatctttaaaatgtgagcttttgttaagatagaattaaactaaaaatttccatttttagaagattttgccgaatccgagcccaaactgtgcgggtcagcaccagcaacaacagttcacttcagcaaattgcgcttcggaacggccgccgcgacaacagagaaacgatgggaggaggaaggaatga

SEQ ID NO: 84873 - DNA, 348 bp, Heterodera glycines
atgaggtgttttttgaataatttaaattaaatttaaaaggttatatatttttttcaaattttagcacggaatatcgtcaagcatttcgggaagaatttccaataatattcaaacgaaatttaaatgtaattcaagtttctccgcagcaaaatggaaccacattcgctgcaaacaaatgattttcaacgctataaagataaaaattattttcgccgtttaaattgaaacatttttagtattgtgtaatctttaaattcgtaaactccaattttcatgtgcttagatttttttctcaaaaaaaagaatgtaaaatttcacacaaacaaattgagggctctaattaataaa

SEQ ID NO: 84874 - DNA, 353 bp, Heterodera glycines
atggctgatttgagcaatttaacggtaattaaatctgttaattataagtattatttttattaatttagtttttattggaattcgcaaatgaaactccaaactggaaattgatcagctgtgctgccatattgggtatcatcgcgaccatgggaattgtcctcaatttttcagtcatttatgtcaccatcaggacaaagtaattaaatacctttttaattaatattaatatttattattttaggtcactcaatggcaccgttaattaccttttgatactttgctcattttttgaaattattcaccaatctggtcattttttgtttgtttataccgcattttctggacaaatttaa

SEQ ID NO: 84875 - DNA, 850 bp, Heterodera glycines
atggaagagcaaagaaaaaaaaccgaagtaaaacggcggaaaggacgaagaaatgaacgacacaagcagccaacttcaagtgttcttgccggaattcttgaggaggacgaagcaagattatggggagaagaaggaagcaccgcttctctcgaaggaggaaaagttagcattttgttggtgctattggagagcttttcctctcatcaaagtaatttgttagggaggggacaaggaaatttgcaaaaacatggaattttaatttgtaaatttatttatgatttaataaaaataaattcgtaggttttgaaacataacattaggtgcattttgggtttttaaaatttaaagttgctgaaataatcaataaatttgaaattcaagtcactggcttcgggaaacaatgtgcttcaggttaaggggatttttaaaaaaatttactaattaatacatacagtctgttcaaaaattattgaattttttataatttttgggatttttatgactttttttttcactttttaaggcaaaatttgaatttcagcaaagattgctgaaaaataaagatatgaccggtaaaaaggcaataaaatccggcagaataaattgttaaaaaatttgattttttttaacttttggctaattaatatttaagaacttttttgcttgtttctgacttttttgcgattttttatggcttttttagtcgacttcttggagatttttcgtaatttaaatttccagccctaatcatggtagaataggtcaaagtcccctgtggtgctaaattttgatcattgcagatcaccctgatggagtgatctggtcacggtggtgcaagtgccttttttga

SEQ ID NO: 84876 - DNA, 486 bp, Heterodera glycines
atggcttaccaattgacgccgatcattatgttgcgttggttgttcgttgggcttgtcctctcctcgcatcaacagatggcacaaatgggtcgaatggaaggggatcaaaagcgcggcatggaaatgggccaaatgcgcggcatggaaatgggccaaatgcgtggcatggaaatgggccaaatgcgtggcatggaaatgggccaaatgagcggaatggaaatgggccaaatgcgcgggatggaaaggggccaaaagcccggcatggtcataacacaaaaatcagaaatggatatggcacaaatgcgcggcatggacggcgatgatggccagatgcgtgcttcatgggcagcatcgcaaaaattgttacgcgcagaggaaaaggaaaaagggccgaaatcgcaaaaaaatgaaactgaaaaggtgaagaagacatgcgaaatgagatgagtttggtaaaacggaggacaatttcaattttaaattaaa

SEQ ID NO: 84877 - DNA, 437 bp, Heterodera glycines
  unsure (1)..(437): unsure at all n locations
atgctacgcacactcggagtgtggcgcaaggagcaaatgcgaaccggcgacgctggacaggaagaagaaggtgggcacgtgcgactgcggcgtgtgcgggggattccaactgttattgctgtgtgagttgggctaattaatgaaaatacattaaataatgatttatgaaattactgcgttttttgttttgtcatttctattcaatcagcgaaaaggtcgatcctatggatcactttttgacttttgttttgcttaaggcggtctcaacagtggcgccctttcccttgacaaaaacattgtgccgcgggagtgtgccggactgaaagatgcttgtgtcgaaaagccattattcgtgngcagcaaatccaaaaagtgcgactgcgaagtgggcttccaaaaagcgggctttaaagaatctgaggggatgacagaggaaa

SEQ ID NO: 84878 - DNA, 2656 bp, Heterodera glycines
atgcaacaaattaacggaattattatgaaagtgtttcctttttaaagaatggccaacatttttgagacattccatcatataaaactcagatttccgtttcaatttaccgtagtatttcctaaaattatgcccatggctcacaaactctacaaagagggccttcaataattcacaatttttgaaaacccaaaacccttttcagcctcctcccgccagtgagtacgaaattcggtgttacgcctccgcgccaaccgacgaaagcggcgaatcgtcgccggcggctgccaacccaaagccaaaagcgatgcaaaagttggaggaggagcagcgcaacgaattcctcggcgagtacggcctctaccgcagttcggcacttcaaattgcgaagaatgtgatgtccaaactgttgcaggcgcacctagtggtaagcagccacagtttctgtgttcttggatgggttttggcatttaattttgaaaaatgatggaatggttaaaaattaatttaaattgaccattccgtgcattgcgatggggggggggggagtcggggtgtcatgacaattcgtacacagacaatcgtacaagcttaaggcttaagcctaagctttaggcctaggcttaagcttatgctttattttgcaaaaatttttattgtatgcgttgcaattgacccgaggagtcgacggacgactaaccataattatgttttccgatagtggaacctatgtttttcctccactaacatttgtcattatttgccaaaatctattccgcaacaaatgtgtttaggacgacgattctctggagacgagtctgaaccaatgggacgccatttttgaggccatgaaaaaggcgggtgccgcggcacaacaaagaggcgcacagccaccggcgggtgaagaacgggcgacggagccgaggggaggcggcggaggggaccaagggtcgtcgacgcccccgcattcggtgatttaactgtcataattcaaattgcataatttttcctccctttttaagcctccgacaaactctgacgctggtccaatgtcgcaggcgttggtcgaccgtttctggcgcggggacgtgtgcctgcagggcggcacggggtggtggaagcacgaggtgtgcctgggccgtacggtcagccaataccacgaggagacggcggaggacggcaccaaacagcgacggcagaccattctgctcggcaaatttgacgaagcggtgcacaaagtggggattctttgcggtttcgaaacttttttttgttggaaaaacccaaatttagtggcaaaattctaaaaaaaaatttttaaaggcatgggccacagaacatcctggcaaagccgtggagcgcaaggtggacggatcggtggttcaagtggcacacatgtacacacagggcgatgtgtgcacggagacgggtgcccatcggtgagaaattttcaggagggaagagaagagcacggttttggtgcatttgagaaactttagatgttaaactgttcatgtttgttttttgaattttaggctgggaagaaatgctcattcttaatcattcccattttttatatttcctctatttttctccagggactgtcaggtgcgcatgaaatgccgagaggacatcaatgcccagaaggtgttcatctacatgttggaggttggtttctttacttgtatcattaaaaataaataaacgaaaagcggttttaaaagtgctttttttgtacgttttgctattttgatttcctcacgttcacggtgttcatttcaaaaccaacaatacgtttttacattttgcctttttttgtcgttgtacgttttgccatccccccccccgccctcaaattcttttgcttttttccgtttttcaatcacttttttttcgctactaaatttagcccagcacttgctcctacgtggtggtgctcgagtcgtccctgttctgctccaaactgcagcgtgtggacgagttcggactgttgtcagtggacgaagcggcgaaagcgagcgttgccgaaaaggaaacggcgcccgaacagcaaaccgacgaccggttgatgaagaaacgcacttttggcgagaacacggtggtgttggacctggcaaatcaggtgggccgagccaaacggcagtttattttggtgttatcagaccaatgttcacaaatgggttgccagagggacggtccccatggaatttagggcttccagtagggaattgagtggaggtaccatggcgagtgttttccaggcctgggtttttttctgggtccgggtccagttcattttacggcaacctacattttcctggttttttatccaggtccaggctttttaaatgtcgattagtcaaaaatgatgtgatgccattttcaggaggaaataatgcgcgtggtgcgacaactgctcgaaggggccggcgatggccaagtgtttgtcagtgcggccaaactgaaaattggcaaaggcgaagacagtgaagaggacgaagaagcggaacaacaacagcagcaagagggaaagagcagagaaacggcggaagccgaagcagaacatggccaagggagtgaggcggaaaaaggcattggacgagaagagcaacagggacagacacaggtgacgacagacaacgagactgaccgcgagaga

SEQ ID NO: 84879 - DNA, 755 bp, Heterodera glycines
atgagcaaatggacagaagtgagagggacaaatgccaaagttattaacgcaattaccgaattataaaacatttgcaggatggcggccaacgagttcaaatgcgaaatgacgaaaggacggcgacagacaaaggaccgccacggctaaatttgtacagaaccagccaaatcattgcgcagttgcccagggatcctccgcccgaattagacgaggccgacgaatgggaagacgaacggggcacaaatggactgcacggagatgggcaccatgggcagcctcctcctccgccgggtgagtcacccactttttacaattcctggccaattacacttgagtcctttttcatgtccagttcgtccccttccccctaaatgcctcgggctttagccaattagcaactcgctaatatccattccatctctgtccatttcagcaccggcccctttcgctccgttggaagtgtttccgcttgcgcttccctcctcctcccgctccgccccgtcctcctcttacctccgcttgttctcctcccagccgaccactcctcgccacgctcctcccaatcatccgacattcgctcaaccgtttatggacgacgaccaatactatcagaggcatttgcgacaacggcaacttctgaacgcgctggaggggtcgattaatacgccgacagtgcgcacggaacagagacggattattatggagacagaaatgacaaatttggtctcaaaaagataacaaaatgaaattgaaga

SEQ ID NO: 84880 - DNA, 151 bp, Heterodera glycines
tttacgcgtcccatgacactttacgcgtcccatgacattttacgcgtcccatcacattttacgcgtcccaacaacactttacgcgtcccatgacactttacgcgtcccatgacattttacgcgtcccatcacattttacgcgtcccaacaa

SEQ ID NO: 84881 - DNA, 137 bp, Heterodera glycines
atgatggcttttgtaaaatctgagctcgcccagcagcacgccgtacgagcccaacaattggcccgtcgaattcgcgccgtcgctgaggcggcgccgtcgtcgcttcgactcgccagcggcgccgtcgaacttcaaca

SEQ ID NO: 84882 - DNA, 1753 bp, Heterodera glycines
atgaggaatatctataattttttggaaaccaatttgttaaatgaagaggaattgaattacaaaatgaaagaggaaaaaagtgaggaaaatccatcaaaaaatgaaacggaaaaaaatatttccaatctccgaaaagaatttgacggattaatggaaaatatatgcaaaaatgccaaagaagaaaaggcaaaattggaaaaagcaattgagattgaagtaaaaagttcctgtttatttttggcatttctatacaaatgtcccatttttcattgatcatgtttctgtcttcttctcccattttttccaatttttcgatttattttggaattttcttttccattttcactgatattctttggaaaaaagtaaatttacaaaaatgggtcctcaaaaacattaactgttttaaaacgtgcagcccgaagaaagggtaaaataccataataaaatttaagtttgaattttgtttattgcgctaaaaaaccgccgcacactcgactacggcggccagtaggtggggcgagactacgggctccggaagcacctaaagtatttttgtgatttggcttatctaatattttttatgtcattttcttagataacttttgtaaatttctttttttccaaaaagttctttcggattcgtgggttacctgcagagaggaatcgattggtatttattttgtcgcaattccatgcgtttttactagttggacggttcagtcccaaaggcatttggccatttcagtcccgggtctgtaactcttcagggattggttgccgcaaaaaaattctttcggattctttcattacagaccgagagctatcgattgatatataatttggccattttaggctccgggccctatgaccgatatttaccgagccaacttttggggattttaatgaaaaaaataaataaaaaatatttcttaaatacctatataagtaactgagcccaaaacttaagacaagcgaaagacaagcgaaaggaattggagcaaagaataatgaagctttaccaaattcgaattgtaaaaaaatgattaattttaatgaaaaattgtttcaaaatcggagattgccaaagttagacctttttttaaaattttgagagattttttaagcccgaaaatgagcattcatatttcataacttatgaaaaattgaaaattcggcgtttaaattttacaaaaaaaagtccgaattaaaaaaaaattacaagaataaaaatttaaaaaatttccaagatggtagatcaatgtcaaaataaatgtaccaaattataattattgtactccataaataatgtgacttaaactcatcaaattaaaaaatttattcaataaaatcaggataaacttttttttgttgttgagtttttggattttattaagactcttattgggcagagtgccaaaaatatcgtaattaattgggcatttaatataaatatttattccaattacatgctgaaggtttgtttgaaattttcaatttttgaaataataatgacaataataaaataatttattaagctaaaagtccgaaggtgccgaaacaattgccaccactgatcaagccaatatttattgaattatattctccgaagaatttaattgatgttgttgaaacattgaatgataagtcgaagtatttttggaaagaaattgaaaatgaatttgattatttcgataacaatttgaataaagaggggaaaagtggagaaaacaaattcatcaacccaaaatga

SEQ ID NO: 84883 - DNA, 114 bp, Heterodera glycines
atgtgcaagagaaaagagttgaggaagaaaaattatgaagaaaaggaagccaatgaatacggtaagggagcgactaactacggtataataactgtaattaattatgatgacacg

SEQ ID NO: 84884 - DNA, 111 bp, Heterodera glycines
ataaaagtcgacgtagaagcctcaaaccaagtggaaaatgtgttatttatgcttaatatatcgaaactagtgcgcagaaaaaaaggcatatgcctcaaaagtcggtctcta

SEQ ID NO: 84885 - DNA, 2584 bp, Heterodera glycines
atgtatgatattatttcagtgttcaaaaatgaaagtcggctttattcactttatcttgagtttttgaccatcaccaaatcaatgaattggctgaatgtaaaactaaaggtattaaatgcaattttaaaattaaaaattggccactttttaagttggatttgttcatttttgtccaatggaccgatgccaaaatttccaattccgccgcgaccatcgcccggaaaaaatgtgccaatgtttggaagcggcacaaatttttgttttaccaactgtacgaccgttggcatgacgaaccgctggacgaaatgccaaactttcaaatttatcaatcgatttttttgagtgaaatgaatttattttttgaaaaagttttggagggaaagcaaatgaaaagtgaaaaagcaatggacgaggaaattcggaaaataattgaaaaagcacagaaaaaatacgacgaaaagaaagggacgagaaaagtgaaaggaaaagcgaaagaaagtgacaaaaacggggaaaattatgcgaaatttgaagtcaaattgggcgaaaagaatgttgaaacactgagcaaattggtggaggaaaacgccattttcaaaaaaatattaaaaaccagtaagaaaaagaaaatggacaagagattactgtagattagagtttagcgttaccagcagtaccagtaattaattacctttggtacggtaccggttctttcaatttttctaatagcggcggtaccagtactatccggtaaatttacactggtaagaatgtgaatccgagctgatttttcatgagaatttgggaaaggggaaagggatattttgaacatttggccaatttttaaaataattctcttttttaaattttgctataattttcaatgaaaatctgttaagaaatcggcgcaattccaaaaattttcacggcacctaaccggtaccgctcaattgtactttagataattagaataagaaatggcaaaatgttaggcatcggcgggtggtaatcgaacccattcgtcaacccaatccgtgggcagatcaaccattgcgcttacgaggcgaggcatatccgccttttttatatcttatcaaccctcgctttaatgatttaactacccaaccagcttcttctttttttgaaaatttactttaattacctaattccagtttatgaatcatttgttgatgtaaatgatatgccagaatatttgggtaaagaaacgacagagcaaatttggaaaacattggcaataaaatattttgaaacagaggaaaaagaaaaagagaaagaggaaaaagaaaaagaggaaaaagaaaaagagaaagaggaaaaagatgaaaaagaaaaagcgggaaaagaagaggaagaagagaaaaaggaagaagcgaaattaaatgcaaaaaagaaaaaacaaaagagaaaaaagagcaaaaacggaaacaaagaaacgaaagaaaacgaaataaaagcggacaatgggaaaaacagcagagaaacagaggaagaagaaagaagatcattctcaacagcagaagaagaaaaagagagttttgcaatgggaagagatacagaaagaaaagagcaaatgaaaacaattactgtaacaaaaagtacggtagaagaggggaaaggaggaaatggtaagggaaaggaggaaaaagagacagaaccgccaaatgaagggttgatggggactgaggaagacgaaggcgaaaaggaaggcacaaaactgatcaactttgccactgatcagttcctcgcattgaaatatgccgaaattgtcaatgcatcggcaaaagaacagcaaaacgatgacaccaaaatgacaagcgcaatcgaattggcaaatgttggcattttggccaacgaaattgccaaccgattggaagcgatcgaatggctggacgttcagagaaaaagcgacaaaacaaaaagcatttccgatcagtgggagagactgaaggagatgaaatactcggcaaaacattcttatgaaggcatttcgaaaaggctttttcagctgctaatggaattgtcgggggaaatggacaatttggggacgaatttggaggacaaatcggacaaattggaccaggaaaatgaaaatataaaatgggaaaattggaaagaaattgtgggaaaattgcactttcgaaaatttggcattgcaattgttaagggacgaatagaaaattgggaaaaattgggccaaaaacagaaaacattggcactttcgaatattgtcgaaaaaagagaaaaaattttggaagaatttgaaagaaatttggaacaaattgaaaagtcggaaaaacagcgaaaattgggtaaaataaattaaaataaataaattaaatttaaattaaaaaaattcttagacaaaaatattttttgtcaatatcaaagcgacacaaatttatcggaatttattgaaaagaaagacaaaataaattttagtgagaaaaattcgcaattatttccatcagaaaaatggcaagaaataaattcagtcaaagaatttgagagaacaaatttagaggaaaaggaaaaagtaaaaatttaaaaattaaagaataataaa

SEQ ID NO: 84886 - DNA, 1175 bp, Heterodera glycines
atgaacatggtcagaatcggtgaagaaaatgacaaaataattgtccaaaagacggcaaatttggaggaatcgctctacggcattttgtacggtttggagaaggaaaaccgcggcgacacaaacgacggactgacggcaattaggacgaaaacgatgctgatacatctgacggaacattttgtgaatttgcacaacggaagcgaacagctcagacaatgttttgaggggcaaacattcattcggttgcgctttaaacgattcgtcaaaatcatggaggaaaatgtggtggacgagggaaaggtggtggccgaccaattttggcacatattcaaaggtggcacggcacattcaaaaaataatcaaataaagccggaatcgttttctgcaatattgccaatgaacgatgaatgccccgacaaagagttctcccttttgcattcggcagaaaaggaccgcgttgacatgacctttggttggccaaattaaatattttttaaattttaataaattctttctttttttgcggcgctttttacaaaaactttttttttgggggggggggggtccggcggtgccattaggcgctgccgggaaaatttttgtaatttttaatgagatttgttagcaggttttgtcaaaaaaatgacaaaattttgaatatttttagcaaatttttatcaaaaaactgctaattttgtggattttcgggaaaatttagcaaaattttaaagaaaatttgactgagttacaatttaatattaatttcagattcctatgcactgatggagcagtacattcagttgttgtgggaagagaataagcaaaaatcggaaatggaaatgaatgaattgacaaaaagtgtcgaaattggagcggcacttttatactatgggcaaaaggcagaaaagctgcttaaatatgcacaattttatgtggaaaatgacatttttgcggacgaaattgttgtttatatgagcaaatttaataaactgatgaaagtgccaaaaagtgatgaccaaaatttggaggggaaactgtgccaaatttaccaattcatgcacaaattagtgaacgatgcgcaactgatcgaattaagcgaggaatggaagaagctgttggaggagaatgtcaaggaattaggcacggagccactggataagcaaattagccttgag

SEQ ID NO: 84887 - DNA, 507 bp, Heterodera glycines
atgagatcaaataattgccaattcattcctttattttctttttatattttatttttggcaagtcaaactttttcgaaaaatttgttcggtaattgtttttataaattcaaaataaattaataaaaacaattttttttcaatgtttccgcaggcatcgacaccaatcgtttggatgaatattacgccaaattgcttttcgatgacaatttgtcaattaatgatcaaacgattctgatcaatcgcttgtctgcttctcatctgcaccggagaataaaaaaagattttgaggaatttgaaaaaattattaaaccgaaaaagtcggccgattggttaaagcgcattaaaatacttaaggataaatttgaagaaattgaaaaagaatttgctaaggaggataaatttatgcaaattgttctctccaatctgtgccatttttggcagctgacaattttattagacaattttaaaagcggactttcaacgatttcattaaatccaattgagtaa

SEQ ID NO: 84888 - DNA, 1142 bp, Heterodera glycines
atggtccgcgccgaagtgaccccgaccctgatcaaaatgggcaaaatgggtttgccaaatgtgcgcaaatccatgagtttgctaggagcttattcctctgatcaaactccagcagcagttcatcttccctgcccttatttgttagggggggggggtgatcaatttggggaggaccatcttcccccgtgggaatgggagggatgcttccaagcggaccttgcgctggggatcaataaaaaaaattccatctcacgacggtgggattaatgggcaaccgatggacgacgacgattggtgctgaatggaatttcaaacataatattttcaaatattagcaatttagtgagccaatcaaaaccatagagggttcctaactaatttgttagcaattttttcgactttttttgccaaaaactatcatttattttccaaatgtgaacaattcgtgtcaatgttccatcaaaaatatatatgggtcaaattgtgccttctgttctctccaaataaatttcacttttacgtgcacatgtacataagaaaacgtgaaattacaaattacaattttgtgggtctaaaacgatttaacttttacgtacacttttacacaagaaaaacgtgaaatacaaattacaattcatttttgggtacatttcacttttacgtgcacatgttcactaaaaacgtgaaatacaattcattttttggtttttacacaataaaacgtgaagttgcgattaggcaattttctgtgtttttgtacactaaaaacgtgaaattacaattttgtgggtctaaaacgatttaacttttacgtgtatttgtacacgagaaaacatgaaatttaaaattacaattcatttttgggtacaatttcacttttacgtgcacatgttcactaaaaacgtgaaatacaattcattttacgggattttgcacaaagttttgcaggtaaagaatgaaaaaaataaataaactaaaaaaataaatatgtctatttagctccaaatatcatgaaataatgaaaaatgaatttccttgtgtcaaatttttgctgtgctcaaataatcataaaccgccggtcgttgttgtatccgtgtcatattattatgaattaagaatttagttttttagcaaaattatga

SEQ ID NO: 84889 - DNA, 611 bp, Heterodera glycines
atgctttcctattgggttcgacgatggtgctttaaaaattccagcgacaaagaaacaaaaatgcgaacggatttgcaaagaacagcgtcaaacaattaaatgtatcaatccgaacatcaaactcaaattatatgagcagctgggtgggtggtggaagagaattttttaataaaacttaaattatttttattttttatattaaatttgcctaaaaaattacatgttttcatgttcctaaaattagaagccctggggggtttaatttatattccatatgactcattttaaatgtttggtaatacaacttggctttgtcaccttgtttgttgccgctttcccattaacacctttgtttgcgctgatcaacaacatcctgggtcttgaaaattcgaattcctatggccgtcaaaaaattttaattttacaaaaattcttaattaaaattaattcagaaattacatggtttccttcaaatttactttttcatttactaaccctatctaatgattgattgatttcttttgatggtttttccactaattttttcaatgtttttatttatttaaagattactcaacaccttttcaatagaagttttatttttaaataaa

SEQ ID NO: 84890 - DNA, 1122 bp, Heterodera glycines
atggcatttggagtcagtcgtcagctgactttcgatgaattggccgtgctttgcccagacgaaaaagagttctgttacaaaacggcactgttgggcaattgttttgggaaatcagtgaaggcaaaactcggaaattttattttatcagaaagtgccaaaattaggcaaaattgctggccaaacagtgcaaatgttcttgtgaaagtgcacagcacagacgcattcagaactgttgcagaacggtgagtggtgaaagtcgtcggatatttttcaaaaaacggtgctttgaaggtcggagaccacgacatgaacttttgcctccccctctgcggctataacaccaccgttaatgaggttcttttcctaattgcccttattaaattactcaatgccattgtgctcattgtcagctggggagtgcccttggcctgaagtgcgtttcgcaactgacaacatgggcatattgcgccgggggttggccaaccttttaagcccaagaaacattcgctgcttaagatgccaatgacaacacaaagtgttgcagggggaaaggtcgacaattattggcaatcagaaaacactgtacttttaggagttgaggacaaatgtttgagcttttgcaagggcgacgtgtaaaaaacaattgggtgcctaattaagcttaatcccttcaattttcagcccgacctgcgacgtacaaagcatcttttcttatcaggtgaagaggaaagaaaaatgtttgacatcatttggtttctgaatttatagccgtgcctaatgaaccttaaaaaaattcttgaatgccaaatggagaatttggacggcaaaccgaagttcgacccgcaatggagaccaaactgcgattgggaaaggaagtgaaggaaaggagaccaaagagaagaaatgcaaatggatgaatgaatcattaagaaacaaagtgccataatttaccgtaatgatttatgcatgtacagtataagccatgtgcacttttgctgttggggacccccgaagaattccaacgggggacccttttgtagggatttgaaggtttaaatagatgtcagattgtgattatgaccccgaaaacccccaattgacaaaagaaatttgcaaaataaa

SEQ ID NO: 84891 - DNA, 1186 bp, Heterodera glycines
atggagacggtcctcagaccacaaactacgaccaacagagaagcggagaaatacttgctgaagcggggcgtaagttttctttctttagccgctctattgcactttaggcgtccattcgacttttaggcttccgtttgataccacaaatatagccattgatcaaataaaaaaagttatgacctaagaaacgatgagcgtggttgctcattggttggacgtctaaagtgcagtagagcctctttggtctttaactttcccagtgtaattggcatgactcattttttcagattgaaaagggcagcactgtaatggctgtaaaaaaggaaccaggaaaaggacacggatcaacaattgcgacaaatgtcgtcaccaatgtaagtgggaacatgacaaagcgtgtacgacggacacgccttttgtccaaaatcggattttaagtttttttttcattagagctcatagcaacattaaagctaagaaaatattgtcttttggttcaatagaaacaataatccgttgtttgaaacattttttttcaaaattttgctaacgatcaataactatcggatgcaaaattttaagctctagatcatatgggattgaaaattttaagtttgaacccgatttttgacataggcgcaaatgtcatgtaacctgacaaaatgactgtgacatgatgaacatagttttataccaattttttccccattttagctgttcggcatagacatgaaacaaccggcgaccgtgttccgttacgaagtgaaaatcaatggacaaattgtccgccaaagtggagaatgtttgctcgtcgacattaccgagacaaccaaattcgagtgtgtgtttcatcgcatgcattcggaaattccatttatattttaattgcttgttaagctttctgaatgtggaccgccgatatttgtgccgcgacgtcttcagggaatttgagcggcgaattgagacgaaaggcaacatgctgtactacgacctgtcgcacacactgtttgcgctcaaaaaattggacatcaatgaggtttgccacacttcgactttcctaacctaaatttctaaaaaaaaacctaaatcgaaaaattgtttgtttcaaaacatttgttagaattcggatttttggattggaaatgttccccccccccttgtttttcatatctgttttcttattaaa

SEQ ID NO: 84892 - DNA, 252 bp, Heterodera glycines
atggagtcaatatttttttatcaattttaatatttaaaattattttttaatgttaattatttattttttctaaattttaggcatttgcctaaaaatggagtccctaaactttaccaatgcgcaaaacataaggatacatttcctccaacaaaaacaaatcaaacgaccccaataaataataaagccaatctttataattgtttatgtttttattgtagcacagataatgctgaaactccgtcgattccataa

SEQ ID NO: 84893 - DNA, 667 bp, Heterodera glycines
atgggcgactatttgggaggaaagtggctatttgtcattttcaacatcgatgttggcccaaaattcagccaagtgagcaaaaaataataaataaataaagagaaagaaaaacggcacggaaattgggagaactattgaaaataaatttaaaaaccaattaaactcttttaatttagaaacgttttacataatagataaattgtcctctttttttagttttttttttttgctttttttatttttttttacttaagtgatattaatggcccaaaaattaaaataattaattcattgatcccggctaatagttgagtgtctgagtattatattaattttgtttttggagggtcattgggtatttaaatattttaaaatgtattcgagtttttagtgagattaagaaaaaccagaaaaaaaaacttttttttttggacaaaatcttttaaaaatcgtataaaattcgaaaaagttccgcctaaaacctcttttctaaaattaaatcaccaaattaagtactcattcaaaacgctaactgaagccgaatatgcggagcatgaaaaaaagtgtgatgaattggaatattcaaacaaaattgcgaacaaattgatgtaccaaaaatgcaaacaactgttttataagtaatcggctgaatttaaaaacaaataaa

SEQ ID NO: 84894 - DNA, 482 bp, Heterodera glycines
atggcattgattgcgctttcattttattgcattggcattttgttgttgcctgcaacaattttttcacaaaaccgacgtggaaattcagagtttgcgcatatttgtggcaaatttcctaatcgatatttttcttatgaacgtaatttattataaaaaaatatataaaaaatagttttttaaatattaaattttaaaaaatttcagcatgccctgaggatgagcggcaatcttcacagaatcaacgaaaccgaaatgatcaaccgccaagacgtgatcagcagcaacaacaacaagtttgcacaagacaaggatggcaaccgattggaattaaatgccaaaatgttaatgattgctatcaacaccgagaaagtattttaataacatttcaataatttatatttattaattttataatacattctattaaaaatagaaaatgcacttgccaaattcattttggaatcactggaaattaatatcga

SEQ ID NO: 84895 - DNA, 355 bp, Heterodera glycines
atagtagagaccggaaatttcaaatttgcggatcctgttgcaggattggaattcaaaattttttacaggacaggatccggcaggattaatcctgcaaatcctgcaatcctgcaaatcctgcatttaaaatctgcaggatcctgcgcaggattgcggattttaggaaatttcaaaaaattctgtattaataaaaaagtctttcaaagtataaaaaagtattcaaatatatttttaaactaaaaaatgatgaagatgaaaaattaataacgtatttttgcttacactccaagcaatcggctgattcttctttaatgcgtttaaaaagaccgatttgccaaattgggtggctcataat

SEQ ID NO: 84896 - DNA, 514 bp, Heterodera glycines
atgatcttgtcctcactcattcttcttttgctggacagtaagttaaaagtaattaatcagggctgccattcgtactttgatgccaagtatgtgcttggatttcggcgttcatgcttggaaaattttaacggtacttatttccaagattatgcttggaaaaagcggtatttttgcatatgaatgtaaaaaaaggtccattttatgaaagtttaaaattatggcattcttttttcccggcggcgctgccggaatctctctttctttctttttaatttggttcaaaagctcacccaaaaagcgtaaactttgaacaattttgtacaaaatcttttaataaaagtgcacatacggtgaaatgaggaaaatgatcccgaaaaaatcgaataaaaattaataatttttcattgcatataataattaagtgtatgtggatttcactaatttttgccattatgtccttggaaatcagtatacccttccttggaagcgggtttttccaatagcaaccctgtga

SEQ ID NO: 84897 - DNA, 65 bp, Heterodera glycines
tggggataattggagactgcgggattaatagagactgggcgataattagagcatttacggtaatt

SEQ ID NO: 84898 - DNA, 985 bp, Heterodera glycines
atgtcgcctcgaactgaaagtccgtttggatttacaagtttccaaatatgggttatccgagcctttttcaaaaatcatgaaccccgtctagccctaaatttaatccgttttcacaggcggccatttgtgcttatttggcactgctccaaacgtacgttgcttttgttgaacaaattggggccggcatcgaatttgtgctggtgacattggaagcactgctccaactgttcacaatgatcactttttccacgaaccgatcaactgcttctgctgctgtccaagcgcataattcatagtgccgtcatttctcaagtccaagaatttctctgggtcgaaaatttttttgcatcgaagatttacatggattgaaaattttcagggactcaaaaaccttgagccccaaacccaagactgaaaattttcttaaacccaagacaacaaagaactctaacttacggaaacattcccggatcgagaattttataggactcaaaaacggcgaaaaccctaaaccccaaagatagcagagcactctaacttcaaggcctgctgagcccgagtctttgccaggaggaaaaagaccgagcaacacttaatccccaaaattggaacctgaaattttctagacccgagactgatgagatctcataatattgatgttcccaaaacaaacaaaaaccaatataaaatcttttttcattaaaaatgatatataatggcatcgtgaaagtgttcaattgtgaataataaatgttccttttacaatttttttctaaaaaaccagcataaaaaatttctatgacagaaaaattttattcgctacataaaatgtatacaaattatattccctattcagtgaatatgctcataggtagtggcattggatgaaagtgcataagcacttgtaaatttttattatccaatgtctatgtcacattttctattcatatgactaaatgccatattttatgtgattattaataaa

SEQ ID NO: 84899 - DNA, 1873 bp, Heterodera glycines
gcgatgatcatcgggaataatttgcgagaccatcgcgttttgatcgggctgaatgatgaaaacccagcctttcacaatgtgtacgagctggacttaatcaacaatcaaatgcgaatggtttgaattaagaaaattttgaaatttaaattattttaaatttaaaatgtgccccaaaataaaggttttccacaatgaacgatttcccgccaaaattgttgttgataatgaattgaaaattcgaatggttgtacaggaggccatggacgggtcgctgatcttttacaagtattaaaatattataaataaaatgaatgcctaaaattaggtgttactgtagtcagtttcattatggagaatgcttcaatggaattgcatgctttcaaaagtgatactgtaatataatatactgtactaagatggttgtatctaacgcgaagttgatgcaaataacaaaccatgccttagatagatgttttatataaaaaaagttatcaacactagaaaaatttaataatcttcaaaaagcgatatcgcaaaaattttcagactttccgacattgcaaaccccagtcgactgacctctgagccgcacaattgggtggagtatttgcgagtgccgccagatgaccgtgcgcttacactgtacatgaaatatttaaattaaaaaaaaaatattgcattaatttttgtaaaatttcaggccaatttcattcaccgctgacaaccgtcgcatttattggcaatggggcgcggatacagtaaacacagaaatttattaaatattttttgaaatatttatatggatttttttttttttttggatttattttggatgaattaacattcaattaataatattttttagataataaaaaatgaaaaacatttctcctataaaaataattatttctttttttctaattattttcttgatttttaagttcatattagccaatttttggtgtttttaaaaattttacaaacgggatttaaataaaaaaagattaaatgttttagaatgttaaattaaaaaatagattttaaactatttataaaaattaaatttttcactaggaccttggccaattggttgtgcacgattttgggcggcctgaacgcaacgaaattctttacacagcccaaaaagcacaaattggcggtagaaatcggaaaaaataatttttaaaaaaatatttgaaaattttaaaggtgtgattttccacccaaccgagcgcactgtgttgtcggtcaccgaaatatatcacaaaccggacatttatgtggcaaacacgacagtgctggtcagttttaataaatttaatatacatttgaaaataccccaaaaaaattggattcgaattcaatcattcaaggaccttttttaaggggcagccgagaaaccaaaaaaaaaaaccaaaccgagatttctgcccttttcggagtactgaaattagttgcctcactttctgggatcaatggccgggattggcacaaaatggttcgcacttctggactagaagttattcggtcggggtcacttaatgtttttggacgagatacctgattttcgaaaacaaaaagccgtactacgaccagaacaagatttccgaaaaggaccatgactggcagcttaaagcaaaaagtcttgttttaacataatgcgttgtactatatggggatcatgtacagtaccccgttttttttctgtaaatgaaatcgactcttaagaatttgagcctaaaagaaaatatttaacaaaaaaaacttttcttcgtttagaacttgaaaacaataatttttaaaatttttaggatgatatgcaatatttggtcaatttgcgaccatcaggaacaccagtcattgaaagcatgag

SEQ ID NO: 84900 - DNA, 663 bp, Heterodera glycines
atgtatctgtataaatttgctcaagtaaattgtaaatcggaaattagtagcgtttatcaactccatacttccgcaacacttatacagtttattttgagggggtaatgagctgaaattgtaagaattatacaagctggccaaaccaaaataataaatggaaattattggcgcttatcgactcgatccttctgcgacgcctatacaatttatatttccatgataatgagctgaaattttgagaatttcaaagtgatcatgaaatgtaaatagagaatctcacaatttcagctacttaatctctaaataaatactgcagcaatattgtagaaggatcgggttaataatattctctgatttattattttcacgaccatccttgtgaaattctcaaaatttcagctaattatcttctaaatataaactctaacagcgttgctgaaatattgagttaatagcgccaataatctccgacttattattttcacgaccatctttgtgaaattttcacattttcagctcattttcctccaaattatctgtataaatttgctcaagtaaattgtaaatcggaaattattagcgtttatcaactccatacagtttattttgagggggtaatgagctgaaattgtaagaattatacaagctggccaaaccaaaata

SEQ ID NO: 84901 - DNA, 60 bp, Heterodera glycines; identical to SEQ ID NO: 58222

SEQ ID NO: 84902 - DNA, 4050 bp, Heterodera glycines
  unsure (1)..(4050): unsure at all n locations
ccccccccccccccctctgtctgtcaacagcatacattttccaaatagtcattatgtgaatattatgagcattttcatccgcagttcgttaatcgatgaatttatcatttcctactctaaattatttattaggtgcgcggattttttgttcctaaatttttgtgatttatcttaaacctaaagcgaagtgttgcggaataaagtcgattttgcgactaaacacattttcttgtggaaggtttcttgtcagtaaaagttaacttctcagtaattcacgcaaaacaatggattcccttcgggctttttgtcgactccaatgttacggtagtgctgactgtaacatcgaaaaacgacagcaacagtttttccttttgccaatttctccgtgcgggtgggtcggggctatatgggtggacaaggaacaccagaccttttccactaattgcatcagttccaaaaagcctctaatgatcatcacaattgttttgatggttggttctgatatttttcgtccgtttcccagggagttctctctgcttctgctgttccagttcgcatttctttgttccgtcgttgtccgtttcgccgtttcggtcccttttatgccaacaattagctaattatggatgcttcatccccccccccttttgctttatcccctcctttttccccctttttagctctcttcccctgctgccgatgcttttcccccccggcgttcgtcgcttctcttcgcctttctctccgcctttgtctgtgccgtcgcccttctccaattaattgtttccccatttccttctgtccttctcattgcctattctttggtcgctttcatttgggcagtgaatgccctcttttattttattacattccaacagaaaaggtgattttggtaatttatttgagggattaaattaaggggtgatcataggctgagagtgccattcgttgtcaactgatcagtgccattaccattgatcagctgcgatagtcagtcagcattcgtttcactaaaagtaatttctgattggttctcattgtttgacgcttggattcattgatcagttgtgattacgggtaatcaatcattgaccaatgctccctgctctgatcacttgataatgagtagcttgtgtttagcagctgatcagtttggtcaggatgatctctctctctttctcttcctccctctctctctcattctctctctccgtctcttcgtcttacttttgccaatgcctttcccttttcagtgtatcgtctgtgccgtccgtcttttcgctgtctctccatgctcttttctgcgctctgttcgccctcctctcgctcaatcgttggcttttccttggcccctccgtctcttcaactctctccattctcttctttctctccattctcctttgctctgtttgccaatttgttttgtgcctttgtcgtccttccaattctattccgttgttgtccaattccaattttggttatcttccgattggcgatgcttcgtccgatcatcagaatggcgatgatcctccgatcattttgttgtgcagtcacgagcactccaattggctgtcaaagctgttcttctgctggacaaatcccctgcttaggaagggctttcagggtcatctttcccaggttgtttttgtcttcttttgccgcccccctccccctttaaaattgtcttttctccaaaaggtggacgatgtgttccatcttccgcccagcctccacttgcccaggcttcagcgtgacatcctcggggactgccatggccaatccgaccatgccgatcagcggctgctttctgccgaattttcattcgctgaagcccttttccgtgcctatgggcgtacctttttgctcatcggcgttgtccgattcactggggacgcgttcagattcgcaagtgattggactaaatggctgactgatcaactgatcagcagaatcttttctggtcactccccttccccccttaggcccaattctccttcacttgctgatcacttcgcttcaagagtcttcccaatccgtggtgattggctttttgaaggtgtgccgtaatgatttgttcttggctaagaatttgggctacgtttgtgccgctctgatgtccgtctctctgttcgtttcctccgtctgcgactttcagttcaattattacatcgaaatgatcactcttcgcgcaaagagtgcgcttcttctcgccgtctaccaaaaattgctgcgaatcccagcctttcaattgaccgaaaagttttcgtccggcaatttgatcaatttgatgtccagcggtgggttaattgtttttcattttctttttctctgatgaattgtcattttgaagatgttgaccgtgttggcggccttatggtcgcatttcacggtttgtgacaaattaattggccaataaaattcgtttcagctttttggagtatgccgataaattttgcgattgcgctttatttgctttaccgcgaggcaagtggcaaaaaaggccgagggttttcagtcataagggactggaatcgaacacagaacaaaacgaagcgaggctcaaaagcatatttaaaaataattttacgcttaattacattagtgatgctcgagaccaaaaatttcccgagactcgagaccgagacaaaaaacccgagacttttctcgagtcgagaccgagactctcgagcattactaaattacatacgtaaattcttcggcatttgattttacaaaaccaaataattaatttgtgcctttgtcatttccgctttttctcctccttaggtcggaatggcttttctcgccggtgttctcgtctctcttctgctaatccctctgaacaaatacatcgcctccaaagtcggccaattctccaacaaaatgatgcaaatgaaggatgccagggtcaaactctgtactgcttcccccccccccaatgtttttaatttccttttttgaatacagtaaccgaattgtcccggtcaatgcgtacggtcaaactgaacaattggacggcctttttcgaagccaaaattggccacctcaggtcacgtgaattggctaatttgaagggaatgaaatacctcgacgccgtctgtgtgtacctttgggttggtgctgccgtgggttggctgttaccgtatgttccaccgtaggcatccgcccctaccgtaatcatggtgctgatgctcgtcacttattccgtcgttttgggcgaattgctcaccgctgccaaagtgttcacgaccctttccctgatcagcattctgatcatgccttgtgggctttgtctttgtttcggtcgatcactttccttcctgagttcccttcagtgaacgccttcccgtgggtgctcagtgcgattatcaacggaatggtcagcaaacgacgctttgacgcattcttcgccatccgttgcggtgaccagcgccaaaacattctcacccaagcggagggagggggtgagcggtcattccgttgctgaacactgaccaatgccatgccaatgtttaagtactgctcggacttgatggcaattcttttgcgtggaacgaaactaaaagcgctgtctccaatgtccattttaacgggaaaaaggtacaaaaaatgaatccaattggatttgtttattttccccgttaagggaatgctaatcggcgtcattgggccggtcggttgcggaaagacgagccttttgatgggtttgctgggcgagacaattgcgaccgaaccgtacgggcggtcaantgggcgaagtgtttcgacgagggatttgncctttgttggccaagacgtgtggctgagagaaggggacgatcagaaagaacgttttatgcgaaaggccatttgatcagaaatgtccanaatggncgnntgattcgtgcgcactgtcctnttgacattcagtgaaatgaaagcctatttgatcagtgacgggcaaatgaatgaatcaattccnttcaggnaatgcccngcaaagaaaatatcgatccaccggcgatggatcctcctgagcggagtgatgtctgggggggggggggggggggg

SEQ ID NO: 84903 - DNA, 1952 bp, Heterodera glycines
atgttggctcatctgacggagagagtgatagtgaaggacaaggacggacaattgccggagagagactgcgtgactttggtgaacgcaacacaaaatgctcttcagtcgctgttgtccagcgcggcgtgtgaagtcaaagtgaggcaattgctaacaaaacaacaaaaatggaaataaatatttttttagacatttgtgcgcgaagccgaagttcaacacggacccgaaagagaggtgaaaatgactgaggttgtcgtgccagtcgtcgaagtcacttcgacggagccattgtctcaaatgatcggaagcggactaatcgcggccagtgtcagcggagtgcctgtccaaaacggactgacaacactgaacactcatgtgaaagcggcaaccggggaagaagtcccgcagacaattttggtatttaactctttgttttactaatatattacactcattcgatgtaggtgacttctcgtcagcaatacggtcttcccgaagatgcgattgtcttttgcaactttaaccagctttacaagatcgacccgcctaccctggggatgtggtgtgagattctgaagatggtcagcactttcttttctccattgctatctttctgatgcccttttcaggttccgtctgctattttatggcttttgcgtttcccttaccacggagagccgcacattctcaagttttgcatgcaaagaggcattgacccgaaaagggtggtcttttcaaacgttgcggccaaaggtatgcctttatcaaattaattgtttgggcattccatttcagaggagcatgttcgccgtggtcagctggccgatgtttgtttggatacgcctctctgtaacggacacacaacgggaatggacattctgtggaccggaactcctatggtcacaatgccacgtatgaataattatttttctattatttcaatcgaatttcagtggaaaccttggcctcgcgcgttgcttccagccaactttttgcgttgggatgtcctgaattggtggcaaaggacagagacgagtacatcggaatagccgtcaaattgggcaccgacaaggaattgtcagtcccttttaaaatttttaatgtttttgataattgctcttccaatttcagcctgaaccaaacgcgtgctaaagtttggaaggtcaaactttaaacttttattttaattataatttatgtcttgtgattattcaaaattgttattcaggcacgcaccacaagcacactttttgatgtgaaacagtactgcaccgacatggagaaccttttgcacagaatttggaaacgatatgaaaatggtaggtttatgaacattgttaaacattgaatttattttgtactgcatacaaaaagtgtggaggcgattcctccatctccccccccccccctctatcattcgccgtaaaattacaccgaggggagggggtataaaggagaggggagaatttccaaaaaattttcccatacaccgcttatcggcacagccagccatttgggcgctgactccccccccccctttttttaatgtgtgttgaactattaccattgaattttaaaaataaccctttcaattttgcaggtctaccacccgatcacattctaaacgctaagttggaggcctcggtttaaaaatgcgactgcgaattgttgagcttcttcgtttgtgggattcgtgttttaaaatggcgattgtcgattttgcacgtactcatcatcacatttattctgccccccccccccccctctgtctgtcaaacagcatacattttccaaatagtcattatgtgaatattatgagcattttcatccgcagttcgttaatcgatgaatttatcatttcttactctaaattatttattaggtgcgcggattttttgttcgtaaatttttgtgatttatcttaaacctaaagcgaagtgttgcggaataaa

SEQ ID NO: 84904 - DNA, 1471 bp, Heterodera glycines
gcgagctttggcttgcattgcatcattttgagaaagcaattgcattggaccccaatttcattgatgcgctcattaacatgggaaatgtgctaaaggaagcaagaatttttgacaggtaaagttaataaagggggctagaaaatacataaattccggtaaattaccgaattcctttagggctgtcgccgcgtatttgcgtgctcttgcattaaatccaaaccacgccgtcgtgcatggaaatttggcttgcgtttactacgaacaggcccatctcgatttggcaattgagacgtacaaacgtgccattgaattgcagccgaactttcccgacgcctattgcaatttggcaaatgctttaaaagaaaagggactcgtgacggaggctgaacaagcctataataccggtttacaataagcaaaaattgctaattatatttttaatttatttatcagccctttcactttgcccaaaccatgcggattcattgaacaatttggccaacattaagcgcgaacagggaaaaattgaggaggcgacaagactttacttggaagcattaaaggtaaagtggcaaaagaattaattaatgttttctgcccggcattcctttgcaattcggcattaatctcccgttttttaagatttaccccgaattcgcggctgctcacagcaatttggcgtccattttacaacagcaaggtttcccatgcatcccttttagtataattttcatgaaatttgaggccgactccaagaggcaattgaacattacaaagaagccatcaaaatttcgccgacatttgccgatgcttactcaaatatgggcaacactctaaaggaaatgggcgacattaacggagctctccaatgttacactcgcgccattcaaattaaccccgcttttgcggacgcgcacagcaatttggcaagcattcacaaagatgcgggaaacatccccgaggcaattcacaggtgcattggggggggggggaggggaattacgatacggaatttcgatttaattgtatttctatattcaatccagctattcgactgcgcttaaattaaaaagtgattttccggatgctttttgcaatttggcacattgtctccagattatttgcgattggtttgttttaacacttaatgcgtcattgtttaataaattaggactgattatgagccgagaatgaagaaattggtgagcattgttgaggaccaattgcagaagaagtaaaaaatgaaaagaaaaaattcgccatagccatgccaattttagacggctcccttctgtgcaccctcaccattcgatgctttatccgctaagccacgaacagcgaatggttaaagtgattggaataaattttaaaaaattgcttttataggcaattgctggtcgtcatgcgcagttatgcattgagaagattcaagtgcttcataaaccttcgtacacttaccccgacaaattga

SEQ ID NO: 84905 - DNA, 138 bp, Heterodera glycines
atgttggatttggttgatagggaaaaagttatagccaaaaatatgctggggccaaaacgtgagggcccaactgaagtaaaccgctttttcgaaacaactaaaaaccgggaaaagcggagaaaatggtggcaagggaag

SEQ ID NO: 84906 - DNA, 572 bp, Heterodera glycines
atgtccgctgggagggcactccgcacaagtgtcctctacaaaattggtgttgatcattttttgctacgactaaccgtattccgtgtacaagtgagcaaaaattgccaactcgaaaaccggaatttcgtttttcgggaataactctgcgggatttgcttatatccagtgcacatagaaaatgattatgtgtatttttttgagctctatccaaccgtgtttttggatttttaaaattttcagaaattttcgagctaggcctaaaaaacggttttttggttttttaattttctgattttttaacgaattttccaggaaaaacggagaccacttccaaaacatagtttttcgagctctatcgattggtgacattttcagaaaaattttggtttttttccggaaatagaaaaattttttgctctgaccgggacatttcagtcccgggcctataactcgtcgggagttgattttagccaaaaatcttacaagagcatttttgtagagaattttaagctctatccatcatgttttatcgcatgtttttagcatgagtataaaaaaagttataaaataaa

SEQ ID NO: 84907 - DNA, 450 bp, Heterodera glycines
aaaaaattaaaaaacgggcgcaaagcgcccgtcctgaggccgcgaagcggccgaatgttcccaacaaaattaaaaaacgggcgcgaagcgcccgtcctgaggccgcgaagcggccgaatgtcccccaaaaaattaaaaaacgggcgcgaagcgcctgtcctgaggccgcgaagcggccgaatgtcccccaaaaaattaaaaaacgggcgcgaagcgcccgtcctgaggccgcgaagcggccgaatgtcccccaaaaaattaaaaaacgggcgcgaagcggccgaatgttatcaacaaaattaaaaaacgtgcgcgaagcgcccgtcctgaggccgcgaagcggccgaatgtcccccaaaaaattaaaagacgggcgcgaagcgcccgtcctgaggccgagaagcgcccgaatgttcccaaaaaattaaaaaaagggcgggaagcgcccgt

SEQ ID NO: 84908 - DNA, 1395 bp, Heterodera glycines
atggaggacaattcgctgttaagtcccaaagaattgaatgcaatcaaaaacggggctatgatgaaagcaaaagccgcttctcagctgtggagttcactcttttgtcctaaagacgaggaggccattttcgcaacggatgcttatgccaaactcaattcatggcttctttcatggatggaaaggctgaggaagaagcaacaaattgaaggagaaaatggacgaaaagggaagaaaaggcggacggatttggaagaggaggaagacgaagaatacttggacgatttgggggaagagccaccggaaaaccctgtgattttgactggaccgaccggttgtgggaaaacggcaatggtcggacatttacaaaaaggaagaaatttatttgttatccttttccatttaggtttattgtgcttcaaaaagaaatgaattccaactgctcgaaattccaccttatgagaaacgcgacaagcaatttttggagcagaaattgttaggggcatccgatacatacaatgttcgaagaatttatgtctgtccagtaaaatttcttttagatgaaagcgggaacaaaaatgccggacattcgcgacttgttcaatccacgacggaactcgccgacaaatttgaagaggaaaatatccatcggattcacattgattttaatagacgaggtcgctttgtttgctttgctaatttttttaattctcattttagtgtgaccttcactatttgccggacactaatttttggtcaactttgaaacaaatttgtgcaaattcgctggtaccaattgtgctcacctgcaacgattacgaagttgtgagaacaaatatgctcaaccgagagccggctcttgaaactttttccacaattcatgtcgataaaatgccctcgttccaatctttcaatgcctatcttcgggtttgtctttttacatccagaaatgtcatctttattcagcaatggctcattggcttcactggaaaaatcagaaagaactcgtatttgagcaatctttttgaacaaaaacgtggcgattttcgtgcgattttgaacgcgttgcaattggatggccaacattcgctgtcaatcattgaaaagccgacaggaaatggccagaaacaaatcgactttaaagaattcgtactccaatcaaagcgggcttctgctgttgactcaacatgcgggaagacaaatgaaatttcatggcgggcgaagcaaatgaccgatttggactaccggagagaaaagccaaccagagactggacaacgaaagtcgcagaaatggacgaacttcggatagaattgctgagtttgctgcgcgttgacgtcgattggtgtgaaattttggattggtttattacccgttttcacaattacctttattcttaa

SEQ ID NO: 84909 - DNA, 1383 bp, Heterodera glycines
atgcaatcaaaacaattgatgtggaatcgacgtatagggagacatagaagtattacaacgcttctacccccaccaaatcaagtctgggctcgatcattatctgttggatatgattcatggattaacatcactgggttttggatcaacatccctgaccacttcataatagcgtcggaaggtaaaaatttgttttatgctaaaccaatgtaccatcaaaatagcctaattcacaatcaacagcattacattggaacatgcattgaaacggcaattcggatgtactcacgcgactgggaccccgtggaggaagcgaatcgtgaatggtttcgttccctccagctcggcccaccaaattccgatcgcgaaacatcatcccgtcacctgcgctagccaatgaacaaccattcaacacagaaagacgaggacgtcttgcgtcggtgattggaggacactggtaaattcggcgcagttcgtggacgtgaaaggtaggtcatttttgagaatgaatagcattaatttttgatcaatttagattaaccacacaaagatttctttcaaaattccatcacttcaataaggtaaaacggtaacaagaaaaactcaaccgaggggaggactcatctaacattcttaatttcaagataccctgcgcggcggtgatcggaggtcaactggacgatgaatgaaggagacatttcgttgaaacggacggatgattcggtggcattggcatttccattcatctcatccccttccttcaattttgtacacgtttgatttcctcatttctcttttccttttgttttgttccttctcaattgtttcttctcaatttcctttttttgtactggaattttcggctgctctttctttaatctacccctcaaaattttgggcaaccaaccctgtacagctcttccaactcggcccttcgtcttttgcaccgttccttcgcaccactctgggacggaatgaactctggttgatttcctccagcccctcaggccaagtctgttcataaattgagcagctggtgcacaggtggttggattgggaaccgaagggcgaaaccgttctcggactggcgcagcatcatcgacaaacttcgaggatcgaggacgatcctatggaaggggggagctgtaagggattggcacaccctcaaaaacaattttcaatttccctcagcagtcggactttccattctttattatcacattttctcatctcgtttatcccattcttccccgccccttttccgttcgcttcacacttttccttcccccagcgatcagttagtcagtcgtcagtcagtcgagtcgttaagcctaaccgatgagtcgttcgtcgatgtatatttcaatcaccatttatccggagaga

SEQ ID NO: 84910 - DNA, 978 bp, Heterodera glycines
atgaggacagttttgaactgtctttccatcctttttgctatgtttgcattgggtggagcttatccaaccaatcattgcagtgaatgcaaacttctttgctttaacaaaggcgttaaagcaaagattccaaaagaaatcaataaagttgagctctgctgtgcagagaactgttacattcatgagaatgtaaagaagctcacttacgagctgcccaaggagatcctcctaaatgacttcaaatgcgaaggtcatttctggatggattcgaaacacatgttcaaaaaagacattttatgtccagcagttgatgagtgtgaactcatcgaatgctatttttgcattgaacagttagcgaatccaacctgttatccattgatttcatcaatgttagcagggggactttgcttatcattcataagcataagctttgtggctttttccatattaaaagtcctgttttcaggactttatatggtcatttggctgataattcaatttatcaggccaataatttatttagctggcccaaatcggcctccgaaagataggaggccaagggcaacagcttctcaaaattggacatcacgccgtgtttacagaacaatggcgtttgttgtccttatggttaactctctccagaatttgactggagcagagaccatagcagttatggccaaatcggaaaaatgcattaaaaatgcgacaagcatgagatgcattgtcgaaaactcggcaacacttacgttgctgccagctggccaaacaaacactcttcttctgaaaacagaggaaggtgttctccttggctcaataaatgttgtgcttaaggctttagctttggaatgccaaagctttactaaagcctggctgcgttcatatgcaattaatgtgtggccggcaaaaggtgccctaaaatgggctcctgcgaaggaaagtattgtggagaagttcgccacaatacttcaattcctgagctaa

SEQ ID NO: 84911 - DNA, 1590 bp, Heterodera glycines
atgaatgcggcaatgatggcggccgcggcggcagttgccgcatcgagcggtggcaccgcctcttcgatgccgtcctcaacggacgtgccgccaacatcatcgcttgcagctgtgatggaaagcggcgcgggacgatacacgggcggtggtggcggtggcgggtcgtcccgcagcaaccatctccacaaccaccacaaccgtgtgcaatcggcagcggccggggaagagttcggcaccgccggctttgcccattcgtcgtctgccagtgcgtttatggcaccgccgacgatggtcccatttggccaccacaacgcgttccaatcggtcaacgcactggcggccagcttatacagacagcaacaccaccagcagcagaacaatgccaatgggaaaaggtgcgcgagtccgatgggaagcggcggcggtggcggcatcaatgaactgctgctccatcagcagcaacaggcggcaacgaagcggcggaggctgaacaccgcggacgcaccggcaacgcgcaatgtaagcaaatgggtgaggggaagtgaagactgatcaaaaaaggattctaatcgaagccgggagtgcgcaagatttgaaggattccagtccgcaatctcgcatttttttggaaattgagggattaataaaattttgagttcaaatcccggagttgggactcgcgataaaatttttggacagagttcaaggaagtttgatgatcaaagtatcctgctaaaattaaaatttcccatggctgaagcaattaaaattttgaatagacgaatcaaaaacaaagggggcgatcaaagaagcgatcgataaaataagaactgatctgatcaaggtcagaagtcatcaacatatttctcaaggatatgctgttcaaagccatagcttaagaaaaaactgttcaaatcttaaatttcccgtgatttgttcaaatttcaatgcatccattgatcaacacatcagccagccattaagaattgatcaactggatcaattgcattttttggcatgtcaattaacaataagtcaattagaatgattaaattgcctccggctaataggctcaatttatggcacgacacaatggtattattgtcgttaattttgtagctccgatcaccgccacgggaccaccacaacaacaatctgttggccaaccagcagaacaacagcaacacaaccgccaccagcaatagcagcgcgtataatttgcagcaaggactgctcgcgtttgtcaaccgccaccatcaacttcagcagcagcaaattgcggcatcggctaatgccttgcgtctccagcaacaacaacaacaggcggtgccgtcttcgtcttcgtcatcgtcttcggcatcggttgccggcggggtcccaacacaacaacatcatcagcaccaccatcacccgattttggtggatacgacatcgtcaggaagtgaaagcggcggtgctagcagcgaagcggctgctgccgcggcggcacaaccatcggcaacgagtcggtacgcaccgcttggcaacaacaagcggtgctcatcaccgccccattcatgctcggatgatgccgcttcgtcgtcagcgatg

SEQ ID NO: 84912 - DNA, 415 bp, Heterodera glycines
aaacaaaaaaaatcgattttttcaagtgtccgtttggggtactcaaacaattatggggagcaaaaatccaacgcagaattaaagtacaggctatagggaagctactcccgaaggattcggtctccccataaatctgggcgcatcggttcggggggactgccccgaaaacaaaaaaatcgattttttcaagtgtccgtttggggtactcaaacaattatggggagcaaaaatccaacgcagaattaaagtacagacaatagggaagctactcccgaaggattcggtctccccataaatctgggcgcatcggttcggggggactgccccgaaaacccaaaaaaaatcgattttttcaagtgtccgtttggggtactaaagcaattatggggagcaaaaatccaacgcagaattaaag

SEQ ID NO: 84913 - DNA, 803 bp, Heterodera glycines
atgcaagcagtgacgcgtccacccattgttttggagcgtggagtttccgggcgtgtaaaatggttcgatttcagtaaaggtttttcacattttctcgcacgttgattcaccagaacggttatgtttcttgtccaggttatgggttcatcacgcgggatgacggaggtcaagatgtgtttctgcacgcatcatccatcgttcgcaaagtcaatatgtacttcgtgctgattgagggccagcgggtgagtcggactgattttgagctgaccgagggattgggacacggagaatcaggggagtacaacgatcctcgaattcaggtagaattcgacgtcatcgatggtgagaagggcagggaagcggccgctgtgtcggggcccggcggaattcgcgtgggcaccgccatccaatacaacaacactgcgcgcagtcagccgttgccggtcaatgccaacaattccgccggacggatgttcatcgccggcagatttcggcgccccgttggcaaggttttgttcggtgttaaaatgcgcttttttggtcccctcacttttacaccaaacaaatcatttttcgggctatcaaaatggacttctaatggactcgtatgtccgtacaaatgtgtcctgccttcggctgattccccgccaaatttgttttccccatcagccgaacaacaaagccaagtcggccgtcgcttcggtccccgcggtggtcaatggcggcgacgacagtgcaaagtgtccgccgctctctctgtccagcgtcactcgcaaaggccgtcgcatgttcaaagcgaatga

SEQ ID NO: 84914 - DNA, 302 bp, Heterodera glycines
aaaattccctcaaaaataaaaggtctattgcgcaccgccctccctatcatgctcgagagcatttgtatgtgtataaaatttatcaaaaaaagagatagccatttttctgggataacctctaaatataaaaatcctctgtgaaataaaatggcgattgtgcacagccctccgtctctacgcaagcgcttttgtgaggtataaaatttctcaaaaaaagagatagacatttttctgggattgagtataaattttaaaatccctcaaaaataaaaggtctattgcgcaccgccctccctatcatg

SEQ ID NO: 84915 - DNA, 170 bp, Heterodera glycines
catgatagggagggcggtgcgcaatagaccttttatttttgagggaatttttaaatttatactcaatcccagaaaaatgtctatctctttttttgagaaattttatacctcacaaaagcgcttgcgtagagacggagggctgtgcacaatcgccattttatttcacagag

SEQ ID NO: 84916 - DNA, 191 bp, Heterodera glycines
  unsure (1)..(191): unsure at all n locations
ggttcgattggtccaactgatcctcgtttttgtcattgctctgttttgctcaaatatttgcttgcttcgtcctccctcacctttggctttctctccgtcttctcaaaatgccttctgtttcttttgtggatgtccccgttaattcgccgtttacctttgagaatctcnccgttcgcgtcttctcaacaaat

SEQ ID NO: 84917 - DNA, 761 bp, Heterodera glycines
atggacagccgatatgaagtcaatgaaagattgggtgggaaaagccaaaaaaataaaagtcttaaaaaattattaaacaattaaacgaagtggaaacccaattttattaaaaaaagtaaataaatttgaaataattgtttgattaaagtgccataattttcattgtttacttgttttttgtttcttttagcaagtgattttgccgaacgattaaatgtggtccgtgagtgtgtgatacgtgccgaagacgcattggccattcgaaatttgtagggacaaaatttaaattaaattcgtattaaattatttataaattaaatatttttgctaaattcataacttgagaccgcaaaaaaggcaccaaaaacacgaaaaaagcactataataggcaccaaaaattgaaaaaaggcttgaaaatcccgaaaacggcatgaaaaaaggcatataacattttttattagggatttttagggatcaaaatacgtaaaacttaacccacggctctctctattcataacagtgaattgcatattaaattgaaattttatgttcaaaagaaagaaattattatttttcgaaataatctggcatgattatcaaattttgttaagtgccgaatcccggcggctttacacgcgcgtggcaatgttaaaccgtgagctaattgcgcaacaggttaatgaccggtattatcagtgaagtaataataatcagcaccaaaatgatttatatttaaatttattatttaaatataaataaa

SEQ ID NO: 84918 - DNA, 1891 bp, Heterodera glycines
  unsure (1)..(1891): unsure at all n locations
cacgacagagacgggggcggatggtcgccttttgattaatgcgggaaagcccgactcggacccggaagtcttgntggcagaacatctcacaaatgttcttcagcctcatcaaattggcggtgtcaagtttatgtaaggggttgagagaaaaggcacagaactatgtggcatttaaagcgagtcagcttttgctttcttaaccaataccaaggtttaccaaaaaatcgttactcgattcggcacttttgctgtttagggccccgaaaaaagttcaaaggagcgacccttttgtagagatttggaattggttgaaatagcggtacttatcccttttgtgacaccctctaaatttttttctacgataattataggctctgaaaaggaatctgatgcatgcattttacgtgagaacatgaaaatgcgtgttaatttaaaataaatttcttgttcgttttcagcgcaaaaaattaccctaaaaaattaaaaaaaaaacttttgaaagggattcttgtttttatttttgttcttagaagcaaaggcttttctgaaattggctctcgttaaggtacgacaacatcatcgaatcgcttgaaacgttccacaagtctgcagggttcggatgcattttggcccatagtatgggtcttggcaaatcaatccaagcgatcacttttctcgaaattttgtttgttgaaggacctaaaccttcgatatatttttttttgttttagcattcgaattaccggcaaaaggcacgtgttgcttatttgtccagtgaacgttctgcaaaattggcacaacgaattcaaccgatggatgccagaaactgacgcggagacggcgcggcccattcggcactttgaactgtttgtcattggtgactcagtgaaaacattggaaaacagagcgcaaatgatcggtgcgtaggaaaataaataacattcattttaaaattatttattcagagaattggtatcagtcggggggcgtccttctgctgggctatgaaatgtttcgtcttctcgtccaccaatgtgaacttttgggcgaaaagagtgcgcaacggaaaaaggcatccaaaaagcaaccgttgcggacgatgtacgatttggcggacgatttggccaaaaccaacgagcaggaaaaggcacaaatgacgcagaaggacgaattgcagaggaacatccgccaggctttgttaagcccgggccccgacttggtcatttgcgacgagggacaccgtatcaaaaacctgaacactgaagtgtcatgtgcactctccgcaatcaacacaaagtaccaggaaagggcatttttgaggaatttagaccaaacacaaaaggcgccgcattgtgctgacgggctacccaatccaaaacaatctgacggaatacttttgcatggtcgaattcgtccgtccctcctatttgggaagcaaaaaggactttcaactgatgttcgataagccaattcgtaacggaagctgcacagactcggccaagtcggacgtcaaattggccaagcagcgcatccacgtgctctgtgacatgctcaggggatttgtgcagcggtactttaaggaacgaacatttagtcaattttgttgaataatttgtcaaggcgttctcaacatttgctcaagaaaattttgcccgaaaaccgcgaattcgttgtccttttgcgcaagtccgaactccaacattcgctttacagagcttttcaccactttgcaagtgaacaaatcagtgttggcgaaagttcattcaacccattgaaagcattcgcaatttgtttgaaggtattgctgatgcttttatattttctgtttcttaatttagattgccaatcatccggacatgctttatgccgccttgaaaaagcaccagataaa

SEQ ID NO: 84919 - DNA, 1355 bp, Heterodera glycines
gtccgtctctttcatacgcccaaattgtgcggcctcctcaaaagtgcgttgcccgaacggaccaacgaaattcttggcctacagcacatgaaagaggaatggctatcactaacctaaggactgaaggtggtgatcacaatcagttcctttggaatgtacattgttttcctttttcggcattttccagtgcttcatctcgtgccaatttcagtctgatgatgatgactttatcatgccgttcggttttaccaatcaattgactggggagcgattggcgtttaaaagtgccaacattttggtgcgactgggatacaattgacattgcattaatcatgaagaaattggaggcgggtcagtaaattgagaacaaaataaattaaattataattcccatttttgcttttagtcttatcgaggcacttccgacccaagtgatcagtgtgaatgtaactggccagaattcggtaattttcacaaaaatgtaaaatgaaaaaaatgtgtgattttgaaggcgagttcgcgggtgtcaatgtgcgactcgaacatgcttatggcctgcgcatcgaaggccgattcgcgcggatgaccagggtaaaagtatccgctcactttagcaataaattttttatgaaaaattcaagaagttcagcgattttttttaaatttttgaaaggactaccctgtcgcgtgtatgtacctcccccaccaaaacacccctaacccgccgatattttgagaggaaaaggatctttgtcagaaaaaatgtacaattaatcgtgcataacgaattcagagtatatttagaaaatttataaaaagcaaaatatttcaaatttctgtttttcatgaatttttcaagcaataattttcgatgaacaatcttattactcattaaaagtttagataattttttgacctgttatttaaaagtctgttgtctgaaagtttttcttctcagcggtcttcatgactgccttccatcttgtgtgcgattacgccgaagctgaacttggaccggcggaacaaaaattcatgcgaacttaccgctttcgcatttcgataccaccaaaagatgaaaagaagtggggtactagcctcgcttctgccgcctacatcggcatggttgcgttgttgacaggcagagcagtgcgcgccgattggtgtgtcaccggcgcactggatagcgatgaagagtaaatgaagtcgctggaatcccgcaaaaagtggcggcggcaaattttaaacttaagacatacataagaattgaacgggaaatccaagatggatatgttgatgcatgcgataatttaaaacaaaaatagatgaaatgataaactaatgtattgttatttaga

SEQ ID NO: 84920 - DNA, 455 bp, Heterodera glycines
atgatcggaagcaattggaagaacggcgaaacgcatcggaaaacgtcaacagaggtgaaaaagagggaattcaatgaaatgcaattaataattggcgatttgcaagcctcgacgcatcctttgatgtgcccgctttggcacacattttacaaattccggacagtgacagcgcacgacggacattggaggcggagttccagaaactggtggccaattaccgtggcagaggcgagacgggagatgaaaacggcaaaggaggaagcggagagaagcagccgcaacagaagaagacgtgatctcacaaatgatctccatgctgtaattaaacttacccaattgatgactcaaatattatttgatgtttaaaatgtacaaaacataaatatattcaccacttcaacacgtcatttattagatttttggaccaggatttccaaggtttaggttcaacagga

SEQ ID NO: 84921 - DNA, 526 bp, Heterodera glycines
atggccgaaatatttgatagtcctcggtctgtaattgaagaatccgaaaaaatatttttgcggcaaccaatccctgacgaagtgggtcagttccgtctcgccagttccgtctggagccggttccgtctggcagttccgtctttgtactcaaagggccggttccgtctcaaaaattttggacccaattaaatttaatttttatggccgccaattttatgtaaatacatattttttcctggcttctccttgctctaaatagcaggaaaaacactttcttttttgtgtttgcgaacaaaagttgggacctttatttacatatttttacatattttggggtttttataattaattaccagggattctttttttatgtaagaaaaatcgtgaaatatgtaaataaaatatgtataaaaaaatgctaaaatatgtataaaatatgtacaaaaaccccaaaatatgtactaaaatatgtaaataaaattttttaaatggttattttttaggaaaaattcctcgtaaagagtga

SEQ ID NO: 84922 - DNA, 5354 bp, Heterodera glycines
atgccttcaaaacaacataatttacgtatgaagatgaaggaggaccgacggcggacggagaaatctgtcagcccaggtcgctcacccgtcccagacgggagtgcagatgagaatggggtggtatcacacccgggcaacgtaacgcccaatattagtgctttgcaattaagcaccccggcttcttccattggaagtaaaagaaggggcagaccctcaaacgccggaacggagtcaattacggcttcgcaacacagtgtgtcatccgttggcacacaaattgcatcggccactcaaaatgatgagtcatcgcctcgcaacaaaaaagggaagatcgacgattttgatcgacccatgtctgctcttgaggcaattgcttcgacgccggtttccacacaaaggaaccgtggagggcgaccatccaaaaaaagaggcggtcatgctggctcaggcaggagcaaagctaatgattccatgagcgagagctcgtcaatggaccagagctctgaagctatcacaaatgtggttgttttgccaactgtgactgataaaataaacttcagcacagtgcaaatcaatttcgcaaccacgcgaaattttgcctgtaaaatttggaagtgggcagcaattggcctttacgaacgtgatggcgaaacagcgcttgccccaaggtctggtccaagattcattgaaacgtgctggaatgatctgacccagtttctcaatgacggctttgctgccacatatttggcatacttggcaagcatatcacaacgaaaagtggtcgttgttgacccaatggtatgggaaaatggcttggaccgtgtcatgcaatataaaaatatgacatttgggtatgacccaaatgttcaggcagaagtcatacttttgccagtacatttccctggacattggactctaattgtccatgatgttcaatgtggtactcattttgccgactctttgcctaccccatatggcagattggatgtgcaactgacggacaaaattataaagatcatttctgacattttgccgtccacagtgttgaccgggattgttgatgtccaaaatcttacggcccaacacgatggaaatagctgcgggtactttgtgtgcctgtatgctgaatcatggcttatgaacaaccgcacatttgttctgccagatttatccatcaattatgaaaaaaagcgcattttgtggcacatcaatgagctgtatggctctgataatgtgccatatcatccaagggaaggggtgccaactccttgcccaattgtctaccgacatgcggatgaagcgcagtcgacatccaaggccgttgagtcaatggaagttgatgacaatgatgacataatgatcatcgaaccacagacaagtggacaggctgctaatgccattctcacccaagcccaagtggctggtgaaaaccaagttgactcgcttgggttggtgtcggagtcttgcgcaccgcaagagcctattgcgcaggctgacgatgtaatatttgtcagacctaagacgcctacaaggcgatcagtgcgcataggtagacggcagtctgcttcgattagccgttctccttcacctgcaccaagacgtcgtttatcaacaaatgctgttgagcaagtcactgcatttacgcagcgttgctaccttgtccacaagggttggtgctgtgctgcagcagcggcaaagcattatccagaatattcaaattctggtaagcttggcgacaagaagtgctctcattgtggggcactactcttcccgcacgaggacagtagcctttgctgtcgtcagggaagagttgttttgccaaaactcaacccgcatccaaaagagcttaaagagctcatcgcatgcgacaaacaatcccgcgagggaaaggagtttgttcggcatatgtcgcgttacaacaacttgctccaattcgcgagtgtttcggctggaaataagccatgccctgctggcggcccgatggctgtaattctcaacggggaattccatcgccgcataagcagcatgcaggctggcacaacacagattcctggctttggtcagctgtacattctggatccagtcgaagccatggagcagcggcgaaaaaatcccacctttacgggagggaaaatcacaaacgatgaagagtttgtgcagggtcatcagcttaatgatgagacccttgaaattttggaacaaatgatccaagaaaatcacccggctgcatctgcttacaagcaggctcgtgaacagctccaagagttgttaagacaacaaaggactgaagagctccggttcttcagaatgactttgttgaacgagcgctcagctccgggtggtttgaaagacccgaagttgcatccccaccaaataatcaccccctcaacgggtgaagggatgtttgcaattcatgcagatcctactggtgccccggcacctaaagggatatgggtcgaaaacaagcaagggcagttaaacgaaatagccccgttcagtccatggactgatagcttgacttatccattaattaagcctaagggcgacgatggatataaaattggcataccatatgccaaacccgcacaaaaaaagcggagaagtgatcaatgtgtcgatctgtttgacactgatacaatgtccgatgatgacatatgcgagaccgagtcaattgcatcgtcagatgccggatctgaagcatcgatgcagtcagtgaccagtcgctatgacaaatcgaaaaaatttgtctccctgcgagattactgcaagtattatctcgccataagggatgaaaatttggagtggcattaccaccacattctatcatgtggcggtggtcttggccagcgctgggttttggaccaagcggccaaaattgattggcaaattgccacttttttgcgccgtccagacatggacctgcgcataagcactccaaaaaatttgctgctgtatttggtgaatcaatacaataagcagcaagctcggcaaaaccccaatgcacaacaaaagagtgttgatgacattggcagcgttgttcgcctttctgagagaaatgtaaattctcttcagtattggaaaaaaatgtatgaagactgcaacaccatttttgcgcgttgccatgacgcaaaaaaggcgcggctcttcatcacattcacgaataaccgtgagtggccagagttcaaggagaacatttacaaaaatggtcaaatgttcactgatcgtttcgacatgtggatgcgtgtgtggtccagcaaaattgctgttttccaccaggagctctatgaaaagagtttcttcggaacaatccttggctcaggcgagtcaatggagttccaagggcgtggtggcccacacgcacacattgtagcccagactgacctggacgcagtcccagaagtcatccaggaatacatatgggctcatattccacctttgccgtgcaaagacgatgactcacccatagcgcaaatgcatcgcgaagtccgcgaactaatgcatatgcaactgcacagatgcagtgatagttggtgtggtccatgtgaccccaactttgggcggtgtaaaaagggcttcccagccccgtactcgaaatgtacgatactacacccggacaggcccgcattgtattaccggcctagcccaaccgacggtggtgcccaaattgaggtgaacggcttaatatacgacaactcgcaagtcgtgccgtacaacccatacattttgctgcgttaccgagtacaccacaacgtgttattcgcatacggtaacaaagcgaacatcaaatatgcactcaaataccctttcaaagggcctggacattgttatgtcgagtgcaaagaggagtccggcagcaaaatcggtatcgatgagccggctcaatatgccaaaatgaacttccgtggtgctacggaagcttttgcagttgtgcattcaatgccatttgcaaaactctcgcatcacgttgttcatttgtccattcatttgccaaaccagcagcccgttgtctacagggcattccaactggtgagcaaagctgaggaaattcagcgaggcgaactcccagagacgccatgctctgcttattggaagcaatggcaaaatgaatggcagcatgttccttcgcttaaggacatgctttttgaaaaagtcccagagcaattccgatgggcaaaagaccgatgggttccatataaaaagaagcctgtcaagaggcccccaatcggtcgtgttgtacctgtccctccaacggaccgggaaagatttgcactttatgcgttgatgcgtcactttcccggtgatccagaccacttgaaattggtcaatgggcagcagtacaacaccttcacagaggccgctctacagcatgggcttcttgaagatgaccaaatttggcacaaaacgctcggcgaggcagccttgcatcgctggccagaccagatgagatggctcttcgtgagcatcctcgtctttgggcagccgagcaatgccctagaactgtggaacaagtacaaagaccaaatgtactatccacagggcattaccagtgcggcaatacgccaagcacgcgagcagcaagccttagccgacattgattggcgtttgcacttctttaacttaagctgcgtgcactttggcctgccagatccaccaaattcaaaagccaaaaataccaatttggctgttgaagaatttttctttggtgatgatgatctgaatatgccgcctggccagccaaatcgaaagccacaacaatacaccccacctccactcaacagcgaccagcaaaaggtctttgatgctgttgtgagggcaatacagtcggatccaaaggatcaaactgtgccgcgccgtttcttcattttcggcgatggaggcacaggaaaaacattcctgtttggccaaattatcaagcgcttgcgaaagcccccatacacctacaaagtgcttgctacggcatccactgggtgtgcggctatcttgctgccatatgggaaaacagcccattccacgttccgtctcggcagagaagtgtcgctagacaagcttccaagcattccgcttgaaagcttctttgctagacggatacgtgaggcccaactcatcatcattgatgagatcaccatgcttcacaacactgtgatagaggtcatcgaccgagtgtgcaaagaaatggcaattcgccagcacaaggacctcctcttcggaggaaaaacggtcatttttagcggtgacttcaaacagtcactgccggtcgtgcctcacgaaggcctaactgcacaagttttggcctgctttcaaacctctccattgttcggtcaattcaccacaatgaaattgaccatcaaccagag

SEQ ID NO: 84923 - DNA, 218 bp, Heterodera glycines
atgccaaattcaacgccaactgtgccatttgaattggtgaatgaacggacccaagaaaagctgacattgttgaaagaaagcgatgcttttgctaatgattggctgttgaagcgatgcccaattgttggggaaacggcggcggaggtcaaatggaaggacgaatatttcttctccgcacgtgtcgacatttcacttagtgttgacaaccattgcattgg

SEQ ID NO: 84924 - DNA, 1799 bp, Heterodera glycines
atgaaaggctgcttaattggcacgagggagttgttctgcaacgaactgagggagtatcgcgtgttcgtcggattctggcaaaagcacgagtgcaacaagccagacaacgtgccattgggccagcgctgcaactttgatgcttattttaatggttcggtcttctcatgccaattgaattgcatggattgctctcgagaaaattctcgggttatttgggtgccgtggcacttattccaattgaattgcataatttccgctcgagaaaattctcgggttctttgggctcccgttttcgtatcgaagcgtcagcattcggtgccgccgagactcttgaaattttattgcttaaggaatttaacaaatcagcgcattataaaacgtcggcggaacgtttttttacatagctctttaaattgttaacgaaattagcattctttgttgtgacgatggcaattctttattatgtcaagtttacgaaatgttaaatttaatcgtctggcgccgttttgtccggcaccgctcattaattgcaaatatttccaaattaagtccaaatgggccaatcgatgacgattttttcttttaataatattgaatttttctcaatttcagaaatccatggaatttacattgcctatttctgtgagctcgatgaggaccagcagcaggacgagaatttgctctgtgacgtgtttctgccagaatttgacaatgcgccaactttggttcggcttaatgatctttagtgttcggaaaaatatggatataaaatcgcaaaatatggccataaaatatggaccaaaaatcgcgaaatatggacataaaatggcaaaaatatggacataaatttttccaaattaagcgtgtaatttctcaaaatttcttcaaatttgctatatgtaaagtaaaaccttcaaaaatggctaaatatggtattaaaaatcattttagaagaataaaagatgataaagctaaaatttactcatttttagcgaaaaatcaacccgaaaatcgaaattttgcttttttacgcttatttttgacataaatttaacaatttttaagaaaatttaaatttattcaatatcatctggaaaaattttgtgaaaaactgattttttgaaaaattttccgttttttgaggtcaaaacggccaatttatcttttgggggccgttatattagaggttttttggaaaaatgccaaaatatgggcataaaatatggacataaatgccaaaatatggataaatatggaaataaatcgcgaaatatggaaaaatatggatatggaaatacagcctagaagctccaaaccaagctaaaaatgtaacccacaacccccctcccaatttactcaaaaaccccgggactcaattaggcgaatcttcctcgtcccgctaatacatttctcttttcccaccttatctcccattcaatctccctcatccatttcacatccgttccccttattccgtttccttccgccacttacggacacttttcacgtacaaaaggcactccgatcacaccaatcggagagggagagaggaagagcacataactccataattcactcggcctctccccctccgtccctttcccccagggcttcttccccttcccctcagggcttttctcaccccaaggaattcaatcttcaatccctccagggcatttttcatcaccaatgaccaatggcactcctaaaatccaatcaatctttcccttttcaaatttcaatcaacacggcacttattttaaacaattatatttatatttattttcttattttcgtta

SEQ ID NO: 84925 - DNA, 896 bp, Heterodera glycines
atggctcgacttctgcttttagtttttggcttggccttcgttttcgccgttttggcttttggctctgcgcagcccccgccgcccttccaagggagcggttcgttcagagaaggtgaagccatcaatttaaatatttaatttgttatttttggcattttaaggccaattcggcgcccctccgtttggtggctctccgccgtttggtggcaattcggcggacgtttcagtctcggcgagtgattcgtcggaatgcagcggagaaggaggaaatggagtgcaaggaggtgaaacaaatgcgcatttctactctataattcattaattcaggtggggaatacggtaatggcaatggttacggtaatggcaatggttatggcaatggcggctttggcggaggcggtgccgaaggtggccaagggatggacatcgatgtggatgttcagcagtcatccgaggaggggaaacgacgccgtaaaagacatagcggattcggacaattgatcgacaaaatcaaaaactttgttggcggcaaagaatcgatggagaggggtaagccaaattagcaaaggaacaattagtgaacgattaattgacccgggattattatacaatttgcataattgtaaggttgttaagtattttttaaaacttttattttttaaacatttttcatttttttcaaaataaagtcatttttgccccttattttttaagaaaatgataaaaatgggttccgtccaaaacgcaactataaccctttgatgatgggagcaatgggagcatcgcaatatggtcaaattgatcatcaactaattgaaaaatacaaacatttgttcccaatttgcaggttcgatgtacggctcgccttatcagtcgaactcggcttatgggaataa

SEQ ID NO: 84926 - DNA, 1581 bp, Heterodera glycines
atggcattcggctctttcgacggtctgtcgaccagcggagtttcgtcccttcagcgactttcactggccggaaaccaaattcgtgagctggtgcgcttcattactgtattatatatcgaatcccaacatttgaccacccattattaaccttttactctccaaaattcgcgaaattttccgcttgaggctttaccctaaaacagcacattaacaaaaatatcactaccatgttgcgaactttttcaaaattccacatattaagaatattataattaatataaaatttttcgagataaaataagaaatgcctaacttttttagaccaattccggcgcgttcatctacctttctaatgtgggctctgattttgtttttgtaacatggcattacataatgactggccattcttcagcttgtccaccttgaccttagccaaaatcgcatcggtcgcctaacaaaagacgtttttgaacgattggactctttggaatggctttcattggacgtaattagcccaattatcatttttacgttaaattttaatccagttcaacaaaatgcttgaatttccccgcaatactctttctccgctgaaccggcttaagcacctctcaatggagtcaaatttgttgcaaatgttgcccaattatgcctttcagtaatattaaattgcttttgctttttaattacccccttttttggtggcttgtccatcttcaatggctttcattggcccgtaatcggtttgtttaatcccggttcatttaattaattgccatttcctaattctcaggttgtcttcaattaatgcgaaaatgttccactcaacaagtgccattcaaattcggtggctcaatttggccaataatcggatcagtcggatggagacagccgcttttcaggccccacttggaaatgttgtccattaaacatgcgtcttttcctgttttagaatttgccgaatttggaacgcctttatttgtccaacaatcggcttacaactttgcccactcaagtcaattgatcatggataattagcaataatacttttctgtcatttcattaaattttgagtttagattctttcgtcactgaagaatttgcgacaattgagcttggctcacaatgacatcaatgaaacgcaggaaagcgcgtcagtccgacgctaatttgctcattaatgcaaatttatgcttattttcagtttcgccaatttgccccaccttgaagagctgacaatggcacacaatcggttgcgcactatcaaagagggtaacacacaaatcattaattatttaaaccgaccgattgatcaccttcacaattattagctttgttacgcttaatcaccccaggcgttttcgacaaagtgccgagtttgagccgacttgacttgtcgcacaatcgcatcgaagcattcgacttggattttcttgggccaactcaagtgtaccaattgcgagtgcttgatttgtctttcaatgtcattcgaaagtaaaataattaatttaaatttattatttaaaaattttcagattggaaattcaatcggccaaacattcgcttcggtcttggacataa

SEQ ID NO: 84927 - DNA, 1086 bp, Heterodera glycines
atgtctgggccaatacaaaaagggatcatcaatgcactcaaagctctggacaatgccaaaagcgccacctcactccttctacaccccgacccggacctgtcaaactgggaaaatgccatcaacttggaggctcaatttgatcgcgtcgtcaaggaaatccgtacaacggaaatgcagatggacagtctacgagacttatccaacgcttggattgaacttctcgcccgcctgaccggagacgacaaagacaacggcgaaaaagaatacatcaaattcgacaaaaatgagaaaatcgccgaacgatacgacgcagcatcaaccaaacttcgggatttgcgagatctcgaagcaacactcagtgccgcagccaaactgcacagaggcagagccgacagggaagcaaaggcggatcaattggccaatccgcagcaacaaccgcccatgccaccagcaatggcagcaccaatgacaatgccaacattcacagcaccgctctaccaattccagccaattcaactggataaatttttcggccaaaagcgaaaatggcccgaattctacgaatccttcaaatcggcaatcggcagtcaatcaatcagtaaagcgcagaagctgaacttactccgcaatctactgggcggagaagcgcgagaactcatagcgggcttccgactggaagacgcaaactacgagacggtccttcagctgttaaaggacacgtacggagctccggaggaacacatcagaagtcttcacttcgaactggccaatctcaagccgtgccgaagcctccgtgagaccaaagactttatgcttcaacttgagcggcttacaagggagctgaacaatgccggagaggacatcgaaggtcctcaagtgttcctcatgctggagaagaagctgactccaccattcctacgaagcatcctcacaaagaaaggagaggatccggcaaactggacgacaaccaaattcctggatgtgctaaccgaagcagtccggaaagaagtccaaatccaagaagtgatgggagaatatggccatcactacgtccaaccaaaagcagaagtcgtctcagcagcacct

SEQ ID NO: 84928 - DNA, 629 bp, Heterodera glycines
atgggccccggacacctgccggtaacagctgttttcacaccctcaaaggtgtgaaaacacatgttttcacaccacccccggagcccgtggggtcactgtccataactactgaaatcatttgcgcctcgtacatttgcggtccatttcttcagagcctttttcgcacatttgcggccacatccaaaaacgacacttgcggcccgactttttcgacccgaaccaaaatgggcgctgatttaccgaaaatccttttttgttatcttaaaatttacgcgaactttattcaaccagggcaccgcaactcacatgagtcacgtggtccaccgaaaaaaccaattctgaattcttcaatgatttaccacaaatacaaaaaatgaaataaaatagaaaaaataaaattttttgggttgagaaaatttcgtaattttcgaaccatgtcacgcattgttgttgaaaattgtctttttttgcaggtgattgttgacgaaattgtccaagcggattgtgacaagcttttgttcaaacacacttcgtccgtccctctccatttggataagttggccgacaatgcaataactgacatagtttttcgggattggatcgacaatctcacagaatgggtactgtag

SEQ ID NO: 84929 - DNA, 604 bp, Heterodera glycines
atggagtttgaagccgaatgtgtagatgcaatgcaaaaatgcatggaatgcggatgggcaaaatgcattccgcaagagggaatcgcagcgagccattgctgcgccgcagggtacaactttacctgctgcaccgaggtgaggttaacgaagccacaacagtacactgagaaattggtaaaatgctaggcctcgggtggtaattgaacccaagcgtctcgtccacccaatccgtagaaagccctaccactgagctaccgaggcacaacggtgctatgatgacgttactcaaaaaccatcaaaatgggcgttcaaaaaactatcaaaatcaaaaaaaaaaaattttcatataactgcataaaagcaactaaatttttttttcttaatatcattcggtagcactaagtgttttccattatcatgcaaactttcaaaaagtttcattaagtttaaagaaagttatgacgaaaaatgttcaagaaaacttgggtttttgggtttctcaggtcataactttttttgaaacttaataaatttttttgtaattttgcaggataatataaaacacttagggctatcgaaagatatcaaggtttttaaaatttga

SEQ ID NO: 84930 - DNA, 1040 bp, Heterodera glycines
atgccttcgtccgcccaaagaaagcgtgccgaattgcactggggtatcatcggcttggggaacatcgccaatgattttgtgcttgcgatggcttattgtcaacacccgaacaaagtgccgcaaaaatttggcacttttgcaattccttttttgaggtgaccgccgtggccacttccaattccgtggaaagggcgcagcaattcatccaaaaggttggcctgaacagcgaacaggtcaaggcttatggcaactacgagcagttgctgcaggacgccgacgtgggtgagttcggtttgggtttggccgtgtttcggtcggttggcaattaactaattaattaattaataattaattaattcgccgttttcctttcgtcagacgtcgtttacatcgccaccattaacagcacccatttgccccttataatttccgcacttgaacaccacaaaagtgtgctgtgcgaaaagccaatggtttattcaagtgccgaactttccgttgtccaaacggtgcaaaaaacgatcaatcgaagggagggaaagaaactctttgtgatggaagtaatgcaaagatggcggtaatacagctgaattttggtcccgacaaaaaataaatttcattttccttgggttcggatccgcagccaagctatttttcgtcgggagtacaattctgcaatattaccgagacggcaaagtccaacaaaccaggccaaaatgtccattttcagggcttttggtctggtttctttccgagttggcagaaaatccgacaaacggtgcgcgacggacagatgggcaaccccaaattggtctcggtggatttcagtcaaaaattggtgagtcgaccgatggggtgattattggtcagttagtgcattttgtccccttttggttagcccgacaaacggcgcgacctttccaatggcatttgtcccctggtggacatcggctgttacaccgtcgatttcgccacttttgtttttgagggcaaaaaagtgatcgacgtgaaagtgatcggagatgtgtctgctgaggacg

SEQ ID NO: 84931 - DNA, 901 bp, Heterodera glycines
atgggcgacatcgaaggccttgttgaaaaggtcactgaaatggggctggaggacaacgaggagctgatcaagcggcttaaacagggtcaactattgccgaattttttcaataaaatttattcaaaaatgcaattttgtcaggcctatgaccaggcggggggacaattccgcgaaaaaatttttaattttcaaaaaaattttggcagtgttaatttcaacttttttttcatttgtacttattaatttctttcaaatttcatttcccttcggtgcttgagacatgcccctattttcactataattttttcgaaattttatcacaaaaatcgtccaaaattcatatatatttttttggcatttatcgtttgtattaaacaaatttttaggtcaatttacgctccgtgacatgtatgaacagttccaaaacattctcaagatgggcccgtttggtcaaattatggtaaaccaaaaaaaattcccaacaaaattttctaatcccccccccttccatttttaagagtatgatccccggatttggcaccgattttctgtcaaagggcaacgaacaggagtccatgtccagactgaagaagttgatgaccatcatggactcaatggctgacaacggttggttcagatttatacaaaaattttttaaattttccattttttgtagagttggaccacccaaaagccaacgatttgttcaacaaagagccaacacgggtgtgatatattttatatatgttttttgacaagttcaattataaaatttatcataatccatggataaaaaaggggaggcgcaaaactgtaaatctaacgaggggtgggtaaaaattcaaaaaccgattgtcaaagattttttttttgccattttccgtcaaaaattcaaattaaa

SEQ ID NO: 84932 - DNA, 483 bp, Heterodera glycines
atgagcgggccaatccgctcaaaaatcgggccttgtgccgcccgtaccaaggcctacattgaggcggccacggtcaatctcggaaaggacacgacagacgtgagcattcaagcagacctcacagcggagcgccgtggactccgccgagcgattcagcttttggaggattgcaatgacaaatggcaatccctcctgctcaaattaaatggagccgaccgccaacaagaggagcaacgctacgatgactttaagccatcgggaaagcacttcatggaatgggcggacaaagcccgaggtgcagtggacacgatcgatggagtgatcggtccagaggatgacgacgaaataactgagagcattatctctcagcccgccaatcctccacaaattcaacatgttcagcctcccccacctcgccatgaagtgaacttacctcccatctctctcccaaaaatcaccgggagagccaagggaagggccaag

SEQ ID NO: 84933 - DNA, 84 bp, Heterodera glycines
cagcagcagaaatgaatgaatggaaatgtggaagtgagcatataatgaaaagggtgccctttttataggccaaaaatgtgaggg

SEQ ID NO: 84934 - DNA, 1674 bp, Heterodera glycines
atgggtgataagctggtatttgatgagtttaatgaggaagcatttaatattatggggaaatctgaaagtaatcaaggattataatcaatgattacgagttgttaattattgggtaatattaattaagaagcaattaatcattaaatggtgataaattaataacaattttttgtcaaaatgattttacggaggaattttatggcatgggtgtgaaataatattaatgatttatgacaaattaccaataatggtgagtagcggtgtagtggggtaattgtctcattgaccaactgtcatttttaattatcttccttgaaacagtctggtgtaagtttaactaactatcagttcctaacatccaattattaaatttgggaaatttatgaattaattattttttattgggatgattttacataggaagtttatcgtttgggtgagactcttcaaacttatgtgattaattatgacaaattaccaagaatggtttctagtatatgcttgtgaataatgagtcctcgccaaccataaggtctaattagtgtcagtttgtaacgacatgatatatgattcacaactaatcactatctatatgccattgtttttagatgagaaggtgtagtaattgatgaatttaatgatgaagcattgaacatattatgagtgggaagtatgaaaaaatcaaagaattttaattattagtgacagttgttaaatcaatttttgggtaatttaattaagaaccaattaatcaactaatcactatctatatgccattgtttttagatgagaaggtgtagtaattgatgaatttaatgatgaagcattgaacatattataagtgggaagtatgaaaaaatcaaagaattttaattattagttacagtcgttaaatcaatttttgggtaatttaattaagaaccaattaatcattaaaatgcgggaaaattattaacaaagttttgatcgagatgttttacatatgtgttttggtatggtcgaatcccatgctaaaatactccaattgctaatagggtatgacatctgcattaattataattataaccaattattctttaatttttacaaactgaatatttctggggaaagaagggttatgatggaacttaaattatgtgccacatttttgttgtaattcaatgaagcagaatacttgaagctgagacaaaggaaatgatgaacactaaatgagtatgataattgttgacagattaacttaattatggtattgatggctaggaaatatggcaattaattctaaaatatctgaaaaagaatgcaactttttgggtagcgataaaccttttttaagtaagtaactaattattacagccgcaaggattttagaaatgtataaaaacaaggaaaataataaaagatgaattttcggtagccaatactcggctctccggtcaccaatacctcacaaggctcggatctccggtagccaatacctaattaagcttggcccgccagtaaccaatacctcataaggctcggctctccggtagccaatacctaattaagcttggcccgccagtaaccaatacctcgcaaggctctgacaccgaacactgaaaacttcattcttttgactatgaatttttatttttatgcaaattgttatcctcgtggtctaaaatttatatgaga

SEQ ID NO: 84935 - DNA, 1862 bp, Heterodera glycines
atggaatatgtgcttaaactccgtggattgacactcaattatgatgtgatcaacaaccaaggctttagatataaaaacagcaagtcaaacgttatgctcaaacaggagagattgaaccaattaatgtaatatacccaaactttattagacccaatattcgtgatggtggatctgtaatatcaagctctatgcaaaaatgttatcagccttatattgggaagggtattgtaggagccgattataatgttctcaattttggacacactttgtaattgctcacccattataatgtcttttcaccattcattgtaattgttcacacattgtaataccttcttcaccaatcattgtatctctctcacacatacacatatgtacccttttgtattttgttcaccatttattgtatctctcttccacacgcataaacatataccccatacacacgtacacatacatgtaccccttttatttctctattttataccaaaaattgtgttattttgtcgttttattcacgtttttaataaaaatgcatacataattaagcaatggaagacacaatttgtaaattattaagcatttgggaacgtcatttttaggtagaaaaatgcataattaagcgaaagaagttacaatttgtaaataattaacgagttgaagatacattttgattatgtgcacgaacttgtcgtttttaggtagaaaaatgcataattaaggagtgaacatgcatgcagaattaagcaatggaagttacaatttgtaaattattaagcatttgggaacgtcatttttaggtagaaaagtgcagaattaagagaaagaagttacaatttgtaaattattaaggaatagaagatacaattttaaaatatgcacgagcatgtcgtttttaggtagaaaagtgcataattaaggagtgaacatgcatacagaattaagcaatggaagttacaatttgtaaattattaagcatttgggaacgtcgtttttaggtagaaatatgcagaattaagagaaagaagacacaatttgtaaattattaaggaatagaatatacaatttaacaaaaattaagaaaaataatgattaaatgaaggaattactcaaaaatgtgtaaaaattacacatggggtgtgtgtgtgtgtgtgcatgtgtatatgtgtaagtgtgcgtgtgtgtgtgtgtgtgtgtgtatgtgtatgtatgcatgtgcgcgtgtgtgcgtgtctatgcgtgtgcgtatgtgtgtgtattgtatgttttttcgagggtgaagataagtgtgtttgaaagttctgcataatatttattaacttatataaaactagttaattttaatcataaacacaaacaatgctccttgcctaattcaacgtaaaataattctaattataataagcaacagacgagaaagggtagataagggctaaatgtatgcgtgaagcaggtcttgtaataggaataaatgaagaaatcatatgaggatattgtagtgcaccatagaatcaatgacaattaataatgggtgtaagagatagagatagagaactcagaaatgtggttgaagagagtcaatattaaatattgagaatttaatgtgagttagtaaggcaaacattaggtaatgtatagggaagagaatagtttgataaagaacaagaatacgaacacttggaagataacggttcgagaataaaacatagtgttggaagaaaagatattgaaaaatagctaacggaaacgattatttagacaatatgtaggtctgaaattaataaggaataacagtgaaagtaaacagatatagaagagtagagaaagtgtattacagagaaaaggaaaataattcaaataaa

SEQ ID NO: 84936 - DNA, 382 bp, Heterodera glycines
atgacaaacaatgagatggctgagcaatctgcatttcaatcgaaattaatgttactacggttgaagaaggttacccatttaccaattgacactgacataaaaggaaatggtgagaaggaagctgaatttgtaagagagtgcaaagagaaattagaaatcttaacccaacaaagatagttgtgaaccaagaagagtaggattgttaaactatgcttgaacaatttgtgcgacatatttctttacgaaattacagcctttaacagactttacttcaataatgatgtacttgattttggagaatatttgggataatcgttcaatagacgtaatgaccatcgaggattgaaaggtgtatcatgttttgattacctacgaaaataaa

SEQ ID NO: 84937 - DNA, 708 bp, Heterodera glycines
atgctaaacatatccgcttacttctattgcagttctctctgtttccaactattcatccacagaataatgatcaatttgccaagtgttcagttgaaaagttattgatctagaaatatcgcaaacaggccttatactagtcatacattcctttagtacatcaatgggtactaaaagacgctgccttccttaataatgccttagttcctttgagacatcaaataattccctcctaaacgataccagcgctgtcattaaaattttcaatgtcattacattttttctcattaattgcctctgtaaatacaaattttccagttgagaagatagttgtggtagaatttgtacctagacccttcattatatttgaaagatttatgtggttgtttttagtggatggggatattaaataaattgaggagaaaagttttactatttattgtcagtaacaccataaattgaatttaattttaggtataatttacttaattttaatcaatactattgtatttattatttttattatattttaatacaactttaatttaattttttaatttagttttatttatttttatttttatttaacatttattttcttttaattttaatcttatttttattttactttttatttgaattaatttgaattttattttactttatttattattcagttaatttaaaggagttgttcagaacctctatcca

SEQ ID NO: 84938 - DNA, 703 bp, Heterodera glycines
atgatgaatgaaactggcaatgaggactggtttgataacgttgagaatttgcgtccgattcgtggagggagacgggcagatactttgaatgatattgcaactgggaaagcaaaggttttcataacattttttgctttactaaaagcctctgtttcaagatttccattgaaagagctgagcaaaaatttctcactgaattcgcaaatgcatccaaagggtccgacccattggagccgatgtaccgcttcacaatttggttcgaggaacatttcccaagcggaaaacaaaaacatttctgtcaatttctttataaaatttgcacaacttattgcttggtgaatgcctacaaaaatgatgatcgcctgatgaaactgtggctaaaattgacagaaaattttcccgagagtggcttcgctataatggaattcgcattttccaaggggtcttgtcgccaattggccaagttctacatacattggagcaccatgtatcagtccattagtacgttttatggtatttgaaattgaggaattgaactgcatttacaggttggtggaacaaagcacgggagaagttgcagctgggccaaaaaatgtgtgcaatgccattagatttgttgcatcgggcggttgacgaattggaagcgtcagtgatgaaagtgacgcgaagcggggagaacagcgaagagactgaagcggacgag

SEQ ID NO: 84939 - DNA, 444 bp, Heterodera glycines
atgcatggtggcaagcggcccagtggtcaagtggttagtgtgcctgccttttatagtgggttcgggtcccactgcttcagggtaatcttaaaaaatattatatataattctattttttgctttgtttttttatttaattaactttatggaaataaaatattagttattttaaattaatgaaataagatttatttaaaaacaaattcaaaaatgaatttaatattaatcaaataaaataggtaaataataataaaaaaataatataataaataaatctaaataatatttaagataaataagtatttacaagtacaagacaagcaatccggtgaacaagtggttggtatgcctttctttgttggtgtagtgttaaagttcgatcccattaattctgattatcaaactttttaattttttttttgataattacgtttaggaaataaa

SEQ ID NO: 84940 - DNA, 669 bp, Heterodera glycines
atgtggattaggaagatgagcccagtggcaaaatgccataccaaaaacaaagatgagagcggtaaatgccttatcaaaaatttattccgtatataagaaatttatacccatgatccaagcttaaaaactaatttaaggctttctagcgagttttacggggcgcgagtggtatcattcgatagggttttgtactggctataaggaaaaactatcggcatcccaatcggttaagcattgttcgaactgtgttcgaaaaacgagtcaaaatttgcactttttttgggtgtcccatttttgaacgctttttgcatgtcttaaaaagggtcaaatcaaaactttaatatgtttgtgcacatctacaaactcttggctttcgaatgataccagggttgttttggtccgggtccgggaagtgctctaaaaagggaggacaagcacttttggtcgggatttcttccaaaaaagaaggaaaaggaaaagggaattaaacggggaagaggcaagcgacccggtggtcaagtggttagtgtgcctgactttggttctgtcatggcggggggttcgagtcccattgctgatgtttgttttctattcaatatttattttaaataattcatctttttttctttttagatttatttattgttttttaattaattaaaaaataaa

SEQ ID NO: 84941 - DNA, 415 bp, Heterodera glycines
atgccaaaagctgaaatgatcccaaaaaatgaacccaaaaagtgtctcatctgtggcggattgtcttctttcaaatattacagtatccctagttgcgaaggtaatggcgcaagcacttcttaacgaaataaattcttatttaaaaaatcgatatttttaaaattttattttaaatttgtggtttaataatttcagtaatttcagcgtgtaaacagttttttcgtcgcacagttatgctgcagataccgtacgtgtgcaaaaaacgcggcaattgcgaaatgtcaactccatacaacagtaaaattcttttaataattttcattataaattatcaaaatgtatgaatgaaatataaataacataattaatggactgctataagtatatataattattattaaaaaatttaaataaa

SEQ ID NO: 84942 - DNA, 1624 bp, Heterodera glycines
atgaatttacaaaaggccacctgtctttttggcactcattttgttcgacaatcgtccgaccaactcattcgagaatgggtgaatgagaatttcaaaaacacaaatgatttcgggtcattgcttgaaaaggtaaagcaattttaagtcgatgggatgcttatgtatatcttaccttggttaatggttgaataaataatcttttttgaattaagcttaatcttcagattgagaattttattgcatattatattgtcgcattgccgtgtaagctgaacgaaaaaatgaatgaacagttaacgaacgaaatgacaacggaaattgggtaatgaataatttaaattgttactttttaattcagtttgatttcaaaattttaaaatcctcatttcagtcataaaaatcatcatttgccactaaaatagctcaaaaaaaaaatcctcatttgaaatgaaaaatcctcattttttaaaacataaaaaattgcaaacaaaatcaattaagagtcatatttttcgtttaaagcaatcatggcgcctatcagcgccgccggaccccaataattcctattttttcttaaaaaatggcacaaaatcacaaaataggtaattttggtaaaaatctataacaaatcacatttaaaacctcaaaaatagaaaattcgatttctattattttaaataaattgacaatctcttaaatttttcgcgtttaaattgcttttttgtggcacggttttccaaaaaactttttgggaacattgggaggagtgggtccggcagtgccggtaggcgctgccggaaaaaattggaattttgagtgcgatttgttaacagattttgccaaaaaaagatcggctcttctatttttacaaggtaaatcctaaaaaagatttaagtgcaaagttttggcgttatgattactaaattaaaaataaacttacactgggagcccaacattgactcggaatgatcaaaagaccacaaaaatccgcaaatcgctctttggtcaaaagtttaaagatttaaaaaaaaattttttaaataatattttatagcatattttcgcatctaaatgaccaatttaacattttagtgtcagtttttgaaatttaatgatcttagtctgccgacggtgccgtcggaaaactttttttcaaacataacgaactttgttaagaagaccgacacattttcaaaaaaaacacaatttaactttaagaaatatttttaaaaattattaattacaattatttttaaattttagtggggaaacaattcgtctgtcggagagtcaagtgaagcaggtgaacgaaatgttgtcggatgaccaccgatgggagaatggcaacgaatcggaggccttccaaaagctgaagcgagaattgggctgggacgccaaatacgacccaattttgagcaaaattgcccaacggacggtgggcatgacaagccaagtggagaagaacatggacgaccacgcggcacactgtgccgcagctttgctcagcgaactgtcaaatcggcacgattgggtgcggatgaacccaaccgaggcggaatacgcaacaatggacggaataatgtgtgtacacgtccaaatccaagacgctttgttccaaatttag

SEQ ID NO: 84943 - DNA, 479 bp, Heterodera glycines
atgtcgagttggcctggcacgcctgaggcactgctggctgggatgttcaaacattgtatcgaggaggcagttgctgacagccgtgagcggggcattgaacctacacacctcggctgtatgatcagcagtcctctgctggaagacggagacattccaaccccgatacaacaaatgacaaacaacactctcgacaccattctgagccagttcaaaaaaatggctcagagcaaagaattggaagatgtgatgctgtgtggtgaacccttcaccgtcaccataacgacattggaccgtaatggactgggacgggcctaagaaaaaatctacgttcctatccgtctcaattcgtattcaacttgtgtcacataatgtattgtttttgtctaccctatatcacacgatcattcatttgaacaatttattgagaaaatggagagaaaattcgacaaactccaatttttatgtaataataatgatga

SEQ ID NO: 84944 - DNA, 2623 bp, Heterodera glycines
  unsure (1)..(2623): unsure at all n locations
atgcggattcgaaggcagaagaagcgcaaccctaacattgttttccgggattcattcaacttgatgccaatgtctcttgcctcgctggttccatcatttggcttggacgtggaggacaagccattctttccgcacatggccaaccacccagacaactatggaaagcagatccatccaacaccagacgactatttggtcaagggtatgatgccagataaacgacagaaattcgacgactggtatgaacaacaccgtcaggaaccattcttcctcgacgaggcgttggcaagctactgcaccaacgacgtggagatactgatggcggcgctgatggcttttcgtcatgagtttttggatgtgacgaaacgaaatgaaggaatcgttgcggagcgtgcggccttctatgagcaccacgacggcattgatgtgttgcgggagtgcatgacgatcgccggcgcatgtatgaagcattttcgcaccaaccatctgccgaagaagcatttggctatcgtcccggaacgcggctacgacaacgcccaaaaccagtcgttgctggcacttcgcttctttcattggtatgcggaggagcatggtgttgtggtgcagacggcgcattcggctggcggagagaagaaaattggccaatattccgtggatggctgggtggaggaagaaagaagagcaattgaagtgaatggatgtgtatggcacggctgcaaggactgcttccccaatgacaacatgatgatgccgaatggaaaaacggctggagaggtgcgggagcgggatgagaagcggctggaattcatcgaaagtcaagtgtcacgagtggacgtgtactgggaatgtcaaattaaaagaatgctgaaccgtgacccgtacatgtgcgaaagttttggtgattatgtggatgatggcccgttggacattcgcgaggcgttcatgggtggcagaacaggaccactgaagctgtaccacaaggcgggagagggcgagaaaatctcgtactatgactttacgtccctctacccgtacgtaaagtgagttttgtttcgatcattattcacaatttataattttttatttccagtttctccaccacttacccgattgaacacccaaaagtgctcatcttgaatgaaaatgtggagtggacaagagcacgcgacaacccctacaaattgtctctgctcaaggtttgggtgattccgccgcgaaagtgtgatgtaccagtgctacccgtcaaagtcaacaaacggctctgttttccgttgtgcatgcaatgttgtctagactacccgaaaggaggcgttgattttgactaccattgtgaacacgacgaccaacaacgcggatgggtcacaacatgcacatcaattgaattggacgcagcacttgaagagggctaccgcgtgaccaaagtgttccgggtgctgaagtacagacatggcgacgacaaacttttccgcccatacatcgctgagttcatgtcgcagaaaattgaagcttccggatttgacgccagcattaagggaaatgcggagttggagcagcagcagttcatcacagaatgtgcggagaaattcggaatttcaatcgacaaggacaacatgaaagtgaacaagggcaagcggtcgttggcaaagctgtgtctcaacaacctgtgggggcgcttctctctgcgcaacttcggcctcgcccagaccctcatcacagacgacccttcagtgttgactgaatacgtggaaaacagctcaattgacatcatttccgttgatgagctggacgaaaaacatcaattgatcagctacgtccagaagaaggagggngtggaggagcacgagtgctccaacattagtgagattttttcaataatttttgtataattttgggatttttcagtaatctcactctggacaacatcaaaggcccgccttctgctgttgaaagcgatgcagaaggtggtgagaacccccnggatgtcggttgctctacactgacaccgactcgctgattttcgtccacccgatcggcatgaacccgttggagacaggaccacacttgggacaattcaccgatgaatacccaaagcatgaaattgtggagtactgtagtggcggagcgaagcaggttaatttaccgtttatttagtgcataataatttatactttatcattttagtatggactcaaactccggcgtaatgggcaggacgaatttgtgctgaagctgaggggcatcacactgaactacgacgtgatgcagaaccaatccctctgctacgacacattcaaagaagaagtgttgcggtatgcccaaaccggagagtatgagcaaataaatgtgatgtacccaaactttttgagaccggacattaggggtggcggacacgtcacttcaggccccctccaaaaatgttatcgcccatacgtaggcaaagggatagtgggccctaattatgatgttctcaatttcggacacattttgtaaatttatcgtttatcattcattgtatctctcacatacacataccccatacacacatacacacgcatgtaccacctttgtttttcatgttttataccaaaaattgtgtaattttgtcattttatttgcgttttta

SEQ ID NO: 84945 - DNA, 1028 bp, Heterodera glycines
atttgttctgctacaatggtccttgtaatcgaattttgtgcccaaattctcggctgttccccgaaatcactccgcgacaagctcaatcatcctgaggaccgagtgaaggcattgaaggagctggtcggaaaaaaggttcggacgacataccaggaccggaatggaatgcagaaaacattttttgtcgacggaatatcggacaagggagcggctttaaccccggcgtatggcagactcagacaaccgtacaacattaacattgctgcccatttctacgctcgccaccgtatcaagctgcatttcccatacgtgccgtgtgttgtggagaaatactccgggtgtggcgaagacagatactacccaatggagctactcgaaattgtggatgaggactacaccaacaaagagcgatggcttggcaaattgtttaccgaaatcgaggacgacttcattcctgtcaaacgccttggtcgagttgacgaagtcgaagaaattgacgacaatgatggtggtggtcgctacgaatgcagtcaaccatcttacgtttattggtaaacacatgtatgttaccttaataatgcacttttctacctaaaaacgacaaattcgtttttaagtttatacaaattgtatcttccactccttaataatttacaaattgtgtcttctttctcttaattctgcacttttctacctaaaaatgacattcccaaatgcttaataatttacaaattgtaacttccattgcttaattatgcatgcatgttaatgtccttaataatgcacttttctacctaaaaacgacaaattcgtttttaagtttatacaaattgtatcttccactccttaataatttacaaattgtgtcttctttctcttaattctgcacttttctacctaaaaatgacattcccaaatgcttaataatttacaaattgtaacttccattgcttaattatgcatgcatgttaatgtccttaattatgcacttttctacctaaaaatgacaagttcgtgcacataataaa

SEQ ID NO: 84946 - DNA, 402 bp, Heterodera glycines
atggcagatcaatttgtacaacccgaaactgcggaggagcaacaagtgaaagctaagaagccaaacgttgatgagcgatttctttggaaaatcacgcggggccaatttgtgcttgcgattcggctgtgctcaggttaatcaaatttctgacgacaaattaattgacagctttcagaggactggaacaatttatttcacaacaaagacaagacacgtcggctggaagatgggcgagtggcgattggactcgagatgtgtgaagaatgcgctaaacttaattgttgtgtcagtgatctgatcgctggccaaaaaaagaaccagaaaaagccggaatgaaattgatttttaccgattaatatttttaataatcactcccactattttgaatttatcttgttttta

SEQ ID NO: 84947 - DNA, 2296 bp, Heterodera glycines
cccaaaacaaggatcaagttgccaagagggaaagtcccggctcgcgtgcagccgatcacaaacaacgagcaaaacggtgcggaggaggagcagatgtacgaagtggagtccatattagcaatgtcagttttgacaactggagaacggctgtattatttggcatgctgtggtaataattgtattttacaaaattgaaaacattttttgttttgggttataggatcgcccggtcatgacagttgggtacggtcgagttggtctgaagcattggagctgaccgtcaacttcattgaagatctaacgatcaaccaagtgctgaaggcactgctcaacgaggaggcagtggaggcgcaattggtcgtaaaattgacaacacacccgttgtttgtcagatgtgggttttcaaaaaaaaaaaaaaaataattttttaataattcaaataaaattagtgcgcgagctgctcggcaaagccaatgacccactccccaccacaacaaacatcgtctatgctaaggacaccacacaagcgcaacggacgaaagtgaataataatttgtccatatgaattaaataaattaaaatcatcaattttgtctctcatttttatctgatccccactctggctgaccttcctttgtgttggtcgtccagagtggggatccttattttctcacaatctttttaagtgatggctgaccttttttcatattggttgtcctctcttattaagattgtttcattaatctgataataataactataaaattcgtcgacataatttttaaattgatttaattatttaaggccgtcgattctcttatacagttcaaggtagctgagaaaattttcgagtagtgactgaccgttttgctcggcttcgctcattcgtcggtcggctgcttcacactcctccatgcaattcttcgacaatccaacattcactcattttaattatgtttaaaaattcactcattttaaatattttaatatcattttgatcaatccgttgcacacatttactcattttaaaaacacattttcatcaatccgttgctcacactcactcattttaatcattttataaacacaattttcatcaagccgttgcacaacattcacttattttaattattttagaaaccctcaacaattttcgttttcaataaatatcatcttttatatatttttggtgaaaacatttgttaaacggagatcgtccataagataagcactgaatgggctatagtggcgggtcatttgttgttgttatgatctggacgggtcaattgtatgggccattcattctttgaagatgtgccatatccattcattcagcggagttggtctatggccattcattctttcattttccaaacaattttttagaaatggaatatccttcaaatttgacttgggtggtcgtgccccagtgcgaatgtgtagctccgttgaatgtttgcgttagaccagccgattaccgccacccaatagtttgtgttcccacctttctggtcgaaaatttcccgaccactatttcccaatgtgttcccaatggaacagacccaatgttgaaagtttgggtcacacttgtgttcttgcttttgcttgaggtccaaatttgaatcaccctttcttttctaacttacacccattgttcagctgtccatcttgctgttgatggttttgatgactcgtcgtctccattctgtcaaaaatgtgcaccgttcaccgccaaaaagcgaatacaaaatggtgggtaataatttcaataaatttctatatttaatttaaacattttccacactcaatttaatttaattttttttttcaaaggccgaatttcattctccgcaacgccgcaaaaccaacaccaatgttcagcatcgtcgcaattttccggtaaaattcagtgtgatttttctgataattttttaatcagccattggccattcctccgttcaagcaccgcactgctcctccagaggcaaccgatgagaatggcgatggattcattgaggatagttggatttccgactcaacggaccgtgaggtagacccctcagtttaaaagttttgaaattttttctttaataaaaattcaagctcgatgccggtgttacgagtgacaaaaacgtcgttgatggtttgccgccgaagccgaaggaaagaaaatacaagtcccattacggtaatctcccacatttctgatcaattaataattacagtaaaaatgtttacagttttgacccccatccccgaagaggaggacaatgaacaggaggacaaggaagattaa

SEQ ID NO: 84948 - DNA, 1920 bp, Heterodera glycines
atggaaaaattaagtctcgatttaatcttgagttagagtctagtttttggtcacaatgttggcgcataaaatggtatcaatctcgaaaaattcaccgtttaatttgacaacattcattagcaaatttagctgatgaggaggagtcatcagcagatggtcaacttcaaaaagatgatggtgatgaggatgatgcgtcagtgcgcgaaaaaaagctacagtacaacaaccttggctattttgcgcgatttttgaaaactgagttggccggggcctgtgccggtgccgtggacaaagtgagcgtggcgacacaaataattttttttttgttttttaatttcaatttatttttaatcgctcaggtggtcggtgacttttctacaacttcatcctcctcctccgcttccaacggttcgtcagtggacaataaccgtgaccatgttgacgaacagtacgcgcaacaatgccagcagcaacaacaccagaatgcggttcaacaacaacaatttcaagcagttcaggtaaagtcagttaataacaggaaaattgcaagcgccctaattagcgtaataaaattttgatgcccgggggaggaaaatagcggcctttaaaatcttccaaatttcgaattgtgaatttaaaaagagacgaaaataaaattaaattttaataattatctcatgggccaaagcgacccaaattgatccatttgatcaatttattttgaaatcatttttccttaaattcatgtgatgattagggctggcaaaaatatgcacataaaatcgcaaaatatgcacataaaattttccaattgagggtgtaatttctcaaaatttcttcaaatttgttaaacataaagtaaaatcttcaaaaatggctaaatgtggtattaaaaatcattttaggagaaaaaaacacgatacagcttaaaatttactcattttagcgaaaaatcaacctgaaaaacaaaattttgcttatttttgacataaattaaccattttttgagaaaatttatttattcaatatttttcgtgaaaattttgctaaaaaattatttttttggaaaattttccggtttttgaggtcaaaaaggccaatttgtctgttgggggccgatctattagaggttttttggaaaaacgccaaaatatgcacataaaatatgcacgaaatgccaaaatatgcacaaatatgcaaatatgcacataaatcgcgaaatatgcacaaatatgcaaaatatgcatatggaaagtcatcctagaagcttcaaaacacgctaaaaacatggttttcgtgcgtttcaggcctcccacagtccaggaaaaaaatatgcatgtgcatatttttgccagccctagtgatgattcatcccgcccctcccttcccctgcgggtgctcctctataaaaggcgcaccgctcactcaattgggggtgaagaagaagcgacatctttttcctgattaatcaattttgcatttgtatgctttttcctgtccctttacatttaattgttaaaataaatttttaagtaaattgggttaatttcccgagaattaaggagagaatgaaatagcacccttcgaaatcttccatattccgaacagccaatttaaaattgaatacaaaaaattaaattttaataaatagacctcccctaaaatcacaaaattttttcaaaaaaaaaaaaatcaggtctaataaattgacaatcccccaaaaatagtatttttttctggccaattcaggcccgtttatggacagccgcgttggcattagccgccactagacagcaacaacagcagcagcagcaccaattactgcccgaccaacagcaaccgcaatttgtgccagccgcagctggcacatgccgaccacctgcatcacaaccacccttttcattggcatcgtcaatggtg

SEQ ID NO: 84949 - DNA, 669 bp, Heterodera glycines
atgtcttcgccaccgactgagcctaatgcttttgcaatctttgatcgggacgaatgttctgattccgatgaggaaaacgacgaaggcgaggtgaacgccgcaaaattgatttattattacattcacatttttaagtccatgctaattgagacgggacatgtgtacgcccaggcagcgcgcaacaactctgaggcggcgcgcgacaacgctgcggcggcacgcgagagtgcccgggccgtacgtgacatcaccgaccttatggtcaaacagctcgagtccaaggaccgtcaaatcgtcgacaaagagtttcaactggcacaaaaaaatgtgctgctggaagaaaaggaccttcaattggaagaaaaagaccggctgttacgccagaaggacgagatgatcgcacgtcttcagggtatcattgcacatggcaaaagggaaaagaaaagtattgaaaaattgattgctcacttaatcaaattttaatgccgaaaaaaatgtagagaaatatttattttttggcaattttgaaaaaaatatttaaaaaatctaatgaaatacacgaaacgattaatcttcttccttttattatccatgtaaaaatttggtgcgattctgatcacttttactctttagtaatggaaattatttgaaactgttcttttcaataaa

SEQ ID NO: 84950 - DNA, 54 bp, Heterodera glycines; identical to SEQ ID NO: 53113

SEQ ID NO: 84951 - DNA, 76 bp, Heterodera glycines; identical to SEQ ID NO: 51235

SEQ ID NO: 84952 - DNA, 909 bp, Heterodera glycines
tggtcgcattcattacacggatatgtacgaaatgctgcgtaacatcgccccacccgtgggatttggccgaaaatgtccatatcgtcttgcttacaagcatctgattcgtatgaacatgtaaagcctttatattgcattacaattaatataattttatgtgtttttttttaaataaatccaccgtggagatcttaaaaatcctaaatgggaggtgccgtgcgcttcagaatgggggaaaaatttttaaaatggggacaaaaggggccatataatttttcacattttgtgtcatgtaaatcaatcaaaaacgcataggattgatcaaatattatattttttgatagacaaattcgcttacaatgcacaaaaaattggcactttgtaaattttcaaatgtttaacatgggtgggccaaaattgggacaaatgctccccccacaaaaaaacggtcaaaatcgccaccctgacaatgagtaaataaatcctcattttatattaaaaaaatttttttttgattattcattttaaggccagtttctgatgatggcactgtccatttcagcaccacactttttgcgcttattcgcgaatcgttgagcatcaaaatgaggccaggtggataaagcaaagaatttcgaaaaatttaccttttttaaaaaaatttttatagtcgaagaaatggatgaagcggatgaagaattgcgacagacattgcgcaaaatttggccattgaaagcaaagaaaaatatgatcgatttggtggtgccgccaaatgggggtaaaaaaataattaaaaaatttaaaaaattcattttttcagatctttgcttccaaaaattgacggttggcaaagtttatgcaggcctactgattttggagaattggcgagcacgaaagtcgggcgttgag

SEQ ID NO: 84953 - DNA, 1566 bp, Heterodera glycines
aagaaaattcgccaattggaactggagaaggaggagctgcaacatgcgctggacgaagctgaggcggcgctggaaattgaggagagcaaagtgcaacggttgcaaattgaggtaaaaaaaataatgaatcaattataattaagtaattaattaataatcctctgttttgtccacttactaaattttttattaaaagaatttatgaatagattttaatttgttttgctcaacgaactcgattttgagaaaaaatagaaaataaaatttaatttacggatatattttaatatattttttgttcgaatccaaccaggttcggggttctgagttggatgaattttaaatattgttgttcaattgaaagtttcgaacattttttgcaaaaaattggccgcactcttttatttttacattttttaaacaaactttcataaatatttttattgaatatgaatacattgtacccctaaatatattttaaaaaagtttaaattatgaataaaatcaaaaatcgaataaatttaaggttatctccataaaatccaattaattaattaatttcaaaatttcaaattgaatcaattaaggttggccaaattcgtgcagaaattgatcgccgagtgcgcgaaaaggaagaggattttgaaaacacaatcaaaaatcatcaacgagcaattgaatccattcgtacatcattggagaatgaacagcgaggaaagcagcgattatgcaggtaattagattaatgatgatattaattaaatagtataatagcactggctaataatatttaattaatttttaatggtcgcagtaattagacataattaattaatactctataattgcagtcaaagaaaaagctggaaaccgacatcaatgatttggagttgggcttggacatggccaataaaacaaatatggaagcgcagaaaacgatcaaaaaattgattggccaagtgcaggatcttcagctgcaggcaagtgaaccacaaaatttttttttgtcgtgttaaaatttgttgccactagtgattaagttgtccaggcatgttttgtgctctttctgattttgggtgtctcgattatcatggagtggtctgatcaaaatggttttctagtattcccgttgatcactcactgatcaccggcatttttacttgaattacatttttggcggagaacggaaaaatttgctagtttttttcataattttttttcaaaatggttcattcaggttgaggaggagcagcgtcggcgtgaggaacagcgagagaactttttgatgagtgaaaagtgagagaagaattaaaaatataattaatattttaatttataaattattcaacaaaaaaaaatcttccaaaatttaaattatttaataaaattaaaaatatttgtttcaggaaattgaacattgtgctgtccgaacgcgatgaacttgttgtgcgccgagagcaaatggaacgggataaacaacgggtggaagccgaagtgcaggaggaacgggcgcgcaagacggagctgcaaatggacaactcacagctgagcgccgcgcgacgccaa

SEQ ID NO: 84954 - DNA, 92 bp, Heterodera glycines
  unsure (1)..(92): unsure at all n locations
atgttttttcccnccatattggtcgtcctcctcctcatcggagggctgcgatccttttgcggtgccatagaagccaagatgagtatcaaatg

SEQ ID NO: 84955 - DNA, 1319 bp, Heterodera glycines
acagcattgaaccgcttcctactgtggctccggcgcatgcgaaatgagttgaaggacgactttggctcaatccttctgttactgctcctctatttgctccaggtttgtgaacttaagtgaacacaatgcacgaaatcaaaaacaattctcctttctccatttttgccatgtcaatagtgaaagcctatattatagggcattaaaattaaaaattttgtccattgttaattttccgaattttaactcaaaaatggtcgaaaactcaaacaactattaattttctctttccataatttactgtttttagatgtcaaaaaatatattcattgtttttacatgttttttggatttccagggcgttcccctcggtttgatcgcggccattccgctcattttgcagtccaaggaaatcacctattcccagcaggcggtgttctcatttgcttattggccattcaggttttacttcgaaattatggcaattttcttttttagtttttttaaaaaattaatttggtcctttgtttgccctcgtttttttacatttcccgttttcagtatgaaattgctttgggcaccgattgtcgattccatttactttcggcgcattggacggcggaaatcgtggatggtaataattttgcattgaccgattttgcatatttcgttataataatttaatcctgttctgatgtaatgctgtttcctttttttatttgaaattatttttcataatttctcattcaactagggcgggggttgctaattttcttaattatttcactaaaattacaaaaaaaaaaaaattttcaccttgacgcctattatcgacatcgccctcaaaatcggtgtttgggtcaaaccttcgcaaaatttatgtcgactcccccccccccctttttaatttatgcatatcatcttacaatgtgttcgtctcgactttgtgtcttaaatttgtttttcaaatttcaggtgccttgtcagtatttaatcggtctttttctgctcgtcatctcctaccatgttgaggaaatcctcggcaccgaggacaaaacggggagcagtgagttcatttacaaccttttcaatctcaaattaaattacataccaaaaacttgacctttcttaggaacctaaaaagcaacaaaaaagatttaaaaatttaaatccaatttagtccatcatttagaattgttgcactaatctgttcattatttttagaatttgacctggacctgtatccaggcatgaatttttcctgggcctggatttttgtccaggtccaaaatggaattgtcaaggcttttttcgaactctaa

SEQ ID NO: 84956 - DNA, 1224 bp, Heterodera glycines
atggccaaatgcatcgttcggctgttgaacaacgaattccaaattgggctcaaaaatgccaaaattattgatggcaccaaaaatatgctgaaaagcgaaaagtgggtgggagaaattcgagtcgaaagcgaaagtgacgaagaaagcggacaacagaaaaggacagaaaaaggacatgatgaaaaaggacacgaaagcagttcaggggaaaaagaaagtgtgaatggtcagtaaaatgccgaataatgaaataattttttaatgaaaaatttttgaaactcagtttactattgtataattaggagtgtgattcttaaactacctaattagccgctaaaaaatgccaaaaaatatatgcaaactcggtccctgtaaattaatccctttaatttgagtttttttttaaattgccgacattatttagattcaagtaaaaccggttattacagcgcaatgccaaaattcgaatttgccaaagtgcggaaaagggaagcaatttttgccggaaatcagcggcatttgaacaaaggatttttggcaagaaaacgccaaaatattgcaatttcgaaaagtcattcatacaatttgcttgaagcaaaacgaacatttggcctcagtcccattggaggatttgcacgctttttgatgagtggcatattggaaaagaaaaacaaaacacggacaataccgtaagagggaaaaggaaattggaatgaaaaatatacgatattcaatttcataaagtaaatcaaaataaatattctttaattttaagttggcaaaaaacaatttcaaaaatacaaaaggcaaaaagggagcacaatcagttgaaaaaggaagagaaaaaatggagggattatgcgctcaaacaaatggtaatttgttgttattaaaaaaaataattatttgctttattcagcccacaaaatcggcaacaattggtacaaatgaaaaatatatgacaatgaattccgccgatgaaacaacggcgtacggtagcaaagtgggcaaattgaatgagcaaattgccaaattggtcaatgacggcatcaaagtcggcatgcgattggctgatttacaaagaaagtcaaagtcaatcgaacactcaaaatcggacgaatttaatgaagagaaaagtgatgaaatagcaaattatgacgaagacattgagggggaggagtacggtagcgaacagagcgagaattacggtaacaacggcgaacg

SEQ ID NO: 84957 - DNA, 647 bp, Heterodera glycines
atgacactgaaagcaattgttggacaaagtaaaaaactgtattattaaaaaaaaaaaattaacaaaattttagaactcattaacgaagttcttcaaccacttcataacccgcagaagggcggagcatggaatgtactgattgtggaccgattggctatgcgaatgttaagtgcatgctgcaaaatgcacgatgttatggaccagggaataacaatagtcgaggacttaaacaaacgccgtgaacctcttcctgctttggacgctgtctatttgatttccccaacaaaagtaaaactttcttcaatcatttatgtttaactaaatattaattaggaatcgatagacaaattggttagagatttctccggccaaaatctttacaaatgtgcacatgttttcttcactgaagcctgtcctgatcagctgttttctacgctttcgagaagtcctgtttcgcgtttcattcgaacccttaaggaaattaacattgcattcactccttatgaatctcaggtttttattacctactttgttcgtcaaacattaaggttctagtcggttttatgcgtcccgtgaatgaccatacccagtttcttaggccataacttttttcttacttggtcaatacctatattcttggtattaaa

SEQ ID NO: 84958 - DNA, 716 bp, Heterodera glycines
atgcatgcgaaatcgcgttggcaaggcggcgacgtggagggagcacgacagatcctttcacaagcattcaaacataatccgaactccgaggaaatttggacagccgctgttaagctggaatcggaaaaccaggttaattcgggatgaatgaacgatcatttagactatcttaatttcttatttttgttgttttaaggaatttgaccgtgcccgaaaattattagaaagagcgcgcaattctgccccttctccgcgtttttggatgaaaagtgctcgattagaatggtgtctagacaacttagacagagcaaatgaattactcgctgagggaattggccgttaccccgactttgagaaattctacatgatgttggggcaaatactcactcaacaagcacagtttgaagaagcaagaaaacaatacttggaaggaacggtgatcactaagcaagcattttatttttaatcctttcaaaaaattttagcgtcggagtcctcatagtattgcaatttggcttctgctgattcgcttggaagattcgcgtggtcggcacattaaagcgcggtcccaattggacattgcgaagaccaaaaattccaaatgtgaccaattgtggctggaagggatccgtatggaattgcgcgccgggcaaaaggaacttgcacagtcaatgcttgcacgggctctccaggagtgcgaacattcaggcaagtag

SEQ ID NO: 84959 - DNA, 672 bp, Heterodera glycines
atgccattcatcaaaaagcgccaaaatttggttctcaacgttctcaacaacgacaaaaatcttttggtagcgccacaacaaccgctgggcattcgtccattgagaaaaccgtccccgtcttcgcgtcaaatggcgcaagttcagcaacggtctgtcaatggaatgccaagctccaatattttaaaacgctttaagttctctcttcgaaatgcctgcgagccgccgacgacgcatccttcgaattcactcgccgacccttccgctcaaaaaggcgcttatggcgcgacgaatgcgattttcaacggcgaaagtaagcatttaatttttttagaatggaaggagctaattgtaagcatacagattctcctgggttccttttgactgcgttatttccttttctttgcaattgagttttagaatcctctttcaattgagttggttaatagaattttgattcttttttctccaaaaattgaactgattttgagaattaccatccataaaccattaaaaatctacgttgtagttttcccggacaatttgattcttgagacggaattgctaaccaacgcaataaagtctctcttgttggacctccaaaacgcgccatccaacagaaacaatagcggtggtgcgagtaccgaatccaacgcacttttccacgccgattcg

SEQ ID NO: 84960 - DNA, 1646 bp, Heterodera glycines
gcctttcccatggaattttctggcactgtttgcgccgattgcggtgcctcttgtccgagttgggcttcgctgaatcacggcgtgctgatctgctccgattgttgttttgtacatcgaaatttgggtctgtctccctaattttgcttcgtttttcctttccaattgttcctctccttaggccgtcacttcagccaagtccgttcactgacaaaaggcgtttggcacgacaaacaattggctctgctccaattgctctgtcgtaatggcgccaacaatgtttgggagcattcgctgatcgattcgttggggggcgcaggtcgggcgaagaagaagcccgtctccaagtgggctgacatttggcaaaagcaatgcgcataactttgtcttccttcccctttaagtgatccgataattcccaaaaaggaggcgtttattacggcgaaatatgcgcaattggcattcgccatcagaccggccaaggacgaattcaatgtggacgatttgtaagcattcgaagcaatttcagcagaaagtgtccctttggaaggaatcgccagctttggtcgtgtgttcgcactgcgcacgttgaaaccgcgttgaggtgaatgaattgggatggaattgtgaatcgctttattagctgaaataattaagcaaacggccaataaactgattaaataattagattatttgctaatattcgccctatttacgtgattaaggcttttggcgcttggcgcgtgtccaaattacgcggacactgagaagggaaacactccgttgcatgtcgcggccaaagagggtcagaatttgcaggcggaattgctttggttgtacggggcggacattggccaacggaatggggcggggcaaacgccggcggaattggcgaaaacggagggatttgtaagggaacggtggaaaagggggcaaacaaacaaacggagaagcggacactttaacatttcagaacgaactcgcggaacgactcgtcgaattggagtacgaaatgaccgatcgcttttcaatgtttctctgcggtaagtcttgatttgtcatttctttggttttaatttaaaatttccatcaaaggaaggcgaccctcccacagagaaaaccaacactttctcatcccggatctcgtcgattcaaagaaaaacagccaagtcaaacagttcaaggattccattcagagaagcagtgggttgatactcgaacgaatggttcaggacgtttatgacgaggtgaccaaaccgcaacaaaaacccaccaaacgcattaattggctgttaattgttgttttggaaacatctttagcctccattttaaggtcgaccgacgcgaattgaatggccattggagtgccgttgcatctgagcatcaccccaccgcaagtgccaaccaacacgtggccatgtttttgcccgtatgttttcgacctttttccccacttaaacctaaattttcacaaattcttccactgagtttcttttttcagcccaacccgcgactctccgccactcgaaaccaactcagacaaaaacttgccaaattctcttcggccgatttcgcccacttaattattgatttgcttaaagaaattcgtcgtcggcgtttaaatttgcccctcccagcgacggattccc

SEQ ID NO: 84961 - DNA, 1692 bp, Heterodera glycines
atggtcgacgaaaaacagcaacatgaactgcaacgtgtccgagcagtgcatggagctgaggaagaggaggacgaagaattgtttttgcttcatgagggtaaaaataggcaattgaaaaaatataccgattttgggatttaaagaaaaaacatttttgaagaataaattattattaggaattaaattttcaaaaaattttgagttcttaacgggtgttttggtttttgttttactgcatgttctttaaaactttttcgaaattttttagaattttaggacctaaaaaaatcctaaataatagaatctacaatgtaaaatttgtaattaaaaaatatgaaatttagacacttcgacggaaccgatgaacattattgatgttgaagatgaagaagattttgaccaggatgagtatcagcacaacagagggataaagattttcgagcgtgaagaaaaaatggagggccaacaaataatgccacagcaaagggcaccttcatctgtctccaaagtagaagtgattatgatcagaattagcagggggctgcctagtgcccttatttccaagattgatttgtccttatttagatggtctgaaatctttgaaattggaaagaaattcgaatcaaacaaaaaaaaagaaatctttaaaatcctcaatttagttattttggacaaactatttacatttttcatgaaaattcaaaaaaaagtttgtccataaactgctttttggcattgccggacccatgcccttcaaaacattttttttgaagaacttctttacgggaggtctaatttgctcataaatattttaaaaaacttgacagccctggattagatttaaacgtatttcatataatagaacccctgggatatttttcaactcccttcaaaaggggggctttatttcaggggtgctctaattcaggggcttttattataggaaatatggtaatttaataattttttaataatttttcttaattgtccttcagatttccgatgaacaatctggtgccgaaatgatttcgggctctgtgtcggctggttcagttacttcttcaccagccaaacgtcagcagcatcgaacatcgcaggaaattgctgggtaaatttaatgtaaattttaattattgtaattctttttttttttttgtaaatttttagttccgccaatggaagtttgttggaatttgaacggattgagcgtgaaatccatgaagttggtgctgaacacggcggtgaaacatcgccaaaaaatgaaagggcacgggctgaaattgctgcagccgctgctgtcgctgcggcacgcggttcgggtgaggcattaataaatgttgttttttttaattaaaaaaaaatattttaaaaaattgggactaattggatattcaaatacttaaattaattttaaaacaaatatttattatttaaatcaccaagctctgagaaataatatgtttatttgttttctcatttacttaaatcaattagaaaagtgaaatattcaatgagattttttgaattttcatagtccaaccagccgaattatgttattttttttgagaattttttatttattattttttcgactgattgaaagtaagccgttttttaattgaagtaaatctcatttttgacttaaaatatgacattttttcaaatttaatcaacaaagcgcaacaaaataaa

SEQ ID NO: 84962 - DNA, 1432 bp, Heterodera glycines
gaccatctcatcaccacgccggcccatcaccacgtttcgccattggtccgttctcgttctcgctctgagactcgtgccggcacttttgtcggttaccgtcggacgtttgtcaattggtgctttgcattcaaatccgtttgcttcattcagacgatccgcctctttcacttcgaatagtgcgggcggtttcaccctgcccagttacggtaggcgcggcgattactgtcggcttttcactttcatttttcgtcgccaaacaatcaaatggactaatttgtgaccgtaattctctcttaaggctatggcggcggatttatggcccgatcgttgagcagatcaagtgcctgcccattgcttttcttccgattgcatttccccacttccctcagattcgtccttgtcactgttcggccgtggtctccattcgtccgccctcgacagaacgccgccctttcacaacatcgccgtccaacggccgacgccccattacacggacaaatgtcagactcacttcgaaactgacaaatgcttctcctttttgcagatccttttgtccgctacagttacggcaacattgagacgggacttagcatcaaaacgcaaacggaaatggtaaaggaaagcaacagaaagcaaatggcatattgccatttcagaagtcaccaaattattacggcataaaagacaccggcacaaagagatggctggaggggttggggggggggcaatgaaagcccaattaggcaccactcccattcagcaagttgaactcgtacaactccggcatcttctcgcgccccgtctcgagagaacggtccatcgaaaggccattggcgcccattcgttcgtatgtgaagtgagttgagcacaatttgaaccgaacagtgaacacatatcaaaaacatgtcaagatatatgccaacggaggatgccgttgatttgttcaagaaaagatgtatgacagtgagcacattgtccaaatattggtgggtaaaagggggaaaagcggcgccgaaaaagggggggggggggtaattgccaaagggaatgccaaaaaaggaggggcaaattcaaggcaaaggcataacatttggccattcttgaacaggctgcagtccaccgggtccaccagccgtgccaacatttcggcccaccgctcttacggtcgcccctcctccgtgtccacgctgaccggctcgtactccacgcgttacaatgctccgccaacttcgacaagttatggcgtttttcgtccgaccaaatattactccagggtggccaattcactgacggccttctgaccaacggaataagtgtcgtcgtccctttggtctttttcacgtgaaagtcggcttcactcttttgccggtgtcgtccgatgagttcaaccctttccttccttattttatgacaattgtctaaacaaattttt

SEQ ID NO: 84963 - DNA, 269 bp, Heterodera glycines
  unsure (1)..(269): unsure at all n locations
agctcagcccatcaacacaaaccgcatatattgacaacaaatggtaacaaaattcacaaatttattgtaacccactgtttttaattctatgagatttcagttggcggtcacttaccacacgccgcccgaaatccgacggaagacgaattagtgggaccgaataaacgaaacatntaaattgaaaattaataacggattaccaagcgagaagcacatgtgctacagacgttgttttatttaaacgaataaagaacaaacggcggaaaaga

SEQ ID NO: 84964 - DNA, 706 bp, Heterodera glycines
attaaatttatttcaaaattttgcagcttacaaattcactttttcaaaaaaaaaattccaaaatttttttggcattttgcaaatccacgggaaaatttcggcaaattcaatacaaatatatttacataatttaatggtactgctctgtcccctcccgcacatcatgtaatttacacgacgctttcataagcctcctaatttggctccaaaaaacactttttgtcccctcggggggggcggtacgcccatcttctgatcaaggtctaagcaacaaatccttgcaatttcaatattttttcttttaagtgccgtggcgatggtcgcacttacaaagtgatgttgcacattccgcagtttatggacatcacttggggcaattcctacacgtatttgctgcacacccacggcggcccccattggcaattcgaaatgattcccttttcacgcttcgttttcacagtcgaagggcgtgcaattgatgttcaatatccgttggaccctcgggcggcgaggtaacgaatcggtctgaatttacttccctgtgagcctaaaacttttgagctcgattggaatcactctcatggacagaattgaggggccatttcgtctggaaatcgactttattggtgccacacatgacataagtcacctcgaaaagcatgcttatgagaaatacaatattcccctaggcaatccgatgttgtaa

SEQ ID NO: 84965 - DNA, 244 bp, Heterodera glycines
atgattagaagaggtgcaacagtgattagaagagttacaaaaatgattagaagaggtgcaacagtgattagaagaggtacagcagagattagaagagttacaaaaatgattagaagaggtgcaacagtgattagaaaaggtagaacagtgattagaagaggtgcaacagtgattagaagaggtacaacagtgattagaaaaggtacaacagtgattagaagaggtgcaacagtgattagaaaag

SEQ ID NO: 84966 - DNA, 1179 bp, Heterodera glycines
atgatgaaaagttctgctgatgctgagcagttcggccgtctttcgttttcgatcaacagtttattcagcacccaagaagtggcatcgtcttcgagtgcgtcggacccgacaacacaattaatcatttcatcactgaattctgtcagaaaaacaaatgaaggcacagtggaaaatgcgacgaaaaaggcaaaaagcaaaaccaattttgacatttttacttggctttgtttcagactgacaacaaagaattgagcaccgacgaggatgagcagcaaaatgtggcgagcacttcgacgccggaggacggagaattttcaaaaatcagtcgtattcgaaagcgccgctacagtcaggcacgaatacagccggtaattggcacgggaatattgtggaaaaagaagtaattactgaaaaaacattttggaaacaattgaaaacttcacgataatagtaaaattgatccccatttttcgacataaaaagaaaattggaaagtaatcaaaagatgtattcggacagttttcaggatcctgatcataaaaatgatattatttcgcatctttaatgcctgacccaaaattcgaaggaaatatcgttgaaatttttcgaaattcattaatttgttgtgttaaaacgagtttaaatgagcattttttgatgatgatttttcacctttttactgtttaggtattcatacaattttacaattagtgttaatttatccaattaataaaatttaataatctattttaattccctaattttttttagacgagagtgaaaaaagtaatgcaaagtgacgaagacatcggcagaatggtggccagtgtgccggtggctatcggcagtgccatggaagtttttgcggagaaattgttgctcgcagcggccgaaagtgtccaacacagttcaaccaaaacgctctctccaatgcacatgtaaaggaagaagcggcaaataagcaaatttttaaagggagaaggagaaattgctacaatagttagagtggaatttagacttttgcttccgttctttcaaatcccaactttcagcaaaatggccgtttctcgcgttccgcaattttcttttttggagcctatgttgagggatgttccgatgaacccgaaaatggccccctcttttggacagcaatcgtcttcaacgtccaacggcgaatga

SEQ ID NO: 84967 - DNA, 1831 bp, Heterodera glycines
gcgatcaagcgatgctacagcattggcggcacgccaacccaatcgccgatgcccaaatatgccgcactgattggcggcacaccatggatcaacagtaccaatacgattggcacaacgtcatcgtcaccgccatgcacagcggcggcggggacgacgccaccggcaatgccatttgggcgccaatttgaattgctgacaaagtgccatcaacaaaagcagcagcagcaaacaccaccgccgccgctgctgccgcggccaccttctaccgtattccccactactgtaatgcagcaacaacaacaaacgccgccgccaccgtcgccagtgacaacagcaacaagtacggtagtgaacgggccgggcaatttgtccgaattggttcatcacctttacaacacacaacaaatgcagttgcagctgcaacaactgcagcagcagcagatgcttgagcacataatgccaaaggttggcggcattattccaaccactcaaacgatgccggcaccagcagcggtcacaacgccaatggttgtgccaattcatgtgttgcaaagcttgctgaccacaaaggttgtgccaattcaattgacggaaagcattgcgccggcggcaccgattgtgccaaaggctgtgccaattcaaacgccgcagctgtccttgtcagctgacaacacaacgccaaaaagtgcatcgcaaattcgagaaactgctgtgtatatagcgccaaaagcgccgccgttttcagcggctggtaacacaacgccaaaaatgaaaggagaagcagtgccaattcaaacagcggcagctaaacaaacaccagcagcagcagcagaagaaaatgccaaagtcggcacttgcacaaacaccgacggcactgcttcatcttcttcctccactggaccatgcttttcctcctctaccaatgcttttgctgctgatgtgccaacaaagcaaaatgcttttgctgctgctgcttatggtgaaatgttaatgacactggtgagagcacatgaatgaataaataattcataaatttgaaatcgttggtaaaaatggatgtgctgctatttatgtaaagagaagaatgaggggataaagctaacaataagctgagttaagccaacaaaaaaacccatgctcttttgaaatttgttttttacagtatccacaggtcttggaaattccgaatttgacctcaaaattttttttaaagagatttgccaagaaaattaatacttttctaatgcctaaccctagaaatctgacagacctgagaatttttttcagtttccttatttctaagccagaacaaatctgaaaattcagaacatgaggagtctttgatggatggaaaacgaaaatttaaaaattaaaaaaaaatgaaaatttacaaatttttaaaactaaaaatttttttccccctaaggctgacaaaaaggcggaaaagcaaaaaaacagttcgcctacattcaacaaaactgttcaaccatcagcagcagttgaagtatcaatgcttcaacaattcaacccccaacagcagcagcaaatgcaggcaaaatttggcaaaaaataaattaaaaaataaactaagttaaaaaaatcttaattttagttcctcatgcaaaatttgctgcaactttacggcacacgatatgaccccaccgttcgctcggctttctctgccgtgccgccaaaggttgagcgacaacagcagcaacaagttcaagctgtacaagcaacaaaaactgctgctgcacaacagcaacaaatggaacaacagcatcaaaaaaaacattgcgaaaatggtgcccaattagtgcaaatcgattaa

SEQ ID NO: 84968 - DNA, 1263 bp, Heterodera glycines
atgaaaacgcttcgcaaccaagtgggtcgccaaacgatgccaatggtggtgaattttggccgggtgggtaaaaacttttttttttttttttactattttaaattttcaaattatttcagactggggacgggcaaatacctggacaagtcgggggccgccaatcgtcgatgccaccatctgttgtaccggtgaatttgggcagcatgccgccgtaccaggtacaacaacaacaacaacaacaaaaaaatttccttccatttcttacaaccatttatttttgaaaagggcctgcaaacgcagcagcgcgaggtgatttatgatgtgcctgcgaacggtgtgccggaagacgacgatgacgccgacagtttttgaacagcgatgagccgacaaaataatgagctttaattctcataaaatttttataaaatttgggaattttcacaatgctttcacattaaacaatatttggcaaataaatgtaattcaaaatgacaaattgataatttataggagaccattagtagaagaaatttgaaatgtttttctcgtagatcattaggcgagattaaaaaattttgaattttaaccatgtgatataatctttttgaatgattaatgtgtgatatagtggagaaaatctgtcggtacatcaaatgagcaatttgagggtcacatccattatcgggaattcgggatgctttggtgcataataaagctgcctcccatttggagaaaaataaagatgttttgcaaggtcaaaagcgcaccatttaaattcatccctcccgtctcgctctctcatttgctcaatattttcacatttatttattctctacattttgttatatcgcaatagcattcaagtacaccaaatttacttcaaattaaaaaaaaaatgtccgacagcccaaccctgacgcccgaaacagaaataagcattgcatgggacatccttgaaaatgacaaagatgtaatgatttttttttctttcttcaatttgaattcaaatcttattgatcatttttgcagtggtacaactggttcactccaacgaccgtcaaacaagcgtgcgtcgaggcattggcatttgcgagagaaggaggactaaagcacgagaacattctgaaaataatcaagatgattgaggagagagaaaaccacgacaagaaatgaaatgtcgatcgatgaccgatttgttaatggtgatgtggatatatgatcattttttgggacatttaaaaatttgtgctaaaatttgtccaa

SEQ ID NO: 84969 - DNA, 612 bp, Heterodera glycines
atggccattaatatttcggacaccaaatcgcttttcaatcaaatcctcgcccagtccgatatcaccataaccacaagcggcataactgtcagtggtccacgcctatcgaccccccgttttttaccgtttgacgattgtggacgctgccgcgtttgcaaagcaaccgaggccgaggtggacacaatggtgaccaaagagggggtcacattgtggtgcactcgtatcaacaaaccccaatttgtgccgttcgatgtcgtctacgacctgccagggcactgctttttccgcgtgaagaacaaagcgagggtgttcaatgtcccctacggagacctgccctccgggacgtgtgccaaaaacaaaccgactgaccaccaacaacaacaacaacaacaacaacaggacttgaagcgcaaggcaaaggtagcacttgacttggtggaggctggactaatggcagatgctatgcaggacggcgcacggtggaagaaggccaaaaccgctatcaacgtgcttggcaatatcctattggctgaatcgttggacaatacttccgctcctccgctgaaaaatgatgccgtggacatcaaaaaagaagaagaagaagaagcaaat

SEQ ID NO: 84970 - DNA, 1026 bp, Heterodera glycines
atgcgggcaacgacaccggcggatggcaccggaggggcggcggatgggcacggcacaagtgacaggaacaacaacagcaaaaacaacatggaggcccaatcagtgatcggcatgtcggaggcgggcggaactgcggatgattctgtggaatcgtaagcatacggaggattaatcagacaaattgggacgagaatcccggggttacgatattttggggactgacatgtcgagaatcaatcagcacatagggaaaaggcccgaaagggtcaggaaaggatacagggaaggattttattcgaaaattttcattggtaatcttttgaacagtcgcccccaacggcgcgtctccgtcactcgattattttcactgcgaaatggccgtcttttttcgttgaaaagcattctgtcggggggcgacgagcgattgaggggaaaaggaagaaaatttaatgggaaaaacggcacaaaaacgcaggaagaaagtgcggaacaacagcagcagcaaaggtaaaacagcagcagaacaaatggaaaataaatattaaaagcgaaattcaactttagtgccggaaaagggaaatgaatgaaattttgagaaaaattttcaagaaaaacaaccggcggaatttaaatttaaaaatgcaaagaaaatattttagattcaaaataagtctcttttctgaactttccattgtttttgtgcttaggtccgtcactctgaccacccccgtggccatcaacggctcttcttcatgtgccgaagctgcggcggacgcattgccaacgccgcagccgcagcaattgcaagcggtgccaacgccgacgccccctccggcggagttttggccaaacggcgcgtgcaaccgcaaaagggaggcggagacggaggacggacagtcggcgaggaccacggcatttacaccggtgatgctgggcgaaagtgaggacttcttcccgttcatcgacgactcggcaggcacatcgttgcaggaggggagcaaagcggaaaaagaggaggtcaccagg

SEQ ID NO: 84971 - DNA, 196 bp, Heterodera glycines
tgagccaatgttcaaccaacgactcatctccgttttctctgcacccgcctacacaggccaaacaaacgcgggcgcggtactggaagtgaagacgtcgagccactttaccactcactttttcccgccccaatcccagtgattgattgtactttgtattgttgttgttgttgtgtttataataaatgctcttttgtgc

SEQ ID NO: 84972 - DNA, 7221 bp, Heterodera glycines
tcttctccttcttcgtccgtctctctactcgccatcgtcacaattttctgtttgctgtgcaaatgttgcgtttcggcaccgcgtaattaattgttttcatttacaattaattaattaattgcttttctgcagatccgtgctgtcccggcagtcaaaaagtggtttcgctgatggccaattacgttggcactttcgcccattccttttcaaaggcatcgctttgttcggatgcccaaagtgttgcgggcgcattgaaaggccaactgatcggctgctcgaagggcggcgacgcaactcttttggccgacatcgaagcatctcttggcactcattctgctggtaataagtgggaatggctcagactaatggatcatttcccaataataataattattattattatgtttttcccctttttgatgagtgtgcccacagcctcggcttcgtccgtgccatgttcgtcattgccgcctccgcttcttcccatgccagcaacaacagcgaatggcaggcattgagtgcccagtttggtcagcaaatcagtgaaattgactcgaaatgtgccgagtttggcattggcattgccaaagtgccatatgacggccccaagggtaaaactaataagagacaataattcattaattatgcgatctcttaaggcgatcactcccaacgaaatgtgcctggcacggacagtgtgatttctatgcccggattgaccggctcacacaaacaatgaaaatgagtcaatgagatcattttggagttcattttgttatttgtccgtcaattagttgttggatttgtaatttagcaaaaataaataattattaaaccgcttaattggaatacattttgcatagacttatttaattgaaaatacgattattaaatcattggcatttatttgccggcattttctgcttgcaaattcatttgtcgcccaattttccaacttcgttcgccaacgcattgaaacataatttgttggctaagcccaacaaattaaattggaaaataaaatggctaatttcgaagaatggcattgttttgtcagcattatttgtaaagcaaaaggaaatgagtgggcgaaataatttttggcccaaattcaattgcaaaaacggaaatgcgtgggttttgcaaaggtataaaagggcaagaaattttaatatttcgacaattatgcaaataaaatcattttgccattcctttgattttccgccgctaaattcaccaaatttccaaaatttaaaaatgcttttctccttcggcagtttctccagcgaagaagcggaggccatcgttgtcggagtgttccctccgctcagataatccgagaggaaattcaactcaaaatggaaatgatagcgatggcattccgaggccccaaaaattttcgggaatcagaattccaaggctcaaaaaggttttggaaatcggaattccgtgccgtccctgctgtgtggccatcacattcggctgatggacaactcagccttacgagaatttacaaaaggctggcttaggctaggcctaggcttagacctaagctttaggcgaggcctagcttaggcttgcttgggcctatgcttaagcttaggctttatttgttgaatttctgtcattttctccctcttattcttccataatttcccccccccccccaatttccctaaaaatttcaaaaattcattttttatttcaaattttatttccgttttctctctcttcttttataaatttgttgaatctgtcagttttgttggccaaatgttgttgaaatttgtcagtttttgtttgccattttcaaaaattagcacaaaaagtgactaaatttatcgtttgcttgtcaagaaagaatttaatttaaatgttttcattaaacttatccaacagagaatttagatacaaaaaaattttggcaacattttacaattttagaattagggatggatccccatagaaaaaggcaattttagtgcaaaatctaataacaattctcacttgaatttcaaaaagtttttgccggcataggacgaccaacaaaagcagaaaagttgccaaattcaatttcttcggaatccctccaaaatttgctaaagatcggcggaaaaatgcaaattttgctgctgtttcatttttcataattttgcaacgaaaagcgatggaacgagagaaatccgttgagggaaaggtcccccccccccttctgctacatttttgcattttttttttgtttgttcctaattttggcgaatacacatgaaatctctctttatttaaaatgagaaatggagcaaaggatctttgttttggatgcctttggttggcacaaatttattttgagttttagtgaattggttttggctgttagtgaaaaccacaaaattgtcttctaaatcagcgctttttgggtgcttttggggccgcactttcaaattgtaaaaatttatatgctgaatggatgcacgaaaaaaatctatttcaatgtgaattttaattggaccattatactacggcagattgtccaaattttcgaatcggttacctaaattaatgactgaccaaacatacctaagtgaaaaattgaaactaatgccaaaaatttaaatcaaaaacgcagcgttaaaattaaacagttggcacgaaaacgcatacaaattgaagaatttcggaccaataattagcacttgggtattaaagaaaacacagcagagagagagagagagagaggtacataaacattattatgacggaaataacacaatagagatcttgacaatcacactttgtcattcgcgagttttgagcattcgacgtggaacgttttcccatgaaagttgaacttggaacactccaattccgcggccattctgcccgaaatggactttttgcacgctaaaacaagttgtgtaagtagccgaattgtttagtcgaaagtacgctttgctaccgttgcagtggggtagccacgcgctctccgtgatttcgaacaagtacatctggtcgccttttgcttgctgaaataggcaattcacatgcatgggaaatcgaccgacatttttaccgccacacagttgcaacagttgcgctgttcgcagccttcgtcgtagtcgtcgccggcaattaaacgtattaggagataaggcgtgttaagaatcatgaaatgaaaaagcattttctgaagggaaggaaaatgttcacactgaaagattaacggaatccaaatccccctccttcgtctccgcttgagcctgcaaatcacagacgcaaaagtccgttccgtgaatttgtcgtccgtgaaaaaaagacacacaaatgcgtaaaaagaatgagctgtttcgcacctgcacattgcattatataggtagttgttcccttctcgttggtaattagttagaaatttttaagaaaaattcattctttgaacacttgaaaagtttataaaaagggtcgaattttgattcatcatcactttgcctaactactccctattattttcctatggaaataattaaatccatagcagagcgcacgctacaggtgtaaaatttttttttcctttgtaaatttttttaaacaaactttttttgagaaagcggaggaggctttgggcgcggagacgactccgttgggagcagaactggaaaaactttgtgcaaacgccgaacggatcgcagtgcaacaggagaagctcatggaaaagatggaactctacaagcaaaaactgagcagcggattggcacatggcacagcaatgctggtggcgtccaaaatggtcggagagcggacacccttcggagaagccctgcagaagacggctcaaactctggcagctcttggcgcggcgcgacgacagctcagcaaaagcgacgtgaagctgggaggcaccaccacaacaatcagcgctatccgcgtgagttagcttgttctgtttttgttttttgctggtaatttcccatttttcagaaacaactggcactgctgcagacgaaacgcttggatttggacgtcttcaaagcgaaatttaggcgcgcatcaacaaccgaggaaaaaaatgccgtgagaatgttgttttgttgttgttgctgctgagttcacatttttcaatccttttcagattcagccccaattgcaacgagcacagagcgagttcacgcgccttcaaacacagctgaaggagctcgtcttggactaccagaagaaagtgcagaacatgaagaagagcctgctggacttcgtggaggcccaaatcaaattccacacgatgtgcgtccaaggggcaacaacaacagcaccagcaaagtcgatggcagaagctccgagaccattccccgacaatttgatccaaaaaattgtacggtcgaaacaaatggagtttccgaaagaggtgaaaaagcgagttttgcattgtcaatttcatccctttttgcaggtttccagcggagaaattcaacaactgtgcgctgccgcaactgacgccttcaaacgccaaccatcgctggtcgaaatccttccgcctgttatggtctgcggcgacgtccacggccaatttcctgacttgatgagaatcttcaactgcctcgggaccccgccggagaagaaatacctgttcctgggcgactacgtggaccgtggcgcgcaatccgtggagaccatcatgctgctgctttgctacaaggtgtggtttggctttttcagccaatactaaagaaacgtttccatttttaggtcaaatatccgacatcgattgtgctgctgagagggaaccacgagacgagcaacatcaacgcaacgtgggttttttttctcacacttattcatatttaaattttccccctctttttttaggtacggcttcaaaaaggaactggaggaacgctatccggcccattcgcaagccctgttcgacagcttcaatgacaccttcgcgtggatgccgctgaccgggctaatcggccaaaaaatattatgtgagatgctcttttttttgttcattctccacctttcaattttcaggcatgcatggaggcatcagcgacaaaattcgaagcattgaacagctcaaacaattggaacgcccgatgctgctaccgccgaccgatagtctgcacattgaccttatgtgggccgacccgatggaagcgcaaggacaactaccgaatccacgaggcgcaggtgtcctgttcggcgaagatgtggttatcagaacttgccagctgctgaagatttcgtgcatcatccgagcgcaccaagtgagtttaagcggccttcgttctaatcagagattaatgtttccccatttgcagttcatccaatccggatttgagccaatgttcaaccaacgactcatcaccgttttctctgcacccgcctacacaggccaaacaaacacgggcgcggtactggaagtgaagacgtcgagccactttaccactcactttttcccgccccaatcccagtgattgattgtactttgtattgttgtcgttgttgtgtttataataaatgctcttttgtgcttcaattgagatggttttgtagggaagagggtggcgagggcggtaaaattttgcgtctgtttggtcggagggttagctctcgaagaactcggtctgcttaattctagtaaattcatgtcaaaattatgatggattttcacttttttaccgttgttcacccactaaaaaaactcatctaatatactgttttgtttataccttttatgtatgtacttgaatatgcataaaattaattgacaacataaaatttgtcgaaaatgttttcatgtgaaagttggatttttgacttgtgtcattcgtctcgaacaactattccagctacatacatattgatggaatttatttttgtgaatgaataacagtaaaagtgaaaatccatcaaaaaatttttttgacgttatcacttgatgaaaaatcatagattagatgatttatatgataatctgatgtcagattcgtgatcagcgccatcgataacccccgaggataacactggtacaaaaatgacgagaagagcttgcaaaattcataaacaaggaacagaaacttttgatctctaaggaccgaaaaattttcaaaaatttcattttttggggtttttcaaaaatattaataaaaaatgtaactttttaaaaaatggaaaatatgtccaaaaattaaaaattttctatttttactcagattcttcaaaattaataaattttagctatatttttgcatttagctattttcgagatttttagcttaaatggaagctgttaaattttgcaatatatgcatagacttaaccaattttttccaaaatatttgactacaaatgccaacatcggatatgccattctatggatggcatttttccgactaaaaacgtatttaagcaaaacgaataagctaatcccatcaaccaatcagcatcattaattaattccatcaaatctgccaaagatccttcaaaaatgtcttctccttcttcgtccgtctctctactcgccatcgtcacaattttctgtttgctgtgcaaatgttgcgtttcggcaccgcgtaattaattgttttcatttacaattaattaattaattgcttttctgcagatccgtgctgtcccggcagtcaaaaagtggtttcgctgatggccaattacgttggcactttcgcccattccttttcaaaggcatcgctttgttcggatgcccaaagagttgcgggcgcattgaaaggccaactgatcggctgctcgaagggcggcgacgcaacccttttggccgacatcgaagcatctcttggcactcattctgctggtaataagtgggaatggctcaaactaatggatcatttcccaataataataaattattattattatgtttttcccctttttgatgagtgtgcccacagcctcggcttcgtccgtgccatgttcgtcattgccgcctccgcttcttcccatgccagcaacaacagcgaatggcaggcattgagtgcccagtttggtcagcaaatcagtgaaattgactcgaaatgtgccgagtttggcattggcattgccaaagtgccatttgacggccccaagggtaaaactaataagagacaataattcattaattatgcgatctcttaaggtgatcactcccaacgaaatgtgcctggcacggacagtgtgatttctatgcccggattgaccggctcacacaaacaa

SEQ ID NO: 84973 - DNA, 463 bp, Heterodera glycines
gtggccgttgttctttcgtccgttcatctgaaggaagacaaaattgatgtgccgcaggtgaccaaatgcgctgactcatttatattcaattttcccctgtttttcagcgcgttaaacgcggagaatacggcggcggtgcctatggcggtgacggcggtggcgttggtgcgcctgccccgggcggtggcggcgcggcgaacattgccaatgtgaacataaaccaacagaacggatgcaacgggcggggaccgcagtaccaatgggcgtacacgcggaagacgggatgggtgtgcatcaacatcataaacgtgatcatcaaccagcaaagtggcggaaagtgatgagaggagccgaaaaaaaagagagagagggaaacggaatgccaaacggaaaaaaagcaatcgaacggtgtgaaaaaatcatactgtaacggatgtacgataaatgttttttggaatagtta

SEQ ID NO: 84974 - DNA, 736 bp, Heterodera glycines
tcttctccttcttcgtccgtctctctactcgccatcgtcacaattttctgtttgctgtgcaaatgttgcgtttcggcaccgcgtaattaattgttttcatttacaattaattaattaattgcttttctgcagatccgtgctgtcccggcagtcaaaaagtggtttcgctgatggccaattacgttggcactttcgcccattccttttcaaaggcatcgctttgttcggatgcccaaagtgttgcgggcgcattgaaaggccaactgatcggctgctcgaagggcggcgacgcaacccttttggccgacatcgaagcatctcttggcactcattctgctggtaataagtgggaatggctcaaactaatggatcatttcccaataataataattattattattatgtttttcccctttttgatgagtgtgcccacagcctcggcttcgtccgtgccatgttcgtcattgccgcctccgcttcttcccatgccagcaacaacagcgaatggcaggcattgagtgcccagtttggtcatcaaatcagtgaaattgactcgaaatgtgccgagtttggcattggcattgccaaagtgccatatgacggccccaagggtaaaactaataagagacaataattcattaattatgcgatctcttaaggcgatcactcccaacgaaatgtgcctggcacggacagtgtgatttctatgcccggattgaccggctcacacaaacaa

SEQ ID NO: 84975 - DNA, 1906 bp, Heterodera glycines
atgaatgaacgaatgagagaagcaaatgacccattgccggtaaatgtctgcccttttatgcattttgaaccggccgagcagcagcagcaccaccagcagcagcacaaagaaaaggtttaccatttgaatcccaccaaagaatgcgttcagtccatgtgagtcccacagaattaaatagaatatgaatataatataatataatttttaagcatataatttaaaaagttattaattgttagggttttgtaaattttaaagggattttttttttaaagaaattatagaaaaagctaatgctccttattttagtttctctttaaactatttgtaaaaaagtatcaaaattttgatttggtaatcgttgaattaaaaattgcgttacagtcaaaaattcttttatttcgataattactttcagaaaaattcgtgttcttttccatatttcattcttaaatttgtcttcactacattctttcactttcaacattttcaccattttttttctttatatgctttcgaccatttttcatcattagcagtgccaatccgctgttaatccgtttctcgctctctccctccaatttttcatcggcaataatggcatttcatcagtgtcaaaaaatccccattttttcgtttcaataactttggtctcggcacaaacacttcacggcccctccccaacatcatcccttgggggggggggcgagagaaaggcaaatttgtcggcacggcacactcggtcacagtgccgtgccatcatcatcttcgctgtttggcttatctgtgcgacggtggatttttcacaccgcggcttttgccttatttttttacatcatttggggcgtaaagcaattaaaattttaatttataaattttattattattgcattttttcgattaaaaatattttctttttttgtacataatataagaaatttaaatcaatgaatttcgattgtttaataattttaaattaattcaaattttattagggtgcttcaaaagttcttccttatccatttagatgatattaacttattcaattaattttgtattaaaaaatagtccgatcaaatttcatgtgtttaaataaatattttttaaataagaataatttcaaatttataaacgaataaaatgctcttatatacacaactaattttttaaaatttatttcattaaattctccaaatattttagattaaagcagtgtccacccgcttttctgtcgaacttggccaaaaccgtttgtctgttttccatggccattttttactgttttcttgacggtggagtgctctcgtcgatgctattcctgctgcttgtgccattgtttgttgttggcatttgtgacgggctacagcaacggctgttgttaacccaagttattgacacaaaacgggacgaagccgtggcacaacaacggtaccacctgtttacggtaggtaaacaaagtgccaaaaaaaaattggaaaataaattcataatcctagaaaaatttaataaaaaattatatatttcgccgatatatgaattaagattttaaataaaaaagttataaatttttatttatttttagttaaaaaataaattttataatttttctctttttatttttttcactccaattatttttagcttttgcttttcacatcgcttggaccattttttgcatcgttacttatttaaactaatacaaataacacattaacaaacaccaaaaatttgtaattagtctgctaaatggtaataatttgcaatcaccaattttttcagttttggcatttgtccgctttccattcagtttggcattcgcttacagcagtttttttgatgttgcctttttgcaggtgtatattaacaaaaacacactcaaacaaatccatggactaattacaataaa

SEQ ID NO: 84976 - DNA, 989 bp, Heterodera glycines
atgccggcactgacaacaccaatgaatggcactgctgaaggacaacaacgacagttttggctccctaatgagctcatccatgagctgctcatatgggtccggcccagctatttttggcgcgttcggcaaatgcttacaaccagtgccattctgtgccctttgcttatgggtggcaaacatgccatcacttggcatcagccttacgatgttggggtaatgcgttaaaaagtgatgtccatttactttggtgcaattgaagagcgttaaatcttattttgaacttagtgaatcgaatttggtaaaatagtgactaaaaatagaaataaatatgtaattagttgtaaaaaatccttagatgtttttttcaaaagttctgccaattaaccagaaattaatttttgccattttattttatttatttaacccttatctaataaaatttgcttaaaagacttgaagcttaatttcttattaaaaaataagttagctttatccttcttatatctctgagtgggttttattcttcatcttattctctgccttatcattcatttgcttattgcctagcgcattatgcgctgttaaattttcatggctttattaccatttttatatttaaaaaaataaatattttaccttttatatttaaaaaaataattcttttttcttttcaaatttggtaaaattgctccatatataaaaaatataataatatatataaataaattttgatttgatttatcaagaccaaagagatgagtcacgcggatcgtacatttggaagcgggaaacagtatgcgctattatgccgatcacattcacaaacgctacccggcaattttatgcgataccaaactcactcaaacgggacagtgactgtgtatgtgctccttatacttgatgagagcaaatttgaatctccagctcaccttgcgcaatcggtgcgtaaaatgagtaaaaaggaatatttgtttatttatcctatttaa

SEQ ID NO: 84977 - DNA, 1432 bp, Heterodera glycines
atgccggcactgacaacaccaatgaatggcactgctgaaggaaaacaacgacagttttggctccctaatgagctcatccatgagctgctcctatgggtacggcccagctatttttggcgcgttcggcaaatgcttacaaccagtgccattctgtgccctttgcttatgggtagcaaacatgccattacttggcatcagccttacgatgttggggtaataacacagtgagggcaaatataatggaaataggtccatattttggtgatacttgagagcgttagattcagtttatattttattttgaaccaaatttgctttaaaaaatcggagatcaaacgattaaagcttgaagaattggttaataaccaaaaaataattttttccatttaaatttttatctatttaacccttatataataaaatttgcttagatgactttcaccatagttttaaggttatgttaaatgcgggactaaatgcgtccttttcacatgactttagctttattttttaccttttgaaatttaaaataattctttttttcaacttaaatttggtaaagttgctccaaaattaatataaaaaataaaataaataaattttgatttgatttatcaagaccaaagagatgagtcacgcggatcgtacatttggaagcgggaaacagtatgcgctattatgccgatcacattcacaaacgctacccggcaattttatccgatacctccaaactcactcaaacgggacagtgactgtgtatgtgctccttatacttgatgagagcaaatttgaatctccagctcaccttgcgcaatcggtgcgtaaaatgagtaaaaaggaatatttgtttatttatcctatttaattttatttaaatctaaatccaaatatgcaaaagactttttctcttgaattgttattttactttggcatcagtctaattaattgactttttttgggggggggggggggggtcaaaaagtccaatttagctgctgagggccgttttaatagagatgtattggaaaatgccaaaacatggacataaaatatggataaaaatgccaaacataaatttggtttttttagcgcaacttccttgattgcagtggctcgcttcgtgaagggcaccaaacacttgggcagggaattactagcatgacttttgttcgttgtcctggtgaggtgcgtaaatattacaattctttatttaatttcaaaaactataaatcttgtcaatgatttttccttttttaaattctgattgagttttggatggtaaaaaaataacttttaaaatttgcagtcaaacaaattatgcataataaattttgcttttaaaataaattttataaatttaggaataaaaccaattattttgtccccaaatttacaaatattacaattccttgccaaaattataaaattacaa

SEQ ID NO: 84978 - DNA, 1493 bp, Heterodera glycines
atgccaaaggatcgccaatcggctgaaagtgttgcccaaattctccgtcccgccgccctgccaattgccgcatttagcgccgcttctgcacaggcgttggtcgacgcaaatgtgcgccgattcaccacaacagcgccgctgttcacggattacgtcaaaactttggtcgaactgctgaaaatgctcggctcggacttggtaaataaatattatttgttttgtttaacactttcactttactcgtaattaattaatgggtttaatcctttaattatggtgataattaattattgggactgatcagttttgtttttcatctaaggtttcaatcgttgactttggagatgacttcgcttacactccgctgctgcaagagaaactccgagccgaaggcatttcgactgccgaagttggcattcactgatctgatcactctcattaattaattacgcgtattccctttaattgttgtcgtttcaggtcgtgtctcttgaccacccaatgctcccctcaattctttccgcgagtgatgccaaaattgtcgtttcgctcgtccctcaccgcattctgcgcaatgcacgtcttggcgagttgcgagcattgatagaattgcacaaactttgggttggcattgacactgaattggacggaggcactgacgcggcggcgacggacggcgagggaaacgcggcggtcgattttttgccggaagacagcgaatttcgacagaatgccaaattgcaggtgccatgttggccattttaaattgctaatggtttgacaaaattacctcaatttgcattttcacagtttgtgacaatccgtcgccgtgttcgacaattgaaagagttcagcgcatactttctgcgcgtgttgcagtcgaaccacgcccattatacccttttgagggcgtatgccgagcaagtgttcgactgcgacgtgaccgttggcaccggcagaaactgtacagacggattactgtcagccgaaagaatggccaaattgcacaggtgccgacacacactgcatcattagtttgcccggcattttgtttagacaatcgaacaccgccgaggcagcaattttgttgacctatgcattggcgagagcgaccgaatggattcagtcgaaaaaggaattggcccaaaaatggtttcagtttcatgatttctttttgcccatttcccccttctctttcagcacggaacgtggttcatttgccggttgccacgatgccacccgcacggcactgttaagcttttcgccaaatgatcggctgcttagtagcggttccgtgcgaatgccgccgggctttatcaaacaattgagcgaaatgaatttcttcgaaaccccagagggcgttgttcagctgacgggcattggcattgaggcaattttggcggaaagggaggacaaagacggagccaacctttacaggcacggcacaacggaagaggagcgaattgtgcagaaattaatggatgaatgtttag

SEQ ID NO: 84979 - DNA, 143 bp, Heterodera glycines
cgtttgacttcgcctcgtgtcaatgcaaacacttcggggaaaactgctgccgatccttcagacgaatggcaaaagctgaaggatttgcttttaaaggcttcgcccgtcatcgttttcgttgtgtttggttggcgcgtggataa

SEQ ID NO: 84980 - DNA, 997 bp, Heterodera glycines
atgcagaatccgttggaaatgggcacctatcgcgtcgggtccgagacgtaccggcgcaactgtccgttggaaaaggcgtccaccgctgcgccagccgctggcgccgcttttggcgcgacgacggcggagaacgacgacggttccgcggacgaacagagttgagagagtttaattggcattttctagactcgttcttttttttagaattaaaatggccgcaatgattttttaatttcgaaaaaataggtaatccccgttagtttttttcttcctttgactcttgcatcagcttttcctattataataataatgtttttaatacatttttgtttttacgttttcaataaatgccaatgacattggcaatttgccaatgcgtcgctttgtttgccgatgcctttcctccctaaaagctcacttttctcaattttaccttcaaatcaatttccatcactttcaataacaaattgtttggcatgcatttccccaaaaaacaattttattatttttatggaataaaacattggcatgaatttacataatattttttttattttaaaaaagggttaatttttcaaaaatgcatttgctcttttgccttttcctcctccttttgtttgtcacaattgccaaatgtcctcagccttatcagcacaattttttcaaaccgaatgaaaatataaaaagtaaaaaataattttgttttcaatttttaatttgtttccatgtttagccctgagtccttcttcgtccggccgctgttcgtcctccgaagttcgtcaagcggattttgctgggtcggattatggaagtccgggaaaaagtaaacctaaaaaataacatttaaaacaattttcgacttttttcaggggcatgcatttcaactgagaaaagaaaggcgacgacaattttaacagcgaaagcagcgcaagaaattggcgaagtgtcgtcggccggagaaaatgtgccgttaattgtgcagcgaaaaactgtcgag

SEQ ID NO: 84981 - DNA, 1397 bp, Heterodera glycines
atgaccaaacagccgatttcctccaacagccaaaccgtttgtcggcgccgtggtgtgccatcatacattgaagaagcagcggagaatgccaaaacggaagtgccaacaacatcatcgacaaacatggcacggcacaaggcagaagcaaaagtgagaaatggcggcggcagcgctcaaatggcggcgcacagtcagccgacgaagggcccaaggtgtacaacagcagcagaagaagaggaaagcagtgaaattgaacagtgagtagtttaagtactcaccaggatggcattcctaggccccaaaaattttcggaaatcgaaaaccgaccccaaaaatgccggaaatcggaattccgactccaaaaatgccggatgttggaaacagataatcggaattcgaaaaccccaaagaattttgagattttgaccatttcgtcagggactcagttggcccgaactaaaacgcaaattttgtgccaaatttgccgcttaattggctttctacatttaaaataattattttttaaataattattttttttattagcttcgcccatgagtacaagaagcagttgcgccgcatccttccaagcacatatgcaaaacggttgttgcccgcgcaactgtaccggtacggtagcaaagattttggcattttgaattatggcatttttaaaaatttaaattatttaagtacactgatctacatctcttatctgttctggttcgtcgtcggaatgtaaagccattttttccttcaactttaattattttgcttataaatccaaaaattattttttttttttttctaaaaaatattttaatgtttatattttcagaaaaatttttaattttttgtcaaaacaacaatttttcataaaatattgtgtaaataaaatgtttaaattatttaaattccattgatctcatcagaaaagttaaaagcactcgttatgatactgtgcattggcacttggtgaactgctgaaccaaaacatacagtatccttttttaaagcaccgtaccattgaaatttttctgggcgaaaaaaggaattaatggtccgccggtggtgtcgagaggcatttttaatgatttcaaaattttatgatgatttattgcttacattagtgttgcaaaaaaaaaaaaaaaaattttccccaaaaaaatcgttgaaaatttttcaatttttttttgtgaaattttcttttaaaaattttcccaaatttttttttcagtttggtaattcgcaagacgaagtcggctgttgtcgcaatgcgttatgtgcgtgcccattccgccaccgtttcgttggcatccattgaacagtcggcacaatttcagcaactgttacaccaaattgaagacgaccagcgaccacccgcgttgctaatgtga

SEQ ID NO: 84982 - DNA, 830 bp, Heterodera glycines
atgcatgagtcatttttaaaatatgtgctaattgagtgccttattaacttgcaaataaaatttggtgagtttcagagcagtttctgaaaaaatatttatgaattaattttgctaaaaaaataaaatagtgaagctttaaaaattaataaaaaattttaaatcagaattactggagttagcatcatagcagtgcttttccttttctttttgatgctctcgcaaaatctggttcgcttctgatcagtttataaaaaaaaaagttaagcctaaaatttttcgcatatttaaaaagcaatttaaaatttttagatttttattcatctccctttttgatagtgtaagcatctgagtgcctaaaataacttgcaaataaaatttggtgcgtttcagagcagtttctgaaaaaatatttaagtagtgatcagaagcgcaccagattttgcaggggcctaaaaaggtcaaggaaaggcgtctctgcgttgatttagcagtagtacctatgaatttaaattttctatgaatttttaaagttttttgaaatttttttaagtgcaaaagtggtggtgtctgcaaaaaattttcaacgggtttaaaaaatctaggaaaattagtaagcatttgtagtgttccgatacgtatccctgcaaaatttggtgagcccctgatcaattacaaaattatttatggacgatcaaatttttagaaatttttatttatttttgcataattaatccataaatattttttcagaaaatgctctgaaacgccccaaattttattacatgctagtttaggcactctgatgctttttctatcaaaaagggagatga

SEQ ID NO: 84983 - DNA, 522 bp, Heterodera glycines
tctgggcgcatcggttcggggggactgccccgaaaacaaaaaaatcgattttttcaagtgtccgtttggggtactcaaacaattatggggagcaaaaatccaacgcagaattaaagtacagactatcgggaagctattcccgaaggattcggtctccccataaatctgggcgcatcggttcagggggactgccccgaaaacccaaaaaaaaattttttggataaaaattatttaaatgaactgactagataatatttaaaataggttatttctcttcctttcagtatccctgcaaagtttggtgcgcttctgatcagtttctgaaaaaaaagttaagcctaaactttttggcctgtttaaaaaggaattaaaaatttttaaaaattttattcatctccctttttgatagaaaaagcatcagagtgcctaaactaacatgtaaataaaatttggtgcgtttcagagcattttctggaaaaaatatttatgaattaattatgcaaaaaataaacaaataatgaa

SEQ ID NO: 84984 - DNA, 432 bp, Heterodera glycines
atgtgtggaagaggtacagctgtgattagaagaggtacaacagtgattagaagaggtacaaaagtgattagaagaggtacaactgtgattagaagaggtacaacagtgattaaaagacgtacaacagcgattaaaagtggtacaacagtgattaaaaaaggtacaaaagtaaataaaataggtaaaaaatgataaaagaggtacaaatctgattaaaagaggtacaaaagtgattagaagaggtacaaggtagataaatggtgtaaataacttttttgaagagctaaaaattacggattttttcataattcaattttgccagtacccctcccctattctgaagggggttatgaattattttctgaaaattcgaaaattttcagaaatttcgtaatatctttttttatattagttgattaaataccaaataaa

SEQ ID NO: 84985 - DNA, 391 bp, Heterodera glycines
atggccataaaatatggaccaaaaatcgcaaaatatggacataaaatggcaaaaatcgcgaaatatggacataaatggcaaaaatgtcaaaaaatggacataaatttttcaaaattgagtgcaaaatttcttcaaatttattggttgaaattgcatatgagatacatttccaaattttttgactcggtaaggcgctttgacaaagacggctttcgttttgcaattagtcggtcaacattcggaaattggtctcgaattttttcggcaattacgtgcaatcattttaaaagaaaaaaacataaaagctaaaatttattaatttttttagcgcaaaatcaacaacaaaagcgaaattttcgcttttttgcttatttttgacataatttattaa

SEQ ID NO: 84986 - DNA, 155 bp, Heterodera glycines; identical to SEQ ID NO: 51421

SEQ ID NO: 84987 - DNA, 653 bp, Heterodera glycines
atggaaacagagcaagatttggacagtcagaatgaagcgatattccgtcgttatcatgatagtattgggtaagcaaaaagatttgccttacttttgaatagagtgccgcgggaccgggaattttgggcaaacccgggaccgggaccttttcgggttgagaacccaggaatttttgcctgggaaacccgggaatagtcccaggggaccttggtactcaattgtactcagttgtccgctaccaggtcccggtcccgtggcactctacttttgaatagagcatggacaggagggtacagtagtgtcctccgtacagtactttaaatgttcattcatttcaaatttggtttatttaggccgctgtctccgcaagatcaaagcgatgaaaaagagttctcgactcccgggcccagtgatcagcggaagaaggagtgataatttgagagatgtccgactgttttatttgatgataattttgtttgctgttctgatgaccattttggcgatgaatattaaaaataggaatttgagttgggcggatagaaaaaaaaaataataataataattggcatttcattgtttcgggaaaactgagaatgttttgcgggattgacattggcaccaaaaaactctcacaaaaaagaaaattaaataaa

SEQ ID NO: 84988 - DNA, 2048 bp, Heterodera glycines
ttttgcccgatttgcttcgtcttttgcttttccctttcgtttgactccattctttgccgtcccttttccatttgtttccctctttgcgtgccttcgtccgtaaatttcccgactttctcctcgtcgagagtgaccaacaattgcttaccgcactttgtcagcaattactcagacaaatggcggccgaaaatgccgaagtgcggcagcaggcggccaccagtgcattggcacaactcaaaatcgcattccggcactcgaaggggtttgaatttagctgtgtttgaattgccatccctcttaattaatcacctttaattgccaggggtttcgtccgtctgaatcggtgtctgacctctgctctgtgttccctcgtctcaacttccgtcgcctctggcaaagcattggacgacaatgccctgagggcgtcgcttaattcgcttgtgcccgaagcgaagaaaagcgaaaaggcggaatttatgagccaattggaacaactcgtggtgaatctgaacgccattctgagcgacacgttcaaactgagcgcacatattgacgattttgagatgagtgtcgacttaatgcatcgaattgcacacggataccgtaacaaccccaagttgaggtatacggtaggggaaagaaacggtggcaaatggagggggcgaatgacggtagattaaatttaaaggattgcttggctgctgggcattgcgcgaaagcatttagaggaaaggaaaacatacgcggaagcgggtaattaattcattagccggataattcatcaattataaattaatgaattaagcggaaattatttttacgaaataattaatcaatgttttaggcgaattaatgatcaattaaataatttgaatttgtcaaatgacttaaaaataaatgtgtttagcccagtgttttttgcactgttgtgccattgtggcgacgactttgcttaacgcgggcaccgccgacgacgaattgttgccgcgttcggtgttcgaagcattcgaagcattgagcgaaaacattagcgaagaatgggaggacaaaaggggcaaagaaaggctgacggacggcgcggaaaactttacactttcggcattcataaaaatggtggagaaaatggccaatttatttgaaaggtaaaggacgacgggggagggagagaatgtcaatttgtactgtaacccctgggtgggatggactgtccatttgagtactgtaatcccagggaggcaggaactgtccatttgcgtctgtaacccctgggtgggaaggactgtccatttgagtactgtaatcccagggaggcaggaactgtccatttgcgtctgtaacccctgggtgggaaggactgtccatttgagtactgtaatcccagggaggcaggaactgtccatttgagtctgtaacccctgggtgggaaggactgtccatttgagtactgtaatcccagggaggcaggaactgtccgtttgggtactgtaacctctgcccttcccttagggcccaactcttcgaattggttgccaatgcgttaaaattggttcttccgctgttcgagcgcacgcacgcgcatgtcaagctgattcaggcgcacgcgcaaatcgtcagctgtttgagccgaatcgacccgccgatgctaattgacgaatgggaaaacggagaaattacagttcatggaaaagggcaaaggacggcgacggcactgacagtgccattggccgggtaacagaaaaacaaattggaaatgatcaataataattaatgccacagaatggacaaacgctgtttcggcacttattttcgggtgcgcttttacggcgtcaaattcggcgaattgaacggcaaagaatttgtgtacaaagagccggcaataacgaaattggcggagataagtgcgcgaatggagcaattttatggggagaaattgggccgagaaacggtggagacaatgaaagactcaaacgaagtgaaaattgggaaggaaaaggaagggaagggaccaggggatggatgtatccagcaggaaattaacaagaaattcc

SEQ ID NO: 84989 - DNA, 642 bp, Heterodera glycines
atggaattggactttcgtttggacacttttgaacgaatgttggcacttatggaaagaaaagtaagaaatcactatgattttcaaataaatggagaaatcattaagaactaattaagcttgaaaatgttaatgttgacgaagtgaaaaaacaatcggcggaagagaaagaaacggcggagaaagcggagggaatgacgcgcaaagaaaaaggggaagaaacgcccgaagggacgggggaagaaaaacgcacagacaaaaggcaggggaaggaaacggcggcggaagtgacaacgaaggcgaatgaacaccccaaattggccaagtatttcaaaatgctcaaaatggtaattggttcagaatcatggaaaatatttggaagaaacaattttagggcgtgcctgaggcggcggtaaggcaaaaaatgagaagtgaaggaatggacgacgcactcctaaagtgagccttatttgttagtccaaattgagtggaaggaatttttacgcggactttattaaatgctcaaaaaacggtttcagtgacccagagaaggaattgccattggaatcaccacaaaacaaagcgcaaatggtacatgatgcattggcagaggacgacgaatcgtcctcaaactcagatgaatga

SEQ ID NO: 84990 - DNA, 365 bp, Heterodera glycines
atgtcaattgtggtgccgagtgacattaagccacgactgcgcggcagcaaatttgcccatgccacggaggaagagaggaaggccattgctgcgcaaatggagcaggtagtactccgaaaacccggtcattatctttatgacaccaaaactgttttcatttaatatttcatttgacactgtgtcagggaagggacgccaatcgcacggcgacgactgaggccaaacgaaacgccgcgcggcttggccaagcagaagccaagctggaccagcagattgaagcggagaaagcctattttgatgcacagttggagaagttggagaacgaactgcaatttgtcgcttcccttttgcccaaatctcagtga

SEQ ID NO: 84991 - DNA, 363 bp, Heterodera glycines
atgcccacactttaccaagctgtgccaggacggagttcagttcggagcagtacaatgccaaccaatcgtcaaaatgaacttgttaccgtcgacaatcgcccaggccttacagtacctcaatcttggaggaattttcttcagactctttcgatttgtattgcatattttctttatgggaaagagaagaggcaaaaatcgagagatgaaattgaggagggaacctatcccgtggaaaagaaaaccatacaaaacaaagcctcaaaaaatcggaaaaggctaacacgtacgcactcaatcccgctaacggaaagatggccgtctccggaacaaaaaccgaccataccaggaaaaatgggcttaaaa

SEQ ID NO: 84992 - DNA, 621 bp, Heterodera glycines
atggccaaatatgcatttattctcaaaaacctccaagatatgcttttatatctagagattggattttttatgttagttaagggaaaattgtttaaattgttttacaaactaaaaaattcttgacaaaaaaagaaatttaaaaataatataaaacccaaaaatattaaaaatcccttgttggtcgaggggggggggggtcgaaagcagggctggccgtgatcacggatcacggctcacggaaatcacggggttttgggggtgccgtgatctcggatcacgggtcacggattttttcaaattttccgtgattttgatccgtgattggcattttatatagggaatttttattgagacgaaaataggaaagtggtgtgaagaaatttttgagaaaaataaataatttcttttcttcttacaaattagcaagtaaacatatatatgtagtctggtggttaaaccttctgtctttcgttgtctgtcccttgggttcaattccccattgggataggacaatttatatattttgttttgataattttaattgaaatttaattaacaagaaatttcataacattgaaaattatttttctttattttttaaaacgtccatagaccaataaa

SEQ ID NO: 84993 - DNA, 1026 bp, Heterodera glycines
atgtacatgtgggccaaagcgagcgttttcggagacgaagaagcggcatctgcaattctgcggacgtcaaatccgaaggaatgcaaacgcattggatcgcgaattcggttgttcaacaccactgcttggagacgaataagcatattcgtcatgacctgtgctaactggcataagtataagcaaaatgaagacctgatgcgccatctcttcaattttggtcccgatgctgaatttgttgaatgtacagcaaatgacgtgtactggggtgcaggagtggcgctttcggatgttgaaaaaatccgcgacataaaccgatggcctggtaaaaatatccttggacggattctctcagccttgatgaagaaattcctgcgtaagaaatctggtgaaatgaacacaaaaaaataaataaaataaaaaataaataaatccaagattttttttaatattacatataataataataataatttaattataattatattaaatcctatatattttttcaaataacaccgcaataacaaataatttattacagaaatgtcggcaccaacagcaccaccaaatgttcgggacctgagcgaattcccgccgttggaaaagttaacattggaggatgtaaggaaaaagaacaaaattgcctcggcaagcccaagtggaaactcaaatatttctaaggaaacctgtaatagtgcaataagtgtggatttagttgcttcggcaagtcatataacttggggaggggaaaaagggaacattgggcaagaaaaaggggaaaagaatcaaaaattaaataaaaatgttgcttcggcaagccaaagagtgtctgaaaattttgcgaatcaaggatttgacaaaaacccggatgaaatggcagaagaaatgatggaagaattttcaagttttaatgtgggagaaaacgaaggaaaaattgttgaatacctggtttgccaagtagaagaaaatatagtgattggaggaaaattgaggacaatgacaacaaaggctggccacattttgtag

SEQ ID NO: 84994 - DNA, 135 bp, Heterodera glycines
atgggagaatccgctccacaaaagaaaaagaaataccgtgatgctgatgctcgaattctccgactcttccaacgttataatgatgtcaataacaacattgtcccccaaaatgatcataattatgccaatgtcaat

SEQ ID NO: 84995 - DNA, 844 bp, Heterodera glycines
atggtaaaaacgggccaggccgttttcgtacggccgtttcgtacgagtggatatacccaaaaaaaacaattttgttattttttctgtttttcaggtaatcaaacgtttgcgccgtgatgaaaatgcaccgcgagccgaacctctcaatttggagcagttggagattccgaatacctatcgtgtttataagcgcactgagattgacgaggagcaattcctgttggcggacactggcgtttttcaaattcacggacagaatggaccccaacggtaagacatttatcgtttaaaccgttaaatgatggtcatttacactattaaggattctcatttttggaagagcgtctacggcagattggacccaccagatgaaagacatttacgcggacggcacttttgcaaagaagcaaataagggccctgggcctcacccatgtaatttagaatttttttattattccgttcccattcaaactcattaaggtttacaacactgatcctgccttcgctgagaagtctaagatgatcacatcattggccttcctgcctgtgcaccaccttcaaaatggccttaatgctcttcaagcacaaattccgccacaacttaatggcgttttcaattggttaagtccgaagacgaattttatgaatttttttttaggtttccggacaactacatgggcagaattcgtttcaatgttccaattacggcgcctctgttccacccacacgaatggagtgttcatcagcgcaccttggatagtgctgatcggaccaacaacttcgccgatgcattccatcgcaaacttcagcggctttttaattgcactcatccgactatttga

SEQ ID NO: 84996 - DNA, 581 bp, Heterodera glycines
atggatgacaaatctttgccatttccattgcccgaccgtccgttgcccagcaaaatccgttttaagcaccttcagatgtggtaattaaaaatcagagctatcgcaataaaagcattcatcccatttttaggcacatcgatcactccgtcatcgcttttcttcgttcaaatcatcaaattttcgacaaaagaggcaccaatttatatttggcgattccatcatcacactctacgaatggccagccgatttgggatgtttttgttcgtgaaatttggcccattttttctgaaaacattcgccacttgcactttaccggtgatgatcatttggacaatttgcttcgtcgcacttcgccgacaattctcatcgatctcaaccaattgaattcaatccattcatttggtctgtcgcccgctgcgtttggtgatggttttgatgtgccaaattcaacaatttctgctggccaagcattgtccaaatggttgcactctccgagaaaagatggccaacccaagcgatttcgttgtggcagaaatttgaacgcacaagcggacttcgattgggtcaacagtttcaaggag

SEQ ID NO: 84997 - DNA, 1153 bp, Heterodera glycines
gtcaaattccctgaaaattcgaaatttgtgtttgtaacggccgccaacaacgcttatttcggaccacttcgcgtactaatcgcaagcattaagcaaacatttggctgcaagcaaaaaataatattttacgacttggaaagtgtcagacaaaataaagaatgggtaattaatcaaattgtcaatagagaccggacgacaggggtcggagggatcccgaatctgaatcaaaaaatcattttaaaatttttgtttgctgagaattttttcaaaaactttaggggatgaggccgccggtgccgataggcaccgacggaaaaaattttgtaatttttgatgcgatttgttaacagattttgcccaaaaaccccaatttttttagcgattttgagcaaatttttcaggaaaattaaggatttttagagtccggcggtgccgttatgcaccgaaggaaaaatacgtagacaacaatttctaatctaattttttagacaaaattcttagattgttgtgcatgaaactacctaataagatttaaaatattctttaaggaattaaaaaaaaataatttttgttaattcacaaaatggccaacctttgcgtcaaattttgaaaattttcacaagtattttgagagccgtgaaaattttttggaattttaacggatttttaaagaaaaataagcaaatttttaatttaaattcaaggtcttaatttaaaaaatgtgagtttttccaaaaattatcgtgacttcaatcccgcgggatcccgcgggattgataaaatggtcgggagggatctcgattcgggatcccgatgaaatcccggtcccgatcaatcccgatgaatttaaaaaatcgttcgggacggattccaaggtcgggatcccgaatttaatcctgcaggatcccgaagaaatcccgcgggatcccgatcccgtccggtctctaattgtcaattaaaaatgctttttaatttttaaagaaaaaattctttttactaattatcattgacccctaaaaacgattagaaggctgagttggatttggtctgtgaattggaagtgcgcattttcaatttttcccaaatggttgctggccgagtgcgccacccgaaaagttacgcgtggaaaatttttgtgatggcggtaaataaa

SEQ ID NO: 84998 - DNA, 1045 bp, Heterodera glycines
ctaaagtttcatttgcttttgcacgatgaaaggctttttctgtttttggacgattttatgttggcttctgcgctgattacatttgtgactttcacattttttggaatgcgtgcttcttacggaagatatgcagctttgtctttcttttcaaaggtatttatcgctgtttggttttttcagccataaaattattattattttttcaattctaaacttttttctgatgttatttaattcaaatttgtcaggtcagattgctattccggcacggattggttggtttctccaggaaatgccttcttttgttttgccgactttcgctgtctgttggcagttgacaatacgttttcttcctcccgtcaatgccattgttctcctaatgttcattgcacattattttcagaggtagtaattggcaaatattattttcctggtatcttctgtcaaatccgttttaggtcattcgtttacccttttctgattaaaggagggaaagccattcctgcccctctcttctcgctgggcttcattttctgcacttggaacggcttaattcagggcttttatcatgcaaattgtgctgtttattcttccgaccatttttggactcttagcgctttgattggtttttttccattccaatttaaagtcactctccgtttcttcactttatttgtaggtttgccacttttcgctctcggaatgttcattaacattcaatccgaccaaatccttcgagacctcagaaaaccgaatgaaattggctacaaaattccacatggcgcaatgttcgaatttgtttcgtgtgcaaatttttttggtgaaattgtcgaatggtttggctacgcccttttcgcccaatcgcgagtcgcgtgggcattcgctcttttcaccgctgcgaatacaatgccacgagcgaaggaacaccacaggtcggagagaacggacggagctgacattgtaaaccaattctcttttcaggtggtatttcgagcacttttccgattacccgaagaaaagaagcgcagtcattccctttttatat

SEQ ID NO: 84999 - DNA, 78 bp, Heterodera glycines
ctccttcgaacagtgtgttccgatgttgccagcaataaatcctgcaaattccgatgggattgttttagccgcgcttcc

SEQ ID NO: 85000 - DNA, 4913 bp, Heterodera glycines
atggctgagcaaaattcttttaattctcaaaagggcgaaaatgtggtcctacagggacaaattggttcggatttcgatccaattttctttacccctgaggagaaccaaaatctgaacaatgtactgactcgaatgcgaacattcgaatccgctatttgccgccaatttcgtaaattggagcgagaatttgcagagttgaaaattgtggctcaccaatcagacgataccgatcgaatggtcaaaattgaacggtcaataattgatttggaggatcgagaagaaatggacaattttcaaatggaagaaaaagtgataaaaatggcagaaaaggctgaaactctcgaaatacggcaaaattcatttgaaagattgaccaaagtcaaatttaacaaggtggtggagaaaatgaaagtggaaatggcaaaaataacagaaaacattgacgttttgaaaataagagtggaaaatgaaatggagagttgtgaaataatggtttctgacccatttttgggcggaattgcaccattggaaatgtttgatggaaagccaagtgtatccttttcacgttgggcatcaaaatttgtggatatgctttctctgctaccccaattaacggaaacccaaaaactgagcagattgagaatactcttaattggtcaagtcagagcggaatatgaagcattggacccaccacccgaaaatttaaccaccgctttgaatcatttaaaatcaaaatttgaaaacgaaaatacccgttccatagcgagacaagcgctttcgatttgcaaacaagcgccaggcgaaagagtgagttcatggaaagactcattcccgagctccaatttgaggtaaaggcgggaagaccaaacagttattcgggtgcctacgaactcgcacaacattttgaactgtttttggcatcccggagaacaaatcaaagttctgtagccgactctgttgcagaattatcctcaaaagttgaggcattgagccttgggcaatatcaaagagaaaatgtcaaaggagggcccgacagacgaagatgctattattgcgtcgccctgggcatttggtgagggactgcaaaacaaagaaaagagatgaaaggcaaaatagccgcgggccacaaagaaataacgaatattatgggaatgagagacattggaacacatggccaaatggtggagaaaattctcgttttgtgaacggaagggaacaaagaaatgaacgagaattccgccggtcaccaactccgaatacgcaccctaggggatacagtaataattcgggatcccccgggagaagagtgagctttggtggaagatttgctgcggcaagaattgccagcccaattttaatggcatttattgcaattctgtctctctttcccccaaatatagctgctaatactgcagttagcccaatgatttgcctatcggatgctccctcaagtctctggtctattccttctgaccccttttgcccaacttggaccccaacagtggaaccgattcccgcaaattttgccatttttaggcaaaatacaatacagtacaaaactgaggctacggcttgtaaatgtgtgaaaacaagcatttcaagaagaatcggtttctttggagggaaaatcgaagaaataagtacaagcccagtggaagtcccaacagcgatttgccaccaaatgaaagaaatgaagcattcacccgccggagacttaattttttacgagggaaacaaaacatttagggcgacaaataattcccttgaggtgggatggtcaagctggcctactggcattttttggacaacaaatgaagtgacaaattgttatgtctatgagccagttgtgttcacccggcacggaatgccagggataagtacaccaataaatgattgtaatgcttgtgtgtaccaatcgggaaattgccattgctcacaaattagcctcatttggaaacctgatcaaacccaccaatgtgcttatgttgaagtcggaagatggggtggagaatattcaacgaggatttggacagcaaattacggagattttgctttaacatttctaaatgcctcgagaaaatcagattgtgatggtacggaatttgtgatttccgaccaagcattcgcggtcccagcggcacaatatgatgaaataattaagagaagtggtgaaccgaatgagaggcgtaaaagagaaattggcttagtgtactcttcacaattgtcagctcaattaacagcgcttagtgttaaaatttcacaaaacacacaacgattgttcacagaaacaatcagacagatttgcatgagtctaaaatttttagccgatcaaacgcttgcacttgctgaagccatccccacacttttggctcgtttttatttgggaaatccatttcttttggcaagattggtaacaaaagaaacgttggaaattaaaccgtgttttgccgttaatgaaagggaaatgcattttaattggcaaagtgggccctgttttgataagcttcctattattttcagtttgtatggaagacaaaagcacggctttttggatccaaatacaatgataattcatcagagagcaggggaaatttattgcaatcatgcaaaacatttgtacatattaataaaagggagtattttacaatatgaccaaatgacaggtgaaatgactcatattccgtacgggtcattacaccagctctcgagacacggaaaaatcgattttccagaatttccagtgcaatttttcaaaaacaaagtcatggcaaatttaaccgaattgtattccccagagaatttcaatgaaacaatggaagtggccaaatttgcccaagaaatagcccgtctctctaagcccaaatccccggaattgggaacagcaacaccccttcaaaggtctctaagatttaaagaaaatgaacaaagagtggttcaaattgcagttgccgaaacaaattgtgaccccaattttcggattgctggaatggcaaatgacaaaaaagtaatccatttgttggatacgggtgcacatgtgactttgtgtggcatacagacagcaaaaagacttgggataaccgaattggaaccagcagaaatcagtggagtaatcggcgtgagcgggaaaattgtcaatattttgggccaaaagaaaattgaaatgcaaatttttgggtgtactgtagagacagttatttatgttgctgaggcagaaattggtggcgttggcacctatgacattattgttggacggaaaactttccgccaactaccattgctgcttgacctgcagacgggtactttgataaggaaggaagatggccaaacatacaattgtgaaaaattcaatgaaagagacgtttatttttatgagcccgaaaataacagagaaaattgtggaaaaatcagagaagaattggaaatttgtttggacagaaataaaagtgtttttgctaggcatgaatatgaccttggcacatgtgcctattgcgctccgcctattctaacaacctccgaccttccggagagggttcggccttaccccgtaccaaaaaagtatgaggaggaattgaaggcacaaattgaaaaaatgttaaaatccgaggtgatcagagaaagttgcaccccgtgggctcacaacattgtccttgtcaaaaagtctaatgggcagttaagaccgtgtgtggatttccggccgctaaataaagtcacggtcccagacccttatccaattccccgaatggataaaacaattttacgggcagctggcaaaaagtggtacagtaccttggatttggcctcagggttttggcaaatcccattggacaaggaaagttcatacaaatgcggaattttgactccttggggactgtaccaaatgctgaaaatgccgttcggcttaagaaatgcccctagcattttccagcgggtcatggataaagtgctgaaggacctcccaaatgtcacggcatacattgacgacatattgatacacacagattcagaaaaagagcatttagaaacattggaaagtgtgtttaagaaattggaggaaaatgggcttaaaataaaaaagaaaaatgctatttctttaaaaatgaatgtacctatttggacatattctaaacaaaaatggttatcgcccatcaataaataatcgggaagtcattgaggcattcccagctccgaaaaatgtaaaggaagtcaaaagatttttgggaatgatttcatttttcagaaaattcatcccagaatttgcagtgatagcccatcccttaaatcagttaacggaaaaagagaaagaatttaactggttggaaaaggaggaagaggcattcgaaaagttaaagcaatgattgcttaaggcaccttgcctgagggcaccgaattataaactgccattttacttgttcacggacgcatccgcagtcgcatatgcaggcgcactaatgcaatcagctgatgagaatcaaatgcacgctgtcggtttttggtctaggactctaaactcgacagaagctaaatttcctccaacacatggagagttggctgccatcgtccatgcagtccaaaattacaaacccataatttatggagcagaactgattattttaactgatcacagaccgctcactttcctattttccaagtcaagctcaaaccccaagctgaaccggtggttaatgtcattacaggaatttgaacccaaggttgtatatttggaagggaaagcaaatcgggtggcggatgccttgtccagagtcccgattaaatgggaccaaattgaatcaaaatgtaaagaagacattccctttttgctggtgacagatgaagaaaatggttttgaaattaaccgggagaaaattgagaaagaaaccagtttagacccaattttgtcacaaattgtctcaaaa

SEQ ID NO: 85001 - DNA, 517 bp, Heterodera glycines
atgaatcggcggtaagtaattaattttaaaaagttaaagaattcatttcaatatttaactaaccattttcacaatttcagctggatttgtaacgatgtttggatggtaatgttccccttttttgaccgtgcccaactcggcctcaaattggcactgatttctccccgtttcgatgttttagtggacaaacatttcgatgccaaaacggaattgacaatttggagaatgattatacttagcaaggaaattgtaacaaaaccgaaactaactgtatgggattttgatgctgtggattttccattgcccgaaccgttccgtcatcgaatttctccgtgccaatcagcaaatttttgacaaaggcacccatttgacttttgcttatatgccttctttgtgcaacaccgctgaaggccaggcaatttgggatgttttggaacgtgaaatttggcccatttttgcaccaaatattcgccatttgagctttgttttttctgatcgtttgggtgaaaccaataaa

SEQ ID NO: 85002 - DNA, 192 bp, Heterodera glycines
aatattgatcataggccccaaactcaaaaatgcttaaaaacggtcagaatcgatgtaaaaaggtttgaaatgggttggaaaaatagaattaggggcgcgcttgccctttttcaggatgaaaagtgccgaaaatggagtgccaaactcaactgggactcaagtgaccgtgctatataaagcactcaaaataca

SEQ ID NO: 85003 - DNA, 411 bp, Heterodera glycines
  unsure (1)..(411): unsure at all n locations
atgtttttgatgattctgctgactaatgactgcgataatgatgatgatgcatcatcatctctcgtctttgtcgtcgtcgtcctgtggtcggtcggttggtcccctcccaaaaatttatttggcgaataaaccaaacncaacaaatttttgtgcttttatacttttttttttgtcgttatgcatttcccgaacttttcgacaaaattatttttttctcatttgtcagtttaattgaccgcaacaaattattttattttttatatttttatttggttaattgactcaatttgcaatttggatattaattttgagtaaaaatggagaaaggttccgcattttttgatataaatttggtttaaatttctcatttttagaatatacaaatattatttactcactttaaaaattata

SEQ ID NO: 85004 - DNA, 834 bp, Heterodera glycines
ggcctccgtttcccggacgcgtacgagcgcctgttcttcgacctgttcagcgggcgccagtacaattttgtgcgcgcagatgagctggagcacgcgtggcgaatattcacgccgttgctgaagcgcatagagggcgaccgggtcaagccggaacagtacgaatacggaaggtgggaatttgggggtttcagttttacaaatttattatatgccttcttttcccgcttcaaaggtagggtggtgaagtttttcaacgaaaatttaccggtcccgagttttgactccaagcaagcttttcgagaccgaaatttgctctcttgaccgaaactaacaaaaacgacttttctctaggtgacgctcgaattgactctcgactatttagggaaggaggtcttggagagaggaggggggggggggctgccgacacgaaaaatttaaaaaatttggaaaacaatttttttccttaataatttatgatgaccgtccctctcttaggcaatgattaattgagataattagtatttagaatatttactctaaaataatcttttctaattgttttagaattttaattttcaaaaaaaaatttttttttttttttttgatttacccatttcaaaaaaatatcggtccttcataataaggggcatctcataagaaacgacgactttttgcaaaaagccctggattttaatgagtcagtattaaaaattttaaatatatccctcccccccatccccattttgaagtcgtggcccgtcctccagcgatgcgctgatgcaaaagcacggctttgtcttcagcggcacttacaaatggccatcggtgaacccg

SEQ ID NO: 85005 - DNA, 553 bp, Heterodera glycines
atgtgtctccattgtgaaagcggctgtttcaaagatgagaaggacggggtgcacaagtgttgtgacgatgcgtgtgccgcgggatgcaccggcgaaggcaccgaccaatgcattgtgagaattcattttcatttttgattttatttattggctttttgattttttgattgctcattttctctaatttgtttcagctttatttgtccctcttcttaggcgtgcaaaaagttcgagcaggacggccgctgtgtgacggagtgccgcggcttcgaccgctacgatccggcggagaagcgcatggacccgctgccggaagcggaccgacgcttcgcctacggtcggcactgtgtgccaacatgtccgccgggcgctctgtatgaaggagcgcactgtgtcacgcgctgttcacccggcaaataccgtaacgcgacggaccattgcgtactgtgccagggcgaatgcccaaagggtaagagcattgcgagaaggttattgtagtggaacaaaagataaagctataccatttatgctaattgtcaaattttgtaaaaaa

SEQ ID NO: 85006 - DNA, 325 bp, Heterodera glycines
ttggcaacattccgtacaacgcaaccgaagcggacattggcaatttgtttagtcagtgcggagtggtcaccaatgttcggtaaatattttgagttggttttgatcgtctattattgcattttttaagcattgtgtacgaccgcgagaccaatcgcccaaagggctttggcttctgtgaattccaggtgattgcatctttcaattgttggtcatgttaagccctctattcatttaggaccaacaaggagctcagaatgcggttacaaatctgaacggagccgagctcaatgggcgtgcgctgcgtgtcaattggaccaacaaataa

SEQ ID NO: 85007 - DNA, 199 bp, Heterodera glycines
atgtcatatttttccgctgacgctgatgcatctgagcttattactgcccaacgacgggacgatgagcaaattcagtgggtctatgacagaatgtccgattgcgtattgcgactttttggggagcggatttggatcagttaccatcgttggcttccatcgctggccgctttcatttatctgtcggcgaccaatttgcgtg

SEQ ID NO: 85008 - DNA, 2227 bp, Heterodera glycines
  unsure (1)..(2227): unsure at all n locations
aggtctggtcgtgggacattntggacgatatggcgcgatttccgccctcttctgtgccaattcgtcatgcttgtccgtcgcactttcgcttaccgctgacctcgactcggagttcgacttgcacaacaatttgtcccttcgccggtggcttgctgaaccggtgccctctctactctccccgtttatccacactatcatttccatcccttctccctttagatttcctcactttttttggaccattcgctgttcatttccgatgaaaatacttcgtctccaacacttccaaagtttgcatttgatttttaatttcattaattttaatcccattaaacagtgtccatcgtatgctgatcaattaccttttgtcaaactgtcgtcaaagtgtcgtccttttctcgtcgtccgttcagtctgatcacttcgctaattgtgagttgaaacagatggtcctctccacaaaacaactcatcttgtcgaatgaaaacatatgcaaaagtgaaaatccgatgtctggttatttcgacctgttacaggtgcttcggattattattttcctttcctaaatttctgaacctttccttcagacgcccttgcaaccgctttctgacaatttggactccgccgtttatcagacgtttgaacaggacaacgccaagtacgaacattaccagatggcaatcaaagccgcgttattggaattaagtcaacgacaaatggtgatcacataatgatagaattagcgaattgttgatttttgttaaggaaagtggagggattgtcgtttttgtgttgggcgccgggaggggtccattggtccaagcagccataaacgccagggacgaattggagagggagaaaaagcacagcgaacaatgctgcctcgtacatttgaaatggtattgaaattcaagtgtcattcattcactttagaattggaaaatgaaactgattgctgtggaaaaaaatcgcaacgcaattttaagcctgaaatactgcaacgaagaaaggtgggttagctacccaattgcaagagatgacgctgtttttgggcaggtgggccaactccgtccaaattgtgcacagtgacatgcgttctttgtccacttttgtcgattccaaagtcctggaaaggcccgatttgatcatcaggcacagtctttttcttctcttcgtccctcccttttcattcgtccgtcctttctcagtgaattgctcggctctttcggtgataatgaattgtgcccggaatgtctcgacggcgtttcgcccattctcaagccgggaaccatttgcattccccaaacatacaccaatttcattagtttgaccattcgtttgtctctcaatttgcatttccttcaatttcagctcccatccaatcgcttcaccttcatcagagtgtcgccgcgctcgaccaatgcaaaagtgaggaacaaagcgtgggacgatcgaaaaagtcagttacctatcagaatattcgcttatgttttgatttccttttagagtttttggctgtgcgttcgaccgttcttacgtcgtgtgcatggatcagttttgttacttggccggaaatgtggagccttgttttcgctttacccaccctaataaagaggtcgacacaattcgaattccttttggactaattgtgactatccatttccaggggtcttcgaattctcgacaatcgaaagttcattttgagttgccgcccaattgtgaagtgagtagcaatactgaggaagtctcctttttcttactatttcgcttctgtttttcagctgatgggcttttcggcccattttgaagtgaatcttttcaaggacatttgtctgagcactcatccgttgcgatttacggagaatatgcactcttggtccgtcagtctgtcattttcgaccgtcttttgctttaaaaattgattattacccaaatggcactgattgtgaatagattttaggttccctgctctttttccgcttcgtcgacttttccattttcgggacaccacaactgtgactttcaacattcatcgcaaaattgacagtgacgggtgttggtacgaatggaacattgagtacaaagtaggacaacacacactcaaatgcatgatcagagcatcaaatgaatttgttttttaaaacccaacttttaaagggaagcgacgggcaaacgacgcgcagcgaaattcaaaatgaaaggggcgagtcgcaatatatgaagttgc

SEQ ID NO: 85009 - DNA, 881 bp, Heterodera glycines
tttccatttatttcaatcggctagtgctttaaggttttctgttttgactttgcttttttttccatttattccaatcgaccacgttaattcattctctatacatttagtgtcttatttcatgaaattatattaatttaattttaaataaagaggcaaatttttacagaaaataaatagacgctgactaattagctaacatttataaagaaagtagaaatttgattaaatgcatatacaatatacaaaatattacttttttaaatttgtataaagttcctattttgtctttgactttgcttctttttccatttatttcaatcggctagtgctttaaggttttgtctttgactttgcttttttttccatttatttcaatcggctagtgctttaaggttttgtctttgactttgcttttttgtccatttatttcaatcggctagtgctttaaggttttgtgttttgactttgcttttttttccatttatttcaatcggctagtgctttaaggttttgtctttgactttgcttcggctagtgctttaaggttttgtctttgactttgctttttttccatttatttcaatcggctagtgctttaaggtttgtctttgactttgcttttttgtccatttatttcaatcggctagtgctttaaggtttgtctttgactttgctttttttccatttatttcaatcggctagtgctttaaggttttgtgttttgactttgcttttttttccatttattccaatcgaccacgttaattcattctctatacatttagtgtcttatttcatgaaattatattaatttaattttaaataaagaggcaaatttttacagaaaataaatagacgctgactaattagctaacatttat

SEQ ID NO: 85010 - DNA, 1248 bp, Heterodera glycines
  unsure (1)..(1248): unsure at all n locations
gtgctttgcgttggttaattggcgtgggtgagtgtggtggttgggccgtttttgcgatattgtggctggaaaaaagaagcgatttcgctgtggggagcgcggccgtctgggtttaagtgcttgcttgcgcttgtgctcggcattgaacggtgatggctgctgctggggtgccacctttgtcgtggcctcagtttctccagcgattggcagctgtcgaaatgaataaaacatgcagctcgtctgtgtgttaaagaaatttggcgagttaattgacttgtgtaaatgttgcctaaggcacaaatgctgtggggaactcagcactggggatgctgaacctaaagttggtggtggtgttggtatacgagtgagtggcgtattgccatggttgacaagccctatgagttcgtggatcggaactccttgcctggggaccagtgtgcttgcattcgaaaaaacacgagacataagcgcccgaaggcctttggcctgaggaagtgtcctaaccgggaaatccggagtgctcgtgtgagtgcctgtgcactgccctcggagctgtgtccagcggcgagatggttcttcccaagtccgggaagctcggatgcctggccagcgctgtgtcattaccacttgctcggtcgccttcgccgcccatgcgcacgcttgcgctgaacggagttgtttctgctgaaactatccgtctttacaagacggctgtaatagcggcgcttggcaacgctcgctagcagctatctggttgatcctgcctgaactgatgtgttcatttcaaagattaagccatgcatgtgtaagtttaacctgccagacagggaaactgcgtacggctcattacaccagctataatttacttgaccttgacttcttacttggataactgtggtaattctagagctaatacatgcaccaaagctccaatctccccagagcggagcgcatttgttcgccacaaaaccaagcgccctccgggcgtccagtgttgactcagaacaactaagctgatcgcacggtcttgtaccggcgacgtgtctttcaagtgtctgccttatcaactttcgatggtagtgtatctgactaccatggtgatgacgggtaacggaggataagggttcgactccggagaaggggcctgagaaatggccactacgtctaaggatggcagcaggcgcgcaaattacccactctncacgcgaggaggtagtgacgagaaataacgagaccgatctcttatga

SEQ ID NO: 85011 - DNA, 801 bp, Heterodera glycines
atggacaaattgtcggaccggatgaaccgtttgttgagcacgggtgttgatgcggatgtgcactttttggtcggacaaggcgatgagcaagaggcgggttttatttaaattacatttttaatttaactttattaaattttgccattttataatctattaataataataattttagttttttaaagtcttctttccattttaaaattaattcttttaactttttaaatttaaagcttttgccagcacataaaccaattttgagagttgcttccgatgtgttcgacgcaatgttccgatttgacgaagaatttcccgttttggcaactccagaacccggcaaaaagagtttagataaaattacatttttaaattaaaatacaaaacagttttagcctctctaaaagagggaaataatcccgttgagatcccggatgtggatgttgaagcattcaaaacgatgttgagcttcatttataccgatgatttgagcggagtgaatggcaaaaatgccatcgacgtgctttatgccggtcaaaaaaatctaataattatttttaaattataattttagccaaaaaatacaatttgccctcgctggttgaagcatgtgtgaaaattcccataaaagagcttagcaacgttttcatcgctttttccaaagctcgtatgaaacgaaattatgcagaataataagaattttatgagaatataaatttgagaaaatcatgattccattgtttccaaaaaaaaatttattttataaagttttttaaatttgaaaaaatatgtaaatataataaa

SEQ ID NO: 85012 - DNA, 837 bp, Heterodera glycines
atgcgcctttgcgaagtcatcgttggcaaagcccccgggttccaactgctcacgggtgccacgcatgtttcggtagctggtactgcacagccaaccgaaactcctgccggatgccacgtatgttcctttgcgccggtagctgctagtgcacagccaatagagactcattccccgaatgccacgcatgcgcctttagcgaaacgatcgttggcaaagccaccgggttccaactgctgcacgggtgtgacgcatgttccggtagctgctactgcacagccaaccgaaactcctgccggatgccacgcatgcgcctttgcgaagtcatcgttggcaaagcccccgggttccaactgctcacgggtgccacgcatgtttcggtagctggtactgcacagccaaccgaaactcctgccggatgccacgcatgcgcctttgcgccggtagctgctagtgcacagccaatagagactcatttcccgaatgccacgcatgcgcctttgcgaagccatcgttcgcaaagccctcgggattgccacgcatgcgcctttgcgaagtcatcgttggcaaagcccccgggttccaactgctcacgggtgccacgcatgtttcggtagctggtactgcacagccaacagagcctcattccccgaatgccacgcatgcccattcgcaaagcccccgggttccaacagctgcacgggtgccacgcatgttccggtagctgctgctgcacgagcacgtgttgggtcgaaggacaaaatgacaaaaagtgcaaaatttgctaagttgactaaatccactcataacttttctcagacgcaaccaaattaaaactta

SEQ ID NO: 85013 - DNA, 327 bp, Heterodera glycines
atgcgtggcacccgtgagcagttggaacccgggggctttgccaacgatgacttcgcaaaggcgcatgcgtggcatccggcaggagtttcggttggctgtgcagtagcagctaccggaacatgcgtggcacccgtgcagcagttggaacccgggggctttgccaacgatgacttcgcaaaggcgcatgcgtggcatccggcaggagtttcggttggctgtgcagtagcagctaccggaacatgcgtgacacccgtgcagcagttggaacccgggggctttgccaacgatcgtttcgctaaaggcgcatgcgtggcattcggggaatga

SEQ ID NO: 85014 - DNA, 1103 bp, Heterodera glycines
atggttgccaagcttcttccagtcatcctctgctgcttgtttttggtatgtttaatcacggtataaaatactgtaattcgagtagaaaatgagggattacggtatctataaagacaaaaaaagaattcagtgaaatattttaaataaagtaataaagcttaaacttcctttttaggcttctttcgccctctgctcgcccaatgctgctgatgtgctggtaaatggctgaattttttggcattccgtttcccaataattagaaatttaatatcttgaagtcgtaaaactcaatttcgcggattcagttgcaggattaggattcaaaatccgttgccggacggatccgccttattaatccagcaaaatgccaaaaaatgcaggattgtgggcccaataaatcttacaaattcttccgtctccactattatccatattaaaattgattttttcagaaatttaaacgagaagcggcgatcagcagttgtggagctgtaagacatatttaaaacaatagaaatattcgacaaaatattcatggaggtcgcttaatccctaaatttgttaatgaaatttaaatttatttgtaccactaaaagcgttagatgttttttaattagccatttttgtcctgttttctattttcggcacttttagggacagtttgaatacgggggcggctgttgtacgacatgcacaagcgatgctgattgtacgggcgggaaggtgagttagccaaattttgagaagcatttgccactgttagaatgggattaatcacagatttaagtgaacgattattaattaaatcattaattatgtccaatcggagtaaagtttgacaaattttccaactattttttgtcttaactttttcaattattttccactcttttaatgtaaacttttaatttgtttttatctaatttagctttgtgtgcccatcctcaacttgctcagcgtcagtctgtgctttgccccatgcggaaattaagacagaaaagaaagcagcaaatgagggtgttgatagtgtgataaattgataggattaaatggaaaatggggagttaataattacttaaatgcatttaaatagtgattgatca

SEQ ID NO: 85015 - DNA, 657 bp, Heterodera glycines
atgagttttgtcaagactacagtggaagcattgaaacaactccagacctcttttacctccgaccaaatgccaatttttaataccctaattaccactttgtcctctcaaattgacctgcttaatggatcgatttcccaactccgctccactgctctctccactgaaggcatgccaatttcagcggaggaattggaaagacagagaagtgtcgtcattattggcatgccagagcacaacgacagctcaccagcaaagcgggcagagatggaccggtcaaaaatcaattgcttattcgattcgctggggatcgaatgcggtaccattgcctatcgcatgggtcgttcctttaacccagcccaaaaaagtcctcgcccattgaaaattctcttgccttcccgtggcttccaaaaacaggctctcgctgcatggcaaaaaaaacaaaacaccattcgggctgctgattcgtctctgcaccatgtccgtctccgtgaatcgctgacaaaggcacaattggaggaacgccgtcgcctgcatttgcaatgcgttgaaaaacgacagaaagatgggcaagattggattgtgtatgctgggaacgttattttgagagacgaagtgcacatcttccggagtcagacaattcgtgaatcaaatttttaa

SEQ ID NO: 85016 - DNA, 1818 bp, Heterodera glycines
atgaacaaaactgatgaaatttcactggctttaataaataaaaaaattagcatattattactgacagagacatggacaaaagacaatgagggaattcctcttagtccatggattaaggagaattataattatatttttgcatcaagaaaatccgaaaacagttcacgtggaggtggttgtggtattttaatcaaaaatgagatagccttttttgtaaaattttctggtacaaaatttaattgtgaaattttaattattcaattacaaaatctgaaatcaataagatttgcattgatttaccggcctcccaaaaccactttaaaacaaacaaaagaactttttaaatttatacaaacattttggtgtgaaaattatataatcttaggagatctaaatttgtcaaatcgagaattggtatggaggcaaggccaaccacacgctataaatcatattggtgaaatattttgcgacttttttaataaatttacatttataaatgccacgaatgagcccactaggggtaaatcatggttggatttgatcttatcagcaaatgataaaattgtaaaacattgtactgttgaaggtggcatattttcatcagatcatttagcacagctttttgtgctgagtgttccagaaataagagcaaagcctaaagaaatttgcctaagacggtttactccgtctaatgtatcacatttaaatgctgtaatttctgctagattaagttctctttctctttcacattttagtataaatgaaaaatgctgtgccttcaatagcgccttgttgaatgccttgaatgagtgtattccaataaaaaaattactaaaaaaagatttagctccaaaatatccacaacatttattggcatccattaaagaaaaggcaaaattatatagacagtgtaaaattgatccaacaaaaaaagcactttatgatagcattactttacatataaaaatccaaaccaaaaaaatacataatttaattgaacataaggctatttcaaagggaaaaaattcaatttttaaatacattcaaaaacacaatgtcaatccctttgaaataccaaatttagtttttgaaaataaatgctatcatgaaagtgaagagaaatcggaattatttgccattttatttgcaaattcatttaataactccgaagttgtcctaaacgatttaagtttggacaactcctatggtaataatcaatgctttatatcggacataaattttaacatcattgagactcaaacactgttaagaaaattgccaaataaaaatggaacttctccggataacatttcttataaagtcctaaaaaattgccatttttcattggcaactgttattactgagttgtttagactatcattagacagtggttctcttccaaacatttggaaggaatcaattgtctttcctctttttaaaaagggggataaattcaatcctgaaaattatagacctatttctttaacctgctcactatgcagagttatggaaagaattctcagcaaaaatatttacaattttctattaaaaaataataaaatttcagagtcccaatttggttttattagaaataggtcaacaacaaatcaattaataacagttgtcgaagattggtatgaagcaattattaatggaaaaaaagttactatatatgttatattgacaaggagtttcgtttcaaaaactaattccggccggccgaaggccggcctgggtctgaaagtggtggaagggtcttacaactttttgaggagaatccgggaaaactatagagaaaaattcagtgcggacgactga

SEQ ID NO: 85017 - DNA, 622 bp, Heterodera glycines
atgcctttcccttcctttttaattttcctttttgccacttttttcactttttctgcctttggttggtccctctacgaattgcccctccgaattggtccaacttcgccaaatgtttgctttccccccccccttttttttgcattttcgcccaatccatcgtagggtttgttcgaatttgagctgagtgtcgagccaaaactgagcatgagtgttgagaatgaccatggcgatttgtcagtgaacgactacgagccgaaaaaggtcggagaaaattaacaaaaacaaaagaaaaacaaaaaagaaaaaggggcaaactttgtgccattggacaatttgtcatttaaaaagccatttttgcgtttgttcagatgctttggacggagagagagaagagtcaattgcgtccgtgcctcgaacatcgccaacttttgtccgtttctccgcccgcgccgcaccaatgccaaacgaatcggtctttagtgctgcgcaagttggcactgagtgcggagcgaacaatgccagacctgattcagttcaatggacggcacaaatggctgaatgccgtaaacggaaagaggtggcccagccaatgatccttgctgtcgattggcacagagactga

SEQ ID NO: 85018 - DNA, 961 bp, Heterodera glycines
atgaaacggcggaagaagcagcggcggcggccacgttatgaagcagcgcagcagacgcagcagcagcagacgggaaaagagaagaacaagcggacgaagcgggcagagaagctgacgaagaaacgacggcattggaagaggcggaggaaggacactgaagccgccgggcatgaagcaatgaaagccaggaagacaacagtgctgaaggaacggcaccggaagtgccatcaaatccggcaccaacggaggaagaagaagcggtagcagaagtgccacaaaaactgttgcccgaatgcaacaatgttgacagatggccacatttttgaattgatgtcgacactttgctgcttaatgatgatgcagatgaagatgagggtggggaagaagctgctgctgctgttaaaattaaatttaaaatgggaaaattgttgttgctttttcttgcatcaaaagtccagaatgggttataattttttttaaaatgatttatcctgttcaaaaatgtttgcttgttttctctcccaactgatcaaaaagcaattttttgaataatttccttgatttcgaaccccccaaatgagtccaattgtgttaatttttgaggcagtcgttttgatttttaaaattttcagatggcatccctatattatcgccctcttccccgttttttaattgccatttccccgcccccccccattttctgctgatttccagtttggacggactttcatcccactctctcagcttccatgcaacaaattgccgatctcattcatttgtccgttgaaatgccaaatattttactttgaaaatgctcaatttctagccaggccagaaaaaaatacacatctccggacgagctctccctccggctggttcaattccctcatttatttatttacttttttgaaaacttaacattttaaattatttgagaggcccttgacgtaccgtcaaaaaa

SEQ ID NO: 85019 - DNA, 2517 bp, Heterodera glycines
atggctatggaattgacctcttccgtagcaacaccaacagcaggtcctcgtcactgccatcacaactccggcttgttgatgaacagcttgaggaccttggagacggcatgccatcatggtcgcccatattcggacggagacggcaatgacgatgacgacgaagaatatgtcaaaaacggtggagaatggcatgctgacgatggcggcaccaccggcatggcgacgacgacgaattccaacacagaagtgcagcatgatggtgaagaaaatgccagatttggcggcggttccggtgccaaaacggtatcgggaaatacccaaggagactatgatgatgcaggccatggccattgccatgccgacgatggtcaacaacttttgcatcgaccagtgccacgaaagcaggcatttttggccaatgcttccgaagtgccgccaccgttttccccatcggcggtagatgatggcaccgaactgctgtttgtacaccgcttggacgaacagttggccacccgacgcacttcggcacccgcgtgtttggacacggcaccacaatttgccagcggcagagcggaattgagatatttgtccatagtctatgatctcgagtctcgagttaataaaatttcacactattttgcaacgattagagggatgtaataaatgctaacccgacttcggcattttgtctaagatttcgaatttacatacccttaaagacatcggaatcgatcaatctatccaagaaattgatcagaatttgatgggctcgcgacaatttgggctttttgtgttgttgatcagttccaggactcggagttgtcctgagaattttaaaatctctctttttttactgatcaggcaaaaagatttttatgacactaaaaaatagaaaaacacaaattcagttttctccaattgattcgaccacctttgccaccaccacccccggtgaagtgaactgcttgaaaaagttggaaacgcatttgtatctgtgccagcaattgatggacagaaagctgctgtacgcattgccaaacaataacaacaatttgaacaagcctaacacttctgctgtcagctgtagcagcatgtatttgccgaaaaactgtgtgtccagctcgtccagcccggactcgggtaggttcactcaacacaaaaaatggcaaaaaagataaaacaaatccagaaaccaatggttgagaataaattaatgccacaattccattagtgatagcctctaaaatctcgagttcgagaatttggtgggtgagagaggtgttttttcgggtctgtgataaaaaaggatcagtcagtgacagatcagcggcggtggggaatatttacttttggttcaatttactattttttggcttactctgatcattggtccgatcgactaagctaatccctgatcacaggacttggacacgagatgaataacagtagcaacatcttcaacaacaacaacaacaacaatagcaacaattgtgccgttgcagtcgtcggcggcgagccatcatcttcagccgctgcttcctcctcctcctgctgtggtctaagtggggtcatgggtaagttttattttatttttttgacggtacgtcaagggcctctcaaataatttaaaatgttaagttttcaaaaaagtaaataaataaatgagggaattgaaccagccggagggagagctcgtccggagatgtgtatttttttctggcctggctagaaattgagcattttcaaagtaaaatatttggcatttcaacggacaaatgaatgagatcggcaatttgttgcatggaagctgagagagtgggatgaaagtccgtccaaactggaaatcagcagaaaatgggggggggcggggaaatggcaattaaaaaacggggaagagggcgataatatagggatgccatctgaaaattttaaaaatcaaaacgactgcctcaaaaattaacacaattggactcatttggggggttcgaaatcaaggaaattattcaaaaaattgctttttgatcagttgggagagaaaacaagcaaacatttttgaacaggataaatcattttaaaaaaaattataacccattctggacttttgatgcaagaaaaagcaacaacaattttcccattttaaatttaattttaacagcagcagcagcttcttccccaccctcatcttcatctgcatcatcattaagcagcaaagtgtcgacatcaattcaaaaatgtggccatctgtcaacattgttgcattcgggcaacagtttttgtggcacttctgctaccgcttcttcttcctccgttggtgccggatttgatggcacttccggtgccgttccttcagcactgttgtcttcctggctttcattgcttcatgcccggcggcttcagtgtccttcctccgcctcttccaatgccgtcgtttcttcgtcagcttctctgcccgcttcgtccgcttgttcttctcttttcccgtctgctgctgctgcgtctgctgcgctgcttcataac

SEQ ID NO: 85020 - DNA, 2588 bp, Heterodera glycines
atgacaaggtgtacactaagcaaatagttttactaacccaaatctgaggttagttaggaaataagtttcgtacactttggcacgtataaagcccctatgcatttaagaagtctttacagttgacttaaacttaatatgtacttaaacttattttttaaatattacaaaattcaatcgagtcaattgtaaagatttctgtccttatacccttttgagaatcacatttttatttgttttcaaatcttatcggtctgctttgcgaccatgatgagatttgtgcacgtgccggtctgctttgcgaccatggcaacatatcggtctgcttagcgaccatgatatgtagtgcacacgccggtctgctttgcgaccatggcgaggctggtctgctttgcgaccatagccaaccgtgtcggtctgttttgcgaccatgacacagtgccggtctgcttcgcgaccatggcacacatatcggtctgcttagcgaccatgatatgtatttaagcgcagacttgcactcgccttagcgatgcatgtggctgggctgcccaatgggagcgcctttttctggccttgtatcccagctgaatgtttgtgaaaaggattgtcctttgattaattagcaatgctaattgttcgaaggtcacattttgtaaacaggaggttggctacggtgggattgtcctccgatcaacagcaaagcgtctgtcgttaggagttccctgcccctggctattcagagaatggaacaaacaaaggacaatatatgtggttcgctgactggccttcggggcatgtgtcgcaccaaagcggttcgctgactggctcttcggggcatgtgtcgcaccaaagcggttcgctgactggctcttcggggcattgtctcaccaatgtggttcgcagacaggcccttcggggcatagtcgcaccaatgtggttcgcagacaggcccttcggggcatagtcgcaccaatgtggttcgcagacaggcccttcggggcattgtcgcaccaatgtggttcgcagacagacccttcggggcattgtcgcaccaatgtggttcgcagacagaccctacgggcattgtcgcaccaatgtggttcgcagacaggcccttcggagcattgtcgcaccaatgtggttcgcagacaggcccttcgtggcatgagtcgcacctaagcggttcgctgacatcccttcgtggaacgtgtcgcaccaacttttggatctgcattcttaatgggatgtgtgagccctggctgatggatttcagcacaggacgactacacttcacggcgaagaatgatgtctttgatctttatttgtgcatttttgttaataaagttttaacgtctgtgtgcatttattggttaattacctcatatttttgccacacttgcgatacttttctgatttgttgtttcagatgccttctaagcaacgaaatttgcgaaaaaatgagacaagagcgtcatcagcggcggacggagcaatctgtcagtccaggtcgctcacccgtcccagacgggagtgcagatgggaatggagaggtatcggcatctctccggggcaccaccaccccaagcttaagtgctttgcaaataagcacgccggcgtcttccatcggaagtaaaaaaagaggcaggccctcgaaagccggagcgaagccaatcttggctacgcaagaaagtgtgtctctcattgacacacctcgaactgcggtcactcaaagtgaccagggttcgccgtgcaaaaaaaggggaaaggtcgccgagtgtggccaacccatgtttgccaatgaagctattgctttgacgcctgtttcgactcaaagtcgtggagggcgtcctgccaaaaaaattagaggcccaggccgaggcagactcactgattccatgagcaaaagctctgaaatggatatcaatcttgtaaatgccccaattccggcaacctcggacactgtgcctgaaaaaataaatttcagcacagtgcaaattaatttcgcaaccacgcggaattttgcctgtaaaatttggaaatgggcagcaattggcctttacgaacgtgatggcgaaacatcgcttgccccgagctctggcccaagatacattgagacctgttggaatgatctgactcagtttctcaatgacggttttgctgccacatatttagcatatttggctagcatttcacaacgaaaagtggtcgttgttgacccaatggtatggagaaatggcttggacagagtcatgccttacaaaaatatgacatttgggtacaaccctaatgttccggcagaagtcatacttttgccagtgcatttccctggacattggactctaattgtccatgatgttcagtggggtactcattttgccgattctttgcctaccccctatggcaggttggattggcaactgacggataaaattggaaagatcatttctgacattttgccgtcagcagtgttgaccgggatttttaatgcggtaaatcttacggtacaacatgatggaaatagctgcgggtactttgtgtgcctgtatgctgaatcctggcttatgaacaattgcacttttgttctgccgtga

SEQ ID NO: 85021 - DNA, 454 bp, Heterodera glycines
atgcttgaagcacgcaaaattttgaatttgttagtaattttgcaactctttttgggcataaatgtgctgcttttatcgtcgatttgctccactgaaatagtcaaaccaacagctgaaggtatttaaaatgcttttttctttttggtaaatataaaaaacaatttcttcggcacataaaaaagcttttaaaaataaatttcttcggcacaaaattctttcaaaataaagttttatttattgaaagttttcagagagtttagtgtgcttcggtagcacaatggtagtggtgctgccatgctgcccacggattgggcggacgagtgggttcgagtcgcacccgagccctaacaattttgcgcatttcttatcttacatttttaggttctaaaaactgccaaaattgttagtttttaggttctgaaaaactccaaaataggtgctaaaaatgaaaaaa

SEQ ID NO: 85022 - DNA, 306 bp, Heterodera glycines
atgccatttttgaacccaaaaaccaacatcgtcggcgttggcgccgtaaacaatccaagaatcttggcagcaaatcggtgaggagcaaatcgtttcgatccaagtcaggccgacgtgtgtatgaggaaatgatgccagagaaagttgaaaaggaggcgaagaaaacaacaatgcaaaagtcagtttggcattttgtttatgtttttttttaattggcaaaaattcccaaatttcagaatcaaacaaaaatttaaacaaaaatttgtgccaacaacacggcagacattcgacagttccagcagtaca

SEQ ID NO: 85023 - DNA, 972 bp, Heterodera glycines
atgcaaaatgatttttcggaaaggatcagaaaaatggaagaacaacatcgggaagagaaggacaaaaatggtgggcaacaaaatatgaaaaattataaaaatatatttttatttgtaaatttaaaaaagttttttaaattatgtcataagtcacattttggaacggatcagcaccctggcgatatggaaattatcagtgaccagcaaaaggaacagcagcaacaaattgatcagttgagcatcgccattcaggaaaaatgtgccaaaattgccacgactgagaatttttatggtggaaaaatttggcacaatgccacaattaaaaacaaaaaattaaagagatggaaatagacacgagacaacgcatcggaaaaatttatgaaaaattttctttgttggacaattttgttggcctattttgtcgcagttccatgcgatttaagtcagtggacggtttattcccaaaggtatttgacatttcagtcccgggtctgcaactctttagggattggttgccgcaaaaaattctttggattctttcattacagaccaaaaggtaccaattatatatatattggctttttcggctccggacagaccacgggactaaatattcaaatacctagacgcatatttacctttaaaacattaaatttttaattgagttcgccaacaaagatatatttatttatccatcgtttgccctaattacttttcttatgagtaaccatttaattcttgaaatcactctcgttggcaaaaaatttctatttaattctgaattatttcaaaaaatttcattattataacaatgaaatagccaaaaaaattcgatgataatcaacaaagtatatttggtttataatttattaaaaagaataacaaacattctaaaattaatttaaaaaacacaaattttttttctcattttattttcaattttctgattaaattatttaaaaattatgcgaa

SEQ ID NO: 85024 - DNA, 1371 bp, Heterodera glycines
atggccgctgtcgactacatcttcatggccaacatcgaccagctgcccgtcaccgcggatgaagtcgccgagcacactcaattggacactacgcttaggaaagttttcgatttttgccgtaatggctggcccaagaagtcgcctactgatttatctgcctttttcactcataggcacaaactttccgaagtgaatggttgcctccttttcggtgaacgcgtcgtcattccggcagccttgcgtcagcgaattttgtccgcccttcatttcacacatcctggaatcgtgcgcatgagggcattggcacaacaacatgtctactggccccgcatggaccttgaccttgaacgttgggttcgccactgcgttgattgcgcgatggcagcaaaagcaccaccaaaaacgacactctctccatggcctcgaacaaataaagtctatgagcgcattcacatggactttgcaggtccatgttctgatggcaatctctatcttatcatcgtggacgcattcagtaaatggcccgagacttttcaagtgaaaagcacttctgcggacaatgtcatcgttcaactcgagtggctctattcgcgatacgggtttccacgtgaaatcgttaccgacaatgggccaccctttcattcaaaagatttttctcatttttgcaggattaaaggtatcaagcaaagatttagtccgacgaatcacccacagagcaatgggcaagccgagcgttttgttgacatttttaaaaggcaaatgaaaaagtgttcacacggagacaaaaagtggatcaccaattccctgttcgcctaccgcaacacaccaaatgccgcactgaaaggtcaaacaccagctgaactttttcttggccgctctcctcgaacacaacggtcactgctcaagcctgacatttcttgctcaaatcgcaatcaaaatgactacacaaacaacatgtcgaagcaattcgatcgcaaacatggtgctcgccaccgaacatttgcaattggtgacgatgtgctcatcatcaactaccgtaacaacaaaaagtcttggctacagggtaaagttgtctcaggttctggtgttatttgggaaattaaagtccccgtccttggtaacgtcattgtgcgtaggcacactaaccaaatgcgtaatttttttccaattccccaaaaaagtcaaaatggaaatggacccggcacacagcatggttctcctggtcttgttcaaaagcgccacgtacgtttcgctgatgaagtggatcaaaatggtaccattgctcgagaccaacaacaacaaatcgccgatgtcgccgacaaacaattcgaagttcgacgttcagaacgtcatcggcgtccaacaaagtaa

SEQ ID NO: 85025 - DNA, 765 bp, Heterodera glycines
atggctcgaccgttttggcccgttcttcaggtggatggcaaggaccttccagacgcaatgcaagtgcgactgctgcttggaaagctcggtcaggaggagtacgctcgtcatacagaacgtgtacttccaagactgccgaccgacttcacattggcacagacaattgataagctcaaaattttgtttggggaaaccaaaagcattttcactcgtcgatatgagtgttttcagttagctaaatcaattttccagtcaccattagattttgctagccaagtgaatgccatgtgtgaacgttcgaaaatggacttgacaaaagatgaaatcaaggccctcattttcctcactggcctctcagatgaagacagagaacttagggaacgctgttttcggattttggaggaagccaaaaagaaaacaccgccggaaatgatcacttttgagaagcttactgaagagtgccgtgcgtttttgtcattgcgcaacacatctcaatctttggcaactgtttctggaacaaacgccatcactctcaagtcgcagaaattgaaggaacagcagctcaaaaagcgcagcatatcgcagcgcccatcggcgaaggcacaaagcaacaaaaatcgcagcccttccccttttcagcgccaaccaaagccgccatcaccgtgcaggttttgtggtcaaatgcattgggtgcgtgattgttcacgggcgccaacttgctcaaagtgcaaccgccgtggtcactaccgctccgaatgccgctaa

SEQ ID NO: 85026 - DNA, 462 bp, Heterodera glycines
atgtccaagaaaaatttccaagaaatttcaaaagacgtaaggcgctcgagaaatacccgtaattatttccggaagagcccagacttgggcaagtattacgaagaggtggaaaaacatgtgaaggaaaacaaaaaatttgggattaaagaatatgtccgcacgttttattttaaatgtccaccaaatgaggatcccgaaaacaattttaaaaaaatcctcaaaaaattgatgtccgaagcaataagccaagaagccgagccaggatggaaaatttcgaaaatttctgtcgatctgtactgcagtgccctgtcggaccccgtgatcattccggctcgccccttccaacaatcaaacccagacattgttttcaacgagttcatgcaccgacaacaatcatttggagagctgaatctattggaagagagaatttcgattaattgctacatatgcttttcctgaaaa

SEQ ID NO: 85027 - DNA, 677 bp, Heterodera glycines
atgtactcgttcaaaaaatattttgaaactgctcttgagaaggaagactttttctggcctaagaacagagctgaggttgaagcgatgttgattgaatcatcccaatataaagtggccatacaccgggattatgaaagcccgttttccggctacatagaaatgcacgaacacacgtctgcgttttgttttaccatggttgagcgagatatgcgaattttttatgactcaggggcgggtactcctatgggtagatacacgttggtactacacggcatcgtacaggggaactatttgggaaatgattcgggattgggactccctatttttttcttctggttttactgggagggaaggagccagacaaaccgcaacggtttttttaggagtcgtctttttctggcaaaggtccaaatgctaaaggtcatggcattagcttggggaaaagaactgttgacttccccaattgaagtaaactaaatgttttctttaatcgtatggacaggtctttaacgattaaaaatctatatgtcattattattacagagaattgcttggctcttggtcgttgctctatcgggtccctccaagtctctttgatatttctcgtcgaattgttgcagaaaaaatgatggaagaatttttaaaactgccatcacactttcgaattgctttttata

SEQ ID NO: 85028 - DNA, 214 bp, Heterodera glycines
gtgattttgtgcccttgtaaccaaaactattcgaatttgcgagtttcatcttttttcatgtgttagagacatgaaaatagtacgccaaaacgagagggagttgacccatagtgctggcattgcgctgtgtcaatgtgtatataagcaagcgctgtaagcaaaagaaatcatttggcttcactttcttttttcctctttttttctctttttttaa

SEQ ID NO: 85029 - DNA, 354 bp, Heterodera glycines
atggccgaattaaccaagagattggatgggccgatgtgggcaagaaaaatgttggcccgcgcgaaaatgggtcatgagtcggtgaccgaatttgcaaataaaattcgggattgggtggagcaagcgtctcctgatcccgattatacaaacgatgcacgcgagaatgaaaccgtacactactttctcaatggtcttcccacaaatttaaaaagaaaattattttttatgcaaaaaccaaagactttagtggaagcaatttcccagacaaaaaaggtactccaattgaaagaagaaattgaaaatgacgaaaagggagaagagtttaagcaacaaattgcagaattaaaggaacaa

SEQ ID NO: 85030 - DNA, 3741 bp, Heterodera glycines
agtgaacccaaatatttttgaaaattatctttccattagtgagggaaatgccctcattcttctcggcctttctctcaccattggcatccttttggggctttgtttctgctttttgttgctgatcggcttctcggattgtcttttccgtcgccgatcactccgacaacacaaaaacgttcgcaacaccgaacattccatcgactcaaatcggcactcaaatgctcggcttaatccctctcttccatctcgtcctttgttcattagggcgactggcactcctgtttgagtgagtctcttacccctttggctcactcatcgagtcattccgtcaacatctttatctggccattcattcactttagtggccattggttcatgtctctgctgttgtgtgcgctttaccgtttaaagatgattttatctccttttattttgttctcattttaaaatttcgatcaatatttgggcaaatattttccgcatttattttcgatgaattttgtcaaaatccaaattatttgcccttcaatcatactatgatgatttccactatttattaatattcatgaatacactataatcaataccgtatattttaaatctatccgttttattataaaataattttatttattttccattttattaactaagtgttcacggcaataatgaatattttcctctccctttcccgtggcgggacctccatgattatggtgaagtgatgtattatccctaattggcgaataatagaataatgatctttattgcgtaaggacaaagaaatacatcattgtgattccccaactcgtaacgggaaaggggaggttggtcgggatccggatccgacaaaagtgggaaggggagttcaaagggaagagtttatataagcggagtcataaggggcggggagagtacaaagggaccgcccccgtaaagcaaaaatgtggaaaagcaggaggggccaaactaactaaagagtaacaattggtcatcgggggccccaaaaattgaccgtctcggtcaaaacacaaaatcaattaagctaagaaaggagatgatggtttaatattttttgattaataaaattgttttattattattattattattttttttttttttttaaatattaaatattaaccatcatcactattctatggtcggtatttattcgaatcatctttaaattgatctttggtcaacggttaaatgcgccacttgttgatggttctgattgtgaatgatcatttctggcccatccttcattcccgcgccagttgtggtggtatgggcgctgtcgcccgcgtccacggctgttgttgacccatctgccgaccgtcccacgattacggtagcggaactcgtcatgttgtcgccaagtcgacgtatttgtgttggcaaatcggttcgaattcggatgaaattcttccgctttttccatttctttttttgcgattttcgtcagttcatccatttctttggctaattcctttaatcctccaaaagcctctgtcatttgttgttgaatttggtttattttttggcaaatgctgttctcaattttcttcattttctcctcttttgtattttgtgctgtttcctcccaaacacaattggcaaactgcccttgagttgccggtgtttttgctgcgaagcgttttctccaactcttcttctgtttcttttgcctccaattcgttccggactggaatttgtttcctcattccttcaggttgaatgatctctgactgcaaaatgctcttttccgcacttcttatgcaattctcggccatacgtcggccgttaaatccaagtccgacttttccaatgacgcttaatcgatcttcctttcttatgtccagggttgtcgttgttgaaacgaaatcactccaccctctgtctcgctcttctctcgttagcaagcggcgggtccaaacgtgctctttttgactcttggggtgcttcttcttcttcctcctcttcttcttcgtcttcctcgtccatatccaggacaatttcatctactggcctttgctcattattctcacttctctttttctccgcctccgccttccttttttctgtttcttccaatcggtgctttaaatcctcaatttcattcaaaagtcgcactttttcggcgatcaatccctcttcattgaatggctcttccgctggagcttttggcgcatccattgtctcgctgctaaaactttttgttataaaatccatgtttttatgacattcattagattttttgtcattaatttttaattcgtttttgttctctgatttttctcctttttcattattaatttcttcatttaaatcgaatatactcatgaacaaatctttttcagtaataacatttatgctctgtttttgcattaaatccccattttgatcactgtcccttttattttcaattttgctttcattacgggagattaatatttcgggaattctttgaagttctaaaatttggccgttaaattctccaactttttcccaatacgtctcattttccccattggttttcgaagtccactcatcattaattagaaattgttcacgaattcccaacaaaattttatcagcttcattgttcaaagacaattcaaattctgtcccaaaaagccacgcatttaaatatttttttccaaattcgtttgtgagtactttccaatgttcttttatgaaatttgttgggattgacgaattcaaaggaatcaaatttggttctggccagctcgtgtatgccaattttacttcaccctccaaaaatatttcggtaattgtacatggtaataaattttcgttaattacttcattttcttccaaaatttcgtgttcatcattttgatcactatcttccctctccttcagaaatgaaattttgggttgaggttattcgaatggaccctaagcaagtacaggcagtccaaaattttagaccaccgaaaagcctaacggaattaaaatcgttgctcggtgcacttacctattttcgaagattattaaaaattttgcccatatagcaaggccactccaaactttaacacaagacaaatttgagggaaaaatcgaagaaaattggggaaatgaacaagaagaggctctggaaacacttaagaaaatgttgacttctgccccggttttacaatccccaagatttggtaaaccgttcataattgagtgcgacgcgtccaaaaaagcaattggagcggtattactccaaacaaatggcccagtcgcatatgcttcgcgcgctttaaacagacatgaaacaaattacccgtcaatcgaaagagaagcattagccttagtgtatgcggtcaaagaattttcgccttatattgttggttcaggcgtaactaaaaccattacggattgtagcgcactgacgagcatgatgaaagccaaagaattaaaagtgcgactagagaaataccagatcactctccaaagttttgaccttgagatcgtttaccgccccggcagcaaaaacaaggcggccgattttctttcacgttataatataccaggcaatgagtccgaagacacaaacaaaaagggtaaaaaagaaaacaaaataaaaatttcaagtacagaaaataaacccaatagtgataaaatagtacaagaaaccgacaaacggacgaaagtagaatttctttaatgccaataattgatgctcaacgtaaagtcaaagaatagtaaaaatattttatatcctga

SEQ ID NO: 85031 - DNA, 998 bp, Heterodera glycines
atggatgcgccaaaagctccagcggaagagccattcaatgaagagggattgatcgccgaaaaagtgcgacttttgaatgaaattgaggatttaaagcaccgattggaagaaacagaaaaaaggaaggcggaggcggagaaaaagagaagtgagaataatgagcaaaggccagtagatgaaattgtcctggatatggacgaggaagacgaagaagaagaggaggaagaagaagaagcaccccaagagtcaaaaagagcacgtttggacccgccgcttgctaacgagagaagagcgagacagagggtggagtgatttcgtttcaacaacgacaaccctggacataagaaaggaagatcgattaagcgtcattggaaaagtcggacttggatttaacggccgacgtatggccgagaattgcataagaagtgcggaaaagagcattttgcagtcagagatcattcaacctgaaggaatgaggaaacaaattccagtccggaacgaattggaggcaaaagaaacagaagaagagttggagaaaacgcttcgcagcaaaaacaccggcaactcaagggcagtttgccaattgtgtttgggaggaaacagcacaaaatacaaaagaggagaaaatgaagaaaattgagaacagcatttgccaaaaaataaaccaaattcaacaacaaatgacagaggcttttggaggattaaaggaattagccaaagaaatggatgaactgacgaaaatcgcaaaaaaagaaatggaaaaagcggaagaatttcatccgaattcgaaccgatttgccaacacaaatacgtcgacttggcgacaacatgacgagttccgctaccgtaatcgtgggacggtcggcagatgggtcaacaacagccgtggacgcgggcgacagcgcccataccaccacaactggcgcgggaatgaaggatgggccagaaatgatcattcacaatcagaaccatcaacaagtggcgcatttaaccgttga

SEQ ID NO: 85032 - DNA, 1634 bp, Heterodera glycines
  unsure (1)..(1634): unsure at all n locations
atgaataaaatcgatgaaatagcacttattttagaaaccgaaaaaatagacattcttttaattaccgagacttggaccaaagacggggaagaaatcaatttttgcccttgggtaaaagagaattacaactatattttttcatcaaggaaatcgaaaactagtggaggtggttgtggtattctaatcagtcggattcaaaatttaattctgaaattttagttattcaacttcaaaatttacaatgcatcagatttgttttggtgtatagaccacccaaaacaacactcaagcaaacagaaaatttgttcaaatttttgcaaaaattttttaatgaaaattcagtgactttaggagattttaatttaccgaataaggatttggtatggaaaaatgggcatccctattcaatgagtaaatatggtgaaatattttgtgactttttcaatagattttcttacgttttggccacgaatgagccaacacggattaattcctggctagatttgatttttacggccaatgaaaaaattattactgattgtactgttaaaggaggcatattttcatcggatcatttaacacaattttttacattaattactcctaaaacaaaactgaaaacaaagatcgtaaactttcgttggttttgtccatcgaatgtgttacattttaatatagtcatagcatcaaggctaaatgccttgtcatatgaatgctttagcataaatcaaaaatattccgcctttaacagtatgttgttagaaattttaaatgagtgtattccaataaagcgtttaaccaagaatgatttgactcctaaatacccacaacatttattagcatccatcaaagaaaaggctaaattattcaggcaagctaaaactgacccatccaaaaaagcactatacgatagcatttctttacatataaaaatacaaacaaataaataccatagccaaattgagaaaaaggctatttcaaagggaagaaattcaatttataaatatatacaaaaattcaatgtcaatccctctgaaatacctaatctaatttatgaaaataaatgctatcataacagtgctgagaaatctgaattatttgccaccttatttgccaattcatttaataatagtgaaaccgacccaagcaatccatgcttgggtaatattatagaaattgatcaatgctttatatcggatataaattttaacatcatcgagacccaaaatcttttgaaaaaacttccgaataaaaatggcacttctcccgataatattagttataaaattttaaaaatttgccattcttctctgtcaactgttattactgacttgtttaggatctcattagacactggttcacttccagacatctggaaggaatcaattgtttttccgctttttaagaagggtgacaaaaataatcccgaaaactataggccaatttcattaacctgctcactctgcagggtaatggaaagaattttaagcaaaaatatttacaattttctattaaaaaccaaaaaaatttcggaatttcaatttggttttgttagaaataggtctacaacgagtcaactaataacagttgtggaagataagtacgaggcaataataaatggaaaaaanagttga

SEQ ID NO: 85033 - DNA, 1439 bp, Heterodera glycines
  unsure (1)..(1439): unsure at all n locations
tttctctctgtggtaaagtgtttcgagattggttttccccccccgagctacaaaatgttgggcatttgttcaacttcttcaattcagtttttctccactttaatcgtccttctgtacacacattacacacgcgcaaagcttcgcctgcggcaacggctgattggccacggcggcggcgcaggcgccgcggggcattcgtcgacactaatgaaggcgcacctccacgaagtgattagtcataaaagtaattaatgacccctctctcctcaatttagttgggtctctacaacatttccatccccgtcactttggtcgctgccattctgctgggctatatgagcatagggtaataagcaaaattgctttttatttttataattttcgattaatcggggttttaaaaaataagaggggaggtaattagctcgagaattaatgtgtcgagaagcgaaacgcacccttaagctaaacattgttttgattttcaataatttgatctgtttttcttttaaagtgccgtccttttggccaagtgggaacgatggcctttgtaagtgaccacttttctgtcgattattaaaaacgggttaagccaattaaaattcgacgtcccaaaaaaggttcgacggcttttactactcattcattacgatgacaaccgtcggatttggcgacattgtgccggccaaacacgagttctttttgttcgatttattctacataantcgttggttggtaaatgaacggtggcacattttggcaaaagtggcgccgcttttcctttccagggttggccatcaccacaatgtgcatcgacttagttggcattgaatacatcgaaaaggtgaccactccgttttttgctaatagcccaatttggtcgggtcgagcaatggcacatcgagagtctcgggaaaagtactcaaagcattggaagaaattaaatggaagcttttgcgggccagcgaaaaacattgggccataatttctcttttggcattttcaaaccaaatgctgcgtttgcttaagattcactattttggccgtgccatttcgggcgctcgcttcgcccttgtcaatgtgggcggaagaatggtacgagtgcccgacttggtgcgctgtgcgcatgttctgcaccaaaagtatgggcaacgaaagccgacacgacaacggcgcaaacgaacggtttcggcatcgtcaacgcaaaacctttttatggcatggaaaggagcgtaagttagcgccaattgggggcggagtaattagggataattttatgctaatgatccttctttctaaaaacatattgaatttggtcagatacgcgcccaaagatttgccgtacattcgcttcatcgatttcggctctttggcaagcttcgagtcgatctcgatctcaagcctcttttctgcaatttttacgagtggtggtcagaagt

SEQ ID NO: 85034 - DNA, 303 bp, Heterodera glycines
gcaagtactcgaataaaatcaaaatttttatgtacaatttctccaattttacaaaaggccatttttggaatgaaaatgatcttttttccttcttcctcgtcgtctttaaatatgccgctccttaatcgcagcagggggtttgaagcagcgtgcatatcaacaacgagatagccatagggtttattagtcgcaatacgataggcagaaaggaaataatccagttttcccggaaaaagttgcactccaatgttacgaatcgccagtgcggaatttggagctcgcattaacaccaaatattgggca

SEQ ID NO: 85035 - DNA, 766 bp, Heterodera glycines
atgacaagcttgtatatcgcattgaaaatcaaggacattggcaatgcttcttcttccaatccatcgaattctgagccattggcacaaattgtcaattggaattgggacaaaaatggggcacaacaaatcattcaagtaataaaatataaagaaatgatcagataaaaaatgaattaatcaattaaattgtttagacaaatacactcaacaagggcagtgagcttaattaccgcagcaataatgattcatcatttgtaatccgaattctcaaaaagcgcgagaaaaagtccgatgaaaaaaagtaggtaaatgtgatattcccgattttatcagtaaaaatgctcgtctaattgctctctattagcatgaaaaattaggttggaaaaaagatccgaggttgatcactaattgatttggcttccgtttttttcccatttttttaagtgcgttcccggcaccttccagcagctcacccgacgacgatttgaccgtgaaaattggtgataagcaggtgaaaaacagaaagaacaacagcaacattaagcctaccctaaagcaacagatttttcatggaaaaaaacaattttttgatacaataaaaattttgaaaacaatttgtgcttgcctggtggctgtactttaaggcctgctgctaactaaatttaacttccgcaaaaattcgtccgaaaatgtccaggatttgtaattagaaaacgggggcgggggagggctcgactttataggcaggacgtactgatcaaataaa

SEQ ID NO: 85036 - DNA, 841 bp, Heterodera glycines
atgcaaattctgcaaaatgagattatgcggggaaaagtcgaaaagtttggccaagacaaattgctcatggaattggccaaaagttgggccgaatacaagcgccaaaacggaaaaaaatgtaattcattaatatttcaatttgaaaaattatttttaaaatttaagcgcatggaaaaggcaaaaataatgagaagggcagaaaaaatgaaaagcgaatccttcagctgttgtacaatttgttaaatgatggcaccaatggattagcatctgctgatctgaaaagtggtgcaaaaagtaaataaattaaatatttgatgggtgattttggatattcgtgatagaaaaatccggggattggcatcaaagtgaaaattgtaaggagttgttatttaaaattaaaaaccattaatttgaaaattttcgacgaaaaattatttataactttgcgcaaaagcaattaaatttttaaaagtttcaaaaaagttatggctagaagaaaacttaaaaaaaaccttgtttgtcgaacattttatgaaaaagcactactaaaaaatttacctaaaaaaatttgcaataaaaagcttgaatgtgaaaattttcgaatttttcctgacataaattttaattttttaaatttttttaatgacagatcgtcaacgcagaagaaaaggccgtggcattatcacggaaagacacattgtcatcttttgtgtgattggcatcatcatttgcattttcaatatttcactattttgttattgccaatgtttcgaccatcgatcagccgccgatgacatagaagcaacagatagtcaaaccacagtcgaaaccgatcaccaag

SEQ ID NO: 85037 - DNA, 1891 bp, Heterodera glycines
atggtaccgacggaacagattgacacatttttaattaaggatgtggagatgacccaccaaatgcgcgaagacttcgaacgtgcctatttggagttgggcggaatgggcgaaagagtgctcgggttttgcgactttcgcttggaccacgacaaatttcccaaggtttttggagtcttaaggttctcccattgctttttatgttttttagggatttgagttcgatgttgaaggccccaactttccgatcgaagggttccgttttgtcggtttgatttcaatgattgacccgcctcgtgctgctgttccggacgccgttgcgaagtgccgtagtgcaggcatcaaagtggtgatggtcaccggggatcatccgatcacggccaaagcaattgccaaatcggtgggcatcatttcggagggcatggaaactgtcgaagatatcgccgttcggaaagaaatttctgtggaccaagtcgacccgaggtcggtgttaacggaaaacggtttgagattcgaaattcagagaagccaaggcgattgtaatccatgggagtgatttgcgcgagatgtaaataattgacccataattacaattcttccttttttgttttttaggaatgaggaccaattggccgaagtcatcagtaaccacgatgaaattgtgttcgccaggacttcgccacagcaaaaactgatgatcgtcgagggatttcagcgtcagggacaaattgtggcagtcaccggcgacggagtgaacgattcgccggcactgaaaaaggctgacatcggagtggcaatgggtgggcaaaaagtcggagagcgtaatgaaataaatttgttggaatttgtaggaattgccgggtcggacgtgtcaaaacaagcggcggatatgattcttctggacgacaactttgctgtgatttattattataattatttgtttgttattttttaattctttgaacattcagtcaattgtgaccggcgtggaggaaggccgtctcattttcgacaatttgaaaaaatccattgcttatacgttaacttctaacattccggaggtgtgtgttttttaggtttcctaaaaacttccattttaaagatctcaccgttcctgatgtacattctgttcgggattccgcttcctctcggtaccgtgaccattctttgcatcgatctcggcaccgacatggtcaaaataagcctttcacccctgatttgatttttcgatttttcaggtcccagcaattagtttggcttatgaagaggccgagtcggacatcatgaaacgcctgccacgtgatccggttcgagacaaattagtaaatgagcgtcttatttcattggcctacggacaaattgggatgattcaagcctcggctggtttctttacggtttgatgatcaaacttattgttagtttatataacccccaatatttcagtacttttggataatggctgacaacggttttcttccaaaggacctttaccaattgcgtgcgcaatgggattctcgtgggattaacaatctcgtggacagttacggacaagaatgggtgggttaagcacaaaccaacttttaccgataattttcaaaaataaaaaaattatagacttacatggaccgaaagattctcgaacacacttgtcaaaccgcttattttgtgtcaattggtagcgtttgtttgcttactttgagtttgttatttccctactccaagtgattgtgcaatgggctgatctgatcatttcgaagactcgtcggaattccattgtccagcaaggcatgtccaattgggtgttgaacatcggcttggtcttcgagactttgttggctgttttcctctgctactgtccgggtttggacaaaggtcttcgtatgtacggactgcg

SEQ ID NO: 85038 - DNA, 142 bp, Heterodera glycines
atggacacctttagaccatgtgcaattggagaagaagtcgagcacagtgcgagtgaatttgtactaattgacgggccattaaaaatgggactgattggaagagactcactcgtccggagaggaaacggccgtacccccgtgg

SEQ ID NO: 85039 - DNA, 86 bp, Heterodera glycines
aacattatggaatttttgattggtgtttctcgaaattaccagatggatgacaaagaattttatgaataaatttttgggatgttgaa

SEQ ID NO: 85040 - DNA, 825 bp, Heterodera glycines
atgaatagcagtgaagaaacaacggaaaatgttgggatgggcggaaataaggacgaacggcagacaacttcaaaagatgagaccgacgaaagcagcagcgaaaatcaacggaatgaacaacgccaacgacaaatggacagcgaaaaggaggactcgaggtgagcatgggctggacaatgcaaaaacagtcaatgaaaaactgaaaccgaaacatcggaggggggggtgagacgaatttgaccaccgaaaactaaaactccatgctttgaaacccaagacgaattaacaaagaaggaattgggctaattgagcatatttgagggcaattaacgcaccaaatgtgtatttttccaattaacatttgttttcatttgtccaggttcgaatgcaatatttgcttggacatggctaaagatgcggtcagtttaccagcgacgatgccttttcactacgttttcatcaatacgttccatttttgccttaggtcgtttcgatgtgcggccatttgttctgctggccgtgccttttccaatggatggacacgcgtccctatcgccagctgtgccccgtgtgcaaatcggcgattagcaaagacaaggttttccatttttactgaatttatcggaatggacaaccaaataaaaaagccaattcacagtctcagtcacattccctctaaaattgcattttttgccaaggtgattccgctctatggtcgcggtggtggggacagcgacccgcgcgagaaaattccaccacggccgcaaggtcaacgcacagaggagacaaatcaggtggacaaaagacatttttaataaatacgca

SEQ ID NO: 85041 - DNA, 1330 bp, Heterodera glycines
atgaacaagtggttggcacttgtgtaagtaattaattgggggtttttaatacatactaattaatcatagaatgaatgagtcaataaaattccctgtaaactttgatcagtaatcataaaaaacgatttcaaatgcttttcaattggtccaaatcgaaaaaattaaattaaataaatgaatttttaaatggtgtccaaatgggaaaccctgattagataattttgactttctgcattcttttttagtgtgttgatcgccctgatcagtgtgctggacagcgctgttctgcgacaacggctcttcgtcaaagcggaaaatgcaccgaaagcggagccaaaggaaaatccaggtaaatgataattaaaaaaactaattaatttttataattgaattagcaactgcggacgtggacgaccatggaaaattggacaaaatccaaggatcggatacgcaaaattgggacaaatgtgaaccgattgaaaacggcacaacaatcattagactggacaaaggctgtaaaaagtttgtacaaattttttattttggatattttaatttataaaaaattaaattaatattagtcatctgatctgttactcgagcaaattggccaaaaattttggaaattggaaagccaatggacggatgagagttgcaaaggtggacttgcaggaattgagcaagaaatgtgccgaaaatgatgggcctaatcagagcaacggcggatggcacggcttaatgattgccaaacaaagtgacgggcaattggaattccaatcatccctcaggcgagtgctttttcggtttaattacctattttttagttaaattaacattttagcgccaatttatccggcaaattgggcatggaattcttcagcgatgccgactttttggagctgaatttcgccaaaggtccaatctcataataatatttttttcattttgtattatttcgtacagtaaagtatgcgtgatactgtagatttagcgatttgcatttaggtaggtactatctacaattaaaaaagcatcgctgtgaattgacaaaaatatttgtttattttttcatctatcaaaagtaataaggacagctaaataaagtactctctctacctttgcacgctacagtatctgattttaaaaaatacagtactcgatgaattttccgcttccttttgcagctctgatgcagcaaaatgggccactttcagcagctaactttgacgaggcacttccgcttggcgcattcatcaaagattttgaagggatggcattgcgccttgtggcactggaacttaccaagggcattgcgacaaatgcacggtga

SEQ ID NO: 85042 - DNA, 906 bp, Heterodera glycines
atggtgtgccgtgtttcttcttctattggttgtctgtgccatcattctttggttcttttttggccatgtcaaaaaacgacgccctcacaaaaacgaaatgtaaataaattaatcaaaaatttcgaaaaaattctccctatttttccagctttatctgcggcgactgttggcttttggtgttcgattttcttgcgccttctcagctcggcctcgaaattgcgctggtcaaccgccgctttaactgcatcgtcgacgaacacttcaaaacacgcaaatggaaattgggcggaatgcaaatttcccacaaaattggagaaaatggcaccaaacaaatgcaaattgtaaattccgatggaaatccattgccaatcccgcaaaatccgttgcccaacaaaatcatcggattcagacgcattcaaattttgtagaaattgattaaattgggatttttcatctaattttctgcttttcagctacatcgatcaaaatgtcgtcacatttctccgccgttttcaccgttttttcgccttttcttcaatattcttggtcatcactgaaaatgtttgcgtttcggaatttgttttgctcaacatttggccgatgcttcgtcattcaatgcgtgcgatgtttttgaataccatcgcttttcgccgtttccgccaattggccccgtcattgctcaacgattgtccatctcttcacactgtcattttcaaagatgccattctcccggaatttccgcccgatgaaagtgccaatgcgacggatggtcaagcggtggtcaaatggctgttttcgccttgtccggacggtgtgctgccaaacgtgttgcatttccatgacttttcggttgcacaatggtcgtcaacgattgaacagtttaaagcggtgattatccatatttaa

SEQ ID NO: 85043 - DNA, 2487 bp, Heterodera glycines
caaaaaaattaagaatagttttactttataggccaccaaacacttctgctagtctcactaaaaagattctgaacctcattggtaattatttagaagaaaattttatcattatgggagattttaacctaaatgcaaaagatataacctggaccagtggaacaccttttgctaaatcggaaaaaggaaacattttttgtgaattttttaataagtatggcttattccttatgacgaacggcccaactcgtggtagtgcttggcttgatctgattctctcttctaaacctgattttgttaataatgttttaattgaggatatttttagttctgatcatcttaccactaacttttcactatcttttcccagtaatagaactaaaacaaacacatttacagtacgcaattataattctactaaacttaatctactaaatttaaacttatcttcaattttaccctacaaattactacaaaaatttaccattgaagataagtttaatcatttttaccttctttttagagaatatgtagaattatacttgcctaaaatcactgtcggtcaaaaatccagaaagcctaactacccattgagtcttaaactgtcaattaaggaaaaagccagactttataaactacaaaaaataaaccgtgataaatataggcatttgtatgatagcatttcattacatataaaaattcaaataaataactttgttactaaaaatgaaaataattttctgaataaaggaaaaaatgctatctacaaatatataaataaatttacaaaaaattttgaacaaatccactctcttagttacgagaaccaaattatttttgatgattatttaaaagcagaaacttttgcaaaaattttccaagaatccttttcaaattcagatgttccacaaattagcagttgtccttccaatcccaatggaccttctatttctgatgttgaatttaatgccgatgaaatttctaaaattttaaaaaatttaccgaatcgagaatccacatcccccgatgaaatttcctttaaaatcttacgtaattgccaccttactctttctcctgtaatttccgaacttttcagaatatcaatggacacaggcaaaattcctgaaatttggaaaaaatctattgttatacctctctttaaaaaaggtgaccgaaatgatccacataattacagacccatttctcttacttgctgtctatgtagagttatggaaaaaataattgcaaaaagcatttataacttccttcatctgaataatttaatatccgaacatcagttcggttttgttaaacaccgatctactaatactcaactaattacagtattagaagattggtacgacagcatatacggtaagaagaaaaatattgactgtatctatgtggactttcggaaagcttttgattcccttcctattaatattttaataaataaacttcataacattggcattaggggaaaactgctaagttggttatctgaatttttaaaggacagattttacacagttaaaattaacaacaaattttctaatttatatccgattcagtctggtgttccacaggggtctgttcttggcccctctgttatttttaatatacattaatgacctcccgcaggtaatccctccgggagttagcatcaagctttttgctgatgatgtcaaaatttatgtttcttacaaaactcgtgatgaaagaagcaaattaaatgttgctttagacaatattggaaaatgggctaatgcatttggtttaaacatctcccaaaataaaacatttatattatttctcggcaaaaataattcaaaacaacaatataaatttttcaacaatattattaatgaggttgaatctattagtgatttaggcattttaattgataataaattaagattttcaaatcattatactaaaattattaaagctgcttatttaaggattcgcaatattgccaaaattttaaaaacccgctctatacgtatttggaccaaagtattcaagacatacattcgtcctcttttagaatatgcgcccgaaatttggaatccgacatacaaaaaagatataaataaattggaaagatgccaaaaatattttacaaaaattgctttatttaaatgtaggcttccgtatataccttacgaacaaagacttgatttattcaaacttcaaactttagaagaaaggagaaaaacaattgatttagttcaggcattcaaaatcatcaatggtctcactcatcttaaaaaagacatattcccccaattttctggtcacatcccttacaatcttagacgtaaagttgtgttaaaaccacaatccagtaaaacttcaaattcttttatcaacagaacggccttaatatggtctaaactcaacaaagatataacagatgctccatctgttgacagtttcaaaaaacgaataaataaatggattgagttaaacaaaaatttagtctgtaaa

SEQ ID NO: 85044 - DNA, 605 bp, Heterodera glycines
atggaagaaaaattattcaaaatttgtaaggaaattcgagttggccgtgccctaattgaaaaatggttgcaacaatttgaaatgtttggaaaaagaatgacgaaaaaagaaaaaatggagaaaatgaaaatatattggaaaataaaaggagaaaatcaaaaaataattgataaagaaattgcaaaaatgttggaaattaaacgacggacattttccacttggaaaaaataatttggagaagagaatatttaattttagatggaaatgaattttcaagaattttgaatttgtttggtgttgttaacaaattttattcaaataatttctctatttgaatttagttgttttttaaaattgcataaatttgttaagggtgattgtcattacattgtattttattgcctatgctcttgacttttctcgccccactcgccccgcccccccttctcattaatctgttcccctctcttttgttctattcattctgatcggggggattgggccaagtgcccgtccgatccttccctccccatctgtcccgtacgaatcgggggccgctcctttccctcatttactcattatgtaattgtgtgcacaccttcgga

SEQ ID NO: 85045 - DNA, 611 bp, Heterodera glycines
atggggtaaggaagactcaaaaaatggggtcggggaacaaattgagaaaaatatatataccgtatttcctaaaatatccccccccctaaaatacccccccccctttttttgaagggtttgaaaaatagagccaccgggggctctattttaggaaatacgagatatattctctctcgtatatgtaattcctaaaaattgaaacctctctatttgtataccagcgtattcctaaaatataaaaatattatagtagccccaagaggagggacgaatatttcagtgaatacggtacatattttcttcttttgtacagtaggatgggtattactgtggcgtttgacaccattttcactgccgcaattcgacaatttgatcaaaaatatagcagcgcaaaaaatgttgttcaattgccaatacaaaatgtgcacatttatgcatttgtttatgaacgaatgaacaattttctttcatcgaatgtcgaaaatatattttcatcaaacgaaaaaatggaatattttttttcattgatgaagaaattttttcaaacaactttgaaacaattgaacaaatttgtggaagagaatgaggaaaaaatggccaaatttttgtaa

SEQ ID NO: 85046 - DNA, 956 bp, Heterodera glycines
atgaattattatttcatttgtatattttttctaattttattaaatcatcgcaatttcaatgccttcccaagtgtaaatgctgcggttgtaagttgtcattttaacaaattagctaattttaatacttttatcatcccattattacaagattgaagatgacgctttggttgcgcttgcgaaaggcccgaaacattttgccaatttttgcgcaatttacggcttaaccattgatgagaaaaaccaatttttgtctgaaaaatatgaagcacaccttggccttttgtattatttaagaaaagattggtatgagatgcattcgaccgaagtaagatcatttgctgaatgttaatttaatagctgtaaaaaaggtcataatcgataatttaaattgattttttttgatttataatttattcctacgatttcgtcttttataattttgttttgcaaatttttgtttatttcgtgaaaaataattattatcttttcgttttctttttctgaaaatatatattttttggatttaattaaaattttatgaattgtttattgtcgtgctttaaggaaaacattttgtatgagaaacaatgggaaatgtcacgcaaatttgctttcattctgtacgagtatttgttccgtgaatatgttgctgaatatgtaaaaggttcgtataattttcaacaaataattttaataaaataattaggctgcatacttatttcatttttaaaattattttaagaaattttaagattttaaaatccaaattttggaaatagttaggcattttcattatttttttgtgccattcagcagttgacccagcgatggctgaacaaattcccgcagttatgaagcccataacagcatttcaatacatagaaatgggatacagtattagcataacattttgtgaggctatcagcgaaaggcaaatattcggattagtgtcctaa

SEQ ID NO: 85047 - DNA, 1261 bp, Heterodera glycines
  unsure (1)..(1261): unsure at all n locations
tcaacaacgacgacgacggcggacagtttggacgagttttcactgttggtgaagaacatgtaccgctacggggaagtgaaggtgttgacaacactcaactacaacatcgacgcgtacaatctgccctcaattgtttcgaggcacaaaaaatgaattttaagaaaaaataaataaataaatcagcagggtttcagaaaattccgattcccgaattttttaaatatatgtctctccggtgaaaactcagtcaatctttctgggtattgatcgaaatgtttggaattgttgaggtcccatcgcttagggcgacttagtcaggaactgaaaatattttttttaaattcaaactcagagatttaaaaaaaatcagaaaattattttctaaaaaaatttttaagaaaaaactaaaaatttttcgtgcgtttattctttattctataatttaatttaaaaattcaattttttagtaatttttcaacaaattaataaaaatctctcctttcntcatttgtgttattgcagcattgaatttaacaaggacggtgacttttttgtgatcgccggtgtgaccaaaatgatcaaactgtacgacttcaacgcactgatggaccattgcggaggcactgatcagccgccaacgacagcgggcaccaacgacggcattacgactccggcatttgtccatcagccgatggttcagcttcggtgcaactccaaaattaggcacggcacaccttcccgcccccctcatttcaaaaactgatttcgttacactttttagcaatgtttcatggaacccatacaataaagtaagaatttaattttaaaaaattatttatcataaaaatgccttcataatttttgttgttcagcacatgttggcaagcagtgattacggtaatatgtattcttttactgttttttattttcctaaatatcacgaatattaattaaaatacaaattcagacggcacagtgcaattatgggacactgctggtaaaaatttaatttaaatttcatttcacgaatatgactaaatattaaaattatccatttcagagggatttcaaggaaggggggaggggaagaatcattaggaattattagcttccttctaactcatttttgggggctttttagccgcaaaatgtacacggacatttggtgagcatgaaaaacgctgctggacagtccaattcaacagcatcgacccgcatctgatggccagcggcagcgatgacggaaaagtgaataaatact

SEQ ID NO: 85048 - DNA, 962 bp, Heterodera glycines
atgactgacagggcaattaggaaattatgggacggagtgatgttcgatggtgtgtggcagaggaacgaaacggcatggggaagtccgcagagcgcggcaagtaagtaaaaaagcctcgatgaatgaatgggcatgagcagtagggagctgctggagaccgagatttcccaaggctcgagagcgaggccagaaaaaagtcaagaaattcaagaccgagaaattcacaagcagcgccactaatgaacaggaggggggggggagggaatgaaaaattgaaaaaacccaaaaataaaaagggatgagtgagaaatgccgaaaactgagaccgtaaccccactgtgaaacaaaaaaaaattaactgaaaattccatttattctttgaaagtttctatgagaaatggaacaagtacagagaacatgtaaaaaaataaaaatccgttaaaattcgaaggataattttggaaaatatttaattattaatttatttaacaaatgtttatttatcctggcgcatgcataatttggagttaataactttatttaatatatttttttttacttcagcaaattttacgcgaaacccccagtactttgttcaaattgggtctcagcagccaaaaaaagtgctaatgatcatctcgttgatgcaaaagtacagaagagaggagggcaaaagcctaatgtcaataggctaccatgtttatcgtgtggtaaaatttggttagggcccggatttttagaggcaaaaaaaatatcaaaataatggcctaaataagggcgaaaatatatgggggggggcaatttaatgatttgcattttttttttatcttttattgccatttgattaaaaatttaacaaaagccaaaatatgtgcaaaaataaggggcgaaacgaaaaaaacgcaaaaacagggaagaagccctacagaaaaacaaattaaaaaccaaaaaatctgggccca

SEQ ID NO: 85049 - DNA, 1162 bp, Heterodera glycines
atggagaccgagaagccaacagcacaaaaggatgccgagctcatcgccagaagcagttccaaagtgcaaaatctaacggaaaggcaatggatggtcaaatggcaggggaaggggcaaacctcgtcgattgtgctccaaattggtgtccttgtgggcaccaattcgtcagaatccacaaaaaccggaacacaggcggtaatttgcgctgcagccgaaacggcttttttagggttagcggagaaaagggacacaatttgggcgggagggaccaccggacggagaaaccttcaggcaaaggaaattcggttggatttagcttgaatatctgtatgaattagatgaggaagctttttagggaaaaactatgggcccaactttgaagcggtgtctttggtcttccaaatcagggttcaacaagctgactaccgacccttcccttctccgcctctcaatttgctcgaccatatcgaataattatggcctcaattgatccattaagcttctgcttgcctcgaggcagtgaaccgttttccctcagtggagcaaacatttgccaacacgcggcgatttggaaagcgttggcggaagcgattttcaaaatgttccccctcggaaagcagctaaaagacgaaaaattgaagtcgtcttcctctatgttctcacattgtcattctgtccaaattgactaacagacggcgattggagcggaaagggtggggacggatcgatgctgatcaaaagtcggacagtgatcggacgatcggacggatgacttcttaagggggggggggggttgagcagaacgaacggaaatcggagcatttgctcgacctgtaatcggtgtgaaaaatcggtgactgaagtgtcaaatgtccgtcggcctttcccagggcgaccaatgccctgaggggcacccgtgccgtgcccaaccatcgccgctcctcgcgctcgtgccgcgtgtccctctcgcggtcgtcactttccatgggccgtacttccacgtcgaacatgtccacctccaaacagtcgccctcctccccctcgtcctctttctctctgcccatttccatcgccaaagtctcttgccaattcgcgtgtcttccgtcgacaatggtcgtactaagcgaactcacctgcaaaacgttccaattattaaaataaa

SEQ ID NO: 85050 - DNA, 520 bp, Heterodera glycines
tgctgatcagccgccgccccttcgacatttcacggcgtttaaagccaatgcatcgacatccgctgctctctttaagacgcccaattctctcagtcagtcggtggcactcaaacaaaggcattttcaaaagaattccaaggattgaaaattaaaaaataaaaaggcataattttttcaaattattcggttgctcgtccattattttccctttgctctctcaggagcaacagttgtccaagcggaagctgattctgaacattcaattcgccagtttcatcccaaaacgtttcgttaatggcggcccttcccaaattttcttgcacttttcgacaaaggtttatttttatgtttattttaataattggaacgttttgcaggtgagttcgcttagtacgaccattgtcgacggaagacacgcgaattggcaagagactttggcgatggaaatgggcagagagaaagaggacgagggggaggagggcgactgtttggaggtggacatgttcgacgtggaagtacg

SEQ ID NO: 85051 - DNA, 1248 bp, Heterodera glycines
atgcgcatgttgtgcagcagagaacaactttggcaattggccttcgatgacgtcgactcggagagggtttggcggggaattgcgacgcttttggcaatttgaagaatttttgaggatttccgcgcgatgagacgccggctgcagaagcgcttcaaatattatgagaagaagcaaaagttggaagagacggcggcacggaaaaaagcgacggcagcagagaaaagagcaagggaaacggaagaggagaagccggacgagacgaaaaaggttggaaaagagagaggaaagggagagtgtgggagagaaaaagaggaaatgggagggaaaaaggaagagggaaaggaaaagaaaaagagtaaatgggaaaaagggagaaaaaacggctaggaaaatgtgtgggagggaaacgaaaaagagagaggaaaacgaaaaagagagaggaaagggagagagtgggagagaaaaagaggaaatgagaggaaaaaaggaagaggaaaagaaaaagagtaaatgggaaaaagggagaaaaaacggctaggaaaatgtgagggagggaaacgaaaaagagagaggaaaacgaaaaagagagaggaaagggagagaaaaagaggaaatgtcagggaaaaaggaagagggaaaggaaaagaaaaggaggtgaagggaggagatggaaagaagagaaagtaatcggaaataatttggactccaaaaaggagaaaaggaaatattttcccaaaaattggtggatttttgtcacaaaaaaaaagaattttcatttttgtcattcgtcccttaaaaatttcctttccctcaaaggcgttttctgccgcttctctccgtccgtcctccgccgccgccgccgttcaatcgccgccgcgtccgtcgcctccgagttcgagcggttacagcacgaccacgacgacgagttcggcggcggacagagaccgctcgccagcgatgggcgtgcgacaaagcacgagaggcaccgcgcggaggcccaacgcggggacgaagcggcagcggtactcgccgggcgcggaggcgctcctcccacagcaggaagcgagacgcggcaaagccaagcagtgaacggagtgacgggacgaaacggacggacagcgagtgaccagcgacggacgaacgaacgaatgtttcggcattcggtcgcttctcttcctcccgatcctcttttttggtctgtgatcaccgaaccaacccaattagtcttttattgttcgtcggtcgaat

SEQ ID NO: 85052 - DNA, 108 bp, Heterodera glycines
  unsure (1)..(108): unsure at all n locations
atgcccttgcttanactaatggtcaatcaaatcagtggccaggccattctttgcttctttctccgccgaacgtacgatttctacgccctcctcgcttcgaaacacgcg

SEQ ID NO: 85053 - DNA, 712 bp, Heterodera glycines
atgctaagggcacttttgtcgccggaaatcttcgtggaaattgtgaattgttaccaggaactgatggtggtcgaaggctgtcttcagattccctgctgcgtggagtttccaccgctcagaaaatttgtggctgccaatgcgattcgttctcggcaacttcggcaggaaaatttggaacggaaggtgtgcagagaacgcatcaaccaatgcacatttgccattttaattaaatcattttcctattttcttggcacccttttcaatgctttcttcatttcagtggcatttggagttggcccgtgatgcatgtgtctcaaaattggcactgtccgaattgtcttgggacgcgagcctttccttcgaaactgtgagggtttgcatggaaaaactacgacggattggcccggaaaagtctgcccaatttgctcgtcttagcattcacctttcgaacagtccgaaattatttgtgatgttcaacggtcgcctctcagtgcctatcgattgggtcaaagaactttaaatgcaactgataattagttaattagccaataatacacttctaaattttccactcttttccattcgcctttatttgactcaatttgcaaaaatattacgcaaactgtgaaattaaaacaaattaccaaaattaatgcatttcaatggccatgccggtgattctctgttctcatttttgttttgattgtttgaa

SEQ ID NO: 85054 - DNA, 388 bp, Heterodera glycines
atttcctcgcactttgtgcccattccattggcaaatcgccgctttcctttttcttccccaccttttcgatcagttgctgttgcatttgccacaactgttcctcgggaatgccgcatttgtccagtcgcgaatttttgcgcttcaggcgcttctcagccgcaattttgcactcgccaagcacagagttcgccgcgtccacatattcacgcggaaagccaagatttttgagtgctaaaaggagacgacagaacgaatgagaaaggaattgcaagagagattatccgaatttggttttaatcacttgagaggaaaggctattaatcctttgttttacgaatgttcaaaatcagggctttttccacaaatttaaaatcaaaagcgcagtcaa

SEQ ID NO: 85055 - DNA, 509 bp, Heterodera glycines
atgaaggctataattgttgcttatttgctgcctgctttcttttacatcccctacggcatcggacggtacagcgtgaaaagaaatgaattagccaatggcgacgtgctttattacccggacgacagtgccgtgtcaaaaacgatgggatggcaagtgagcagaaatggccaaatgcaaagaaaaaaggtcaatcgccatgaaaacggtgttcccagatctacaagtggaccagggaaggccttctccgcttccttccgattgtcattctattcgtgctcaactctcaaattatggtggctttccgacgcaggcaaaggatgttcaaccgattgcgaaatcgcgaccaaacgactatcgcacgtgatgacacattgctgtacattttgggtggcatcgcagccatggtaatgcctttgatgttcaaagtcaaggagttcacaattttgcttgcatttaaagtttttcgtctgcaatattccggctgccatcaatctgttgttcatcaatga

SEQ ID NO: 85056 - DNA, 1057 bp, Heterodera glycines
atgacggaagaggagaacgaagtcggacttccgcagaagggcgtcaacatgatcatcaaggacgccctcccggacatgcgtatcgccaacgaaacgcgcgaattgctcaaccaatgctgcgtggagttcgtccggcacgtgtcgcgcgaggcgcaacacatctcatcaaaggaccagcgcaagaccatttaccacgaccatgtgcagaaaggtggtgggagtgggcgattgtgatgcgttgaggaataatatcaataatgggccaatgggtggcattttcggcattatgccctcaacctcccccctcccccttttttttgcttgactaattattgggctcaatttgggggttgtgtcgcagagggcggcaaagcgcggaagtaccggcgcggaagggactgttgactcactttgtgacgggcaatttatccgaattttcgcctctgccgcgaaatcccccggggaattggtgggatggcttcccccctcccccacggcatttcgctgacatttccattcatcgtctcccgtcaaacccgcaaaaaagcagcactcccaaaggccaaataatcgcaatgttcacttccatttcacgaaacatttttccatggatttctcctccaaattggcttcaatttgtgattttttttcgcttgttggcactttcctttttttaatataaataataaatagtaaaataaactaataaatgttgagaaaaagggagcgattgactgcgcttttgattttaaatttgtggaaaaagccctgattttgaacattcgtaaaacaaaggattaatagcctttcctctcaagtgattaaaaccaaattcggataatctctcttgcaattcctttctcattcgttctgtcgtctccttttagcactcaaaaatcttggctttccgcgtgaatatgtggacgcggcgaactctgtgcttggcgagtgcaaaattgcggctgagaagcgcctgaagcgcaaaaattcgcgactggacaaatgcggcattcccgaggaacagttgtggcaaatgcaacagcaactgatcgaaaag

SEQ ID NO: 85057 - DNA, 930 bp, Heterodera glycines
gggatgggatgacctgaaacagagcatcataatggcatatgaagcgctgacagacaaagtgtcgcaggccttctgttggggcaaatggcttggtcaaaaatgcgtacactacggcaaagttttgctcggctttttggtcaaactgctggtggagataatcccgaaattggaaaaagccatgaaaaaacttaccgacttttttgccggtggcaaaaatccaattgacgtcaaagagggaatttctgtttgtgaagtggtgaagcagtacacgacaatgcaagtcaagagtggattaactgtgcccaaagttgcacgtaagtttgtccgagggttgaaaatttgttaaaaaaaggggtcaaattgaaattttggcagaaaatttaaggaaaaattagtttttattccaaaactgagttaatcacaaaaaacgtcgtcgccataggaaatcatcttctgaaaaatagcaatctttctgaatttaacgaaaataaatatcaaaacgaccgaatttaatgatttggttaattgattatttatttgcaccaaatttctgtccacttttttcagtactaaaacaaatatctgaaaagtttttgttttgctttcttttaatttatgtctaatttatctgtgtttttgtctaaggaaacgtcgcaattcgattgcccaaaggcaattgcattcgaaaattctatgaagaaaacccaatagtgattcagcacattgaggcattctacaacgtttccagcgaggtcagtacgacactcaaatttctttcggtcttgatcagcactatgatttattacaatagaaaaaaattaaacaaattaatatatatcataattacagcaaatcaagcgaaaaattgctaacaaaaaagctgccgcctttctccagtcaaagttgaacaacggcaacacagcatcgtcg

SEQ ID NO: 85058 - DNA, 545 bp, Heterodera glycines
atgtatgtgtcaggcgcacccggagaagagtgttgggtattggccagtgataccgaatgttccgaatctgttggcaagtttaattctcgcgctggaattgacgcggtattacgcctgctcttgggagagcgcgtggcgggtagcctcatgagcgacattgaggctaatccccgctaccaaaaaggcatttttaatgacattaaaaaataaaaaattttttccttttcgtttgcaacaaacatacggtcccagtgccgtacattcgaggattaaatgttacttttgggtgcgacgtggaagccgacatgaaaaaaaaggtgtatttttaaaggggtttttaaaacaaaattttgaaggccaaggccgaattgacacgggaatttattcccaattgcatggcgaaatgtgttagcgaggatggtcataaagatgttgatgaggaagagcagtgaatgaatgatttgaaatgatgttaagtaaatggatggatggatggacaatcaaataattaaattattacattttcaagttaaatgatgaataaa

SEQ ID NO: 85059 - DNA, 677 bp, Heterodera glycines
atggcagccaattcacctatttttaatcccggacccgaattcgaaccaaaagtcgaaattttgaagaaaaaatttgttgggacattaaagcagaaaagaaccatgaatgaattattactaagttgcaattttcctatcaggtgcgttggtcatccaccttccaaatgcttgatcgtttttgcaaaacaaaacagttgttgggcttctgtgtgcagaagacatttcgtttccgaatctaagctatcaaaaaaatatttctcagccccagctacatcgactgaaagcgaacggcttttctccaccgctgggttgattgtgacagatctgagaaaacgtttattgcctcagaatgtggacaaacttttatttttgcatcacaatcttaaaatttatgattttgattatgaataaaatttttgggaaaaaattatttaaaaaaaatcggaatcgcaattaatcggattttgggccataatcgtaatcggttttaaaaccgtatcggatttttggccataatcggaatcggcgatttaatcggaatcggattttgtctggctcggcacatccctggtgtgcgggttggctgattgtctagcctacactccggtgcgggttagctgtctgactagcctacatgcttcactcaaattgaacaaatgtgagagttaaccaataaa

SEQ ID NO: 85060 - DNA, 833 bp, Heterodera glycines
atgaacacaaaatcccaagagaaaccacctgctgaaatctacacatttctccatgatcattttgtctcattggcatcaaaacaacaatcatcatcaacatggatatggaggtgttatggcgttactcaaaaacaattaaaatgggttactcaaaaacccattcaaaataaaaatatttatattaactgatcagaagcaatcaaagttttaatatttgatttcattcgatagtgctaaattttctctattagccttcaaaatttcaaaaaattttgttgactttcaaaaaagttgtggtcagaagaacgcaaaaaacaatgtttttcaaacacattggtcaaaaatttttttgaacttaacaaaaattttttgaaattatttaggctaacagaaaaaattaattaaggcaatcggaagataaaaatcaaaaatttggttgtttcttaacaaaatgatagtcaaatatttttatttggatggtttttgagtaacgcccaatttggaggtttatgagaatgacctattaaatacagacacggacacggtggatatgaattgtcggaacaataaaagccacggcttctctaggccaaaattctcataaattttcttaattattttacagtggaaaaaagcgcgaaataaactgtgcatttgtcaattttggacgagtgttggcaaaacgtttgaaatttgttcatgaaaagtttaacacatttgctgatggtaaagaaaaagaatgtggcggcagagacccgcacacaacaaattattatgattataagcatcatcatgctttcatcagtgataacaatacaccggcggaagggtaa

SEQ ID NO: 85061 - DNA, 964 bp, Heterodera glycines
gaagttggtagagccattgtagcagaattaactgattgttcggtggtgttgatgatgaaaaagagaatatatttctcgtgggatatacaaactctacatatatctgctttcctctcctcagcaatcttctataatgatcaaactgaaacagaaaatttaaatggttggacctacaaacaatacttggagattggtcccaatatgtgggtaggccgaagaaacaatgattcagttactttcaaattaaatcagcaacaggttaatttaaaatataattaatgtcataagacataaagtaaatttgaaacgtgaccggaattcgtaagtctaaatttcgcaattagcacttttgggttcaaaatcggtttaaatacatggaaacaaactaaagccattaatcctgcaataagcgatcatttaagcagtttttgaatcaaaaaagctaaattcgaaaaattgggctttcgaattttgtacgaattcgggttcacgagttcagaattgaccgaaatggttgccggatcatgttcagtgatctttaaacccccagggaacataatattagtatcgctgacgcattttctactgacgcattttccactaacgcattttccgggcgccaattgaaaatatgtttttttttacttaagtttccgtgcagtggcatttgccgaacataaactaataattaaaaaatgtcatttaggtgattggtcaaataagcgttcgtgagttgcgcaaaaccgccgccatcaatttgatggtgaaaaagagagtgtatttcccatattttgatggccaaccgtacagtattaatgcttggactgagaatggccaagaaatttttactgaagtagcattgtgggatttttcaaataataaacggtatttggagattgatccagaccaatttggaaatatgaattccaatgattggatttatttctatattgctgggcaacaa

SEQ ID NO: 85062 - DNA, 1903 bp, Heterodera glycines
aagagaaggctaaaaaggatgccgaggctaagcccaagaaagacgcagaagagaaggctaaaacggatgccgaggctaaagccaagaaagacgcagaagagaaggctcagaaggatgccgagactaaagccaagaaagacgcagaagagaaggctaaaaaggatgccgaggctaaagccaagaaagacgcagaagagaaggctaaaaaggatgccgaggctaaagccaagaaagacgcagaagagaaggctaaaaaggatgccgaggctaaaaccaagaaagacgcagaagagaaggctaaaaaggatgccgagtctaaagccaagaaagacgcagaagagaaggctaaaaaggatgccgagactaaagccaagaaagacgcagaagagaaggctcagaaggatgccgagactaacgccaagaaagacgcagaagagaaggctaaaaaggatgccgaggctaaagccaagaaagacgcagaagagaaggctaaaaaggatgccgaggctaaagccaagaaagacgcagaagagaaggctaaaacggatgccgaggctaaagccaagaaagacgcagaagcaaagaaaaaggaggaagaaatgaagaagcaaaaggctaagcccgaagaaaagcctgaggcacctgccgaaggcgtagccgtagtgccggaagcgaagaaggcggaagagacaaaggaaaagctgaaagaggaagagaaaccaattgaagtgccaccatctccagcagaaaagaagagaaaagaggctgaggagaagaaggatgccgaggctaaagccaagaaagacgcagaagagaaggctaaaaaggatgccgaggctaaagccaagaaagacgcagaagagaaggctaaaaaggatgccgaggctaaagccaagaaagacgcagaagagaaggctaaaacggatgccgaggctaaagccaagaaagacgcagaagagaaggctaaaaaggatgccgaggctaaagccaagaaagacgcagaagagaaggctcagaaggatgccgagactaacgccaagaaagacgcagaagagaaggctaaaaaggatgccgaggctaaagccaagaaagacgcagaagagaaggctaaaaaggatgccgaggctaaagccaagaaagacgcagaagagaaggctaaaaaggatgccgaggctaaagccaagaaagacgcagaagagaaggctcagaaggatgccgagactaacgccaagaaagacgcagaagagaaggctaaaaaggatcccgagactaaagaaaagaaaagacgcgagaagaagaaggctaaaaaggatgccgaggctaaagccaagaaagacgcagaagagaaggctaaaaaggatggcgaggctaaagccaagaaagacgcagaagagaaggctcagaaggatgccgaaactaaagccaagaaagacgcagaagagaagaaaaaggaggaagaaatgaagaagcaaaaggctaagcccgaagaaaagcctgaggcacctgccgaaggcgtagccgtagtgccggaagcgaagaaggcggaagagacaaaggaaaagctgaagcaggaagagaaaccagtggaagtgccaccatctccagcagaaaagaagagaaaagaggctgaggagaagaaggctcagaaggatgccgaggctaaagccaagaaagacgcagaagagaaggctaaaaaggatgccgaggctaaagccaagaaagacgcagaagagaaggctaaaaaggatgccgaggctaaagccaagaaagacgcagaagagaaggctaaaaaggatgccgaggctaaagccaagaaagacgcagaagcaaagagtaaggaggacgcagaggagaagcaaaaggctaatgccgaagaaaaggctgaggcagctgccgaaggagc

SEQ ID NO: 85063 - DNA, 1021 bp, Heterodera glycines
atggtcgcacgcctggaaaacaattcagtggagaagccaacacataaacctcttcttgtggtttttgggaaatggcaatgtgccaatgactttgatcatcctaaatatctagaaaaaatggcgcgccaacgattcgtcaactcgacgattcgtcaacccagccaaaatgtgacgattcgtcaactcagccaaaatgtgacgattcgtcaacccagccaaaatgtgacgattcgtcaactcagccaaaatataacgattcgtcaacccagccaaaatgtgacgattcgtcaacccagccaaaaatagttttaaaaagcagtttcaagagcttttaatggcgcttagcacaattatagcattcttttaggctaatttagaaacaagaacacataaaatcacgaccttttcgatgaaatattcaataattgctttaagttccattttttaagtaatattgattgagttgacgaatcattgagttgacgaatcgttgacatttggctgagttgacgaatcgtcacattttggctgggttgacgaatcgtcgagttgacgaatcattgagttgacgaatcgtcacattttggctgggttgacgaatcgtcgagttgacgaatcattgagttgacgaatcgtcgcattttggctgagttgacgaatcgtcacattttggctgggttgacgaatcgtcgagttgacgaatcattgagttgacgaatcgttgacatttggctgagttgacgaatcgtcacattttggctgggttgacgaatcgtcgagttgacgaatcattgagttgacgaatcgttgacatttggctgggttgacgaatcgtcacattttggctgggttgacgaatcgtcgagttgacgaatcgttggcgcgccgtgcaaataggtttattatttatttagtaatcagaacgccaaaactttgcaaaacttaaaatttttttgggattttcccttgtaaaattagaagagccgatctcgagttaaaaacataacttcgaaaaaataaa

SEQ ID NO: 85064 - DNA, 1028 bp, Heterodera glycines
atggctttgaattatccaattcaattcattaatctgatccctgaaaagggctctctgctcacttctctgctaatgaatcgacttttgttgggccgagaatatccgttaaagaaatatttgtccgttttggccatcactttgggcattattctctgcacattggccacttcgaatttggaaaaagtgggaaaaataaaatgaaaatttaaataaaaataattattgaatttcagaaaattgagtctgtcctttcacttgaagaagcggaaaagcattacagagaatgggccgtcggtgtgctgatgctttcggcagcccttttgatctcttcttatttggcaatttgtcaggaaagaatgtacaggtaaaatgggagaaagaggcaaaccaaaacagttcaataataattaattgcagcaattaatattttaattgttttttattttagtaaatatgggaggcatccgcgggaagcgatgttttacacggtgagacaaaaaaagggaggatgggagagggggggggggggtaatggatgatcggaactgaattttcgacactatgatttgacccaagactcgagaaagggagaaggaggaatgataatatgcccatactcgagaagaggaataagacggcattgtggaggggggggggcggcggcgaagaaaatgccaaacaaaatgaggtgccaattaacgaagtcaaattggtttttttgtgccatgctttcgttttgatcagcgaactgttcaatttcagcacgccgtctctttgcctttcttcgctctgatgggcggcgacattctccgcagtgtccgtcgcttttcctccgctccctccgcccttttcctcggcttttccctcccaatttcggcactttggctccgtcttttggccagctgtgttttgcagtaatttttgcacactttccctgctgggttttcattggaatttcttcagatggctttgcattatgttcgtctatcgtctcaatgccacaattgactctctttccgtcactttgg

SEQ ID NO: 85065 - DNA, 1432 bp, Heterodera glycines
aggttggaagacggtctgtaggcggtggacgtgttgcgcaacggcaacaacattttacgaatgttggcgctggtggtggtggtggtggtggcggcggcacaccgttgtcatcgtcgtcccacaatcaacaacagcgagcagtactcaccggtggtggtggtggtggcagcggcagcaacagcgcttcttcctctccagttcgcgcatttcgtccaacaacaatgtccaacaccgtcaccagctcatcctcaccgtttcatcaccgtcgctactaccaacagccacatcatcaacagcagttccatttgagtactgcttcagcttctgctggttcatcaccggtgctgttggctgctcgaccgttgcgcatcaaaccgtccgccggcgccgcctcctcatgcccccgtccgtcatcaattgttgtgcaacaacaaccacaacagcagcttcggatagttcagcagcacatgaacagaaatgagtaatcatttgaaaaataataaatttggcatgaaaaatatataattttcatcttttttcaccaaaatattcccattttggattttgatttattgttagatagcaaaaataactcaatattaaaattaattactataatttattaaactgttgtttatgctttactcggactgaacacattaaacgagacccaaaatcgtgtcactaaaccaaacttattacacatattctttctttttttttagcattgcatcgaccgggaatgttgttggtggtacgacggacgctactgttgctactgcttcatcatcgcctgtctcatcactgcaccacccccaccaccagcaccagcaacatcagttgaacatgacaacgcctcgtacaattgttgtgcacaagtcgtcttcgtcgttgatgccctcctccgatgccgagggcggtggcggcggaggcgtcgctgacccggcaacaacaacaatagcaccgcttgttgccggtccgaaacggttctacgttcacgcatctgggccgccccaccagcagcatgtagcagccgttgctggtggacaaccacctgtgatggtacgacgacaattgccaaactgtccgccacgacaacagcgacaagccatggtaaactaaaaaaaaaatttttttttcaaacctggaaatttttcaagaaaaaaatttcaaaaattttcttgtagatacggaatgggtgacaccaagttgacaaaatcaaaaaatttttttcaacaatgaaagaaaatgatctttataggcaacttcgaacacttttgacattcttccaccaccggccaaaatggtcaaacatatggaatttgtgccgactgtgtccgacattatttctccaactgaaccgccgttgagctcaacgaccaccacaaagactaccacttattcggttcctgctgcaccggttgtcattgat

SEQ ID NO: 85066 - DNA, 1321 bp, Heterodera glycines
ccaggctgctcggtcaaattctccatcaaacaatttcgtctgtgccgttttcccaaccaaggatagccgcgaaaacttggagcgctatggaagcacactttgggaacaaattgacggaataggcacattggcgggcaaacgagtcaagtggtaaattttaaaatttgtttttttccatttttctgaattcaaaaggtttatgggcggagacgtcagttttatttggtcaatgatcgggcattgtggttctgcagtgacaacatttccgtctccaatttgcagttgcagaagtgatcatttggtgcaggagggcgaaatttgtgaactccggacaattgatcaaactgtgcagttcgcggagcagttcaccagagccatggtgaatggcgaaaaggcaaacgcagcggtcagatcggcgatgatgggcatcacgaaaccaccgcttctcctgtccattggatttgaccggatcatccccgcgccatttcacgttttccaggggcttggaaatgccctaattcgggaactcgaacagcaggacggatgtgccacaattgctcaaaacttttttcggagattcggcgcgcggagggagcaatttcgtaaacgagacatgaccgggaattcaattagaaaaattcttgtccatgcttctgaaatggaacatctcttttcgacggattggccaattacaatttgcagaacccttgtgcacctcgggaaaattcaaaaattttcaaaagtcattttttcttttttctcaaacttaaattcgaaatttaggcagaaccactgtcaccgaatgacatagatgagttggagaggcgcgtcgacgaatttaaatcttttttgtctgcccaggagcggatgcgcgggtttctctcaaagaagcccaaagcacatcttttgttgagccattttgttcccttcgctcgcgagcacaaatttcttggccttttagatgaacagggttgtggtgaaaaatgttttctatcccattaatctgaattttaaggtgatgaggcgctccattccgtttggcgccgacttgagcaactgtggaagtgtatgccggacgcagaccaaattttgcagcaactggagcaccattttgtcaacaattggctcctcgactctggcaaaattgatgaactgaagaggtatgtatgtttggagggggtaattgcgttaaacttgttttatttaaaaatttatatataataattcagagaaaaagtgatcagagggaagagtatgatgagttcgatcaaacggaagaagaaactgacgaaatttcgcttatcaatgtcattgattgatg

SEQ ID NO: 85067 - DNA, 1237 bp, Heterodera glycines; identical to SEQ ID NO: 3534
  unsure (1)..(1237): unsure at all n locations

SEQ ID NO: 85068 - DNA, 839 bp, Heterodera glycines
atgaattaccctactgatttttcttggcttcccgtcaacaattgtgtttgtcctgtgaaggacaatttatgttatcactttcccggctacaaaaagccggttatttgtgcccataaactggtgcaaaacattaccgcattcctttcaactccccctcacatttctaatggtattttttctgtttgtttatgatttaatttttcaaacaattttccagaatcggcacctgcgtctctttcctcgggctccgtgttgatgctgcttactgtgctccaaattttcatcattttgtttacggtgagtaaaaatggtttatcattaaatttaaaaatattttaatttctttaagatggctttgtgctgctgtttgattgtctttgccgcgcgaggccgaacttacacggtgaatggtcgccgttccactcggcgccgagctgccgctgcgactttgagcgccttccaggcgcgcacttcgggtgggaattttaaaattgttataataaaaatattcattatattcggggaagggatgaatttcgaatttttaaaaaaatttttttccattttcagcgcttggtcttggcagtgctgctggtccattggcgattccaaaccgccccgcagggtgcacttctcatcgtgtgccgggtagtggggcatttcacatttatttttttttttgttttaattttcattcattatttaggctgaatggtgtcagctggtcaacgaaagaatgatgtgtgaagaaaaggcggataaaatttaaaaaaaaaggaagatcgaataatatttttctttttttattctcttcattttttttccaaataacaatttaa

SEQ ID NO: 85069 - DNA, 448 bp, Heterodera glycines
atgtcctccccaagcaaattctctccgacaaaaagctcccccatcaaaaaggagaacaatgttggaaaagctgaatttgtggttccttccttgaaagcgcccacccgtaagcagccgtcaaaaaatgtgggaatgaatggtggtgaggagcagcagccgtcaatgaaaaaacgaaaagtcgaggaccgagacctgtggaaactcgccaaaggaaaatacatgctgggcttctacctctgcgttggtgaataactatttattttttattgttaaatatttataaatctcagatgattggaacaaattgtacaacaacaagcagagggtgttgcgcaaggatgatgaccgtttcgctgtcaattttgaactgtgcgaagaatgcgctctggccaatgttcgcgcaaccgacattttggcgccgccgaaagcaaagaagcgcatcgaataa

SEQ ID NO: 85070 - DNA, 806 bp, Heterodera glycines
atggccatcaacatgagcgacaagcggggcttgctccgacaaattctcggcgaagcggaaattaccgtgacaacatcgggcctgacgattagcggcccccgtctgtccactccacggttcctgccgtttgacgagagtggccgctgccgctcatgtaaggcaactgaagtggaggtcgacacaatggttacgaaggagggggtcacgatttggtgcacacgcatcgacaaagtccaattcgtgccattcgatgtggtctacgaattgccaggtcactgcttcttccgactgaagaacaagtcgcgtgtgttcaatcttccatacggcgaccttccatctgaatccagtgaaattccgctaacccaacacgtggacgaagaacgggacctcaagagaaaggcaaaagctgcgctcgaattggtggaggccggactgattgcggacagcactgtgcaggacggggcccgtttgaaaaaagccaaaactgcgatgaaagtgatcagtgacattctgctctctgaaccggtgggagatgatcaaaagaagacggttgaagtggcagttgtcgacaagcagccacaagagcagcaaccagcccctgtacaagagaagcccgtcacggcacccgctgtggaacagaacactgttgaagtgaagacggaagaagaaaagaaggatgatcttggtgacattgacaaaacactcgatgaattttttgcgagccttaaagccgcaaccaccagtatgtaaacgaaaacatatttaaatccttcgaatttatttgcgcaccatttcacttgatcaca

SEQ ID NO: 85071 - DNA, 619 bp, Heterodera glycines
atggctaataaatttttgcttgttccacaagaaatttaccgagggctaacctcagcgtcagatacgggagtcattaatttggatgcggtaaggcatgacctggagcgtgccaggcgtgaacggactaatccaacaacaaaaaatgtccggtacaatcaacagcttaggcgttatctgcaaatgagaagggagcttgccgatagacctaccaaagttgagttaaccaagggcttgagtgttttgctcaagcgagatgggggtgttgatgatgacgacggcgaagtcgtcaacactcagccacggcctcccgctccaccaccaccaccaccaccaccaccacctcctccacctcctcatcaataccaccgtcaccatcccagccctcccgatgagcaatcttcctcgtctgacgatagtcatccgcctcgcccccctcgtccaccacgtcctcagagaacaaagaaaaaccatcaatcttctataaaacatggtcggctgaatcaatggaagcaaaggcgtcgtgacttgcaacaacaaccggtagtacgtgatctactcgctgaggcagcagctgctcctttacctgaaagtgacgatgacgatgaacaaatgctggaag

SEQ ID NO: 85072 - DNA, 1348 bp, Heterodera glycines
agaggaagagtcggagacggacatccgactgaacccggacgcgtggagcacggcggtgagacacgcgccacaggaggacgttcaggtgaaaacaaagggacgattgttttttggctggtgaagggcgactctttaccttctttttttgtaaaatattcatttgttccgattgattcaagcattttaaaaacaggcccagcgaaagttgatcgctgaggcggctgaatttctattgactcaccaaatccctcaatttgtgcgcgactccgtccaattggcagtttcacccatcgatggagttgccctggtagaagcaatgcacgcccgtggcattaacattcgctatttgggcaagttaattgaagctacacagcacaattctcgactcgattacctcacggttcgttcgctgttcgtaaaaaaacgattttcggattgcaatctttgttttttgttagactatcgctaaaatggagcttctttgtcggtgtttgcgtcacattttccgcgacttcgtccagggagtggaagtgcattttatgggcacggcaattgcccatttcctcaattgtttgattggctccggcaaaaacgtcagtcagatttcgcaatttgacaacgaccaaacaaatggtgtggccctgaagaagtcaactggagctagaaaaaagcggagatacggctatttcgataaaggaactgtcattggcgccggctcgggcccgacaccgaaaacgatggcatgggctaagctgagccaagagagcctatggaaaagcatcggcgacgattcgtacgcgcacttcggcctttgcattccttccgattggtatttccgttttgaatcgcttaatctgtccgttgccattggcattttctttccccgttcagttgtgacagtttcgtcgaatggagtggcggtgcccaacgctcggcgatcattcgtcgtttttgtttaatgaacggtgtccaaataatgctcaaggtcgcctttttgcttcatttattgtcggcattgtttgtcttcgcttttagaattatcagctcaacccattaaagtccaagtcacaagcgcctttttctgaggacgacattttcaatgtgttccccgtaataaaacgtcttaatccgcgttcccaaagtgcctacaacctttatctgagtgctctcatcaaaatgcagcaagggttcatccgtactggctacgatttgatgcagcaggtgtcgcttttgtctttatgattcaatgatttacctctgttcccaggcccacagcatgatgaatagcatttacggacccctccatcccgatttggccttgtgccttcgttttatggcgcgtatggca

SEQ ID NO: 85073 - DNA, 2386 bp, Heterodera glycines
aaaccagtgaaaacaaactcatttacaggcagaggtttccagcagctcggcttcaaaacggtcacacttggcgacctaaacttggaggaaatgcgtgccatggtttgcgaataccgcaagctgttgggcgaaggcgtttacggtatgtatatggtatccaagggacggacccctgggggggggggggtcccaatgatccatccaaatttttaaggcaaaaatagtatgttgtgttgaaatttttcggttttccttatttgtaccccctccaagactccctcacccaaactttcaaaaaaaaattcgctaaattttttcaaaaatcaaaattaaaaagtcgtcgtccttgaggcggaaccccctctaatttaggcagaaatcctggaaccgtccctggtcgtaccacgcaaacaatcatttcttgctatatcaaatcagttaagccgtgttttactttgtcggccacggctttgaggcgaatggtcagtgctatttgctgccaatcggagcgcccggcgaagactatgggcccgagcattgcctcagcatggattgggttggttggtctttcgtttgctgtgcattccattgcatttggccaaagtgctgcaattccccctcaggtgatgggccaattccgcgacttccaacccgcgctcaacctcattctgttggacatctgccgcaaatttttgccctccaatttggtcgcttttaccgcttacgcggaggaattacgacgcggcgaagtgcgcgtcaatcggaacaccgtttatggtgggaaattggcggcaagaaaggcattgaaaatccgttaaaagtgacaaatatttccccattttattttttcggttcccttaattcgtttttccgtcgttcaaatcgctttttcgaattcccttaggctacgcgaccagcggcggtgtcggcgcgtatgaggtgaagggcgagcagaacggcgtgttcatgaagtatttgaagcgacgcattcagcagcccattccattgctggacatgctcaacaaagtgttccggggtgagcggaggttggggattattatgacaaatccggattaacaataagcattttcaggagacttttttaattgatgcgatttgtcaaaaatggcaaaaaaaatcccattttttaagttagaagcagaaaaagccattgttggtgcactctaatgaccatttttgaacagagaaaaatatttttctgatccatttccgatgttgaacgtgacccaaaggtccgcgacgtccaaattcccgaattgcgctccaatttgacaaagtcgcgctcgctgcacgacccgttggtgtacgatgggcacacgacgtcgtacgaccaccacacttatcactggcggacaatgcacggcaagcggaattgaagcatttattactaatatatgtacaaataatatttcttctgtgtccaatttgcccttttggccctgtaattagtgtcctaaatttgcagaacttccgatgccggtcaccgtcgacttcgctgaactcggactccaagtgacaatttggttcgacttctgtggccatttcaccaacaaggcacgtttttggacaatttcttccgtatttactccaaacggattgacggggttaattggatctttttggagagagtttgatttaattgtatcccaaattttgtgccgatagccttggagttttcgttggtttgccaactttagccaattcatttgccacttgagatgcctttctgttggcaggtgtacgtgttcagcagtgtggacgacatgtcaacacaaagtgaagaaatcggttgtgaccagcagcgagggaatggcacaattgcgcgacgattgtcaagtgacggtgccaaaacgcactcgcaatgggcgctggcacatttgaagttccccgaggtgattactttcgcacaacaattgcaacatttttgtatctgtcgtcttgggttggcacttttctgcccttctcgaaaatgttttttcggaaattcgctaattaatcatttgttttgcatttttatccaataatgtccgaatccatcgaaatttttttgttttatgtctttttaaggaatttgaatcatcgaggcccaaactttgtgaggacgaagtcgaaggcgtttctctctgtgtgctcctttcccatcttcagagggccacggtacagtgtatttatttgctttgttttttaaaacaaaaagtctgaaaacgaatttccatttgtccgattttgccttaagaatgaaatcgtttgcaccgtcgaattgcgagagacagaaagtgccgacgacggagaagccaaattagtggccaaaagagagcggcaaatccttggccacgttctgatcactcggcttgggttggccaga

SEQ ID NO: 85074 - DNA, 479 bp, Heterodera glycines
atgggccgttggagtgccacggcttttgtgacaaatgccatcatcggctccggaattttcatcactcccaccggcattctgaacaatgtccaagcggtgggcgcttcgctggtcgtttggctgctttccggactaatttcggtggtcggtgccttctgctacgtggagttgggcacttcaattaaggtaagtgtctgtgtgtgccgtgccattcattttgctatacttcgcaattttttttacctattttgtccgagaattttattaattacataatacaaaattgttcaaaaactcttttcttttccattttaatttttcactcattttccttttcctttctcttttctgctattatttggtgcatatttgcatattttagggtccttttgctctctgattgttttggtgtgcattattaatacataaatatatatttttgtccattttattagtctttttcgaatgaaaataataaa

SEQ ID NO: 85075 - DNA, 944 bp, Heterodera glycines
atgcttcgaatatttttccgcattatttttgccacgttaattttcgcgaaaattcgtgccgaatgggaaattcccgacgaattgcgcccaccccaatttcttacagtaattaaaaatggcttccaatcggcggtttatttcacggagaatggccaaaactctgtcgatgaagcgacaacaaatcagcaatggcttttccaaaggcttttggaatttgcagatgaaaacaaaatgccaacaatggcaaaaagaaaaggaggcgcaaatttggaaggaaatggcatttaccgagagcatacagtctcgagcaattggcatacgctaattgacaaaatcaacggaaaaagcggcgacgttttggatggatgcgaaggcattagcgaattaattattcacatttaaatttaatcattattagggatcggatttaattgctttaaatcgcaaaacaggtacttaaaaaaagtaccaaaaaagttcaaaataagcgcttttttaatttttttgcatttttcatgagaaaaaatagagtaaaaagtaaaaatccgattcataatgattagaattttaaatatattttaagacattaatacttttacatttaataaatattttttagttcttttacaatcatccgaaagaattgagtttgaaattggggtaggaaatgtgacgatcggatgcatcaacaaaaatttcgatttatcaatttctccattaaatgtttatttctgcaaaaatggcacagaatgccaacgatcaaagtgaaaattaaattaacaatttaattaatgaaatgatatttaaatttcaggaaaaaattgacaaattgcgcaattattgtgcaaccagcagaaggaaattggacgaattatgaccagcagcaggagaaaaggcattttgaattttttggaatatcaccaaccgaaaataatgaaatttaa

SEQ ID NO: 85076 - DNA, 1071 bp, Heterodera glycines
ggtctcttttaattaatttttgcttttcacaggtattacgtcaacagagactcgctcttctcatttcacaaggcggcagaggtattattcattttttggaatttaagaacattttgggcattttcaacaacaaaaagccgaaaccgattcttattattagaaaagttgtaaggaaatatcatgaaaaaattttttaattcatcacaaaatttcaacgaaaaagaaatcggttttataaatttgaccgaaaatttaaaacaaaaaattcaggaaggaaacaaccgaaacgggggggggtgaagagctctgttcccataaaagtgccaaaatctgttaaaattagccatttccaacaagggaatgaaaatgtcaacctcccaccacctcttgatgaaaagtgccattaaaatgaaactctttttttccatttccaggtgttcttggccaatctgatgtccatttacgcggtacgttttggcatttactccaaaaattttatgttatttttgccattaattttcctctttcatatttttggccgcccattacaaaaacagtccggacgacctgcaaatgttggccgacgcgccggcacatcacctttttgtgctgatggcacccgtgccggctgaccaaagctccgtgccacaggcaaatatttgtggataaattggcatttaattcgtccacactccatcaccgaaaatgaaatccaagaattatcgaacatattcaaaatttaaaaaaaaaatttaaatttttgaataaaattaaatgagtgatgatgaagcgttaaattttatgaaaaattctctaccttttcagaattttctacatttttttattaattgtaatttagaaaatttatttttcccggttcgggaaatgacaaaaaatgattaaaaaatcaaatttatctacttccattcatccattttcagattttggcggttgtccaacagtgcctggagggctccatctctaaacaaagtgtgacaaatgtacgggacaaaggcaaaaagcgggcggccggtgacctcatcccgtggacactttgccaacactttttgg

SEQ ID NO: 85077 - DNA, 1183 bp, Heterodera glycines
atgccattctcagacttcgatggccgtgccatgcaaattgatttcctccgttcaaatggtccgtcttttttgtctgattatgccgacctttggcttcttggacttgacatgctgccaatggcacaccaaacagaagagcaaagagaacagctgaagatgaatctgttcatcagccgcagctccaaatgctccatggaagcatgggtcgaaaaacaatccgaccagaagggacccgtattttagggatttgtctaacaattaattttatttttttctgggctttatggaaatctaatatttcgtaactattttcccattttagttatttgatcaaattcaattcctttaagtttatccaaccttcgcattcccttgtgccacccgatccgaaaatgccattcgacggttcggtgtgcaaaccgaatccgacggaagaagaatatgaacggtagtaaaacttcaaaatgtgatttgacatttttgtgacgaccgcaatttaagtacatgaaaattttaaaaaaatatttcatcttttcaaattggatccaggcttttcccgaaaaaagttgacaaatatgtgttcacgacaggcgttcatgtgcaggattgggcaatcaaatggtactttttatgaacaagtcgggatttccgataacagatttcaaaaaaacaattaaggaatgaatgattttatgactggtccaaaaatttaaaatccagcccccagggcaaagaaatttgattttgagctttaatgaatttggttgcatttttagttccgttttgccgcattgtacggaattggaaaaccttatggacggaagccgatttacaaggacagtcacaaatgcacaacacacgatcatggaatagaagaaggcgagcagaaggagcagcttttcccgatcttcgccagccaagaaaaatattttgtaatttaattaattaattttaatcatttatttatttttttttaataatttaaaattcattcagaatccgaaagggaaggaagcaaaatgaaactttttatgtggagaatgtattcattgaatgtttatcatatgtgaacctacaaaagttggcattgtgttttttgattaatttcaattaattttgtttaagtttttctatttcgagaatcaagcagaaatatttggaattggatgtgattattaataaa

SEQ ID NO: 85078 - DNA, 1155 bp, Heterodera glycines
atgagaaagaacaaaaagagtaagagatataacgatgaaaaagtaacacaaaaagtgtgcggtgcatacattaaaaaaaagtgtggggcgggagagaatcgaccaaatttttgcgaagggtccgccgggggggggggggtcaatggccaaatttacgaagcgccaaaagtgcccttttaattccttttttattttgtttttaatttgcttctcccattaattatttttggccatttttacgtaagaatttattctgagaaaattatgagattgaagccgaaaatggacatttatttcatttattttcccatgcgtttaattacattatttaattttcgattcttttgtctgccattttcactgattattggacatttaattaaaacggcaaaggcattaattaccgaaatggcacaattgctaaggaaattattattaattgtaagtcactttgagaaccaaaaacgatggcacttaggtgattttataatttgtaaatagcattttattaaccgtagatgataaatgatcactggtacaaaaaaagaaacttttttttaaattttaatatgtaaaattttttggacaaaataattggaaaataatccgacaaaaaaaatcattttcagacagaaacgttttgttgaagtgaaaatcgcaattttaatgagcagaaattacaaaggcacaacgcaaaatggcgaatgattaacaaaataatggaaaaagtcattggaccctaacgaaaatatttttgccttttccttttcatccgtaaatttttccatgtttaaaaagggaagtaaaattgaagacgagacgaaagtgatcagctttttctgtccgttggtttatctttcggctacaaaaaacagatggacattttaagccagacgaacggacggacgaacgaaaggacgaatgatgagacagcggaagaaagggggaaaggagggggattatgccaaagtgggaaagtgcaacggggagaggaatgccattggcactttgggagagtgcgcaatgggaggggggggggggtaataatgagaacaaaagtgcggcattccattcgctgtgccttcggccgatgcctacaaaagaacggaatgcacttgaaaaaggaggaaaatgagaaagaaaggcttaaataaa

SEQ ID NO: 85079 - DNA, 1143 bp, Heterodera glycines
atgtcaacttttaaccgacaaattgagcaggaacaggacaaaagtggcaaactgataatggaagtcgaacggaggtaatgccgacaatggacagactcattttctgaacgcatttcgacactaaatccggattcttttttaaattttgttttagagtaatcactaaagcctctcccgaccgactgctccaacaacttttggtgggcgatgaaaatgccgtgggttcggaagaagtgccgtccgactcgcattttgtggaggactttttgctgatgcacagagtgtttttccgcgactctgcccaaattgtgcgccaattgctccgttggttccgcgcggagcccaaccgccgagaccgagtggcgcggataatgctcatttggttgaacaaccatttcgaggactttgaagggggacagagcggcagacaaatggccgaactgttggacgaatttgacgaagtaacagtggtggtgctaataaactgatcaattaagagagaattttttaattaaaggcaattaggcgtatatttttaatctctttcagctgttggccagcgcaaagatgttcaatcaccaaagccttctcagcataaccgtcagtgtgaaatcgcaggcccgaatggtctgacgaattaacgaaaatatttgtggcaacaagtttgcttgtttagataattttgacgaggtcggacagagctgaaaaactcgacttccaactgattggcaggaataatggcattttcgtgatgaatgtcgacgcaaattcggctgcggaaaaggccggcatcaaacgatgggacgaggtgataggtgtaaaaccatggatatgctgctgaattcagcgaattttttggaatgaattattattcaaaaaataataatagggacaacgactctctgtccggtctaatgaacgctaatattcaacgatttgttcagcttttggagatcaatggccaactttgccgctgcatgagcctttcgaaagcattggatttgctgagagaaagcacccatttgagcatcagcgtcaaaaccaattggattgggttcaaggtgggcaaaggcgcaagggcaattaatcgttaatcatttcgatcattaccttcaaaataactcgagaaaatcacaaaggaca

SEQ ID NO: 85080 - DNA, 515 bp, Heterodera glycines
atgactttgcttaaaatgcttaatgccctcattcatttatcggttgcttttatgatcaatgggcagtgcgtgatcagtgttttctgatcaccgcttcctcccattgtttttggcttttcctcccccttttgctcacttgcgcctctttaacaattcgcaggtccaacatttgcgacttggcactcggtgaacagaatgccaattcggctgacaaaacactgccctttcggcccgaatttgccaaaagtccgttgggcaaaaaatgatcagacgacgccgaaacagaagcagaagtggaagcaactacagaagaagcgaaggggaaatgaaaaatgaattaaaaaataaacaaaattagcaaaattaataaaaatgcaaaaacaaaattaaaaatatattttaaaattaagaataatttggttaatatttaaaaataaactattaattatttcagataatagttaaatagtaattttaattggattaattaaatttattgttttaattaaaataaa

SEQ ID NO: 85081 - DNA, 2261 bp, Heterodera glycines
ccgcagccgttgccgttggccaaaaatggcaaaaatggtggagattttttggtcaaaggagcggcagaaaatggcaaaataacgacgaacaaaggcatcatgaacagttgtggcgaatccgtcgatgaacagcacacggcggcattcgattttcgccatttttccgccatggaaaaagggcacagagtgggcaattaacggactaattgattgtcagcgcaaattaattaattaatcgctgtctaatggacatcgattatccattaattaattgatgtttcgctgtactcttaagcgccaaaaatattgaatgtttcattttcgtaattagaaaatggaaattattctaaattattcccaaaggtctgtaaattgttcgtgctgaaaaagttcgacgtttcctttcgccacctttggctcaatttgcacactcatcagcttgtactcaccaaattggcaagcagttcagcctcaaatgatgagcccggtccgacaatttaatggattttattttattttaattaaaacaataaatttaattaatccaattaaaattactatttaactattatctgaaataattaatagtttatttttaaatattaaccaaattattcttaattttaaaatatatttttaattttgtttttgcatttttattaattttgctaattttgtttattttttaattcatttttcatttccccttcgcttcttctgtagttgcttccacttctgcttctgtttcggcgtcgtctgatcattttttgcccaacggacttttggcaaattcgggccgaaagggcagtgttttgtcagccgaattggcattctgttcaccgagtgccaagtcgcaaatgttggacctgcgaattgttaaagaggcgcaagtgagcaaaagggggaggaaaagccaaaaacaatgggaggaagcggtgatcagaaaacactgatcacgcactgcccattgatcataaaagcaaccgataaatgaatgagggcattaagcattttaagcaaagtcattggggatataagatgaagagaatttggcagagattggcttgaacattctaatcatttgatcatggcattcctaatcagttgatgccattcaaattcaattggctggctctcttatgcttttggctatcctttcgaaagctggtttttgaggtgctgagcaaagccattggcacgatgcaaatcgcggagaaatggcgccgggacacttcgctgcagactttcgacccggaactgattctgatcatccaatggggcaccgcttttgtgctcaactcgtggcttattctgtgtaagccgacctgagaaaagtgcgccatttgatcatcgggcgtctgtctgatcagaataccgaccttttgaccagtgtgcccaatgatttcttacatctttttccatatcatttggctaaaatgccaattgcttccgttttgcgttcagtcaacacaaaagaggcctgccagctgtggtgccgtgggctgcagcagctgtgtgccgtcggcgatccttcttctgatcagtcgcatgcactcgtcgtggagcggtggctgcgcaaaagggtatcatttcttgatcaatctcgatcagtttcaaatttaaaaatgaatttcaatttggaattttgcttttcagttccttgccctgcttccccatccgacaagtgccgcgtcggtgaacatcaaacacatgaagccgtttgtgcagcaacggctgcagtgcaaagtgagcagcaaacaattgcaggagatcgccgaggtgggcaattaaaaatggataaatgattaattaaaagtgaatcagtgggtaatttaatagggaaaatgaccaaaagcaaaatgaaataatttaattcaaactaagaattaaaaattaggaaaataaattagctcacagttttaagagggtgaaatattaattaaatgatagcacgtcaattaaattgctccaattaacggattataaatgtttaaaattaaacaactttaaataatcaaatattatctgatcatctgatcactgatcacaatttttcttttccttcaatgctttttctcctttgtgcccagggcgaaatgggcttcgaggcctttgtgctggcacataatcggctgctgaacttccacgcgttgttcgactgtatgttcagcgagtacgcggacactgaacacgcgcaattggtgccctttcaacgctttgtcgactttttacgagacattcagcacgacgggctgggacag

SEQ ID NO: 85082 - DNA, 513 bp, Heterodera glycines
atgctacgaggcaaaaccgtggcgcaaattgcagaagaatgtggacggattcgtgggatttgtgccaaattcaaacatgttcattttgtttggttgccaccaccgtacgtccgagagcagcacaccctgtacaatgaactgctgccgatcctggaaacagtcgctggcgaatggttcatcgcgctaacaacgagcggaagaagtctggtggagatgtggcgattcggcgagactttcgatatgacacggattcgttcggatgggaaaattttgtctgagggattgaaatgttttcgcgcttggattgtcacccaaatcccaaatttccccgatgataatgctcttggttttcgtcgttcatctcgctcagttccatctgtatctgatcacatctctgaattgtctctcagtcattctcgcacttctcgatctcacccctatgctgttcgtcaccattatagctcgcaggctcacagaggcggaaacgagatgatcagccgtcgtcgtcattaa

SEQ ID NO: 85083 - DNA, 805 bp, Heterodera glycines
atgagctcaagcacaccgaacacatcactcataacttgggacatcaattcagaccaaagtaacggcaaaatgacatcacaattaaagaatataaaacttgggaattagtttctcgacttgggcctggatttttcctggaccaggcccagggtcaaggccattttgtgggaatctgagtttttggtttttatgggtttttcgtcaggtctaggtcaatctggaaatccaggcctaggtccagttccaacagaacctaggttcaggttttttcaaaatgtcgagctcagtttaaaatcgttaaaacgcttaactccgtgccattcacttagaaagacaaaaaacgcgatttaataattaaaaaaaataatttacaaaataataaaataaaacacaaaaatcttctctctcactttttagacaatctttgcccttcttttgcactgtccgatgatggaaatgaattggaaagattggaggcccagcgaaaagcaattaatgcaaaaatagcagtggaatttgcgcgtcaacaaatgataatggagggcaacgaagcgactccaaagtcaaaaggcaatttggaagcattgacaaacaataagaaaaattttattcctaaatattttaatagcctaatttaggggcgtagaatcctaatatagctaacctataataattttgatgatttgatgtgggtcaataatgcttttttgagatgctgatttacttattttaagaaatttattgattttgctgttttttgaaaaaaatcccccaaaatggccaattttcagttaaatctattaaa

SEQ ID NO: 85084 - DNA, 94 bp, Heterodera glycines
atgaacaagcaacgtttaccatctgagctgatttgcgaaatcatcgccacaatcccgcttatgtacctatttggaggaatttctaagaaaccag

SEQ ID NO: 85085 - DNA, 211 bp, Heterodera glycines
atgattcgctgcccaattattctgcttctcctttttgtcagcattttgccatttaattgtgccgtcgacggaatggcgggcgacgctttggccactgttgtcactctgagcattggccaatcggatggaactagcggaacggcacaagcgaagaagcaattggacaaggaggaagaagcagtggaggaggcaaaaagcggagaaacaatca

SEQ ID NO: 85086 - DNA, 1129 bp, Heterodera glycines
atgaaattggcgtttgttcgtttgaatgttcttacggtactttgtctgttctgttcaatgagtcattcctacggtaatccatccgacgaatccgatgacgaaatttgcgaggaagaagaaaatgaagcacaatcagaagcagaagaagcggacgaattttttcataattttaacggcacaattcaaagtgaaagagaggagaaaagaacggtgaaattttaattgaaaaggattttattaattttaaatgattgcctaattaatgaccatttatttgcaagcgcaggttgtcgaaatattttgccgaaatacaaatgacaaatttcaattttccaccgacgacgaggggaatttcaaaattcaaatggaagcgaaaatcaaatggaaatttcacaaatgcaccaccggactgagaatggcattttacaagaaaaaagtgatggaaaacaaagtaagacaaactgaaaacagacaaattgacaagcgaaaagaccaaatgaccacaaatagagcaaaatatgcctataacattcataatttgcttcaaaaatttgttgtttttcaggtgccaaaatgtttgcccattattttgcggagtccaaaacggaaattaaaaaatgcaaaaagattggatatttgtgttgtcccaattcgcatcaaatggcttaaatttggcccaaaaataaatgcagaagaagccgaaaccgaagaaaatgacgaaattttgagaaatgaatttgcattggattttgatgtggaaaagaacgcgcaaatgaacggacaaattagaaattgcagtgatttacattctgctgaacacaattttgaaatgattttcaacaaatatttcgatgatggaaaaagtaattacctaattataattagcaatttattataattattaaacataaaattaattaataattgtttatgtaattaaaaggtgttgacgaagagggacaatcatcgaaaagtaaggaaaatgggcacaaagtgacagaaaagtaattaaaagggcaattaaaaagagggaaaagcaacggaattgacaaagcgaaagcatttaataaaatttgaataataatttatatttttatttttcagcttaaaatgaggccgaaccgtcgca

SEQ ID NO: 85087 - DNA, 648 bp, Heterodera glycines
atggcacgtgcctttggcattaatttattacaaaaaaaaatttcttatgcattaatttacatgcgatgggtaaggggccaaatttgcctttttgggatcttaaagatgtgccaataattgatttggcaacaaaagctattcctagtaatgctaataaaaatgcgaaattaattaaaatatttcatttaaaaattaattttatttttttatgcttaaaaaaattttattttaaaaatgtaaattaattttataattaaaacagtaacatatataaaatattttaaatataaaaataattaaaattgacaaaaaatattgaattatgataatataaaaaatttttgaataaattagcctaattttactaataacaaaactaaaccactcatgtgccatttgattagaatttttagatgttttttggtcattccgtcatccttttttgcttcatagcaaatttgtattccttttattcatcggcggatgaagttgttaagtgtccaatttgtcaggaagaatttggaggaaacgcgcaagagaagcttctttatgattgcaatgtgagctaataggtttaataattaattaattaattaggtcaattaaatcataattaatttttaaattccttaaaattaaaatattaaa

SEQ ID NO: 85088 - DNA, 4371 bp, Heterodera glycines
atgtccggaactattagaacccgaattcctattttggttaaaagtttgaaaaataaaattgaaaaatattatgaacaaatagaacaagggaaatatgaatttgattccaatgatttacctggttgtttaaaattatatgaatttattaaaaaagaaatatttaattttgaaaaaacgtttgatagtttaatagaattggataaaaaatggaaaaagatacgaaacaaattaaatactgaagataaaaatgctgagataaaaatatataaaatttacacagaaaaacatgactatttaaaaattttagaagaagcggatagtgttatcgatgaattaaagtcgcttaacttagaggtaaagaaagctattcaaaatttaaaaagaaataagaaaaataattcaggggatcaacacgaagatgaaaatgatgatgatgacgaaccaaatgatgaacaaaacacagaagaagaattaactgataaagaagaaaaagaaactggtactgatcaaacaaatgattccgaaattaaatctgatttaaattcatatgaatattcaaatttttcttcaaataatcatagaataaaaataaaattaccagcacaatccttaacccattttaatggcaaatattcaaattggacatctttttgggatgattataaatcatcaattcataatgataaagaattagaaaatattcaaaaatttaaatatttgagaggattgctccatgatgagccatatagaatgataagtccatatcccataacaaatcaaaactatccaattgtaattgaattattaaaatccagatatggaaatgaaaatctcttaagagaaaatttgcataatgaattacgtaatttacgaaagccatcagaatcaatatctgatttaagaaaattcattttatccataaaccgaataattttacaacttcaaacatacaaagaagatataaatcatcctcaaattaagcaatcaattgaaacaaaattgccaaataatataaggatcaaagtccgtgaacaacttggcaccttcaatacaaaaaaattaatgaatttcttagaccaatatacgcaggcaagagaagaagttcaaaatattgaggaaattgataaaatgaatcacaatgcttatagcaataaaccacaatttcgcaatggaaattttaataaaaataattattcaaaacaatataaaaattttcgaattaatggaaattttcaaaacaatccattaaataataatcactcatttccaacatcagcattaacaactcaatctaaaccagttttaaatataaattataataaaacaacagaccaaaaatcaaatgaaataaaattgttttgtaatttttgcgaaaaaacaaatcacaaatcaaaagattgtaaaatttatccagacatagaaacacgaaatagcagaaggcgcgaattaaaattatgttttaattgtttaaaaaagggacatcacgtgaaagaatgtaaatcaccatatacatgcttttattgtaaaaataaacataatagtctcctttgtctaaagaaaaaacaaaataataatgagaaacaaattagaccaaatcaaacccgtactaatctaattaatgaagaaaaattatatgaaacccaaactttttcaattacaaagcaatttgaaaaggaagaaattgaagaaatattaatgacaattgaagcaccaattataaatattaatgataatactgaattaaattcaataattttattcgacaatggttcgcaaaaaagttatataacaatggaacttgctaaaaaattaaatcttccaataatatctaaaaaaacattagcactttctacattcaacgaaacaaaacccaaaattattgaaagccaaattgttcagattggcattaaaactctagatgggtcttatgaaaccgttaccctacaaacaattgacaaaataactgatttaataaacgtaaatctacaaaaaacaattgatttcggcagaagtaaaatgccaattggattaagaattccacatattctaataggaattgatcattattggcaatttatgttatctgattcaaaaatcagatcgttaccatcaggatttttccgaatttctactaaaattggtgatatttgttccggaaaaggaacagtagaaataacaaaaactaattatgcttccgtaaaacaacaagaaaaagaagaattaaataaaactatacaaaaattctggaatttagaaagtataggaatatccgactcaccttctttaaacgatgatgatttatcagttatacattttaataaaacagtaaaatttgaaaataataggtacatcgtccgatggccatttaaacaagaacaaccggaaattccaacaaattttggtttatgttttggtcgattaaaaggagtacttaaacaattaataaaaaataaaaaattattagagtatgacgagatattacaaaaccaattagaaatggaagttaatgaaattgtaccatttgaatccagttatttaactcattatttggcacatcatccagtcattaaagaaagttcgaatacgacaaaaattagaccagtatttgatgcttcagctaaattacgaggcaatcattctctcaatgatgaaatatttcaaggtccaaagaaaatgccagatttatgtggaatgataatgagatttagacttaaaaaatatgtattaattggagatatagaaaaagcctttctacaaatcggattagatattctcgatagagatactaccagatttttatggattaagaatgaattattaaatgaattaaataaatccaaccgagaaattgaaatgaaagacgttgaaattagaagatttacaagaataccatttggcgtaaatgcgtcaccatttttactggcagcagtaattgaattacatctatcaaaaatagatgaaatgtatgaaaattttaaaaacataaatacaaatgacatcgaattagacttagaggataaaaaagaaaaatttggaaaattatgtaaagaattaacagaaaatgcatatgtagacaattttgtaatgatgtgtgaagatcaaaatgaaataaaatttaagcattattggagtaaagaaattttcaaatttgcgtcaatgaacttacgagagtttatttcaaatcatgaagaatctaataatgaaattcagaaaattgaaggctctgaaatgccaaaaataagcaagcttcttggaataaaatggaacgtagaaaatgatgaactaacaataccaataaaaattccaactatttcaattggaacaactaaaagaaatgtaattcatttaattgcaaaaaattttgatccaatgggatggatttcacccgtaattttgccacataaaagattctttcaaaacttatggaaatctaaaaaagattgggatgaccaacttagtaatgaagaaataaaaaactggaatgaaataacttatgaagaggaaattcatttaagacgttttccatttaacaattctttaattcaaccagttgaactgcacattttttctgacgcttcaggttcagcctatgcatccacagcctacttgaaattaattgaatcaaatgaaatatatttaatttttgctaaaacaagattagcaccagtaaaagaattaactattccaaaattagaactattagccttattaattggtacaagaattgctaaatttattataaatgaaaccaaaattaaaatacaaaatacttatttatggtcagattctaaatgtgttctaagttggcttaaatataaaaaagaattgcctacatttgtaaaaaatagagttaatgaaataaaaaatgcaacaatagtttttaatttaaaatttcactatataaaatcaaaagaaaatccagcagatattgcatcccgagggatgactgtatctgagataaaaaattctgatttatggtggtatggcccaaattggctaaaattaccaattgataaatggccatataaacaattagaagattttactcctgaagaaataaatgaagagtttaatgaagaattagaaattcaattaacaaaatcaaatttgactacaaatccaattaaaccatttatcaaatgggaagattacagttcatggacgaaattaataaattattgctgaaaatattaatatttaaaaataaattgttgctgaaaatattattataagataataaacatggtttatttttagatttacagcaaaatgatataagagatgaagaagtaaataaataaatattttaacatataatttttaaaacaaaattataaaaaattattaattttatattatatggaaaataaa

SEQ ID NO: 85089 - DNA, 4810 bp, Heterodera glycines
ggacaaccatactcatcacccaagttagttgattggacaacagaaatcagctgtattcctccgaaagacatataaaatcccgctagaagacgaaccgtccactagtgcgaacaatttggagaaaaaagattgattttttttgacattatttgaaggcgatcagataccaagatttttgatcactattgttgatactgtgatcgtattgttaataaaaaaaaaaatttccaaataaacgtcaaactgtgtcggccaaagaaactaatttctgaactggaaaaggaagaagaaaattttgaaaattttgatcaattggaagaaattattgaagaagttgaagaatttgtacctattgtagaaattccggttttaacacccgaagaaattgttaccgagcttgaaagaagggcaaactttccctttccaatagtgcatatttacccaggaatttccaaattaacgaaccaaattttaaaaactgaacccttcacataccaaaacaaaaccgtatataaattcactttgacaataactatttttccatactgcattttagataacctagataaagccgattctttggaaagaatatcacaggaagtaattttagaagcttacttaaaagtaagagaaacactcaactctaaccctgaaaaacgactgaaatttgtcaaattcattctaaaagttttatcaagagaaagaaaaagtttattaaaaaagtggagaagatctgaaagaagtatagtattacaccctattaattcattagtccacaaagagtatataatttaaaaacttacgaaaatgtccggaactattagaacccgaattcctattttggttaaaagtttgaaaaataaaattgaaaaatattatgaacaaatagaacaagggaaatatgaatttgattccaatgatttacctggttgtttaaaattatatgaatttattaaaaaagaaatatttaattttgaaaaaacgtttgatagtttaatagaattggataaaaaatggaaaaagatacgaaacaaattaaatactgaagataaaaatgctgagataaaaatatataaaatttacacagaaaaacatgactatttaaaaattttagaagaagcggatagtgttatcgatgaattaaagtcgcttaacttagaggtaaagaaagctattcaaaatttaaaaagaaataagaaaaataattcaggggatcaacacgaagatgaaaatgatgatgatgacgaaccaaatgatgaacaaaacacagaagaagaattaactgataaagaagaaaaagaaactggtactgatcaaacaaatgattccgaaattaaatctgatttaaattcatatgaatattcaaatttttcttcaaataatcatagaataaaaataaaattaccagcacaatccttaacccattttaatggcaaatattcaaattggacatctttttgggatgattataaatcatcaattcataatgataaagaattagaaaatattcaaaaatttaaatatttgagaggattgctccatgatgagccatatagaatgataagtccatatcccataacaaatcaaaactatccaattgtaattgaattattaaaatccagatatggaaatgaaaatctcttaagagaaaatttgcataatgaattacgtaatttacgaaagccatcagaatcaatatctgatttaagaaaattcattttatccataaaccgaataattttacaacttcaaacatacaaagaagatataaatcatcctcaaattaagcaatcaattgaaacaaaattgccaaataatataaggatcaaagtccgtgaacaacttggcaccttcaatacaaaaaaattaatgaatttcttagaccaatatacgcaggcaagagaagaagttcaaaatattgaggaaattgataaaatgaatcacaatgcttatagcaataaaccacaatttcgcaatggaaattttaataaaaataattattcaaaacaatataaaaattttcgaattaatggaaattttcaaaacaatccattaaataataatcactcatttccaacatcagcattaacaactcaatctaaaccagttttaaatataaattataataaaacaacagaccaaaaatcaaatgaaataaaattgttttgtaatttttgcgaaaaaacaaatcacaaatcaaaagattgtaaaatttatccagacatagaaacacgaaatagcagaaggcgcgaattaaaattatgttttaattgtttaaaaaagggacatcacgtgaaagaatgtaaatcaccatatacatgcttttattgtaaaaataaacataatagtctcctttgtctaaagaaaaaacaaaataataatgagaaacaaattagaccaaatcaaacccgtactaatctaattaatgaagaaaaattatatgaaacccaaactttttcaattacaaagcaatttgaaaaggaagaaattgaagaaatattaatgacaattgaagcaccaattataaatattaatgataatactgaattaaattcaataattttattcgacaatggttcgcaaaaaagttatataacaatggaacttgctaaaaaattaaatcttccaataatatctaaaaaaacattagcactttctacattcaacgaaacaaaacccaaaattattgaaagccaaattgttcagattggcattaaaactctagatgggtcttatgaaaccgttaccctacaaacaattgacaaaataactgatttaataaacgtaaatctacaaaaaacaattgatttcggcagaagtaaaatgccaattggattaagaattccacatattctaataggaattgatcattattggcaatttatgttatctgattcaaaaatcagatcgttaccatcaggatttttccgaatttctactaaaattggtgatatttgttccggaaaaggaacagtagaaataacaaaaactaattatgcttccgtaaaacaacaagaaaaagaagaattaaataaaactatacaaaaattctggaatttagaaagtataggaatatccgactcaccttctttaaacgatgatgatttatcagttatacattttaataaaacagtaaaatttgaaaataataggtacatcgtccgatggccatttaaacaagaacaaccggaaattccaacaaattttggtttatgttttggtcgattaaaaggagtacttaaacaattaataaaaaataaaaaattattagagtatgacgagatattacaaaaccaattagaaatggaagttaatgaaattgtaccatttgaatccagttatttaactcattatttggcacatcatccagtcattaaagaaagttcgaatacgacaaaaattagaccagtatttgatgcttcagctaaattacgaggcaatcattctctcaatgatgaaatatttcaaggtccaaagaaaatgccagatttatgtggaatgataatgagatttagacttaaaaaatatgtattaattggagatatagaaaaagcctttctacaaatcggattagatattctcgatagagatactaccagatttttatggattaagaatgaattattaaatgaattaaataaatccaaccgagaaattgaaatgaaagacgttgaaattagaagatttacaagaataccatttggcgtaaatgcgtcaccatttttactggcagcagtaattgaattacatctatcaaaaatagatgaaatgtatgaaaattttaaaaacataaatacaaatgacatcgaattagacttagaggataaaaaagaaaaatttggaaaattatgtaaagaattaacagaaaatgcatatgtagacaattttgtaatgatgtgtgaagatcaaaatgaaataaaatttaagcattattggagtaaagaaattttcaaatttgcgtcaatgaacttacgagagtttatttcaaatcatgaagaatctaataatgaaattcagaaaattgaaggctctgaaatgccaaaaataagcaagcttcttggaataaaatggaacgtagaaaatgatgaactaacaataccaataaaaattccaactatttcaattggaacaactaaaagaaatgtaattcatttaattgcaaaaaattttgatccaatgggatggatttcacccgtaattttgccacataaaagattctttcaaaacttatggaaatctaaaaaagattgggatgaccaacttagtaatgaagaaataaaaaactggaatgaaataacttatgaagaggaaattcatttaagacgttttccatttaacaattctttaattcaaccagttgaactgcacattttttctgacgcttcaggttcagcctatgcatccacagcctacttgaaattaattgaatcaaatgaaatatatttaatttttgctaaaacaagattagcaccagtaaaagaattaactattccaaaattagaactattagccttattaattggtacaagaattgctaaatttattataaatgaaaccaaaattaaaatacaaaatacttatttatggtcagattctaaatgtgttctaagttggcttaaatataaaaaagaattgcctacatttgtaaaaaatagagttaatgaaataaaaaatgcaacaatagtttttaatttaaaatttcactatataaaatcaaaagaaaatccagcagatattgcatcccgagggatgactgtatctgagataaaaaattctgatttatggtggtatggcccaaattggctaaaat

SEQ ID NO: 85090 - DNA, 2103 bp, Heterodera glycines
tgaaaagaaaatcaactgaagagccaaaacccgacacggacacgaaacagtccaaacctgagcaaaaaccagcacaacagaaggaaggaaaatcagaagaaggtcaaaaaccgaaaactggtaaaaaaccagaatttttgttgaaaaaagcaaaacatcccagtagcatttctgtatctgaaagaaaagaggccagagtttactttaccaaaatttttgagcattctgaattgttcaaacgttcagacacttctgattctgaataaattttaattttgtagacacatcatccttgtcaaaggagactcaatttgtcttacaaaaactcagacaacaagaagcaatcgtacaggcaaaagaattgtcaaaagtaataagagaagttcaagcaacaatcaatttcaacaggaacactgaccttattagttattcacgagctttacagaaagcaagtcaaattcctgagcaggacgaagccactgacaatttgaacttccattcgaatttctctccagaaattaacaacaaatttttggaagaactcaactctcttgaatcaacacacgacgatatctacaatcgtgccgtggccgattgtgagagagcagaacaaaagcgtataaactctgttaccaaacaaacgcaaaatatttttgaagccgtgggaaaggctatcaaagctgaaaatttcaacaagggactactcaccgagttggcaaaagccatcaacagtccttcatacaacagtcgcgctggaaaggacaaagcattaatcattgtgaataaactgcaggacaaccttacacatcaccaccgttttttgattggacaacaaaaaacagctgaattcctcagaaagacatttaaaatcccgctagaagacgaaccgtccactagtgcgaacaatttggagaaaaaagattgatttttttttttgacattatttgaaggcgatcagataccaagatttttgatcactattgttgatactgtgatcgtattgttaataaaaattccaaataaacgtcaaactgtgtcggccaaagaaactaatttctgaactggaaaaggaagaagaaaattttgaaaattttgatcaattggaagagattattgaagaagttgaagaatttgtacctattgtagaaattccggttttaacacccgaagaaattgttaccgagcttgaaagaagggcaaactttccctttccaatagtgcatatttacccaggaatttccaaagtaacgaaccaaattttaaaattcgaacccttcccctaccaaaacaaaacagtatataaattcactttgactgtaactatttttccatactgcattttaaataatctagacaaagccgattctttggaaaggatttgccaggaagtaattttagaagcttacttaaaagtaagagaaacactcaactctaaccctgaaaaatgactgaaatttgtcaaattcattctcaaagttttatcaagtgaacggaagaatttattaaggaagtggaaaaatactgacagaagtatagtattacaccctattaattctttagttcacaaagagtatataatttaaaaccttacgaaaatgtccggaaatattagaacccgaattcctatgttggtcaaaagtttgaaaaataaaattgaaaaatattatgaacaaatcgaacacgggaaatatgaatttgattccaatgatttacctggttgtttaaaattatatgaatttattaaaaaagaaatatttaattttgaaaaaacgtttgatagtttaacagaattggataaaaaatggaaaaagatacgaaacaaattaaatactgaagataaaaatgctgagataaaaatatataaaatttacacagaaaaacatgactatttaaaaattttagaagaagcggatagtgttatcgatgaattaaaatcgcttaacttagaggtaaagaaagctattcaaaatttaaaaagaaataagaaaaataattcaggggatcaacatgaaaatgatgatgagaatgatgatgatgaagacgaaccaaatgatgaacaaaacacagaagaagaattaactgataaagaagaaaaagaaactg

SEQ ID NO: 85091 - DNA, 284 bp, Heterodera glycines
atggaaatagtaaaaaataaaatgaaaatatgtaataggaggataaaaagagatgagaccaatggtacggcagcgattatttatgatttcgtgtagataatacagtaataagtggaaatggtaggacggagaaatacggtaatagaggtaacgaacaaagaaagaagaaaaagagaaacatggaggacgactggacgaaaaaagaagtgactgatgagcagaaaaagtgctggacggacaatcatcaaacggaagagattcgcgagtcggagaaggcaatgtga

SEQ ID NO: 85092 - DNA, 448 bp, Heterodera glycines
atgaaatatcaatcgtaagcatcataggattgttttttcaagaatttttgcggtttccattgaggactatgatgagcagtgggtcaaatgggttggaggtgccctgcatcggactgaatctccaaggacgcacctcgtccgaggaatatatatacacgccttagggaagctaacatacgtatttcaagacatacagaaaaaggatgtatgtataagaacgcactcaaatgcacgactcatggtagacttcgatacagcagttacaagcgcgcgtatacaactcatccatacccaactcatccatacccaactcatccatacccaactcatccatagacccaacttatccatgcataaaaatgccacgaccaagaccgcataatcaaaaataccacgacgatgactcgcagtgttatggatgagttgggggtgactccacaaaaataaa

SEQ ID NO: 85093 - DNA, 2087 bp, Heterodera glycines
atgggcggttgttggcgccgccgctaccggccggcccactctcgtctattctcgaccctgccggtagtcactcttcgggcctcggcgggcggggggggggggaaccgatttccgagcaaatcttctttcactccatcattatatatcctctgaagggggggggggggattgatctcccggtcgaccgaaaggggtgtcgtttaaataaatattaaaaatgcggcgccgctggtgccattttctatcggcaaaaacaaaggggaaaataaaatattttttgtggggacaccgacagtaatagacaattaattggttgaggggcttatgatggactcgacctgcggtgccaacaatcgcctcctcctaaataatattgttataaataataataactgtgttgccgccttcaaattatcactgatgaattatggttgtggcccaaattttttggttgccaaaatttctggcaccgtaaatgccattaaaattagaatggaatactgatggggtttggaatgcaaaatctcgggctattggacaaaaaacacctcttcaaatttttatatatttttctttgaaaatgcaagaaaaacgtttattattgtttttcattagcgttttattaaatgtattttaaaaagatcaaattgttttctaattttgcatttaaaatttagtttttttgataaaactcatattaatttttccaacttttttggcattttaaattaaataattattttactaaaacaaaactttaatatttgctcttttggcattcaattaaattttaattaattttacaaatggataaatgaattttctttctttactaccattttaattttatttgggaaaataaagtattttcttgtactatttctgctaaatttaaatttacattattttataataattattccttatttggcattaaatttcccatgatattttttttacataaatttcatattccaaacattttttggacgaaattaatttttgttaatttgcgtctttttagttaatcaaaaatacaattttatataaatgaaaattttgtcatcgacatcgaatttttcaattgaaaatctgctgtttaagccgtgcacattgccaaccccaacaccaaatgcttttggcactgctccacccattgtgccaataccaatgtaccccccattctttgcaacaatgctaacacaagccacagcgtcaacaacaacgattttcacaccgccatcattaatttttaaatctggtgaaattttaagtgaattaaatacgcacaattaaataataaaattaacaaaataaattaatttatggaattttttgtaaattaataagattttttaatataaattatcatttttatagacaaacattctgcttcccttcattgcaagaacaacaacaataattcatcacaacaaattggcacatcaacaacaacgaaatcatccacaaattatgccattcaaaaggcacaatttttttaattgtgatttttcttttcatgggctaaaaaattttaagattaagatttttaagcagataatcattaataataactaaaattctcatttttcaaatttttctttagcaaatttctcgggcatccagaaagaaattgcttggattgaaaactcttttaattccaatgaaattataatattttgatttaacaaataacttcattggtgtttcattaatttttgactcaaaaaagcaagaaatgacaaaattattgccaaaatcttatgaaattagcttaatctgctttataatataattaatgcctaagtggtttcatttacaaaattcgactgtattaacttttccaattttcatgataattttaattttcaaatgaaattaattaattttccattttttaaattaattttccattttttcagctcagtgctctaagcagtgaaaagcggaagcgtcgccatcgtacaatgttcacggagtaccaactgaacacgatggaggaggcgttcaccgcctgtcaatatccggacgtacaaatgcgggagcacttggcggacaaattaaaattgcgggaggaacgcgtggaa

SEQ ID NO: 85094 - DNA, 1455 bp, Heterodera glycines
atgaacagacggtaatgaattcttttgaaaaattaaattttcgtttacccaattttttcccatgtttcagttggatttgtgcggatgtttggttggacattctgccatcttttgaccatgcccaactcggactcaaaatggcattgctttccgaccgttttgatgttttggtggacacgcattttgatggaaaaagcgaattgacaatttggagagaaataataattgacaaggacgaaggaccaaaaccgaaagtgtctgtacggatcgatggcagttaccattttgtggattttccgttgtctgttcgtcaactgccaaacaaaatcagctttaagaacattcagattgagtcattcttaaacttttgtgcacgttaaagcatttttctcttgctttaggtacatcgaccattccgtgatcaaatttctccgctccaagaagcgattctttgacaaaagtggcaccaaattggaagtgtttgtgcattcaattgatacggatgtccaaccgatttgggatatttttaccagtgaaatttgggcactttttacgacaaacattcgccatttgggcttcgaagatggcaatcatttggacaatttgcgtcgtcgcacatcgccaacaattctcactgatcttgatcaattgaattccatcgattccggtcgtctgttccccgatagaattgctgatgatgggccaaatgcaactgctggccaagcgttgtccaaatggttgcatacgtccacaactgatggtcaaccaaagcgattgtattgcaataattattttggtccactgaatctcgaatgggtcaacaacttcaaagaggtgtgtctagccatattttcgtcaatttgtttttgttttaccaatttttgtgtttagacatttcgccgtgccaccacttctgtcagttacacaattcaactttatttttgggtggaacaaatgccaattgaatcatttgaattggtgaacgaacggacgaaggaaaagctgacactgaaacagaatatcgatgaattcgacgtaaatgtgtgtaattggttgttgcaacggtgcccaattggggagatggcgacggcgccagcaattaaatggggagacagcttaaatccgagtgccaatttgaaccatatcagatttgttctgtggagtttcgataaatgcattgggtgagcagcagcaatagcatttgaattttatcgaaaaataaaatatttaattaattttaggccattgtcgccaccagcggaagaagaaaaagcggatcaaagcaatgaaaatgtcgtctgattaagtgtacgggaattaattaattacctaattgtatttgagaaatgatctatctcaatttggtgtgctcatttactctcagaaatgcttttgttaattctttcgttctacatataatattacacatttatatatattttaaataattatgaa

SEQ ID NO: 85095 - DNA, 596 bp, Heterodera glycines
atggccgcggtaacaaaggtcggaaaaggacccggtccatttttgccagatatgtgctgggcgacgtggtgggaacggttcgagtttttcatccagctgaaaggcgtgactgatgtcgcaacaaagcgtctgctcctgttcaccgaaatgggtcaggtgtacgaagagcttcggcgaatggcacagcctgaggatgtccgaaccatggaccttgccgaaattgaacaactgatggtggaacgatttggcgaagcaaaatcaattgctgcgtgcaggcatgaattgttttcagccaagcagcagacagggcaatcgataagagactattcagtccaattgcgaagtttgatcgcgaaggctgaatggagccgcgacagcattgacatgtgtcagcgcattgtttatcaatggcatctccaatgattcaattcgggttgaattgatcaaaaaaggcgacaaggacctaaaattcaaggatgccgtcgaatcagccgttttgttggaacagtctaatttggatgcccaagcaattggttcaaatgcaataccggaggtcgcaaaagttggcacttagcaaagaggaccaagaacgccga

SEQ ID NO: 85096 - DNA, 93 bp, Heterodera glycines
gcacttcccttcgcttgaccatttatttattatatttgtgctccaaataaatatttgtcttttcttcatatctgttgttctcggacacaacag

SEQ ID NO: 85097 - DNA, 1603 bp, Heterodera glycines
aatttgaacaattcttcaactcgcagttatgacgatggaaatgatgattcggatgatgatgccaaaaatgagaaagtcgctggtggactttttgcccaatttactgccgcttttcgacgccgttccgttagcatggacgagcgcgtgttccgcccacggcacggcacaatttcgtcatcctactcggtgggcggcacaaaaatatttaaattttaaccgcatttaaatcgagaccgttgataaataaaaattttcttaaaaagaagcaaattcggtctaaaataaggatttggtcacaaaaaaaacgacgaaagcttatttaaaaatggaaaatttattaaaattaaggccttataatttatcaccaatatttttaaggttaattttgaaggaaaatttagcacaaaataaggggatttaatacgaataaaattataaaaataatttgcattaaaatgttacgaaaaaattatgccaatttaatataataaagatcaaaaaagggaaattcagaaaatagggaatgattgtcgatataattttattgaatatttattattattattatatttgatttttttttaatttgtacatttttaaagatttttaatttaaaattaattaatttataaaattaaatttcaacttacatttatgaatttaaagattagcggaagtccaacaggcgaggtatacggaggcgtcgccaagggcacgcggcaaccgcgcgcaaaggaatcgaacactttccgcaagatgcgcgagcggctaaacaagtggaagctgtccaccggataaagccgatgtccgtaagccgaaattaagcggatcctgaagcggaggcggacatgacacgagacgagcaaaaaaatttttttttgttttttcctgtccaaattatgctatttgtgcgagactctcggcacttggcactcgactcgagaattttagaatttttcaggtcttttcgtgacctttgtgagttacaaaattttcaaatttcggtcggtatttcgtctgcttggaagtgttgtttttgattttttttttgatttttttccccgattgaatttcgggccaaaaaagttagcattttttcgcaattagaattccagcctgaagaatgtgctaggaaaaatttggcaaattcaatttgttcattaatttctcaacaattctcgagttttggcaaaaaattctgctctcgcactcctatttatccacccaatatttactcatcatcaagccattcgagcacccttttgcccctctgctgatctcgtccgatttatgtactattttttcgtagcagtggtcagacagacagacacacagagtaattactgtaaattttggtgtaacgcaactgtagtcagtctgtgatcacacatcgaatagatacgatatatacactatcgtgaatatacaaattttcgaactggaaaaacccatctcctctatcaacttttagttaaagctgataccgtattcgtttgtcagtattcagaagatattgtatttattttgataattttttttatcccaaatactttgtagaaaattctataaactattttttaacaatttatgtgattttaataaa

SEQ ID NO: 85098 - DNA, 137 bp, Heterodera glycines
aatgaataaaaataaatcaatcaaatgttaaaaattcacaggtgataaaaatatagtgtaaatatggcaacatggaaaatcctactcagaactcattgcttttagtaaatccctgaattcctttgccttattaattt

SEQ ID NO: 85099 - DNA, 227 bp, Heterodera glycines
atggacgaatcatccgatggaaatgccgtcgatgttggcgaaggacgttccaaatatgtgcaatggattttggagatgagcgcaatggttggaaaacaaaatgaggaaattcggatggtaatttaaatttcaaaaaaaaaatcgggagaaatataaaatttcagacggcaaaatccgtgcagaataaaagaaggggtcttttgaaattttttcgtttttttgcataa

SEQ ID NO: 85100 - DNA, 726 bp, Heterodera glycines
atgccaaatgtgaaaaaacaacacgaagacttacccccgaatagcaaaacgttcaagggaagagggactgtaagaagaaaatggaaaagaatttcaaaatatatcgggcagaaatgagaacaccgactttaattgtttgagttttttatattcatgaaaaacttactaaaaataaggaatttttttttcaaaaaagccttaaatttttgagtttttctgtgttcaaagcgtggcttatgcacctccaatttttgccgattttcggtcggctcagccaacaattgggtcaatcgttcgtccgttgcgccaattcgctgctgacgcgccgcaatttggtcggccaacagaacattcgcatgacgaagctgaacatgaagcagaaataattgacagcctcttcagtttttttcgtgtttgcctggacctggacctggcttttttcacattagactggacctggatttcctggacaaaaatccaggaaattccaggtccaggaaaaatccaggttgccaaaaaatggcatggacctggacccaggaaaaatccaggcctggatccaggtccaggtcgatctctagtgcaaacagacgccacgcagtaaaaaaaattgaaattttaaccattttttaaaacagattttcaccaaaaaatgcgaattttgtggattttcagaaaaaaattcacgaatttttttttgagagaccatggggggtataccaacaa

SEQ ID NO: 85101 - DNA, 709 bp, Heterodera glycines
gtggccatcttggtggcccaaaatgacacggactttggcatggcacgaaagaacgccgcgttgcccaattcgggcggcgcaattccaatggcattggaacagttgtgggcggacgaaatcctaccaaaaagcgtcaatttttcgtcagtttactaacactttaaaacggcaattttaaatttgtcgccacagaattcattggacttattctcaatgtaatgaagcaaacgattttggccaaacttacaattatattagcaaattgggagcagacgcaatcattgcgacttcgtgcattgacggtaatgcgaataaattagtataattgtatgtataattaattagaataattaatttgttgcaaattctttgaagtgccgccaatgctgggtcatttggctgccaattctaacattccgatgcttgtctggggacaaagcatgtcttcaaagtgagttcgttcaattaatttgactaattaatcttcgaattctcatcagtcttgcctcctcaaacaatgccacctatccaactctgttgaacattgtgccaaattgcaaatagtacactcattttgatttgtatattatttaattgcctgactttaccgttagcatggcttccgggcttataagtcttcttcagtattttaattggacacaaatcggcattataatccaaagtgatatcatatcagcaagtggaggta

SEQ ID NO: 85102 - DNA, 252 bp, Heterodera glycines
gaattcgtctgggaaagtgccgacggcaaatgttcagtccaattttttgtcgaacacgacaatgcctcacaaactgcagacaacttcaaccagaaaagactcaaattgttccgtcacttctctgcttcccaatgctgaaaaagaattcgacaaatcttttgctggcgttgctttgtcgtgcggtggtggcaaaaaagcacaccaattgaatgacattaaggcagttggggaagaagcagcagcagagaatgt

SEQ ID NO: 85103 - DNA, 485 bp, Heterodera glycines
aatttttttgtgtcttggatttataggtgctaggaaattggtaaaaatttacaaaaagttgtaatcaaaaaagctcgaaaaatttagaccgaacaattttgaccctaacttttttgaaattcaataaaatttttcgaactttaacaaaataatagagaaatctttgggctatctaattatataaatacaattaaaattggttctttcagaaaaaagttatgaaggaattaatagtattatatttttatggtcatccaaaaaatgtaaggtcgtttaaatgcatgaaaattgttcaaaccttcaattatcacattacatttgatatgaaaagatagcccaaagatttctttatgatgcagttaaatttcgaaaaaacttattgaatttcaaaaaagttagggtcaaaattgttgagtctaaatttttcgagtttttttttgcttacaactttttgtaaatttttactaattttttaaaaattacat

SEQ ID NO: 85104 - DNA, 478 bp, Heterodera glycines
aaattgcaatgccttcatttaaatttgtatgtttccaatttttgctaatttttgtgctcacggaattggcacattcagagaaagggtgcccaaaaacagaagatttaattgaaatgaccaaacatttgctgacaactgggaagaatgtaatttctggtgaagcagcttcatcatccaccgaaggaaagtgcagtgatacggtaatggaaagtgttgtaacaaaagttattgaatttgggtgttatgacgaaatggaaaagaatgacggcgaaagagcgaaaagcaaaacgaaaaacgcatttattgaaagcattgaaacacaacgaaaaggtttttgccaactttggcaaaacggcaaaagcattggggagaaggagcaaaaagatggcattttgaaaatagtgaaaggattgggaggaattgagctgaagaaaattgaacgaattcttgaaaatgttcaaaacattggattatcgcc

SEQ ID NO: 85105 - DNA, 591 bp, Heterodera glycines
gagtttcattgaaaactcaaaaaatgacaacagtcaaattgctatgcctaattgccctatttgcggtagtgcaacttcgttttgcatttgctatgatgaatcaaaacaaccaacaagtgagccaaaacaacagctctgacgaaggagaagatgatgatgatgctggtaacggcgggcaatatgacacggttgctccattgcgtagcgacagcactagtttcgttagcagcggcaccttaccgccgcagggcagcaccggtttcagcggggtcggcatgatgccgccgcatgcccaaaacatgggagcaatgggcatggggatgggcaataccagtttcggcaatttgcaacaacccactatgcaaatgcaatatcaaaaccagcaaatgatgcaaaccccgcaaatgatgcaaaaccagcaaatgccgtttaaccagagtggcagtttcagtggggttggcatgatgcctatgcagcaccaaaacatgggagcaatgggcatgatgaatgttggcagtaccagttttggcaatttgcaacaatccaatatgcaaatgcaacatcaaaaccagcaaatgatgcaaaacccgc

SEQ ID NO: 85106 - DNA, 612 bp, Heterodera glycines
gaaggcgtgtccaagttgatcaacggtattccagtggctgagaccgtggtttacccagccatcggcgagaccaagactcatatcacggtgttcaccgataccacctgcccgtactgccacaagctgcacgccgaagtgcctgcgctgaacaaaatggggatcgaagtgcgctacgtcgcgttcccgcgccagggcctgggctcgccgggtgacgaacagctgcaagccgtatggtgctcggccgacaagaaagcggccatggacaaaatggtcgatggcaaggaaatcaaatcggccaaatgcgccaacccggtttccaagcagttcgccctgggccagtcgattggtgtgaacggtacaccggccatcgttttggctgatggccaggtcattccgggctaccagcctgcgccacaagttgccaaactggcactgggtgcgaagtaagcagtcatcgtcgagcctttgacgatcatgccccgtcgaacagtcgacggggcattaattgagagccgcagttgtgcggctgtttaccacggccgaccttgagtcggccgtttcatggggagttcttcagtgaaaccggtcaaagtaggcatctgtgggttaggg

SEQ ID NO: 85107 - DNA, 584 bp, Heterodera glycines
  unsure (1)..(584): unsure at all n locations
tgtcgacagatttcaaacttgatacttgttgttgttgaacatatttctatacctcacagttcgtccacattttgactttcggacaaaaacaaaagacaaaaaacggtggcaatgatctccaggagggcaattattatttgggccnttgctttgttggcattagcagcgatttcgcccaacttttccaccgctgacaaaggagttgacgctgtcgatgcggnggacgaaatcattgacgacccaaaagtggaggtgccgaagaacggcgttggcaaaggcaccgatgaccaaacagtgcagtgggaggaggaggccatcaaactggagggactatcagtggccgagttcaagcagctcagggagagtgcggagaagcatcaattccaagccgaggtcaaccggatggtgaagctgatcatcaattcattgtaccggaacaaggagattttcctccgtgagctcatctccaacgcgtcggatgccctgnacaaaattcggctcatttcgctgacaaattcgacagcacttgcggccaccgaagaattgtccatcaaaattaaggccgacanagaaaatcacatttt

SEQ ID NO: 85108 - DNA, 320 bp, Heterodera glycines
acaaaaattaattggccgtgacgaaaacaatatcatcaaccacagaaaagtgaactgctccagcgctgcaatgttgatgctgttgatgaccattttcactgtgctgtccaatgtcaacgaggtagcagccgaggagcacgagctggtcagccgcattaagcgcaacggctacggatacagcagcggttatggtggtggctgttcagcctgccaaagcagctgcaccacctgtggttacacatcctaccataccgtgcctgcggctcccgctcccccgccaccaccgccgcctccgcctccgcctgcgcccgtctacagct

SEQ ID NO: 85109 - DNA, 601 bp, Heterodera glycines
  unsure (1)..(601): unsure at all n locations
aagaataacatgaaaataataactctaattccaatcttattttcattaataaattcggtagttggacaaacaacatgcgcaacaccgacaacacccccagtttgttactgtacatgtgaatcaacacctggagtgtcatcaacagcaccaacaacgacagttggaccaacaggaacaacaacaactggcacaccattaacaactggacagggcacatctggaccatntacaccagcaccaacaggcactcccggacaatctacaacagcaccaacaggcacgcctggaccatcaacaccagcaccaactggcacgcctggaccatctacaccagcaccaacaggcacacccggaccatcaacaccaacaccaacaggcacgcctggaccatctacaccagcaccaacaggaacacccggaccatcaacaccagcaccaacaggcacgcctggaccatnaacaccagcaccaacaggcacgcctggaccatctacaccagcaccaacaggcacacccggaccatcaacaccagcaccaacaggcacgcctggaccatctacaccagcaccaacaggcacacccggaccatnaacaccagnac

SEQ ID NO: 85110 - DNA, 691 bp, Heterodera glycines
gcagacacaattaaatgagagaaatagtgtgggcgagagagagagagggaaatggataaaaataaattaataaaatgtcttgacacaaatctctttgcgtatctttccgttggctgtggaagaggcggcatcaggagatcaatcgtggtgcgcggttttcggccaaggagcatttcggcaggggtttttgcgtccggcaacgaatcgttcggagtcgtgcggtaagttaccaggaaagtgttgatgatttccttgtttggcactccctccccttttatctttcgaaacgctctcttaaaaatgtccacgaaccgttccgcttgtccattggactttgggttgtacggagcggaaaagagatgagcaattccatttgcttctgtgaattttgcaaattcacttgcggcgaactgcgttccgttatcggttaccagtgtttcaggtataccgtgtcgtatgaacagatatcgcattcgttcgatggttgcggctgctgattttgtgttcatttcgaatacctccgggtatttcgagtatgagtccacaacaatcagaaattcttttccgaagaaagggcccgcataatcggcatgaattcgttgccatggccgcgttgattttggccatgagtgcaaatccgtttttgtcgcagcctttgcggccaattgactcggtgcacaattcttgacaa

SEQ ID NO: 85111 - DNA, 3824 bp, Heterodera glycines
catttgttccagtgcaaaactcagcagcagacaatgcccggcaactccgtccaacaattcaccactccatcagcgccggtggccaacaatcagacggtgatcaaagtggccatgttggtggcccaaaatgacacggactttggcctgccgagaaagaactcaatgctgcgcaatgcgggaggtgcaattccaatggcactggagcagttgtgggcagacgaagtgctgccaaaaagcgtcaatttctcgtttgagtgggtttatgaaaagtgtaatgaggcaactgcgatgggattaacctatcagtttatccacgattttggtgctgacgcaatcattccgacgacgtgcatggaggtggcaccacaagtgggtcatttggccgctaattttaatattccgatgatcgtttggggacagaatatggtctcaaatcttgcctcctcaaacaatgccacttatccaactttgctgaacattgtgccgaactacaaatacatggcatccggactgatcagtcttttacagtatttcaattggactcaatttgccgttgtgatccaaagtgatcttggcaatgtgagcggaggctgtgattatctcgccaaatccattgataattcgttagcaacttcgaatatcactgtcaattataaaacgcgcattttcaatgttcagtcttcggacatggacagaattgccaattcactgctgcaacgggcgcgaattattttgctttgctttgatgacaaaaaacagttgcgcacatttgcgcttaatttgtttgatggcggactgaacacaaagaactttgtgtacataatacctgacaatgacatgactttgtcgttcaatttgtcgttggacccattttgggtgcaaacgagtgtcaattcgaatggacttgacggaagagacgcggacgctgaagtgattggacgattggcattttggtggcattatgacatcactctttccgcgttatccaatcgcaactattacggcttttacgggagagtggtcaaccgaacgtacggttggcccttttactgtcccgaatcggaatgtaacacagttgctaatggctccctcaattccgtccttttgtacgatgccatttataattatgggatggcactgaatgagagctttaagcaatttggcatccgaagagagacataccgtaacgggtcattgttagcggccaataacagaaggccatttatgggtttgaccggctacgcaaccgtggaaactgaccgtaacacgcgggtctttgtgttgtccaaccgaaaaagcgacagcaaacaaagtccgctgcgcattttgatgcaattggcatggacaaacggcgaattgaatgtgacaatgagaaatgccagctcattgatgtggttttctcatggtggtgtcgttcctccggctgttcccacgtgcggcttcgatggcaacggatgtaccgtatccgtgttcgatttgtacaaaggatactttttgggcggcatcgctttgtttgtgctgctcattggcgccagcattttctgcgtcgcttatttgatacacgcaaaaattgttgacaagcgaaaaggcaatttgcagtggaaaatcccttttgcgttgttgcagcgacagaaccaaagacgatctgaacggaccgccgaacggagtcaccactctctccgctccaaccaaacaaatatttccgcgttgacacatgcgaccaccagcagcagcttggcacagtcaaaaaacttcacactgtacgcttacaatggacaaatgtgcattgtacacgcgtacggcccaacactgttggccatgccattgtctgccgaggggatggccgagtgccgaacgttgcgactgtttgaccacgtgaatttaaatcgctttttgggactgagtttggacgggcccaatttgctggcggtgtggaatttctgtgcccgcgggtcgctcaaagatgtgataatgtccggtaatgcgatggtcagagacgtcgtgttcatccaatcatccatcagggaactttgtgaggggttacactttctgcacaattcgcccctccaattccacggccgactgaaatcgtccgcctgtctgatcaatgatcggtggcaagtgaaaatctcatactttggacttcgttggctgaaaaacactcaaaaaattcaaacaaaagaccttttgtggttggcccccgagcaattacggaaaatgggcgagaacaaaaatttaattgacggaactaaacaatcggacatttattcgctggcattaattttcactgaaatggtgaatatgacaccgtgttgggagacaaataatgaagacgatgaagctgacagtgacaaaagtgccgcagatgaccaagcagtgcagcaagagaatgccatgtcgcgaagacgaacaacgacgacaacggcggcacaacaacgggtgaaacgacgcgccccggggggacagcaacaaaggacaggacaaaggcgacaaaatgcggaagaaattgtctacctggttaagcgaggcggactgattccgttgaggccgacgattcggcccgcattggacaatttgaacccggaattgattcacctgatccgcgattgttgggtggaatcgcccgcggaacggccaaccattgagaaagtgcggcaaaagttgaggcaaatgaatgccggacagagcatcaacttgatggaccatgtgttcggcatgttagagcagtacgccaacaagttggaggaggacgtgcacgagcgaacgcgcgagttggaggaggagaagcgcaagtcggacatccttctctaccggatgatgccgcgccaagttgcgaacagtctgaagcttggccagtccgttgagcccgagcagttcgagtgcgtcacggtgttcttctcggacattgtccaattcgctgcactgtccaaccaaatgcgaccactgcacgtggtcaatctgatgaacgaactgtacaccacttttgatgcaattgttgatgagcacgacgtgtacaaagtggagtcgatcggtgatggttatctctgtgtgtctgggcttccaaatcgaaatggaaatttgcatgccaaacaatgcgctgacatggctttgaaatttctgaattcgttgcaatccttccgaatttctgagcactccgatcagcgaattcggcttagaattgggctgcacagtgggccatgtgtggcgggagttgtcgggttggccatgccccgctattgcctcttcggtgacacggtgaacaccgcgtctcggatggaaagttcttcaagcgccaacaaaattcacatctccaaagaaacgtgcattttgttgcacgaaaactctgaaggaggcgcttacttaacggaaagcagaggcgaagtgatcattaagggcaaaggcgtaatggaaaccttttggctgttgggaaatgcaaaaattagcggtggcacaattggcacaaatcattcgcaagcagcggaaagacaaatggcaatggaaagtgacaaatcggagaaagaaatgtacaaaagttacaaacaatcgacgacaaattaatggcaaatataaaaataattaattaattcaagtttaattattatttttatttttttcatgcaaatgtaaaaaacctttttaatatttcctttattaatgctcctctttttatgttgtgtcataaatattgtcctacttcgattacgttgaatgactttagatttatcacacttttcttgacataattaatgttattaaactattttaaaatattatcgctatttttgacataaatctttgttataacaaaaaaaaaaaaaaaaaaa

SEQ ID NO: 85112 - DNA, 3499 bp, Heterodera glycines
atttcgttccgatgttttttgggacatcggttgctgttgttctttgttggcttttttgcactttcccaacgacattcggccaacagcaaaatgggactgcgccgctgatcaaagtcgggctaatgatgccgcacaatcagtcgtccgatttgtcttttgcccgatccgccggtgccatctcagtggcgctgaagcacattttcaacgacaatttgttgcctcccggcaccaatttcagtttcattgtccgtttcgaagagtgcctaatgtccgtcgccgccgggtacgccttcgatttgttggatggccagcaagtggaccttttcattgcgccgccgtgcaccgacagtgcgcaagttgcacttttcgtgtccacattttacaacatcccttccatcacatggggccagaattcggactcctctttcaattcgcagagcaattaccccactttgctgagtgcgcttcccaattacgccgactttggccaaattatcatttcgctgtgcatcttcttcaagtggtccgtcatggcactgatttatcagctcagcgagacgggtcaatgcgcgtcgttccagcaagacttgcagatcgcgatcaattccaacgacaaatgcgatatcagctacagagaggaagttaagatcagttctgcgggcaccagcgacgcccaatacaccataagtcaaattcagagcagggcgagaatcgtcattctttgcttcgacgagtttgttcagctgcgcaactttgccgccaaacttcaggagggtggcttggactccgctgactacgtttatctcatccccggactcaccatggatgatagtattgaaagtgttaattgtgtcttttataaaattcaaatttgcgtttgctttttctctgtttttaatttactttttgttttgggtggctccaaggccaccgcgtggtgggtcgacccgaacccgaccatccaatcagcggcctacagaattgctcagcgcagtctttatctgatgttggacatcttcaacaaagtcgcaacttcaggtcaagtgggcaacggcacttcgtttgatcaggaagtgatcagacaggtcacccaatggcccttcttctgtaccgattgcgatcagtcgttgcaggcttcttcttacgcccctttgctccacgacagtttctatttgtatgccatggccctttccaaagcggcaaaaattgccggcgcattgtcaccttccgtttaccgaaatggccaattgattcgctcccaaaccgccaatttgtcttttgaaggaatgacggggtcaaacaaatttggatctgatggacttcgtaatttcatttaccttgtctccatgtattcgagcttgaacggtgacttgacttcgtatgtgtggctccaaatgaacgatgccggagtgaattcttcatggattaatgccacggccgagaagctgatttggtcgagccgaaacggcgttaagccattggccgtgccgttgtgcggatttgacggcaacggctgtcacatggacttcttcacggagtaccgtgggtatgtgatagctgccggctgtctgttgctgctcattttgggctcgttcgccttcggcatttactggctgttccaatccaaggcgcgcgagatggaacggcaaaatcgcctctggcaaatcgcctacagtactctgacgccggcgggcaccaaaaagaaaatgatggaaagtgtgcgctctctccagtcgagcacttcttctcagttcacgcgcgactcctcccattcccacgtttccatcaaacacaacttcaatggcatcgtgtacattatgaacggcgagcgggtgatcggcattcagcattcggttggcattcgactcagtccacaggacatggccgagctgagaactatgcgccttttggatggagacaatgtgaaccgattcatcggcctttccatcgatggcgccgcgcttctctccctgtggcgctactgctcgcgtggccccctttcggacgtgatctcgggctcttcctctctgaccatggacggcttcttcatttattcgttggtccgcgacgttgccgaaggattgcgcttccttcacgcgtcctcaattggatggtatggcaatttgcgttccaccaactgtttgatcgacgaccgttggcaaataaaactgtccgagtttggtctccgcttctttcgtgcacacgaaaaacgggaggcaaaagatttggtttggacagcgccagaattgttgcgcgataatgacatcgttggcaacaaatttggcgatgtttacagcttttccatcgtttcttccgaaattgtgaatatgaagccaatttgggagcaggacgaagcgaagggaaatgttgaaagggtccgaaccggggggaagagggcatttcgtcccaaattggagccgagcagccaggacttgtccccggcactgctgcatctgatcaaagactgctgggacgaaagccctgcagaacggccaaaaatggagacggtgaccgcacttttgcagtcaatgaacacgggaaggagcaccaatttgatggaccacgtgttcaatatgctggaagtgtacgccggctcattggaggaggaagttgaggaacggaccaaagagttggtggaggagaagaagaagacggacatccttctctaccgaatgctgcccaaacaagtcgccgacaaactcaaattgggccaatctgtggagcccgaaaccttcgactgcgttaccgtattcttctcggacgtcgtctcattcacaacaatcgcttcaaaatgctcacctttgcaggtggtcaatttgctgaacaatctgtacactctgttggactcaatcatcgccgaatttgacgtgtacaaagttgagacaattggcgatggttatttgtgcgtgtcgggccttccccaccgcaatgggcatgaacacgcgcaacacatcgccaaaatgtcgttggcattcatgcgcaacttgggcagcttcaccattccccacttgcccattgaacggcttcgtctccgcattggcattcacaccggctccaccgtggcgggcgttgtcggtctttccatgccccgttattgtctgttcggcgacacaattaacacagcggcacggctggaaagcagctcaaagccgatgcgaattcacatttccacgacgacgaatcactttttggtcaatgttctcggaggttttgtcacccaagcgcgtggagaaattttagtgaagggaaagggcgttctcgaaaccttttggctgcttggcctcgaaggcgacccggcggtgatgcgaatgttgcacagttcggacggtaataatgcgactacggaatgaacaaaaacaaattgaggaagaaattgaacacaaaggaaacagaaaaaccaaaagaatgaatgaatgaatgatttgtcatttgtaaaaattaaaatgtcggacaacaaaaaaaatcgaaaggaacgaaaaaaaaaaaaaaaaaaaaaaaa

SEQ ID NO: 85113 - DNA, 364 bp, Heterodera glycines
gagtgtggctgaagtggctaaagccgcaggtctttttctggtcaacaaattttacacatctgaaatttgttaaggtgtcgagtggggacgcatgtcagcagcggacaagacactttgggaacagaaggcggcagacgacaagaagcgctacgagcagggtaaaaaaaatggcatggcattgcgacatttgaagactgatttttttagaaatgactcagtacagagctcgccagaagtagacgattgggcagtgaatgacgttttatctttgacttccttttccgctgttctctcctatatttaaaagtcaacaaaaatcgaccttccatttgtcgtccttttcgacattctggtttatttctct

SEQ ID NO: 85114 - DNA, 3008 bp, Heterodera glycines
cgaaaatcacaattaattataaaacacgcattttcaacattcaatcatccgacacaagcacaattgtcaatgcaattcgagaacgggcgaggatcgttttgctttgctttgacgatttgaagcagatgcgaactttcgcacttcaattgttcgatggaggactaaacacaaaagattatgtttacataatggtggataatgacatgtatttatctttcaatttgacgagattacctttttgggtacaatcgagtaacaattcaaatacgctcgacggaagaaacgcggacgccgaagtgattggccgattggccttatggtggcactacgacatcactttgtccgcgttgtccaatcaaaattactacggctttttcaaaagagtgatcgacagaacgggcgattggcccttttattgcgatgaatccaattgcagcaaagtgatcaatgcatccatctattcgcttctgttgtacgacgcaatttacaattacggaatggcactgaacgaatctttccgccaatttggcattcggcccgaagtgtaccgaaacggcactctgttggcacggaacaacagaaagccattcatgggtttgaccggctatgtgacggtggaaactgatcagaacacgcgggtgttcgttttgtccaatcggaagtcgagcgagaaaggaaatgcgctacgcattttaatgcaattcgcatgggtcgaggggaaattgcaaatatcgttgcgaaatggcagcttgtccatgtggtcctcccgcggtggaagcattcctccggcggtgccaatctgcggcttcgacggcaaagggtgtgccgcgtcggtgttcgaaatgtataaaggctatttattgcttggaattgctctttttgtagtgacaataagcggtagcacttttactgtcggctttttgatacacgctaaatttgtggaaggtcggagaagcaacatgagttggaaaataccatttgctttgctgacgaaatcgaaaccaaaacgtgccgaccgcacagccgccaaccgaagtcggcactccgtccgctccaaccaaacgaacatttcctcgctgacccattcgaccattggcagtttggcacggtcccgaatcttctccctgtactcatacaatggggaaaagtgcattgtgcgcagctttggctccacaacaatggcaaaggcatttacagtgacacaaatggccgagtgccgaacgatgcgtctgttcgaccatgagaatgtgaaccggtttttggggctgagtttggacggggccaatgtgttggccgtgtggaacttttgcatgcgcgggtccatcagagacgtgattttgtctgaaaatgccatggtcaaagatgtgatattcatccagtcggccatcaaagagatttgtgaaggcattcatttcctgcacaattcgcccctccaattccatggccgactgaaatcctccgcttgtttgatcaatgaccggtggcaagtcaaaatttcatattttgggcttcgatggctaaagtcttcacaaaaaaatcgggcgaaagatcttttatggctatcgcctgaacaattacggaaaatgggagacagcgaaattgtggaggggtcaaaacattctgacatttacacgatggcattaatcttcaccgaaatggttaatatgtctccgtgttgggacagcagcgaagcggacggagcagaggctgaccgggccgaggatggagaagagcaaaacggaacggaaatgtcgcgaagaaagcaaacggcggaaacggagggagaaacggcacagcggcgcccggggcgacgcgcgaggggacgcaacgcggaggaaatcgcttatttggtgaagcggggcggaatcgttccgctgcggccgatcattcggccggcatttgaccatctgaacacggaagtgattcatctgatccgcgactgttgggtcgaaacgccgagcgaacggccgaccattgaaaaagtgcgacagaaattgcggcaaatgggtgcccaacggagggtcaatttgatggaccatgtgttcgacatgttggagcagtacgccaacaaattggaggaggaagtgcaggagcggaccaaagagttggagggggagaagcgaaagtcggacattcttctctatcggatgatgccacgccaagtggcggaccgactaaagctcggccaatccgtggagcccgagcagttcgactgtgtgacggtgttcttctcggacattgtccaattcgcggcactgtccaaccaaatgcggccgctgcaggtggtcaatctgatgaacgaactgtacaccatcttcgacgcaatcattgacgagcacgacgtgtacaagggcgatggttatttgtgcgtgtctggccttcccaatcggaatggcactttgcatgccaaacactgtgctgatatggcgatcaaatttatgcaagcgctgctcaatttccgaattcccgaccttccaaatgagcgcgtccgtctccgaattgggctgcacagcggcccatgcgtcgcgggagtcgtcgggttggccatgccccgttactgtttgtttggggatacggtaaacaccgcctcgcgcatggaaagttcttcaagcccaaacaaaattcacatgtccagtgaaacgctcgaattgctgcacaaaaatttcaacggctcttatcacacggagagcagaggcgaagtgatcataaagggcaaaggcgtcatggagaccttttggctgttgggccaagtcgaaaatggaacaacaattaacgccgattatgcgcatagaatgcatctgccggtgatcaaatttggggaggagggaaatgaaaccggaaaaaatgcgtaaagaaatggtgatgaagccaccacatttagactgaaatgcataatgaaagagcaaagatcaagactttcaaaatgcctgaaattaatgtaactttacccaaaatttagcaaaaaatttcaatttattacgaaaaaaaaaaaaaaaaaaaaaaaaaaa

SEQ ID NO: 85115 - DNA, 907 bp, Heterodera glycines
gcaataaagagtaaattatggataggagattcactgtcttccttgtgatcgcattggttacttctatttatgaagtgcttagtaatggaaatttgaacgatggcgacgactcatttaaacaattcgatgaactcgaagaaaacccagcgcataaatattcaaaagaggcccagaaggggttcgaaatggaggaggaggaagtcacaatccgagaaccttcggggacgaaggaatcgttcaaattgcccatcaatatgccgccagtgaaattttctttttgtgtctcatgtggttatcgccaagcatatgaacagtttgcgcagattttacgcgaaaaatatcccggaattgacatccacggcgaaaactatcctcccggcattcttcgcacggtgggagcgcaggtcatcggaatggtcaaaattgcactgattgtgtgcgttgtgtccggaaggagtcctttccccaccttgggacttgaaaccccaactttcttccaatggatgctcagcaatcgtttgtctgccgcacttatgctttttttattttccaatgccatcgaagggatgctccaatccacaggagccttcgaaatttacattgaaagcgaacgaatttggtccaaattggaaagtggtcgcgttccgtcacctccggaattgttccaggccattgacagtcatttggcaattcgcaggggcggcgccggaaggtttggttcgtcttcctctttcggcatcgatgggtcatgagaagaaaatgtccattggaagtgcgggtcgttcacgttaaattcacacaaagcgaaaaaagcccctcctcttctctcattttgtctgtccatttattcatttccttgctttttgttattgggcataaatggtggagagaaaaaaaaaaaaaaaaa

SEQ ID NO: 85116 - DNA, 607 bp, Heterodera glycines
aatattaaaagatccgaaaaaatgccaaacattttcaaaatccttctgattgtgcttttggccgtcgtctcattccgtctctcggcttctactggtgacaaaaaaactgctaatgatgggagtggaaacaactcatcagctgggattggtacgaagatcaaaagaattgtcaccgctggactgctcttcacttccctggcgacgggtggggcggaagcgattgggcgaagcaatgctcagggaggaaatgccgccggattggtgccatcgcatctgaccaatcgctcaatggctccaccacctcctcctgcgcaatttgaaaagggggcggcaactcgagttgaaaaaatgagggcacagctacgcgaacttgctgagaaaatgacggacaaagatcctaagcgtctgtcaccgagtggacccgacccacatcatcattagggccatggatggatctaacggaggaagaaagaatggatgcttagttttcagcttttattctatcctcttttatttattagtttttcaaaacaaatttcttcttatttgttgttttgaatctttttagataaatctaaacccctaaaaaaaaaaaaaaaaaaaaaaa

SEQ ID NO: 85117 - DNA, 1418 bp, Heterodera glycines
  unsure (1)..(1418): unsure at all n locations
tttaacngccncctcaacnacntnttgcatataacctaaaanaaatgcatttccaaactgccttccttctcctggtgccgttcattgttgccaacattgtgttggctgacatgcccaaagatgatgcgccacgcccggcggtgcaaatccgcacccgtcgttccgtgtatgtggcaatgatggacggcatcggcgtcaccaaggaggccatgagatatgcatgccggggatggcaaacgagcttctgcacaaagtttggcactacgctggccgttgagcgtacacgacgtgacacaaatgccgagatgatgggtaccaagatgactgccaatgccgagcgggaggcaaagaaggaaatgaatggcgagatgggtgccaagaaagaaatgaatgccgagatgatgaacaccaagaaagacacgaatgccgaagtgatgggcaccaagacgaatgctaaccccgagcgggacaccaagatggacgccgtggtgatgaacaccaagacgaatgccaaccccgagcgggacaccaagacggaaacgaatgctgtcatggtgaacaccaagacggattctgccaaccccgagcgggacaccaagaccgacgccgtcatggtgaacaccaagacaaatgttaacccagagcgggacaccaagatggacaccaccaatgccgaggtgatggacaccaagaaggaagccaacgcggcagctgcagcgccggtggcggcgtcggacaacacggcaccagccccaatgacatggatgatggacggcattgtgccacgcgatgtcaatgtgatggtggaccgtaccacgaaggagttgcgcaaaaccacggagacggacggcttctacgacatgagccagcgggcacaggaacgtgtgatgttggagacagccggcaaacagggcgaaattgtcaagacaaagctgaaggaagcaattgaggaggcccgaaaaatgatcgaacgtgctcttggcacagtgatttcctactcggaagcgccaatggagtccaaaatgcaattggaacaggtgttcatgacgctgacggacgagaccaagacgcccaaagagaagatggagcggatcaaggacatccagcagaaatggacaccggaaatccgcgcggcgttgaagccatccactgacgacaaggaaattgccgaggcaatccgcttcttcaccgacttgccggctcagattgagcttggcaaaaagtgatcggagctgtggcgcaattgtgccgatctgatcaatggccggacatcgcacaatgtcccaaaaaattcatagaaaaacaaaaacagtaacgatcattcggattttcttttaaatgatcaatgtcaaacaaggattgttttttttgtggttaaataaattttcattaaaaaaaaaaaaaaaaaaaaaaaaaaa

SEQ ID NO: 85118 - DNA, 120 bp, Heterodera glycines
aatgtgggtcagccgatcctaaggacccggctaagcgtaacacactacggatgacgacttttctgtgcttgcgcagttggtccatccggttgccgaaaggaagtgggttaacattcccac

SEQ ID NO: 85119 - DNA, 7127 bp, Heterodera glycines
gaatggcgaacagtcatttgccgatatttatatgccaatctccacctctaagccgaccgaactcatccgccggttcttggctcactttgccctttcatttggctatatttcatttccatagctttaaatttattcagacgtcaattgttgaattcgtttcgccattagcttttgtttatgacttttccacatctgttcaaataatttgaacaccaaaaacttggcttttttgattgcttaaccattcattttgttaaatttgccgttcattttgtttgatcacctaaaaaatttggcgtagtttttgtgatcacattaggagttgggaccaagttagccaatttttaggggtgtatttttcgtttttttaaatcccgagctaggtggtggattttccaaaatttttagccgttttcattttttacttatttaatgggaaaatgtaaaacggaaaaaattaaacgcatggaactgaaaaaaggaaatgaaagatatttcaaacggaagaggaaaagaaaactatcaaaaattaaagaaaattcttaagaaaaagcaccgattatttatatatatatttttattttttgctgaatatattttttcatttttacttgtattattataattttttgtttattgataaggattttaaaaatttcgatatttcttagaattaaaatttgtcactctgtcaggactttgaactttaaaaaatttgaactttggcggtaaaattatttaacgatgccctcccaaacaaagctgaagaggaagtggatggaatcacttcaaaagaacgaattcattttggaattttgaaatgccctttaagggattatgcgactgccgcaaaacgaccgtaccgaatcagcttgaaacattttgtaaggtttctccgctgggatttgaatcccgacaaatcgcctttttaatgaattcatttcattttaaaatttccttgcccaaaatctctcaaaatggaaatgccgtcctgtttcttcctccttttctttcttatgctttttgtcagcccttctcggcaccaattagtcactgttagcaactcatcgtcttcgcccattggcaccaccgtcgcttttggcactccttcgccgatcatcccaatctctactgcaccctccacgaatggcactgccacttttggcgtccctccgccgatcagtccgccgattaattcttcgtcctctctcccatcaactggtcctttggaagcatcggttcagttaaaaatcggcttcctctttgctaacggcacccaacggttgcgaatgcttttcggctttggccaatccgcgcccgccgtcactttggcactcgaacgggcgaggcaggagcacctcatcgacagcatcaacttcacgtgggcaattggaatgaatttagaaactcacaattttcaaatcactttttgcaaatttaaaaatctccaagcgagcggaaataattggccgtaaatgccaatttcagttacacgtggcgaatgtgcggctgctttcagccttgggctgtcggctacgccactcaactggttctgacggaaaatgtggacgctttgatcggtccgccttgtgtgaccagtaatgcctttttgtttgacactttgccaaaaattgcgtaaatgaaaaaggtgccatcgccgcgggatacgtggcctccttctacaacattccactgtatttgtggggtgctactgtggcctcggaattttacaacactaccgtataccctacactgaacaacgtgaacgttaactcggacatgtcagtggagaaaatattcttcgccttccatcccctaaaattattatttctactaataaaataaactaaaatggatttgctttacgagccgtcaccaaatcaaatgaccaatgatttcttattaatttcaacaattattgcaggttggcgttggccttacaaagtgtgttggtgcaattcaattggacagaagtgtccttcgtgtacactccggacaatgagcgaatgtaagaattattttgaataattaattaattaattagctattaatataatttaattagggtctgtaactcggtgaaacagagtctcacaaatgtgctcaacgtgaccaatgtgaccattgttttccagcatcagatggagtccaatgtggacagtatgaaggcgacgctgagaaatctgcgcaaccgatcgcgaagtgatgggataattaatttgatagcatcgctaattaccatcaattagttgtgctttcctgtttcgatgtcgaagttgaacgtcgcaactttctgttgtccattttcgacactggtcttgctgcggacaacgaatttgtgttcatcatgggatccctgcgcaaccagggcatgctccagcagggtaattaggcaaatggccaaattaggggagggataattaaaggggcaattgattagacctaacagtgcttcagttgcgtcgcgtgaggacggcagtgtcaaatatgtgaacaattggatggacaaaaacagcccaggcgatggccgcgactcggacgcactcgccgcgacaaaacacgtcataatggtcaatccacggcgaagccaagcaaatttaagtgccttagtgtcgttcagattgacctggaaaaccaatcgagtgatcagcttaacgaattcaaccgaaatttgagtgcgaaattcggcacttatccctttttctgcaacggaagttgcatgggcggcgcaacagaacaatcggttgcaatttgcacgaaaaatggaaattataaaaaaagataatgctttttagccgtcgcaatacgccagggctttgttcgacacaacatacgcatattttagagcattgaatcgcacaatggaaaagcgcaaatcgaatgggagggattgttgcgcaacggcacggaattgaacgcagaaactgccgggacgacctttcagggtgaggtggagaggaagaaaaggaggggggggggtagaagcgaatttgggagaggaaccaatggataaagcctggcaaaatgatggagcattaaggcgagaccggacgcatcacttttgacgcccacggcaaccgccagccgaccttttttgtgacgatgctaaacgcactgaatgtgcccactgttatggtgaaagtgaacattaccaacggagtattggtgcgaatggattaagcggcggcggattcttatttttgaaattcaacagaaaatggaacggctgtacggcagtgaggcgtcgctgtgggtcaattggggcggctttcggccgatgaccacgccgttgtgcggctacaacggcacaatgtgtggccaaaatgtgacggtgtacattctgatcggcgttacgcttatgttgctgttgctggtcgccgctttgcttggcatcggatacgcaattcggtaaacagaggaaaagcatcggactgtgccgatcaaaaattgatttaaaagcaaagccaatggtcgataattggaccaaaaggaatgttaacgccaaaatcactcattaattataaattttaagcttttaatgcattaattggaccgaatttctccgaattggcacaacttaagcccattaatccgccgattttgccatttgcagggagaaaatgcgcgagaagcagcgcctgacacgcgagtgtttgatcccatttgcagagctgcgcaacctgaaagagctgcgcagttcggaggaactgaagtcggagacggagaagagcatgcggagcatgcgtagcagtcagtcgggtgagcgtacggtagcgaccattcgctcaaatatggcatatggtaacgcaggaagcacacggcttacggtcggcagccacaaagcgcagcgggagacggccaattgcgcgttctttgtgttcaaccgggaaattgtgctggccgtgaaataccacgtcagggtgcgaattatgtccgaagatttggccttcattaggaaggtaaatgggacaacggcaggagaccatgttggaaaatgtgactaattacctaaagatgggtcaatcgttaccatataatatatacttccgtcgttacggtacagctgcggcagttggaccacgacaacatgaacaagttgtacggcgtgtgcaccgatgggccccttttgttcgcaatttggcgcaattgtcagcgagggacattaaaagtgcaatttgacagaaaataacatttgttcagtaaaataacatgtcatgtcattaaggaactgatcgccaaggagcaatacgttggggacaattgtgtgatgtttgctctgatgcgggacattgcaaatgtaaacactcacatgggaagtgctttggcattggcacttcccatcagctgtttctttcctaaatcggggccattttcggggatctccgacctcgacattcttctgtcataattggcggcttgccgtttccaatttcttctgcataaattcgaatttcggtcactccatccccagggtctgctcgccatccatcaatcgttcatcggagcccacgggctgctctcctctgaaaattgtctgatcaatgaccggtggcaagtgaaaatcagcgactttggcctgaatatgatcagagaaagtcaaacgctgtcgaagaaaggttggcattgggtttacgaagtaattcgcgtaatttgcgccatttaaagcacttttgtggacggcgcctgaacttttgcgagaaaacaatcggaagggaacaaaagagggcgatgtgttcagttttgcgatcatttgtgtggaaatggtgaacagagagacggtgtggaacggagtggaaagggaccaagacatcgatggtgggagggcggaggaggggatttggaggggaaatttcggcactcggcttttccttttccatcggtgccattgtccgacctttctttagaaatcctttatcggctcagacgcaccaacaccacaatccctcaccgtccgcagcttcatccccgcgcagagattaaccaaagtttggtatgcgcacgcatttctcatggcattttgctgctgctattctgtcttataccatatccccacttaccgtaagcttcatctgatcagagactgttggtccgaagtgccgtccgaacgtccgcgcatggacattgtgcgaacgatgctcaaacagatggtccaggacgggtcagtaagtcaacagcggagcaatcaatggacacgcttgtgatgctcgaaagtctcgagagagcagtctcggggttttttaatgcccttgaccgggtcaaagcttgagtatcggcgatcttaagtagaacaagcgcttttccgatccgcttttgcccccccccccaatttttgcccatttcctttctcttcagcagtcaaaatctgatggattacgtgttcggcatgttggagcagtacgcgagttcgctggagcaggaggtggaggaacggaccaaagagttggtggaggagaagcgcaagagcgacattcttctctaccggatgttgccgcggcaggtggcggacaaactgaagataggcgagtctgtggagccagaatccttccaaatggccaccattttcttctccgacgtcgtctccttcaccactttggccggcaaatgctcgccattgcaagtgccgtaaaaaaagaaaatttaccgctacacttttggaaaaataaattgtcgcatatttttcagaccccaattaatcaattaatttaaatcaaacaagattgatcaaaatgggaaatactgatcaattacattgatcaaaatggggaggaatcgactgatcaatcccatccgtccccacccctctcttctcgtttaggttgtgaatctgctcaacggtctgtacacagcctttgacgggatcattgacactcatgactgctacaaagttggtaagtgaccagcgaatacctcactaatcgtcttcaactctctctcctcctattttattgctttgtattagttctaatttgccattttaattgccccccgccacttctcccctcagaaaccattggcgatggctatttggtctgttcgggcattccgaagcgcaacggcgaccaacacgcgaaagaaatagccgaactttcgttcgccttccttcgcactgtgtccagcttccgtgtcgatcacctcccctccgaacgggtcaaccttcgcattggcttccattccggttcgttttcgctattaccgaatcaaaaagactcccaacggcaccccggggcattccctggcttcttcccaatttggcatttctttacgaatgccatggttaattaattaattaggaccagcggtcgctggcgtcgtcggactgacaatgccgcgctattgtctctttggggactcagtgaacacggccagccgaatggagtcaaacggaaagggtaaataaacgggagaaaaagcgaaacaaaacaaatcaaattaatttggcaaccattttcagcaggccgagtgcacatttcatcaagtgccaaccactttttgaccagtgtaatcggcggatatgtgacagagccaagaggcgaagtgattataaaggtcattaattaaggatgggggcaatggctccaattagtcggttaatcccattattagggcaaaggagtgatggagaccttttggctgttagggcgaattggagaggcacatttgtcggagggcacagcggaaagaaatgcgagtgccgcaacgagaaaatgaagaaacatcacacggcattccctctgatcactcattttaatgactcgaaatcattgaccaattttaatgaattttaatctcttttattattatgatagcgcaatttttgcgcacatttaagcgataacaatttttatattaaagttccccttaacaaatttactattgtaaatactgtctcgaatacaaaaaatgtataatttactatttttctcacgatattcatggcaaaaaggtcatccctaattattaaacgttactctttcatgtgttcattaacacacaataattttttgtctcagatttactaattacatatacaataagaacaaaaatattttttggaaaaagtttacaatataaagataatattaaaggagcaattagtgaaaatgcatataattagaaatgatcgagtc

SEQ ID NO: 85120 - DNA, 1500 bp, Heterodera glycines
attttgtccgtcctttgtcccactcaaaaatgctcagtcgaatgttgtcctcggctgttgccgtccctcggatgtgtgaatcaaacaaaaaattgttgaggaaaggcgcgactttcgttggtcttctctgtgggcgaatggccaactcaactttcactgccacagttacccctcctcatcggctcttacgtccgttgcatatcaacgaaaaaaaattgttcggacctggtcccagtaacatgccaccactcgtccaggagggactcgttcaaccgttgcttggacatatgcatcccgagttcttcgaaattatggatgatgtgaaagccggcatcaaatacattttccaaactgagaatgcgctgaccttcgctgtttcgggcactggccatgccgggatggaatgtgccattttgaatctgctggagcctggccagaccattttggtggtgcaaaacggagtgtggggcttgcgggcagcgaatttggcggagagacttggcattaaagtgcatcgattggtcgtaccggagggagaagtgattaatttggacgattttgccgaggctgtggataactaccgtccccaagtggcattcgtttgtcatggtgaaagttcgaccggagtcgtccatcccttggagcgttttggcgatatttgcaatgcatatgacgttcttttcctcgtggacaccgtcgcctccatttgtggtgcccctttccatgccgatgcgctgaaagttgattgtgtgtatgccgcaactcaaaaagtgttaaactgcccgcccgggttggctcccatttcattcagcgaaaaagcactggagaaaataacgaagcggaaaacgcgagtgccctcattttatttcgacgcgttagagttgggcaattattggggctgtttcgacgagccgagaagataccatcacacggcgcccatttcgttggtttatgcgctacgcgaaggtctttcagcagttgcccaggaaggaattgggcacatggtaaaccgacacaaaatcaatgcaaaacttttgtatgacgcgtttgaccaattgggactggaattgtttgtccaaaaagagaataatcgtttgccatgtctcaccaccgtacgcgttcccgaaggtgtcgactggaaggcggtgcaagacaaactgatggcccaaggatttgaaattgccggcggattgggaccaacggcgggtaaaatatggcgcatcggaacattcggaatcaattcgaacccggaggacattgagtcacttaaacaagcattgaaaggagcactttacgaacaagaggaaaagggacagtcggaccatttcaaggcggccatctgatgacagagggaaaaatggcaaaataaattaagacggttaattaacaatgggtagatcattaacataatatatcttttggttattttggcacatttcactatgaacatgtcaatttttaaaaaggacggacaataaagttaaacggcaacaaaaaaaa

SEQ ID NO: 85121 - DNA, 1040 bp, Heterodera glycines
gttgtgctgtaatttgtaatttttgaattttcttctaaaaatgaccgccgccgaaattgagctcaaaacttgtgagcaaaaaaaaacgaacggactgacaataaacaatgcgcacgaagagacaaaaatggagccgattgaagaagcgaatttgaaaataattgacacggacatcggatattgtcgctacggaaagggcccagtcaattttctgttcatttgcggtggcgtcggctgttacaaaaaagattatccggagtgtgtactgcgtgcctttgaccccaactttgccaccataatttgcatcgacccgccaggatacggcaccagtcgtccgcccgatcggaagcaggaggtgaaccgttgcaaaatggacgccaaatactgcttgaaactgatggagaccctcaaattgacgccgtttgttgtgttgggatggagcgaagggggcagaacatcgatacacgtggcaggccaagggaagggcctggtcagccacatggtactgctttcgtccggctcccaagtggacatgcggggagacttggcattcaaaggcatgcgaaacacggaccaatggatgcccgcggcaaaggcaccctatttggagcattattccaacgaatttctcaaggaacaatgggccggactttgcgatgttgtagcaaaagtgtacaaggacctcggaggaagttttccatgcgaccgcgttctaaacacactgaagatccccgttttgatcgtcaacggtaacatggaccggttcgtccttgacccgagcttgatgagcaagaaattggaaaatgccaggattgaaatacatgcccagggagggcacgaccttcacatcaaatacccacgttggtttgctttaaaagtgactagttttgtgaaggaatcggcgaaaagtgatgtgaaggcgaataggaaatgaaagtaaaatcagtttcactgcttatattcaacccaatttcactttgtatttttcactgtgatcgtttcgttacaaatgctgccaaataaagcgcgacaaacaaaaa

SEQ ID NO: 85122 - DNA, 1243 bp, Heterodera glycines
cgcattttcaagggccgtgtggagcgcacgagacaccacaggaaccgcggtgctttacgggcgcaacatccctatctcaggctgagccacttccaggcacgcacaccctaaaccagaaaagagaactctggctcggactccacacgacgtctgcgagttcatttgcgttaccgcgcaaaacagctcttgcgaaccgtcatttccctagcctggcgtgggaatgttaacccacttccctttcggcaaccggatggaccaactgcgcaagcacagaaaagtcgtcatccgtagtgtgttacggcgttagccggtgccttaggatcggctgacccacattcaactgctgttcacgtggaacccttctccacttcagtcttcaaggatctcacttgaatatttgctactaccaccaagatctgcactggtggaagctccggccgggcccacgcccaaagccttcaacgcaaccactacgaacctcctacacgtcatggccagactacgcgacaagcacgtgtacaagccaatgacggtggagtataggtggcccgctccagcgccatccattttcagggctagttgattcggcaggtgagttgttacacactccttagcggattccgacttccatggccaccgtcctgctgtctatatcaaccaacaccttttatggggtctaatgagcgggcactttggcaccttaactccacgtttggttcatcccacatcgccagttctgcttaccaaaaatggcccacttggagctcaaacattcaacgcctgggttcagagtcaagcaaccctggcttcatacccatttagagtttgagaataggttaaggacatttcgtccccaagtcctctaatcattcgctttaccgagtataactgcttaacgagctccagctatcctgggggaaacttcggagggaaccagctactagatggttcgattagtctttcgcccctatacccaagtcagacgatcgatttgcacgtcagaatcgcttcggacttccaccagagtttcctctggcttcatcctgctcaggaatagttcaccatctttcgggtctcagcgcatacgctctgtctccgccccatcgcatgcgatcgagacgggactatgttgcgccccaacaccgcagtgccagggatcacacatcagctccgtaagaagccttcactttcattgcgcctttgggttttgaacacccaatgacttgcgcatacgctaaactct

SEQ ID NO: 85123 - DNA, 3762 bp, Heterodera glycines
gggatttgaatcccgacaaatcgcctttttaatgaattcatttcattttaaaatttccttgcccaaaatctctcaaaatggaaatgccgtcctgtttcttcctccttttctttcttatgctttttgtcagcccttctcggcaccaattagtcactgttagcaactcatcgtcttcgcccattggcaccaccgtcgcttttggcactccttcgccgatcatcccaatctctactgcaccctccacgaatggcactgccacttttggcgtccctccgccgatcagtccgccgattaattcttcgtcctctctcccatcaactggtcctttggaagcatcggttcagttaaaaatcggcttcctctttgctaacggcacccaacggttgcgaatgcttttcggctttggccaatccgcgcccgccgtcactttggcactcgaacgggcgaggcaggagcacctcatcgacagcatcaacttcacttacacgtggcgaatgtgcggctgctttcagccttgggctgtcggctacgccactcaactggttctgacggaaaatgtggacgctttgatcggtccgccttgtgccatcgccgcgggatacgtggcctccttctacaacattccactgtatttgtggggtgctactgtggcctcggaattttacaacactaccgtataccctacactgaacaacgtgaacgttaactcggacatgttggcgttggccttacaaagtgtgttggtgcaattcaattggacagaagtgtccttcgtgtacactccggacaatgagcgaatggtctgtaactcggtgaaacagagtctcacaaatgtgctcaacgtgaccaatgtgaccattgttttccagcatcagatggagtccaatgtggacagtatgaaggcgacgctgagaaatctgcgcagccgatcgcgaattgtgctttcctgtttcgatgtcgaggttgaccgtcgcaactttctgttgtccattttcgacactggtcttgctgcggacaacgaatttgtgttcatcatgggatccctgcgcaaccagggcatgctccagcaggttgcgtcgcgtgaggacggcagtgtcaaatatgtgaacaattggatggacaaaaacagcccaggcgatggccgcgactcggacgcactcgccgcgacaaaacacgtcataatgattgacctggaaaaccaatcgagtgatcatcttaacgaattcaaccgagatttgagtgcgaaattcggcacttatccctttttctgcaacggaagttgcatgggcggcgcagcagaacaatcgccgtcgcaatacgccagggctttgttcgacacaacatacgcatattttagagcattgaatcgcacaatggaaaagcgcaaatcgaatgggagggatttgttgcgcaacggcacggaattgaacgcagaaactgccgggacgacctttcagggcgagaccggacgcatcacttttgacgcccacggcaaccgccagccgaccttttttgtgacgatgctaaacgcactgaatgtgcccactgttatggtgaaagtgaacattaccaacggagtattgaaaatggaacggctgtacggcagtgaggcgtcgctgtgggtcaattggggcggctttcggccgatgaccacgccgttgtgcggctacaacggcacaatgtgtggccaaaatgtgacggtgtacattctgatcggcgttacgcttatgttgctgttgctggtcgccgctttgcttggcatcggatacgcaattcgggagaaaatgcgcgagaagcagcgcctgacacgcgagtgtttgatcccatttgcagagctgcgcaacctgaaagagctgcgcagttcggaggaactgaagtcggagacggagaagagcatgcggagcatgcgtagcagtcagtcgggaagcacacggcttacggtcggcagccacaaagcgcagcgggagacggccaattgcgcgttctttgtgttcaaccgggaaattgtgctggccgtgaaataccacgtcagggtgcgaattatgtccgaagatttggccttcattaggaagctgcggcagttggaccacgacaacatgaacaagttgtacggcgtgtgcaccgatgggccccttttgttcgcaatttggcgcaattgtcagcgagggacattaaaagaactgatcgccaaggagcaatacgttggggacaattgtgtgatgtttgctctgatgcgggacattgcaaatggtctgctcgccatccatcaatcgttcatcggagcccacgggctgctctcctctgaaaattgtctgatcaatgaccggtggcaagtgaaaatcagcgactttggcctgaatatgatcagagaaagtcaaacgctgtcgaagaaagcacttttgtggacggcgcctgaacttttgcgagaaaacaatcggaagggagcaaaagagggcgatgtgttcagttttgcgatcatttgtgtggaaatgatgaacagagagacggtgtggaacggagtggaaagggaccaagacatcgatgaaatcctttatcggctcagacgcaccaacaccacaatccctcaccgtccgcagcttcatccccgcgcagagattaaccaaagtttgcttcatctgatcagagactgttggtccgaagtgccgtccgaacgtccgcgcatggacattgtgcgaacgatgctcaaacagatggtccaggacggcagtcaaaatctgatggattacgtgttcggcatgttggagcagtacgcgagttcgctggagcaggaggtggaggaacggaccaaagagttggtggaggagaagcgcaagagcgacattcttctctaccggatgttgccgcggcaggtggcggacaaactgaagataggcgagtctgtggagccagaatccttccaaatggccaccattttcttctccgacgtcgtctccttcaccactttggccggcaaatgctcgccattgcaagttgtgaatctgctcaacggtctgttcacagcctttgacgggatcattgacactcatgactgctacaaagttgaaaccattggcgatggctatttggtctgttcgggcattccgaagcgcaacggcgaccaacacgcgaaagaaatagccgaactttcgttcgccttccttcgcactgtgtccagcttccgtgtcgatcacctcccctccgaacgggtcaaccttcgcattggcttccattccggaccagcggtcgctggcgtcgtcggactgacaatgccgcgctattgtctctttggggactcagtgaacacggccagccgaatggagtcaaacggaaaggcaggccgagtgcacatttcatcaagtgccaaccactttttgaccagtgtaatcggcggatatgtgacagagccaagaggcgaagtgattataaagggcaaaggagtgatggagaccttttggctgttagggcgaattggagaggcacatttgtcggagggcacagcggaaagaaatgcgagtgccgcaacgagaaaatgaagaaacatcacacggcattccctctgatcactcattttaatgactcgaaatcattgaccaattttaatgaattttaatctcttttattattatgatagcgcaatttttgcgcacatttaagcgataacaatttttatattaaagttccccttaacaaatttactattgtaaatactgtctcgaatacaaaaaatgtataatttactattaaaaaaaaaaaaaaaaaaaa

SEQ ID NO: 85124 - DNA, 7127 bp, Heterodera glycines; identical to SEQ ID NO: 85119

SEQ ID NO: 85125 - DNA, 3499 bp, Heterodera glycines; identical to SEQ ID NO: 85112

SEQ ID NO: 85126 - DNA, 3008 bp, Heterodera glycines; identical to SEQ ID NO: 85114

SEQ ID NO: 85127 - DNA, 356 bp, Heterodera glycines
ggaatcgaaggtgttgtaatcttttttcctttcttcacttgtaaatttatttaaattttcaatttttttagctttttttcgaaaatttttttgtctttttttcggcaggcactgcctctgacgatgttttttatttatttagaaaaataaattgattttttttcttgttgatttattttaattatatttcatccttaaatttttttaataaacattttcaaactttcaccttattaatttaaggcgaattttgccttttttaataaattctcttgtgaaaaggcaaaaaataggctcttttaaatatgcctatttaaattactttcattgctttcctttcgcatacgaccatacca

SEQ ID NO: 85128 - DNA, 136 bp, Heterodera glycines
tcgagactgggaaaacccaggacgcacccaacttaaccgccttgcagcacatccccctttccccagctggcataacaccgaagaggcccgaagcgatcgcccttaccaccatccgcacagcctgaatggcgaatgg

SEQ ID NO: 85129 - DNA, 163 bp, Heterodera glycines
ttcactggccgaaattttacaacgtggcgactgttaaaaccctggcgtaacccaaataaatcgccttgaatcatatccccctctcgccagctggtgcaatattgaacaggtccgcaactatcgaccatcccaacacctacgcaccctgaatggggaatggcac

SEQ ID NO: 85130 - DNA, 480 bp, Heterodera glycines
  unsure (1)..(480): unsure at all n locations
gttcgaagcggtgaagcagatgtacgacggagtgaaacacctgatcgaattggagaagaaagcataatgggaggaccgatctatgatgatgactttatattgcgtaatgtggagatttgctagttgttctgaatctcttaggctttaactatttaattattgtcccaaaatcgtgcttcatccgtatgattatttccgtgcataaatttgttcgtgttcaaaannnnannaaaaaaaaaaaaaaaaaaaaaaaaaaaaaaaaaaaannnnnnaattcccccnnnattacaactgcttaaaaaaaaaaaannnaaccactctaaatgacccacgtttacntacccctgcatgcaacatcatacctctcctataatggcccctaaatttcattccctggccgccgttttacaaggtcccgcctgggaaaaccctggggtccccactttaagggcttgcagccaatccccgtttggcagttgg

SEQ ID NO: 85131 - DNA, 484 bp, Heterodera glycines
gttccgttttcgcgtgacgaccgtcttggctggctgactttctgtcctaccaacttgggaacgactgttcgcgcgagtgtgcatatccgacttccgaagatcagcgcaaaacccgacttcaagtccagtgttgactcagaacaactaagctgatcgcacggtcttgtaccggcgacgtgtctttcaagtgtctgccttatcaactttcgatggtagtgtatctgactaccatggtgatgacgggtagcggaggataagggttcgactccggagaaggggcctgagaaatggccactacgtctaaggatggcagcaggcgcgcaaattacccactctcaacgcgaggaggtagtgacgagaaataacgagaccgatctcttatgaggccggtcatcggaatgggtacaatttaaaccctttaacgagtatctatgagagggcaagtctggtgccagcagccgcggtaatccagctctcaaatgca

SEQ ID NO: 85132 - DNA, 378 bp, Heterodera glycines
gtttatatggttccacatttattgttgattttgatgtttgttgataataaatgttttaatttgtaaaaaaaaaaaaaaaaaaaaaaaaaaaaaaaaaaaactcaaaagaagttaccactgcttaaaaaagcaaaaggaggccgcatcaagaggaaccaagattacacaactcttgtgttgtcgacgtcattgctcttcaataacgtcccctaaaatcacttcactccacgtcgttttacaacgcctatgactgggaaaaccctgaagatccccaccttaatcgacttgcagttcctcccccttttcccccgctggcgtaatagcgaagaggtccacaacgatcgcccctcccaacagttgctcatcctgaatggccaa

SEQ ID NO: 85133 - DNA, 145 bp, Heterodera glycines
atttttacaactacatgactgggaatgccctggggttacccaacttaagcccgttaaaacacatccccctttcgccaaaaggcgtaagaacgaaaacgcccttacctatcgtccttcacaacagttgaggaccctgaatgtcgaa

SEQ ID NO: 85134 - DNA, 157 bp, Heterodera glycines
ttcactggccgtccttttacaacctcctgactgagaaaaccctgccgttacccaacttaatcaccttgcatcacatccccctttcttcagctggcgtaataactaaaaggcacgccccgatcgcccttccctccagttgcgcaccctgactggcgaa

SEQ ID NO: 85135 - DNA, 1059 bp, Heterodera glycines
atgttggttcaactcgtcctccttgccatcattggcatttcctttgtcggtgctgccgcgccgccgtacggccaattgtccgtctccggcaccaaattggttggctcaaacggcaaaccggtgcagctgatcggcaattcgttgttctggcaccagtggtacccacaattttggaatactgaaacagtgaaggcactcaaatgcaattggaattccaatgtcgtgcgcaccgcaatgggcgtggaacagggcggctatctgagtgacgcgaacaccgcctaccgactgacggcagctgtgattgaggcggccattgcacagggcatttacgtgatcgtcgattggcacgcgcatgaggcgaacgcggacaaagcgattgaattcttcaccaaagttgcgaaagcgtacggctccaaccctcacttgctttacgaaacgtttaacgagccgttggacgtgtcttggaacgatgtgcttgtcccgtaccataaaaaggttatttctgcaattcgtgccatcgacaaaaagaatgtgatcattctcggcactcccaaatggtctcaagatgttgacgtggcggcccaaaatccgatcaaaggattcggtaatttgatgtacactctccacttctatgcgtccagtcactttgttgatggacttggaaataagcttaagaccgccgtaaacaagggtcttccggtgttcgtcactgagtacggtacatgcgaagcgtctggcaatggtaatctgaataccaattcaatgtcaagctggtggagcctgctggaccaactgcaaatttcgtacgtcaattggtcaatcactgacaaaagcgaagcttgtgcagcgctcactggcggaacatcggctgccaatgttggcacttcctcccgctggacgcagtctggcaatatggtagcttcgcaacacaagaaaaaatccaccggtgtgaactgcagcggtggtggtggcgctgctgctaagccagctgctaagcccgccgctaagccagctgctaaatcgaagggaaagtcttccaaagccaagaagtccggatga

SEQ ID NO: 85136 - DNA, 950 bp, Heterodera glycines
ccaagtgattcctattcaccacctacctgctgtcctgttgggctagcgttggcaccaccaaatgcccccgtccgctgatgggcacaggtcgttcgagatgacttgtggacgctgcccaacattacggggcagctgcctcacgagccatgcttttggggtgcttccatacgttggagctgtggtataccgctcagtgctgcacatgtgaaagcctgtgtatggctgctgcgtggcaatgtgtcggtggcgggccgcctcgcttggctggttcgctgcgccaatgtgggatgcacgctcgtggggcgacctaacggctgtgctggcgtctgtgcgtcgttgagcggttgttgtggcaggcacataacacactgactggggatggtggtttcgttcccggtcttacgtgccgtaactagcggtgtgtttgtgcttgctgctacgtccgtggccgtgatgagacgacgcggtagggcccgtgcttggcctagcacgtggcttaagactcaatgagtgtcagctcgggcaccgccagctttttctttttttttcattatttttttttacacttctgttgaagaatgaattctagtcttatcggtggatcactcggctcgtggatcgatgaagaacgcagccaactgcgataattagtgcgaactgcagaaaccttgaacacaaaacattcgaatgcacattgcgccattggagttacatccattggcacgcctggttcagggtcgttaccataaaatgcactgcttgtgcgttgcttcgtgggatcatgtacttgtacgtgttcttacgttacttgctcagctcggctgtggggttttggtgtgctggcgcgaacttgtggttctaattcgcgttttacggaccgtaactcaagcgcaccaatgctttgcatgctgtggcggactgcctggattactggcattcctgctttgatt

SEQ ID NO: 85137 - DNA, 368 bp, Heterodera glycines
aaaatttgaatgctgaaattgcagagctgttgaagaaggaagctttgaatgttcagcagacatcagtccgcattgatgaggacaagcaacacaaattgcagtctgcattgggactttccaccaagtatgcagatatacatgaatagaagagacttgtggggattgcttgtagttgcatgaagaaccaacttccctctgacacaatgcatgctattttgctactatgttccaatcttacaaagaatcattctgtcgctcttaccttttttgacgctggtggtttaagtttacttctttctctgccaaccagtagcctctttcctgggtttgacaatgttgctgctggtattgtccgtcatgttatcgaa

SEQ ID NO: 85138 - DNA, 173 bp, Heterodera glycines
ttcttggtcttctttttcttttcgtccccttcctcttttttcttctcggcttcgtcatctgacacgtcatcttctggcttctcctcctactcctttgcttcatcttccttcttctcctcctctgcctcatcatccgaaatttccttgtcacgctccttttccactagcaattt

SEQ ID NO: 85139 - DNA, 344 bp, Heterodera glycines
ttcgttgaaaggagattcaggagatgaaatcggtggctcaggagcatggtgaaattgtcttgctttgtgtgcagaagaaggagcttgagcaggggaatgtactataactggtagtggtcttggtgttttgtatggaggtgcagaaactggttctccacctttggtccaattgaagcttctagaaggtgttgatacaggagagacaacaggtgcttgagcatggaaatgcactatagctgatggtggctttggtgttttgtacacaggtgcagaaactagttctccaccaggtgctggtgattttggtggaggtgctgctggtatgactgggtggaccaatggag

SEQ ID NO: 85140 - DNA, 334 bp, Heterodera glycines
gatttccaccatcgcttcgttttccaatgtttggccgtatcgctttggcacaaattgagcagctgaagaatgggtgcaggcgttgtcgtgctgtctttcggtgcatcgcatcgccgaattgagcagactctcttttggggcgaagcacgccttcacctggcggaagttgccaccgagcgaagtgatatgagattggcacgtgtccaagcatggctccatcgtcttctgatagcggtctttgcacggcttaatctccgcacatttgcactgccttttcatccccgcgggcggttgccgttgcgctgccaccgcttgtcgcgcggccggtcgcgca

SEQ ID NO: 85141 - DNA, 389 bp, Heterodera glycines
atggtaaccaacagaaccatgctaccggacaaacgccgcctggcagtccgaaaggtgggcacggcaacaacaaatcgccaacgacgccgcacggtgccggttcgccacacggcacgcagcatggtaaccaacagaaaaatgctaccggacaaacgccgcctggcagtccgaaaggtgggcacggcaacaacaaatcgccaacgacgccgcacagtgccggttcgccacacggcacgcagcatggacaaacgccgcctggcagtccgaaaggtgggcacggcaacaacaaatcgccaacgacgccgcacagtgccggttcgccacacggcacgcagcatggacaaacgccgcctggcagtccgaaaggtgggcacggcaacaacaaatcg

SEQ ID NO: 85142 - DNA, 450 bp, Heterodera glycines
atgcgcacttttctgttcatagccgtagtcgggttgatgttggccgtcatcttggagaatgtaaatgcgacgccgacaaagggacaatcgctgccagacagtacaaaacgggaaacagaacctaaagaagagtatggtaaccaacagaaccatgctacagtttcaaatgaggtgcagaacgttgactacagacaacaagctcctggaaaacagtcgctagacagtccaaaccatgaaaaagaccataaaaatgagcatgaaaagtatgaagcagcttactttcaaatttcaaatgtggtgcagaacgttgacaacaaacctcggccatctgctgctgcttcacaccttgtgccagtaacaccagggaaagtaggaggagcaagccttaaaatggtgaagaaactgtgtggaacgatgatgccaaccatgaacaaacccaaagctgttgta

SEQ ID NO: 85143 - DNA, 581 bp, Heterodera glycines
atgggccaaatcaatgtatgcgacgacgtttggttggacacattggcatggatcaatcgtgtagaagtcggcatgaagttcgcgctggtcaatgttcggttaaacgctttggcggacaaacatttcaagcagaggaagtggtgcttcggcgagtttcatacctgtgagcggatgacggaagaatcgggcgcagaaatcatgacatcgatcgacggctccgacttcagcacgttgccactgcccaccactccgttgccggacagtgtcgtcggcttccgatcaatttccatttggtacatcaatgaagaggtcgtcaattttctgcgcacaattcgccgtctccttaccaaagacattgcgctggaattctccactttcttcacggaatatcgcagttggaaagtgatggcacaacacatttggccactgttgaaagatgggatcagcaccttgtgcctgaagaagtgtgacttgggccatgctccgtcaaacacgtgtcgcccaccgtgctgtttcgactgtgccggcctggaccgaattcacaacgcaaaatgcttgccccgagtgttcgtcttggttga

SEQ ID NO: 85144 - DNA, 866 bp, Heterodera glycines
  unsure (1)..(866): unsure at all n locations
tccttaagaatgccatctntttggnattttgccccttnattttccccaccaattccctttctnatttccgtcctttngcttcttttctgtctccaattctttcctctcaatgcccttcatcattcggtttttgttcgacgtgacttgagccgacccgcgccggatgatggcgtcgcgtccgcctccatcaacacggaggaggatttgggaggactgaacaccgaatggctaactgacgatcagctgagcgaattggcctctgccgggagtaacgaagaacgaatgataaaaatgaggaccttttatgacaatttggaaggcgaagcgaagaaaggcgcaacgaagaaaatagtggaggaatgctacggatgggtggacgaagtggcgacggaggacgagcgaaacgcactgaagcaaatgcaccaccaaagccatgacgaatgcaaggccaaagtcagggaactgatgggacggctaagtgaggagagaagcgaacaagtggagaatcggatgggtttctgcgaacacgtctattacgggaagatggacggggaaggcgacggaggagcaggaacagctggagacgaacaccaccaccaccatcatcaccacaccaaaagacgggctcacaggcaacgcagagaccaccaccaccaccaccatggcgaacatggacttgaggattatttcaaaacgcatttggcatggttaacggatgagcaaaaagcggaaataagcgggatgaaggagtcagggaaaagccgacaggaaataaagcagaaagtgatcgaattgtacgacgcaaccactggagaagcgcgagaaaaggcaacccgacttgctgaagggcgggtgcccgagagctg

SEQ ID NO: 85145 - DNA, 1002 bp, Heterodera glycines
  unsure (1)..(1002): unsure at all n locations
atgaaaggatttgtttccaaagacattgtttgtatagcaaacatttgtgtacaaaaacaggaattcactgaagcgaccagtgagcctggcctcaccttcgtggctgcgaaatttgatggcattcttggcatgggattttcggaaatttctgtccaaaaattgccgaccgtgttcgacaacatggtcacgcaacagaaagtgccggagccggtgttcgcattttggcttaaccgtgacccgacctctgaatttggtggtgagatcaccattgggggcactgatcagcgacgatttgtggccccaatcacttacacaccggtcacacacaaagcctactggcaattcaagatggattcgatcagtggaggtaatggcaaacttgcgtgccaaaatgggtgccaagccattgcggacaccggcacttccctgcttgctgggcccaaaaatgacattgaaaagattcagaaacacattggagcaattccactcttccatggcgagtatatgatatcatgtgaacgtattcccacactgcccgatgtgacgatcaacatcggtggcaaggcgtacaccgttgaagggcgaggactatgtgctgaaaatgaccagcatgggcaaaagcatatgcctttccggttttatgggcatngatttgccggaacgtgtcggagaactttggattcttggcgatgtgtttattggtcgttactacacggtgttngatgtgggccaaagtcgtgttggttttgcgcaggccaaagacggaaangaaattccaatngagcctcaagtgcgcgattgcgtaaggggaggcgcactttgcttngatcattccaacggagtngacgattcngatcagcagatggtngagggcgattttgtaatgacggactgaagaaaattgattttatttatgcaattttcagttttatacaatttttaatccatgacgaagcctatgagnaaactatttttcctagtctgataattgtaatcaccatg

SEQ ID NO: 85146 - DNA, 840 bp, Heterodera glycines
  unsure (1)..(840): unsure at all n locations
atgttcgacaaaatggagaaggacggggacggaaaaatctcttcggatgtgctgaagcgatttgccaccgccggaagtgccgcgggggcggcgggcgaacgcggagacgaattgctgaaggacatttttaaaaagaaaagtgatggagagacaacagaaactggtgacgcgaaacaacagcaaattgaggaatcactcgattttgccgcatttttggacaaatttgaaatggtcaaagagtttgttgatgaaatcgccagcgcagcggaaaagcaagatgcagaaatccccgctggcaccgaagagggcgacaaaacggacgaccaaagcggcgaagagggacaaaaggaaaccgaaaaatatgagcagaaaacgcgcgaacttatcgaacgggcggaccaggctngcaaagagtacgacgaggtcgccgacaaagtgtccgacttggagaggctaattagagaatcctcctcctatttggacgtagaatttgggccggacagcgcgtgggcaccgctgaagggccaatgcgcggaattgaccaccacccaatacgtgtcaaactgtgcatgttcgaccgaacggtgcaaaaggaccgaaacggacactcggagatcagcctgggccattggggcaagtgggccgggccggaaaacggcaacaaattcgaggctcaacgctatgaacatggccaaacgtgttggaatggaccggagaggtccactttggtgcagttcgagtgcggtgaacagttcgaacttgtggaaaccagcgaaccgtccaagtgcgaatatcactttttggcaaaatctccgaccgcttgtgctaacccggaggagc

SEQ ID NO: 85147 - DNA, 681 bp, Heterodera glycines
atgctgaaggaagtggaagaatggtacgcacatcacaaaaatgatgaacataaaaaagctccagtttttgtgttcaagtgtaaagacaatgtcagtctggtgataaatgttcatcttgatgcagtccggctttccaaggagttgtcaaatatgcttgaagatactgccgacgaaggatatccgaagccaatcccgagtccagttcagaatttcaaaagtgacatcatgctaaaactgattaaattgtgtgaagaatacaagtacaaattcgatggcctaaagaaaacaactgatgtgccaactggagaagtcgcggaggcatcggcttcaaatgtccaagagggtgacgttggggaggcatcggcttcaaaggtcaaggctggaacaattgcggaggaaatccaaaaattcgttcctccgccacacattatgcaatgggacgtgaaaacggaccttgagatggttcgggccgccgacttttataacatcaatcgtttgatcaacgatgattacattgacaatgtgtacgaaatcgtaaaagtcaaatggatcaatggcaaaaccgccgcaggaaatttcgcaagggattcggcgtcgaagagcccgtacccgcccgggacatccgaaatgggcacgagtttgcgaaggagcacgagttgggacgaatcggtccaaggaact

SEQ ID NO: 85148 - DNA, 360 bp, Heterodera glycines
  unsure (1)..(360): unsure at all n locations
atggagtccgacatggcttcttcgagcctggagacgtcgatgaccaactcggccaacatcgcccgacaagccctggaggagttgcccgtgaaacaggtccgacaaatggaacaaattgcggaggagggaaagagcaaaacggtggaggagcaggagagggcactgcgcgagtacgcngagaagaacagcgaaagtgtgaagaaggctgttgaccaagtgttcgtcgccaaggaccgggcggacatcgctttggagacgtacttgaggagccacgctgtcaccttctnccaggaggcgcgaaaggccaacgaccagatnctgttccttgatgaangacaagaaagctttaactttngagga

SEQ ID NO: 85149 - DNA, 760 bp, Heterodera glycines
  unsure (1)..(760): unsure at all n locations
atggtagcggggggcacccaaaaaaggagaaagccccgaaccgaaaaaggaaaaaaagggccaaaggaggaagcccgaaaagggaagaaaccaagaaaggaggggggcaaaccggaacaagctcaagaaacatccaagccccaaaaggggggcccggaaaagggaagaggccaaaaaggaagaaagcaaagcccagcgccccggccgtctttaactgaaagctgccgacaatgcgaacaaaacgggtcaatgactcaagggttaaacaggcaaaagcatcgaaaaaacgcggcccaagcaacggcaaagaaaaccccggaaagagcaggaaaaagcatcgaaagaagtggcagaaaaaggaggaaacgaacagctgaagacggctgtcaccaaaattttggaggcaaaagcgaaaaacgacgcggaattggaaagcgaagtgaaaacgaaaacggcaacnctttccgaggacagcaaaaaggccagcgcagagtcgactttgataatcgaagacaaaaagacgcctttggacgaaaaggtnaagcggacggaggagctgacagccaaaatgtcggacaacacgaacaaggagctgaatctgaacaacagtgccgacgtcgtcgccttcgtcaagtcgtactccgccgtcgccgtgccggcggtggccacggagggcaaagcatgatcaatcagtctgatcggaggattcggcattgttgtgtgatgaaatgtagccaacaacgaaattcattgatcaaat

SEQ ID NO: 85150 - DNA, 702 bp, Heterodera glycines
  unsure (1)..(702): unsure at all n locations
atgaacattctgctgaagtctgttctattcatctctcttctgtcactgtttggtgattgcatgaaaaactcagatcaaattggagtcaaaagaaaatcagcaggaataagaattgaggaaccaaatgatgtaaaaggcaaaggaaaagtcgtcgaaacaagcagaaaaggcaaagaaaaagtcggcgaaaaaataagcgttatgaacacagctgaacgcattgaaaaaatggaccttgcccaagacaaagctaaaatggaaatagacaatatagacaccaatgccaaacccaaacaaaatgaggataaaggcgttatgaacacagctgaacgcattgaaaaaatggaccttgcccaagacaaagctaaaatggatatagacaccaatggcaaacccaaacaaaatgaggaaaatgctcctccaaaatatgttttcatttggagcggtaacaatgagaagaagaaccttgaggttgacctcagagtgatccgtcactccaaaaaactcagcgaattattccatgccaaaagtgatcaatccgtcaatgcaaaacacggaaagcaggaagcattacccggttccgaaacaggaagccgaaaaaatgctcgaanggaagtggaagaatggtacgcacatcacaaaaatgatgaacataaaaaagctccagtttttgtgttcaagtgtaaagacaatgtcagtctc

SEQ ID NO: 85151 - DNA, 553 bp, Heterodera glycines
  unsure (1)..(553): unsure at all n locations
atgaatcccaacggttttttctttgttttagcggtgctctttcttgtcaaagtcgactttttacagtgcaaatacaatgaaccaatggcacgacaggtgctgcaaaagcatgcttcacaatttcagcagcattgtaaaaatgcccgcagaggaagtgccgtggccaaatgttgcagngccatcagaagcataatgggccgattcacaagccaaaaaaaggcaatgaaccaaatgctggccaagtgtaaagcgggcacaacgccaagcgaagcacagcaaatgcgaagaaaattggaaggatcgaataaactgaaggattgtggccagtttaaaagccaaattcagcacaagttcagcgagttgaagcagtactgcaacaatggggcagaaaatgaggaggaaaacgacgaacgatcagagagggagagagaagaggagagagttttagagagagaggaacagcaaaattctaatcaccagcgatcactgataattgccgatcgattgaccggtttggctgatcaagtttttttatggcataaagagttgcgtc

SEQ ID NO: 85152 - DNA, 270 bp, Heterodera glycines
atgttcgctcaaactcttcaacagcagcgcgggtttggcaccagcttcaaatttcctggagagggcaaaaaatcgtcaagtggcagaggcgggaatgaggccggaaatgatgacgatgacctctacagccaaagtgtgaacattgattattcggaagtgatatcatcagatgatgagcaaaatatgtcattgtttaattgtattggctgcatttttgcgccttgtcggttattatgtgtattgtttttcatttatggaaaggtggaataa

SEQ ID NO: 85153 - DNA, 936 bp, Heterodera glycines
atgcttttcattctactggtcataactttcgtccaaattggtcaactgaatgctggcatatgcacatttccaaatccgtcaaaaagtgttacggtccaatcgatgatgactgtttcatcgagtacggactataagaacactttgtttgtcggcggttccggcattttgaacggcgcgtgtgatgtgaacaatgacaaactgaaatatttgatgacattgaagaatggcgtgaccatcaaaaatgccattcttgacacgcccggtttgggcatttactgcgagggcaattgtgtgctggaaaatatttactacaagcgattgtgttaccatgctactgggttcgggtataagagcaccagcacttcatacacttaccaagtgattggcggtgctggccaaggttcacctgacaaatatttcacccaatcgggcaaaggcactaccatcatcaagaatttttgcgctgaaggcaaatacggcaaattgtggtgttcatgcgggaattgtccgttccaaacggctcgtaccgtacaaatttccaacaccgtccttaaggggcccggactttcggttgtctcgcttaattccaactacggtgacaaaatgtcactttcgggactgactttgcatggccaaaaatcagcgagcacaaaaacgtcatacatttgccaagagtacaaaggcctcacttatatggcagccatgagtcctcaagcgaattatgagccaaccaaatcgggcagtggcacatgcgcgtacagtgcctcggcagttaaaattgcgagctaatttggagaaataaatgaagaaataatggagggttgagtgatgaaagtaaatttagaaattaaatgatgttaatacaacctgttaattgtcggacgaatataaataaagattaaaaataatttgcttctaaaaaaaaaaaaaaaaaaa

SEQ ID NO: 85154 - DNA, 2062 bp, Heterodera glycines
cggacacaaaaacccacccgaaaatgttccatttggccgccatcgttgcgctagcggcgctcgcactgcccctggcatcttcagacaagttcagaccatgcctcgagggctacgcacaatacggcaaatactgctacaaggcattcacaaacccggacaaaagcctgccatggtcagacgctaacaaaatgtgcaagactgaaggtgccgaactcgcgtcagtgcacagcgaaacggagcgcgaatttgtgaacatgctcgtccttagggaagcgaacaaaatggaattcaactgcaaacagccgggccgcgccttcttttggtttggcctgaagctgaaatggagcgaaaagaagctggaggatgcaagttggacggatggaaagccggtggactacttgagcccgaccgagtggggcgcgtacaaacggccgttgacgatggacaacgcaggcggggccggctacaacaaagagaacgaaaactgcgttttccttggccaatggccgcgcaaagtgaaggaatatctgtcgctggagacggcgctggacaaaagcggcgtggatgtgctgtggatggacgtggtgtgcgagaagccggaggagtactgggcaccgcacggcgccgtgtgcaaaatgcgcgccaaggaggaggagaagggatacggtaaagacaagtacggtgcaaaggaggaagaggaggaggaggacgaagagcttcgcaagatcaacaagtacgtcaccatcggctcgggcaacttcatctacgccaacaagaacacgtacatgattctcctcctgaaagacttgtacggcaagcagttgaaggaggagagcaggaagaaggtgtgcgaattgtacaatggcgaatatgtgaaggtcaaggacgagccgaaggaggcacaagaatacctggacaaagtgctggccaaggaaaaggagctgtactctgacgccagcgaccacatgttctgccgcttcaccggcatcatcggcgcgtgcggcgagtcgtgctacaaagtgccgttgccaatctgtgccgagggatacgcgtacttcagcgggtactgctacaaggcgttcaccaacgcggacaaagaagtcaaatattcggaagcgcagaagatttgcaagtcggacggggccgaactcgtgtcgatgcactcggagttggagcgcgagtttgtgaatgttgtggcactgactgcggcgaagaaatacgaatacaacgccaaagtgccgggattggccttctactggaccagcatgcagttggagtgggacgagaagaagctaaagaacgccagctgggccgacatgacgccgatggactacttgagcccgatggagtggggcacgaagaagcgtccggtgtacgtggacaactcgaacggcggcgagtacaacaaagaaaacgaaaactgcgtgttcattggccaatggccacgcgagggcaagcagtacctgaagttggactcggcagtagacaagtacggtctggacgtgctgtggagagacgaggtgtgcgagaagccgggcgaggactgtccgcgcggcgccgtgtgtaagaagagggctacggtgggcgaatgctacggcacaggggcgtatctcctggacgcggccgaggaggaggagatgaagaagctgctcaaattcatcactgtcggatccggcacttttgtctatgctgaaaagaacacatacatggtcctcctgctgaaggacttgtacggcaaacagatgaaggaggaggacaggaagaaggtgtgcgcttactacaaggcggagtacgtcactgtaaaggccgagccgaacaaagtgcaagaatatgtggacaaagtgttgtccaagcagaagcagatgtacgcggatgcgagcgaccacatgctgtgtaagttcagcgggacactcggcggatgcggcgactattgcaaaacgggatattgagaagggacggacggaagggaaggaacactttctcattagcatttagtcgtcctttgttttagttaaaatggtgcgctttttctctctgatttattgcataaataaaaaatttt

SEQ ID NO: 85155 - DNA, 819 bp, Heterodera glycines
atgaattcgtccgtcgtttcattttcgctgttactttttgggttattcacaattcgcactgcaaaatcgcaatgcgagaaacattgcactaaaagcaaaccgatgggccaatgcaatgaggcggaagaagtgattctgcgcaactccgactgtgccttcatgaagaaaacggaaacggcattcgaatttgtggtcggaatgaatggccaaacggaggacaaaacggcgcccggggccaatgccaatggggcatttttgtgctgtaaggcaacccaaggaaccgcaacacttttcatcgtcggcgtggccaacaaacggctgatgttggccaaggacgtggtcaattacaagtttcatcaaaacatctcaatcgatgattttgaacgggaaaagcaagtgttggaaagtgtttcggcgcagggacaaaaagccggcattggggacaattatggagaaaaattcttccaggaccaaatggacgccaacaaaatgattcagaaaggctctgtgaagctgtggaccgccaacaaatcgttgcctcctcaaaatgtgccggatttacagaaagatacccggcccaaagtgacggcggcgacagaagaaatgattttggcactgaaggtgtttcaacagtttcgaaagaacaaaaattgttgggcatctgtggaaaaggaactcttaaagtcgcaaagctttttgagtttggccgaacccaacggaaaggacgcaatgcgaaaagcggcggtgcgattgtgcgcaaaaatggaagcgaaaattgaggcacaaattgacgaaacggcaaagaaattgttggcctga

SEQ ID NO: 85156 - DNA, 792 bp, Heterodera glycines
atgattcttttcattctattggtcataacttttgtccaaattggtcaactgagtgctggcatatgcaaatttccaaatccgtcaaaaagtgttacggtccaatcgatgatgactgtttcatcgaataccgactataagaacactttgtttgtcggcggttccggcattttgaacggcgcgtgtgatgtgaacaatggcaaactgaaatatttgatgacattgaagaatggcgtgaccatcaaaaatgccattctcgacacgcccggtttgggcatttactgcgagggcaattgtgtgctggaaaatatttactacaagcgattgtgttaccatgctactgggttcgggtataagagcaccagcacttcatacacttaccaagtgattggcggtgctggccaaggttcaccggacaaatatttcacccaatcgggcaaaggcacaaccatcatcaagaatttctgcgcagaaggcaaatacggcaaattgtggtgttcatgcgggaattgtgctttccaaacggcgcgtaccgtacaaatttcaaacaccgtccttaaggggcccggactttcggttgtctcgcttaattccaactacggtgacaaaatgtcactttcgggactgactttgcatggccaaaaatcatcgagcacaaaaactaattacatttgccaagagtacaaaggcctcactcacatggccgccatgagtcctcaagcgaattatgagccaaccaaatcgggcagtggcacatgcgcgtacagtgcctcggcagttaaaattgcgagctaa

SEQ ID NO: 85157 - DNA, 1009 bp, Heterodera glycines
  unsure (1)..(1009): unsure at all n locations
acctgcctgaactgatgtgttcatttcaaagattaagccatgcatgtgtaagtttaacctgccagacagggaaactgcgtacggctcattacaccagctataatttacttgaccttgacttcttacttggataactgtggtaattctagagctaatacatgcaccaaagctccaatctccccagagcggagcgcatttgttcgccacaaaaccaagcgccctccgggcgtccagtgttgactcagaacaactaagctgatcgcacggtcttgtaccggcgacgtgtctttcaagtgtctgccttatcaactttcgatggtagtgtatctgactaccatggtgatgacgggtaacggaggataagggttcgactccggagaaggggcctgagaaatggccactacgtctaaggatggcagcaggcgcgcaaattacccactctcaacgcgaggaggtagtgacgagaaataacgagaccgatctcttatgaggccggtcatcggaatgggtacaatttaaaccctttaacgagtatctatgagagggcaagtctggtgccagcagccgcggtaattccagctctcaaaatgcatagaattattgctgcggttaaaaagctcgtagttggatctgtgctagccgtccggtgcacactttgtgtgttactggtttggttggcttttctgccggtctntccccggcgttggcctttaccggtcggcgtcggtgggctggcgagtttactttgaacaaatcagagtgcttcaaacaggcgtttcgcttgaatgttcgtgcatggaataatagaagaggatttcggtccgattttattggttttgctgaccgagataatggttaacagagacaaacggggccattcgtattgctacgtgagaggtgaaattcttggaccgtagcaagacggactacagcgaaagcatttggcaagaatgtcttcattaatcaagaacgaaagtcagaggttcgaaggcgatcagataccgcccat

SEQ ID NO: 85158 - DNA, 659 bp, Heterodera glycines
gtttgaggtttctttttatttctaaacattatgaagaagtttgactatctcgtcattggcggcggttccggtggcatcgcatcggcacgccgtgccgcggaattcaaagtgaaagtcggactcatcgagtcggagcgccttggtggcacatgcgtcaaccttggatgtgttcccaagaaagtgatgtacaacaccgccatacatgccgagtttctgcgggaccatgctgactacggcttcgactcaatgaacgtaaaattcaattggagcaaaatcaaaaattcccgtgacgaatacatccgccgtctgaattccatgtatcagaccaacttggaaaattccaaggtggaaatagtccgtggacgggccaaattcaacaaagacggctctgtcgaagtctccagaagtgatggctcaaaagagacatgtcagggtacgcacacactgatcgcagtcggcggtgcgccgcggattccgaaggacgtgccgggcgccaggtatggcacgagcagtgatggattttttggctttgagcaaatgcccaataaaaccgtcgtggttggtgccggacacattgcagtcgaattggcatcaattttggctgaccttggctctgaaacccatctgctgatccgttatgatcgtgttctgcgcagtcg

SEQ ID NO: 85159 - DNA, 1052 bp, Heterodera glycines
agtttgagaatggaaaaaggaatcagttcggctgtgttttgtggacctttctattcgtcctggccgacttggccgcttccttcggctccatctgtttccacggttcctcgccgtcggttggacatttttccgatcagttccgcgccccctatctgtttaaccgttccgttttcgactttttcgtgatctcagtgctcagatcgtttttcatttcgcttggatgtgccatttgcatcttcaaaaatgcccaagccccccgaactctcgctcaactctctcaggcctcatttggcctttgcattttgctctgttccttctcgcctaccaaatttcttgcgcttagcgacaactcaggccctgaccatcccggcactctttttcccggcgacattcccctcattctcgccaatttcatcttttccatcaccgcccatcgcctttggctgtttttcttgcacacggcacaaaaaaatgaatatgaaaggatggaggaggaagaggaggaggaagaagaagaggagggcaatgaacggattgagacgcgaaatggggcggtgaaaggcaacgtgcgcacttttgtgatcatccttcggctgcttcagtactgccgtaatgaatggttttggcatctcagcgggttcacttggctgttcatctactcactgactcgtattttcatcccctacttcaccggccaagtgatcgccagcgtcgtctcttcctccggcgaggaatacgcttctctgatctcttccgtcaaactgatgcttttcatctctgtcatttcggcaatggccggaggtcttcggggcggttcctttgaatatgcttactctcgcatcaatcgggcaattcgctataatttgtttgcttctttggttcgccaagaagtcgcctttttcgacaaccataaaactggcgaaattacttcgcgactgaccgcggatacgaccacaatgtcggatacaatcgctcttaacgtgaacatctttctgcgtaacactgtccaaatgggcggttcgatgctttttatgatgactctctgctggcgc

SEQ ID NO: 85160 - DNA, 975 bp, Heterodera glycines
agcccccaatcgccggacacaaaaacccacccgaaaatgttccatttggccgccatcgttgcgctagcggcgctcgcactgcccctggcatcttcagacaagttcagaccatgcctcgagggctacgcacaatacggcaaatactgctacaaggcattcacaaacccggacaaaagcctgccatggtcagacgctaacaaaatgtgcaagactgaaggtgccgaactcgcgtcagtgcacagcgaaacggagcgcgaatttgtgaacatgctcgtccttagggaggcgaacaaaatggaattcaactgcaaacagccgggccgcgccttcttttggtttggcctgaagctgaaatggagcgaaaagaagctggaggatgcaagttggacggacggaaagccggtggactacttgagcccgaccgagtggggcgcgtacaaacggccgttgacgatggacaacgcaggcggggccggctacaacaaagagaacgaaaactgcgttttccttggccaatggccgcgcaaagtgaaggaatatctgtcgctggagacggcgctggacaaaagcggcgtggatgtgctgtggatggacgtggtgtgcgagaagccggaggagtactgggcaccgcacggcgccgtgtgcaaaatgcgcgccaaggaggaggagaagggatacggtaaagacaagtacggtgcaaaggaggaagaggaggaggaggacgaagagcttcgcaagatcaacaagtacgtcaccatcggctcgggcaacttcatctacgccaacaagaacacgtacatgattctcctcctgaaagacttgtacggcaagcagttgaaggaggagagcaggaagaaggtgtgcgaattgtacaatggcgaatatgtgaaggtcaaggacgagccgaaggaggcacaagaataccaggacaaagtgctggccaaggaaaaggagctgtattctgactccagcgat

SEQ ID NO: 85161 - DNA, 650 bp, Heterodera glycines
  unsure (1)..(650): unsure at all n locations
agtaatttcaagtccaaatggacgccgttaaagcgccaactttggcttcgattcaccacaaaaatcgtctccaatctccgctcaatgcccacggccatcctttgatcattgaaaatggcactgtcgcagaaacattagtggacaaagaagaagaggaattgacggaacaagtcggcacttttttgttcacttccgaatctgtgggcgaaggacacccggacaaaatgtgtgaccagatttctgatgccattttggatgcgcatttggcattggaccccgcagcaaaagtcgcctgcgaggttgtcacaaagacaggaatggttttggtctgtggggaaactacttcgagcgcaaccgtcgattaccaatcggtcgtccgcgaaacgatcaaaaagattggttacgatgactccagcaaaggatttaactataaaacgtgcaatgttttggttgcgttggaaaagcaatcgcccgagatcgccgcaggtgttcacgaagacaaggaaccggaagatgtgggggcccgggatcaagggattatgttcngctacccttccgacgaaagccccgaggcaatgccactgactttggtcctttcgcataaattaaatgccaaataccaccaacttcgaaggtccgccgttttgccc

SEQ ID NO: 85162 - DNA, 255 bp, Heterodera glycines
  unsure (1)..(255): unsure at all n locations
atgcagagnagtcccatgctcactttgcttttccatngcagnattntggggatcatttcccttctcagtgccattgactcttacttcatttctcacgctttcttcacaactttgatgcgggggnccggcgctcaaattgtgtttggatttgagtacgccgttcttctcacaacggttgcgcatacnaccatcaattacattttgcatttgcacgatttgcgttcnccgcacccctgggaaaacaaagctgcgtac

SEQ ID NO: 85163 - DNA, 185 bp, Heterodera glycines
  unsure (1)..(185): unsure at all n locations
acaacgatgagaatccgaatccggaaatggatgatgaaatgatggaagaagaggcagcgcatcatgaggacgatcagctggtgttaggcagtgatgaggacgaacaggaggaccccaaggactacagaaaaggtggctaccaccctgtgcagatnggngatgtgttgaaaaatgggcgatnccac

SEQ ID NO: 85164 - DNA, 142 bp, Heterodera glycines
cgacagaactcttttaaagactttcaagtttataaaagagttctgtcgcacatcatttatattgatcgatttctgatcactcgcaatgcatattaatgttcttcacggctcagcgtccaaatcagccatcaaagcccattcc

SEQ ID NO: 85165 - DNA, 1615 bp, Heterodera glycines
aattcgctttcatcgttcaaatgtgccgactccaagcaactcatctgctcgctcgactctttctgcttcttgcgctttgcactgctctcgttagctctctcactgctgttgccccgccattcggccaattgtccgtttccggcaccaatttggtcggcgccaacggacaacccgtacagctgatcggcaactcactgttctggcaccaatggtacccgcagttttggaacgctgacacagtgaaggcactcaaatgcaattggaatgccaatgtcatccggggggccatgggcgtggacgagggcggctatctgagtgacgcgaacacggcttacaatctgatggtggcagtgatcgaagcggccatttccaatggcatttacgtgatcgtcgattggcatgcccacaattcacatccggacgaagcggtcaaattcttcacccgaattgctcaagcgtacggctcctaccctcacattttgtacgaggatttcaacgagccgctgagcgtttcgtggaccgatgtgctggtgccataccacaaaaaggtcattgctgccatccgagctattgacaagaaaaatgtgatcattctcggcactccaacatggtcccaagacgtggatgtggcatcacagaacccaatcaaagactaccaaaatctgatgtacactctccacttttacgcgtccagtcacttcacgaatgatcttggtgccaagctcaaaacagccgtgaacaacggtttgcctgtgttcgtcactgagtacggcacatgcgaagcgtcgggcaacggcaacttgaacactgactcgatgtccagctggtggactctgctggacagcttgaagatttcatacgccaactgggcaatctccgacaaaagtgaggcctgctcagcactgagccccggtacaactgctgccaatgtcggtgtttcgtcccgttggacatcctccggaaatatggttgcttcgtactacaagaaaaaatccaccggcgtaagctgtagcggctcaagttccggcagctcttcgggctcgagttctggctcttccggttcaagttccggcagctcttccggctcaagttccggcagctcttccggctcaagttcgggctcctctggttcgagctcagggtccagctcgggttcgggatccgccagcatctctgtagtcccatccaacacgtggaatggcggtggtcaggtcaacttcgaaatcaaaaacatcgggtccgtgccattgtgtggcgttgtgttcagcgtctctcttccctcagggaccacgcttggtggatcgtggaacatggaatccgcaggctccggccaatacagcttgccaagttgggtcagaattgaggccggaaaatcgagcaaagacgcggggctgacattcaacggaaaagataagccaacggcgaaaattgtgacgacgaagaaatgttagggaaaagacaaagcgcaaaatgggaggaaaagaatgggaaaatgaaagagtggagaaaaagaacaaagggaaagaaagacaaagaattaatgattatgataagagataataactgataaagtttagcataaaatgttgaccaaagtaaaaaaaaaaaaaaaaaa

SEQ ID NO: 85166 - DNA, 1191 bp, Heterodera glycines
tcttaataaaaaaatactcttcaaataaataatcattcctagctgcttttggtttgatcacaaatgttcgtccaactcgtcctccttgccatcgttggcattacttttgtcgatgctgccgcaccgccgttcggccaattgtccgtcaaaggcaccaatttggtcggctcaaacggcaaaccggtgcagctgatcggcaattcgttgttctggcaccagtggtacccacaattttggaatgcccaaacagtgaaggcactcaaatgcaattggaattccaatgtcgtgcgcaccgcaatgggcgtggaacagggcggctatctgagtgacgcgaacaccgcctaccgactgacggcagctgtgattgaggcggccattgcacagggcatttacgtgatcgtcgattggcacgcgcatgagccgaacgcggacaaggcgattgaattcttcaccaaaattgcgaaagcgtacggctccaaccctcacttgctttacgaaacgtttaacgagccattggatgtgtcttggaacgatgtgcttgtcccttaccataaaaaggttatttctgcaattcgtgccatcgacaaaaagaatgtgatcattctcggcactcccaaatggtctcaagatgttgacgtggcggcccaaaatccgatcaaaggattcagtaatttgatgtacactctccacttctatgcgtccagtcactttgttgatggacttggcaataagcttaagaccgccgtaaataagggtcttccggtgttcgtcactgagtacggtacatgcgaagcgtctagcaacggtaatctgaactccggctcaatgtcaagctggtggagcctgttggaccaactgaaaatttcgtacgtcaattggtcaatcactgacaaaagcgaagcttgtgcagcgctcactggcggaacatcggctgccaatgttggcacttcctcccgctggacgcagtctggcaatatggtagcttcgcaacacaagaaaaaatccaccggtgtgaaatgctaaataaagtctgaagtccggatgatcaactgaaactgaagaaaatggaaaatgtgaagattgcgaaaaataaatatatataaaatttgcatgcgaatgtttatcgaaattccgattaaattgttttttgagcgcagataaatcgcaaagcataaaaaaaaaaaaaaaaaa

SEQ ID NO: 85167 - DNA, 1053 bp, Heterodera glycines
atgaacaggttttttacattattattttttgtattatttttcaatgccgcaattaattttgtcagttcacatcgcattgtcggttattatcagggcatacgtccattgacaaatgatcaagccaagaagttgacccatcttatcctggcattttcaacccctgactctcaaggcaatttgagtccattgagctctgtgcttaaacaggcgctaaaagcgggtaaatccgctaatggtgcgctcaaagtgatgattgccattggaggaggtggctttgatccggccatatttacttcgttagcatcaaacagtggcacacgtaaaagctttattaataacattgtttcttatctgaaaaccaatgagctggacggttgcgacatcgactgggagttcccaacttctagtgacaaggcaatctttgtgacatttctgcgcgacttaaaaaaggcgatggcacccagcggcgctgtgcttagcatggcatcggcagcaagtgccttctatttggaccctggttacgatttgccaggcattgagagtgccgtcgatttcattaacgtgatgtgctatgactattatggaagctggaccaaaacatcgactgggccaaactcgccactgtttaagggtggcagtgccgacccatcggacacattgaacagcaattggacaatgaattatcacttaatgaaagtgtataatcgagcaaagttgaacatgggtgtgccattctacggaaaatcttggaccaatgttggagcaccactaaacggtgacggactttggcgtcagttgggcacttatggcaccgaattagcctggcgtaacatgggcaaaagttttgacatgaccaagacaacgtatcataaaacggccaaaactgcatacatttatgatacagctaccaaaaattttttaacctttgacaacccacaatcactgaaggacaaggcaaaatatgttgcggaaaagggcattggtgggataatgatatggtcaattgatcaagatgacgacaaattgtctttattgaattctgtttcatattga

SEQ ID NO: 85168 - DNA, 1714 bp, Heterodera glycines
atgaacaggttttttacattattattttttgtattatttttcaatgccgcaattaattttgtcagttcacatcgcattgtcggttattatcagggcatacgtccattgacaaatgatcaagccaagaagttgacccatcttatcctggcattttcaacccctgactctcaaggcaatttgagtccattgagctctgtgcttaaacaagcgctaaaagcgggtaaatccgctaatggtgcgctcaaagtgatgattgccattggaggagggtaaaaaataataaattttaaaaataaattaattcaataattttaagtggctttgatccggccatatttacttcgttagcatcaaacagtggcacacgtaaaagctttattaataacattgtttcttatctgaaaaccaatgagctggacggttgcgacatcgactgggagttcccaacttctgtacttgcttaaactttaaatgtctatatttagatcacaatagtgctctacattattcaatagtgatatcatttagttaatgaattatttttgctccgcttttttggcatttttacaaaaatttattcttttttcaacaatcatcataaaagcatgagatatttagcttttgccctaccttattagggtaaattattttgcgttttacctgattaaaaatggcatccttgtcagttagaatgaaaatttgaaattttacattaatttctacaaaaatgaggagtactatgtataatatcaatactgtatttgaacagagtgacaaggcaatctttgtgacatttctgcgcgacttaaaaaaggcgatggcacccagcggcgctgtgcttagcatggcatcggcagcaagtgccttctatttggaccctggttacgatttgccaggcattgagagtgccgtcgatttcattaacgtgatgtgctatgactattatggaagctggaccaaaacatcgactgggccaaactcgccactgtttaagggtggcagtgccgacccatcggacacattgaacagcaattggacaatgaattatcacttaatgaaagtgtataatcgagcaaaggtaatataataatgaaacatcaatgaatgtaaaagatagaaaaagaggaaaaaattcataaagtttccgaatttttttaagtttattatttaaaaaagaagaaaatttataaaagaatgaaaaaaaagcagctaataatctgtaaaaaatacattttcgtaaggttattttctaggaaaaaggtttttatgaaaatcttttaagctacatataaattattttaaaaattaagcatttggtatgaaaatttcctatttttcaaagctaactttgcttgttttaacataacgaattaagttgaacatgggtgtgccattctacggaaaatcttggaccaatgttggagcaccactaagcggtgacggactttggcgtcagttgggcacttatggcaccgaattagcctggcgtaacatgggcaaaagttttgacatgaccaagacaacgtatcataaaacggccaaaactgcatacatttatgatacagctaccaaaaattttttaacctttgacaacccacaatcactgaaggacaaggcaaaatatgttgcggaaaagggcattggtgggataatgatatggtcaattgatcaagatgacgacaaattgtctttattgaattctgtttcatattga

SEQ ID NO: 85169 - DNA, 1008 bp, Heterodera glycines
atgtccgcttggatttgtcctgggtttttgctgttttttgtgctcattctgatcactgatcactgtccgatgacccaagctgtcactcaaccgccctatggtcaattggctgtcagtggaaaaaatctagtacaaaaaagtacgaaaaaagccgtggcattgcacggcctgtcaatgtactggagccaatgggtgccgaagttttgggtgaaacagaccgtcaacaaattaaaatgttcatgcaatgccaacgttgtacgcgcagcaatggcatccagctttggcggttacatttcaaacccaactgctgaatataaaaaaatgactgcaatcattgatggggcaattgaccaaggcctttacgtggttgtcgattggcacacgggcgacgatttggccaccaccgaaataaaatatgcgactgaattctttacaaaaattgctaaagcctataataaatacccgcacattttgtacgaaatttggaatgagcccaacaaatttgtggcatgggaagcggtggtcaaaccatacgcaaagacgatgattgacgtgattcgtaaatatgacaaaaacaatgtgatcattgttggcacgccaaactgggaccaagatgttgacattgttgcaaaaagtccgttgaaagacgcaaatattatttacactatgcacttttacgccggccaacacaaagatgacatccgaaacaaagtcaaaacggcttataaattgggccttccaatgtttgtgactgagtacggttgctactcggctgacggcaatgaaaaaacaaatttggaagagttgaaaaagtggatggaacttttggacggctatggcatttcctacgccgcgtggcacgtggcggacattggcgaacagtcgtccatactgacaaagacttccgaagtgaacaacatctgtgacccggcccatttgaccaactacggaaaagccatcattaacaaattgaaatcgcaaaacaatggtgtgaaatgcagtggttag

SEQ ID NO: 85170 - DNA, 1803 bp, Heterodera glycines
atgtccgatgccaatttggtcggcactgccgaccatcctctgtcgtctttacaccatcgcccatccgcctatgcatggcctccaccttcccactcgttgatggaacgtttccgtcaggctgccgtcacctcagataacggcatttgttccgaaattggccgtgacgtgatgatgcagaaaaatggcaatgccgtggacgccgcggttgccgccatgttgtgcattggtgtgaccaacgcacagagcagtggacttggtggcggaatggtgctgaccttttatgatgccaaaacgcgctcatgcaaagtgattgatgcgcgtgaaacggcgccggcacgcgcgactgccaaagcgtattctgaacgtgtgaccgcaaaccgaacgacagcgcgtgctacgggttaccatgaaattgcaacgcccggagagcttgctggattgtggcttgcatacaaaaagtttggcagtggccgagtgccctggtccaaactggtaatgcccgctgcaaaattggcactctatggttttccaatcactgaacacatgagaagagcattagttggcacggagaaggaactcattaacagtccaacaatgaagcaatggataataaatccccggacgaatcagctttacgaatttggtgatcttgttaaacgtcctaaattggccaacacattggagcgcttggccgcagctgaggacccaaagaaactgttttatgaaggcgaaattggggatgaaattgttgaagagatgcaaagaaatggcgcatttttgtcccgatccgatctgaaaaattacgagccccgtctgtatgagatgccattgtacacagatgatcctcatggcaacttgcgcatgtgcggaccaccgccgccgtcttcgtacgcgatcacacagtcaatcattgcgacgatgcgcatggaaccaatgtgcggtggtgacggatcagcagatgatcaatctcaagccaattcactacaaaatgatcccaaattctaccatcggctgattgaggcacaaaaatttgcatacgctcaacgcgccaatttgggcgatcaagcatttgtgccagaagcgaaaaaattggccaagcacatgacaagcaatacatttttgcataatgtgcacaaaaaaatgttggacaaagcaatgccggacgagcattacacgctgatgatcggcccatcaagagctgataaagatcatactggaacatctcacacatccatattagacgctgatggaaatgccgtttcagtgacaagctcaatcaatcaatggtttggggctgtgattcaatccgaaaatttgggcattatatggaatgatgaaatggaagatttctcatttcccgatgtgaaaaattggttcggatatgccatttcaccaaccaattttgttgcacccggaaaacgtccaatgagctcatttagtcctatggtcatctacaacaagcacacggggaaagtgaaatttgtcattggcggctccggcggtgccaaaattccgtcgtctgttgccaaaacagtgttgcatgtgttgtgcctgaaccaaacagtgaaagaggccattgatgcgccagtgttgcacaaccaattcactccgaaccatgttatttacgagaatgggacaccgccgaaattgatcaaagatctaaacgaaaacttcgggcacattatgaagtcgtacgacaacaacaacgtggttgtgcaagctattcatgtggccgatgacggcttcatctatgcaaatggggacttccgtcgtcgaacttacatgcacccggccggcttctaa

SEQ ID NO: 85171 - DNA, 558 bp, Heterodera glycines
atgtcttcttccccgtccgtctctgtgctcgccatcgtcgcaattgtctgtttgatgtgccaatgttgcttttcggcaccgcatccgtgctgtcccggcagtcaaaaagtggtttcacttatgtccaattacgttggcacttttgccaattccatttccaagtcatcgctttgttcggatgcccaaaatgttgcggaagcgttgaaaggccaactgatcggctgctcgaatggcggcgatcgaactcttttggccgacatcgaagcatcccttgccactcattctgctgatgagtgtgccctcagcctcggcttcgtccgtgccatgttcgccattgccgcctccgcttcttcccatgccagcaacaacagcgaatggcagacattgagtgggcagtttggtcagaaagtcactgagattgactcgaaatgtgcagagtttggtattagcattggcaaagtgcccataaacggtcccaaggatgtccatgttcaaaatgtgcccaactcggaaagtgtgatttctatgcctggattggccggctcacacacccaatga

SEQ ID NO: 85172 - DNA, 399 bp, Heterodera glycines
atgaattggatgcattattgtttaatcgcttgctttgctttttattatttcaatactgttgagtcatccactattaattcggtaaccgtacaagtgaacaagattgaaaacaatgaaaatggaagacaattcaatttggaatttacaaaccaagtttatgagcgagtgtgccacgttgactttcgaattgatctgccagacacagtaaaattgaacaaatattcaaaaatggtgccaattcctgacacctgcggccagtacgcattgcccaagagtttggacttgcttcccggcgagtcatttgatgcacaattaacactgcttggccatgatgggaagccgaatgtgactgtgctgaacacgaacaatattccaaccagcaaacaatgcaaaaaatga

SEQ ID NO: 85173 - DNA, 1026 bp, Heterodera glycines
atgctccaaaacggccttaccattctgcttctgatcagtgttgtgatcggccattccttggccaaccttggcccaaccatcaaacataatcctcattttaaagccgtacaaactgcgcatcatttgcatgatgccattgcgaagaagcacgaggccgaagttacgcaagtcatttgctctattagcaacgaacagcgtcaagcattggctttggagttcaaaaaacaattcggcactgatctgattgccatgctgaaaaaggagttcaaaagcgactttgaagaactgatcatttctttgatgcaaacgcccgccgtttacgatgccaaccaaatgcgtgccgcattgtccggctccaatgaggcggtgctaatcgaaattttggcgacgcgcacaaaccgacaaattacggcgccgaagcaggcgtatgagcagttggacagaaggcatcagcacaatcagctggaggaggacatcaaagcgaagacgaagaggacccttccaaaatctgttggtgtctttgctcagctgctctcgcgaagaaaaagtgcgcccgcaagcattgtattggcacacgacgaggccatgaaactgttcagagagggcgagggccgacggggcgttaacgccgtggtgttcaaccaggtgttggccactcgcagcttcgcccagcttcgggaaactttcgagttttaccgacaagccgcgcaccacgagattgaggagggaattaagcaagaattcagcggtcacaacgaagcgggtttcttggcactaatcaaatatgtccgcaacgcttctgtgttttttgcggatttgttgttcaattcgatgaaagggctcggcacacgcgactcggatttgattcgtctggtcatttctcggtctgagattgacctggctgacatcaaacacgcttttcacacgttgcacaagaagagcctggaggaggcgatcaaaggggacaccagcggagcttaccgagacgcacttttggcattggtcaagggcaacacggagcagtga

SEQ ID NO: 85174 - DNA, 501 bp, Heterodera glycines
atggcaaaattcgttgccattgctcttctctcgctgaccattgtttcgatggcacttgcaaaaactggcaaaagtcaaacggcagacgaagttgagggatttcgcaatatgaacatcggcgacaacaataaggttgacgccggaaaggagcccgcggctgataaagcaaccaaaaagggaaaagctcagaaagccggaacgaaatcggcggcggccactaatgagcccgcggctgctaaaggaactaaaaatggaaaagccccgaaaaccaaagcgaagcaagaggtggccactaatgagcccgcggctgctaatgaatggaacgaccaattgatgggcatgagcgttgagaaatttaacgaggagcttgctgtgttgttgccaaaagccaacacttttatggaaaatgctttgagcttcatcaatgaacaagtggaaaaaaatggtattgcaactggcgctgccggggactcgtgctcgaccgggatcccggccaactag

SEQ ID NO: 85175 - DNA, 1470 bp, Heterodera glycines
atgaaaaattctttcctcttcctgcttcaaatttttattctaaccaacattttaactgaaatactttgtggagataagtcaaggccgtcgacggaaatcaatgccaatttgggaacaaggaaaaagcctgaaacaattacggcaacaaaaaatgccaatttgggaacaggaaaaatgcatgaaaccgatgggaccagcaaaatgccaaaacatggcaaacctgtgtcaaatcgaatggcagccaaaagcacgacgattaaaaataataatgaagcagcagggccaagccaacaatcaaaacaacctgcggcaaacattacgccacagcaaaaggggccaatgcaaaattcaaaaaagcagccaccaaacgaattgtttggcaagaagcaaaggtcaacccctgaagagatcaaagctggcaaacaaccagcaatggagctaatgccatgctatcgaggaatcggcaaaaagacgatgccaacaattgcacagcgaaatgccaccatgctaaaaaggggggacagtttgacacggagtgccgactttgaggacccaattttggccaatgtaaaacaaagccaaatgttgatccgacaaaaatccaagggcaccatggacttggaaatggacgaattcttaaaactgcacaagcaaattcaaggacctcggcaaaaattggtacgaatggaaagggaaaaaatgatcaaagaagcgaccgaaaaggcaaaagtggaccgaagaaatcgtatgttggaacgagaaaaaatgtggagcatgaagaaggctggtgttgctgcacatcaaccagcatcaccggcaattcgtggacgaacacagcagcaacaacagcagaagctgcaacctgacaaaaagccggaaaaaatgctgaaacagcaaaacaaaacacaaaatttttcggcaccttccaccagcaaacaaattgtcaatcgaaggttgttgattggcccaaacaaaccgagaactggcaacaaaattggcactaccaagcacggcatacattcggcggaaataatgacatcatcgtcggaaagcaatgtgccaaaaagtgaaaatttgggcagcagtgaaatggagacggcggaggaagcggcacaaacctatttgaacaatttacgggttgatttaaataaaattccttcgatgaaaattccattccttgaaccaataattgaaaaatatgttgatgaatacaaaaaaagtcgtcaattattcgctgaatgcatgcaaaaaattttgcgaaaatcgaaaaatcctaatcaaacggtgaagatcatcgaatttaaaaagacaattgaaaaagaaatgaatgatttgttgaaacatacggatttgccaccagatcaattaattgatctgttgaacactcgtgaatggctattgtcgatgaaaaaagacattgagtacatggaacgcattctgaccggacgcgagaataatgacaacatttga

SEQ ID NO: 85176 - DNA, 642 bp, Heterodera glycines
atgtcttctctgctgctctccatcttcccaattgtgtttttggtctgttgcaatgcaatgccaaatttcccgtgctgcccgggcagtcagcaagtggttgctgtgatgtccaaatacattgacactttctcttctgctgctgacgagtctacagtatgctcaaccgctaaaagtactgtggatggaataaaaaatgaactgtcctatcgcgtgggatgcccaagcggaggagaagcacaaattgtgaatgaaattgatcgacagctgaagaacattgcgaaaatggaaatcaattatgaggacgagtgcccgtacaatttgggctttgcccgtgccatgttcgacttggccgctgctgctgctggccatgcggggaacggcacagaatggcaatacatgaaagtacaatttgagcaggaaagccaagcaatcaaagcaattggacaagaaaagaactttgaagttacggatgtgcattttggagtcccaagcaaaggggtttctgcacatcaaaatgtgccgagtccgagccatgtgattgccaaccctggccaacacagtttcggttggccaacggaaagaaagaagaaccgttgtcatcggacctcgatttttgaggaccaaccaatcaggaggaaatag

SEQ ID NO: 85177 - DNA, 1138 bp, Heterodera glycines
attatgcttaaactttgcttgacaattattttggttaccatcggatacaaatcattttcgttgtctgagcatatttcagaattttccgaatgcggcatttccgactttgaacccgaatttcccattgcaccaaaagtggaaattggcacaaatcatatattcaaaggaaaaacaattgtggatgacaaatcattgccgtggatggcaagaattttaagtggagtctcttgcactgcgacaatcatcgggccccgacatgtgttgacagcggcgcattgtgttgaaggccaagcacttgaaaacttcgttgtgtcatatggaagcgccgatgcttcaaatcaacaacataaatccggcgttgaagcaattaaatatcatccaaaaacacaacattatgaaattaaggataaatttcgaaagaatacaagagcatacttatttttgaatgacattgtcgtaattaaaattaaaaactcaatcaagttttcacaaaatgcccgaccaatttgtttgcatggcttccatctaacaaattcaacaaaatctgatggaaaaagcattaaatatgatgaatattcaaaatttattaacaacactcaatgtgttgttgctggttggggtataaccaaaccgacgtgctctaatgatgatgataaaccactaagtggccaattaatttatggccaaatgcgaatgatttcgaagcaaaaatgccgtgaattgtcaattgaatatgaaaaagtattcacaccatctgatggtaacccagaagttgaatcgatgattgaagcttttgatgcgtatagtattaaaagcaatatttgtgtggtgcccgagcaaagcattggcgaaccgggtgacagtggtggcccattaatgagcaaagttggaaaaaacaattggggtcaattgggagtgttgacaaaaggcgactgcagacctaaaaacccaacaagcacagaaggactctttgcccaatacgcgccgatcgattgtgaatgggttgccgaagcaacagatggtgaagtgaagtgccaaacatggtaaaatgcctggcctttctatatgatcaacgacatatttaattaatctttcattagcatttgttggcacataatcataaataaacgtttaaaca

SEQ ID NO: 85178 - DNA, 985 bp, Heterodera glycines
cagatcttgtgttcaagcaatcatcagaatgagggtgctacttcttctttgtctggctctgccagtattcagcgagaacatcgatagccacgttgttggaggcagcaatgctaacattgcaaactaccctcatcaactctcactccgtgtttctggctctcactcatgcggagcttcactagtctctactaccaaggccgtcactgctgctcactgcggaggaagtgctatctctgtctactcaatccttggaggcaccacctcccgtactgatactacctgcagtacctgcgtcaccagaaacctcagccaattcaatagacacgctagtttcgtgaacaacggtaaccagggttatcctaatgatgtagctacccttcacttcagcgccgtgacaaccaacagcaaccttcgtaccatcgccatggctgcctccagcgcaggagactacgccggacaaagctgcgtcatcaccggctggggccgtacttctgctaccagctctcttccagtaactctacagcagggaaccatgaccgtccttactaacagtaactgcgccagtcgttggtcagctgctcagatcaataacggtcacatctgtgtctcttcaagctccgtcagcgcttgcagtggtgattctggtggcccacttgtctgcggtagcaccctggttggtgccacatcctggggtcaggctcagtgcaacccatcctatccatcagtctacacacgtatcagctacttcagatcttggattgatagccactaaacaactcatccaaacattaacgtgttcaactaaacacaagcgcctacctaactactacgtgacgttattatgataacagtctattgtcaagaaaggtggcgataaggatttaatatgtatttaataaagactttagtttaattaactaaattgctaatagtttgccatttaatggctcatgatatgatacaaaataaaatattatacaactaa

SEQ ID NO: 85179 - DNA, 953 bp, Heterodera glycines
gcacaataaatagccgtttaatttcttatcaaatgcaatcactttcacatattcttttcacatttttctcaattctttttgctgctcattgtcaaagcgatgaatcaaaaagcgcgggagcgcaaatgcaaacggtggacgaaaataagattcggcacggcaaaccgttgacgagcattgtcaaatacccttttatggccactgtttggcaaaatgaccgcaaactttgcaccgcgtcaattgtcagtccaaattatattttgtcggcgggccattgctttgtgaaaatgtccgaggaaaattacataattttggtggggacagtgaacgcgaagttggagaagggcaacggacagcaatttaaagtggagaaagcgcacgtgtactcggagacggtgttcggccaagacattgccattgtgaagctgaagaattcgattgatttctccgacaatgccactcagccgatcactttgtcccggaggtccaattttacaaagactgacctggcattcattgccggatggggacgtatcaccgactggagttctccggtcactctgcaaggtgccaatgtgctgatttggccaaaggatgaggcgcgttgcgacggcattatggagtcggaagtttgcgcatttggcgaagacggagctaatgtttgctttggcgacagtggtggtccgttgttggtcaaaagttacgacggtcagcgctgggaacagatcggagtgaccagccgaggcaatttcgtatgcgaatcgaacggcttcttctcctgcgtttatatctactgcgaatggttggcaaaaataacggagggcgaagttcagtgtctaaataatgagtgattttcgaaatgcattctctgttctgtgctttttaattgtttaatcattttaaagaaatccaacaatttgttaattaaatgaaataaaatactttcctttcaa

SEQ ID NO: 85180 - DNA, 1529 bp, Heterodera glycines
tttgagaaagggtaaaatgaatttgcacacaattttctccgtgttattgtgtgcgctggtgttgtcctgcgcagtcggaaagccaccagcaaaaaagggccagcaaagtaaaaaggctgacgtcatagctaaagccgctgctggtgaaccggccgaagtaaagaacgatggcaaagcaaaaaaatcggctaccgtcgtgcctgtcgcggctggaccggtaggcgcaagtaacgatgccaagggcactaccgccggtggcaacaaggcaaccggcgacactggcacgactaaaccaagcgccggcggctctgccacgacagatgatgatgatgatgatgacgagagtccttctccttccgccgccgccggtggtgcgacgacaaccgatggcaaggctaaaccaagcggcgatggcacggccaccactttgtcgggtggcggtgggaaggcctccagcgcggcaaaagttggcagtggtggcacaactgtgcccgccaagggagaggaaacaaccgcagtaaaggtggacgaaaactcgaaaggcactgatgagacagagaaaccggaaggctcaactgatgccaccattactggcgacacgtttacaaaggtcaacaaaatcgcggacgagatcacagagtgcgagttttacttcgttcatttggaaaacgtgaaagccaacgaaaaggaaaagctttggacacgaaccaaacaagaagcggagatcgacaccgaagagatggcagaagatagcgtcgattatcgcattgtgacgcccgccatttccaaggaccaaccggacatgggcacattgtacgagcaagacacggatgatttgccctccgatccagatgatttgcgcaaggaggaatattttgctgctgacactgagctcgttgatgcggaatttcttaaaaaaaatacttccaatttatacgacgaaaccgattgccatgggatatttggacggaacgaaatacgacacggcaaaagttggaccatttttcagaagggaaattcgctgatgaaacacagattctgcctcttttcccctgatgatcaactccaaaatacggcaaagactgcatctcaagtacatgcccggtgttgttgctacaacaaaaatgtaagcgacagcttacgcgacttcgacatctcaaaaaccgccgatgcagatgctattcgtgccaaacacattgacaatgagtacgcgttgttccaaaagaatcaaagttcgacgatggcattgcgcggcagtttggttggcgaggatgggcaagccgtctatttcagcatttggagcaagagtgcccctggctcatacggtctttgcacagctgaggatgggaagaactcccgcgggaaacgccaagcagaagatgacgaagcgttttacgataattatgacgacgaatgaggagaaaagcaaaaaggaaccaaaaagcatggataattagttaattacaataattgatggcgaattaattaaagcgtaataaaaaagtttaacaaaaaaaaaaaaaaaaaaa

SEQ ID NO: 85181 - DNA, 1194 bp, Heterodera glycines
atgaattcgtccgtcgtttcattttcgctgttactttttgggttattcacaattcgcactgcaaaatcgcaatgcgagaaacattgcactaaaagtatgaattttatgttttattaagggttgatttctatgattaatccgaaaaacccttgggggcattgctaatgggaggggtcttaagcagcagtgtccatggattttcaagaatcactttttcgtgggaagaaaatgggataaagaataaagaatatggagaacaggcagccgttgttcagttcgataggaaaattaatcgactgactctcggcattattaggcaaaccgatgggccaatgcaatgaggcggaagaagtgattctgcgcaactccgactgtgccttcatgaagaaaacggaaacggcattcgaatttgtggtcggaatgaatggccaaacggaggacaaaacggcgcccggggccaatgccaatggggcatttttgtgctgtaaggcaacccaaggtgaataaaagcatcggagacatttatttatatgagtaattgaattttatattgatttaaataaacaaaaataatttaaattccttcacaaaggaaccgcaacacttttcatcgtcggcgtggccaacaaacggctgatgttggccaaggacgtggtcaattacaaatttcataacaacatctcaatcgatgattttgtacgggaaaagcaagtgttggaaagtgtttcggcgcagggacaaaaagccggcattggggacaattatggagaaaaattcttccaggaccaaatggacgccaacaaaatgattcaggtgaaagttggaaatcgtttaaacgtcattaatgaatatagttgtttaaacattttgtagaaaggctatgtgaagctgtggaccgccaacaaatcgttgcttcctcaaaatgtgccggatttacagaaagatacccggcccaaagtgacggcggcgacagaagaaatgattttggcactgaaagtgtttcaacagtttcgaatcaacaaaaattgttgggcatctgtggaaaaggaactcttaaagtcgcaaagctttttgagtttggccgaacccaacggaaaggacgcaatgcgaaaagcggcggtgcgattgtgcgcagaaatggaagcgaaaattgaggcacaaattgacgaaacggcaaagaaattgttggcctga

SEQ ID NO: 85182 - DNA, 279 bp, Heterodera glycines
atgtcccttttccgtcctcaatcgctgcttcttctggccgctctttgcctgtcctttgcgctgctctttgtcacttcgtcggaagagggagggcgagtgaagcgcggcggatggccttgggattgggccggcaaacaactgtgcaaaacatcggcaaattgcaagtgcaaggatggcaaaaattgggccaaatgtgtaaagtcggaaggctacgcggccagcaattgttgcgacaaaaattacgtgtgggcatgttgcgggaagaagcccaaacattga

SEQ ID NO: 85183 - DNA, 417 bp, Heterodera glycines
atgccaaacattttcaaaatccttctgattgtgcttttggccgtcgtctcattccgcctctcggcttctactggtgacaaaaaaactgctaatgatgggagtggaaacaactcatcagctgggattggtacgaagatcaaaagaattgtcaccgctggactgctcttcacttccctggcgacgggtggggcggaagcgattgggcgaagcaatgctcagggaggaaatgccgccggattggtgccatcgcatgtgaccaatcgctcaatggctccaccacctcctcctgtgcaatttgaaatgggggcaaatcgattagaaaaaatgagggcacacctacgcgaacttgctgagaaaatgccggtcaatgaatcgaagcgtctgtcaccgagtggacccgaccctcatcatcattag

SEQ ID NO: 85184 - DNA, 411 bp, Heterodera glycines
atgttcagctcttccaatttgtctgctctctttttggcctcctccgttttggccgtgcttataattggcattaaaatggacggaccgacggaggcaaaaggcgccgcccctccaaacgccgcggggccaatgggacttttgcttttattgaatggcaaacaatcggcggctaatgaaaagggaaaagcgccctctggcgaaagtaagccaaatccggggcagaagccgagcggagaacggcgaaagagggacgttttggggcacgccggcggatacgtcggaggatgggaccatcccattgactcgacacttgattgggcaaagagtcagtggaatgatgccaattggctcgccgatgttgtcaacagaaacggatgggaaaacaccggcactccaaccggcggacgatga

SEQ ID NO: 85185 - DNA, 645 bp, Heterodera glycines
atgcgtaccattctcttcatggccatggtttgcttggtgatggctgtcctaatggaaatggcaaattcaaaagtagtcaaaaaagacaataaaaaagcagcagtggcggcatctccagcaaaaggaaaagcatcgccaaaaggaggcaaaagcccagcaaaaggaaaagcggcaaaagttagtaaaaaagataacaaattgaaagcaaagaaagaaaccaaaggcattaaagttaaaaatgcaaagccaacaaaaaaaggtaaatcggcaaaaggcgcatcaaaaacagccaagaaagtccaagccgccaaaaaagcaccaggaaaggacaaaaagtcgctagttaagccaatcgtccttaaagcaccggtaccaccccataaaatgcacccgatgattgaatccgaagctgtgccaccgcccgcccatgcgcgttcgcttgcgaccgttccttacagtacaccgggggcagccgaccgtaactcattgccatcgtacacttcgactgccaccaatttggacatggccgatgataatgatgattatcagaattattactacggaacggaagacagcagcagggaatttgatgcatcggcggaggaggaggatgaactatatgagagaggagagtcggggcaatga

SEQ ID NO: 85186 - DNA, 726 bp, Heterodera glycines
  unsure (1)..(726): unsure at all n locations
atgagcaactttatatttgtcgcctctttaactgcagcgttttttagctcaggcctcgctctaccggctccttatgatgctgaatcggtggtatcttctgaattaaatgttccactactttcagctgacgcaaatgttgaagcagcaattaccaatgaaagtgatgctgctgctgagatacaagctccatcaattccggtaccaattgaacatcaaactgctgctgacattactcatccaactgaaactggcaatgagtcttctattgcatcatcatcatccacgccgaaaagtgagcagacgccaaaaaaagtgatgaacatgaaaagcgcgctggaagancgcaggcaggccaacgtgtacgaggagaggcttccgttagacaagcagcccaagacgatcgctgaagcggcagcaaaagcaaagcagacgcccgccaaacttccggctgactacgacgtgaaccgcgtggcggaacgcgcagcagcccgtgtgtacgggtggcttccggaagacaagcagcctaaggcgatctatgacgcggcggagaaggcaaagaacacgcccaaaccgccgggcgactacgacgtggagcgcgtggcgcaaaaggcggcccggctcgtctacggtgtgctgcccatcggcatgcagcccaacttcgccggccctagcactgacaagagcaatgtcgacgactcggagaaaccttctgctgctgcggcttaa

SEQ ID NO: 85187 - DNA, 750 bp, Heterodera glycines
caatgcgagaaacattgcactaaaagcaaaccgatgggccaatgcaatgaggcggaagaagtgattctgcgcaactccgactgtgccttcatgaagaaaacggaaacggcattcgaatttgtggtcggaatgaatggccaaacggaggacaaaacggcgcccggggccaatgccaatggggcatttttgtgctgtaaggcaacccaaggaaccgcaacacttttcatcgtcggcgtggccaacaaacggctgatgttggccaaggacgtggtcaattacaaatttcataacaacatctcaatcgatgattttgtacgggaaaagcaagtgttggaaagtgtttcggcgcagggacaaaaagccggcattggggacaattatggagaaaaattcttccaggaccaaatggacgccaacaaaatgattcagaaaggctatgtgaagctgtggaccgccaacaaatcgttgcttcctcaaaatgtgccggatttacagaaagatacccggcccaaagtgacggcggcgacagaagaaatgattttggcactgaaagtgtttcaacagtttcgaatcaacaaaaattgttgggcatctgtggaaaaggaactcttaaagtcgcaaagctttttgagtttggccgaacccaacggaaaggacgcaatgcgaaaagcggcggtgcgattgtgcgcagaaatggaagcgaaaattgaggcacaaattgacgaaacggcaaagaaattgttggcctga

SEQ ID NO: 85188 - DNA, 1614 bp, Heterodera glycines
  unsure (1)..(1614): unsure at all n locations
atggccctctctgcccttctgcttcttctccccctgcttctcaatgttcaaaatatcccagatgagtcagtccaatcggatatgaaggctgtttattcggctatttcatcgccggaacaatggaagaactcacaaaattcattggcttcactcgaatcacaactgacagagccccaaagagcactggcaaaaatgcattgggaattggagaccatccaaaaggaaaagccggaggcaccgccacaattcgacttgggacttttctcggaagctttggaagtgatggtcgaaatggacgaagaagcgaaagaagtgaagctgaggaaggacaaactgatccgaatgggcaggaggagaggaagcaaaaaaaaattgaaggaaaagatgacggaggaggacacagtgccggaagtgagggtgaacgagaatggtaaggttgaagtgaaggacggcgccggaggggaaggacggttggaagtcagacgaacaaaggacgagaaaggcagagagcaggtggtgatcacccttatgaagaatggcggaacggagggaccagcggaaggaaccgcggagaagccacaagagaaggccaagacggaggaggaggtacagaaaaagaatgatgacaaaagtacacgacaagaacaggaggaagcgaagaagacggagcaggaaaacgccggaggggtgccaaaaactgactcggccaacagccacattccggtaatgccaatgcacaccattttgtcatccccgtctccaccggtggaggagaagggcaaagcgagtgcagaggaggcacaaaaaaaggaggaggacaaaaacacacgacgtggaggggaggaggcaaacaacacggagcagaacaaagtcggaggagtgccaaaaatgtcagttgacagtcctaagtcggtcgtgccaatgccaatgcacaccattttgtcctcaccagccccaccggtcgaggagcaggacaaggcaagggatgcgctcacagaaggagcaaatggaaggaaaaaggcgcaaaacaacgaagaaatgttgctggttgcgacggagaacaacggaagcatgagaaatacgaataatggaggaatatttgattttgtccgaaaatttatctccaatgtgtttggacgtaagaaaagggacacggnaagcggtgcacagagaaaatatgacgggggaacgaaggaaaattcgcagcattcaaaatttgattatgagcactgtagggaagtccgactcagagccgaagagcgaagacaaacagcagcaggaagagaaaaagaaggcggagatcaagcagtacctggagaagggagtggtcaacacgggtggaatcaaaaaggccgagaaactggcatatgcttggtactcggagcttctgtactggacaaccaagtggatcgaggcattagaaaatcgggtggcgggagtcaaacccgaattggcacagcaattcttattctccaaaacgggatcagctgcttaccaggagctgaaggaagaggtggacaaatgcgaggcgaagttggccaaactaaaggaatggatcggcgactctttcaagtgaaaatggaagaaacggctcttagaggtgtatttttctga

SEQ ID NO: 85189 - DNA, 429 bp, Heterodera glycines
atggccacttacctattcatcgctgctgctgccttcggagcaggaatttactgttggaaggcgtacctcggcccgatgctcgaccaaccgaagagcgacgacgaggagaagcccaagccggaaggaggcgaagaagcgacaaccgccggcgacaaggaggagaagaaggctggcagcaagggcgacaagcacaagaagaaggacaagaagggcgaaggcgcagcagcagcaccagcggcggacaaaaaggaggagaagcgcaaggacaaacaccgatcgaaggaggcggggaagagcgacgacaacaaagcgggcaagaaggacaagcacgggaagaaggacaagaagaaggacaccgccgatgcatccaccgtggacgaagcgctgggagaacagagcacagcggagatgagccaagcagaggaatag

SEQ ID NO: 85190 - DNA, 558 bp, Heterodera glycines
atggcttcatctttctgctcttcactcatttccatcgtcgcaattgtctgtttgctgtgcaaatgctgcttttcagcaccccatccatgctgtcctggcagccaacatgttgtttcgatgatgaaagatcacaccggcacattctccgcttcgatgccaaagtcttcgctttgtctgagtgccgaaagagtcgccgctgcggtggaaaaccaactgaaaacaatttggtgccctggcaatggtggccaaacactcatcaacgagatcaacgcagctcaatcatcatctgatgagtgtgctcgctctctcggcttcgtccgtgccatgttcgaaattgccgcttccgccgcttcccatgtcggtgccaacgccgaattggccaatttggctgtccagttccgagaacaagttggcacaattgacaccaactgtgctgcgctgggcattcatgttgggcaaatcagcttgggcactcccaaaggagaccatccgcaagtgcatgactctgagagtgtgcttagtaaccctggcaccagcgggtctcacaagcgcatttaa

SEQ ID NO: 85191 - DNA, 303 bp, Heterodera glycines
atgttgagcagatgctgttggctccgttcctgtcttccaggcctcggaaaatgctctgatcaaggagttggaagcgggagaaaatgccgaagtcgcccagaaattcttcagacggatagggccaaggagggaagcgttcagaaagcgagacatgacggggaacagcatccggaaaatcctcgtccacgccgatcaaatggaggcccttttcgagacggaatggggcaaaacaatttgccaaacgatggcacatttggggaaaatccaaattttcaccaaagcccagctattgtccccaggtga

SEQ ID NO: 85192 - DNA, 402 bp, Heterodera glycines
atggcatttctcctgttgtcacttgcacccctcttcgttgcccttagcgggattgatgcaaataaagtgccactgcaattgtgctgtgctggtggccaaagcttggctggccttatctacgactattctgaccatttcagcgaagttttgcaacagtcgggaactgagatgtgcactagcctgaaaaaggacatgaccaaattgacaactgcaattgaaaaagctgaaggatgcaagtgcaatcttgttgaaaaaattgagaaggaattggatgatgttgaggatgattgcgcctacaatttgtcacttcattcgcgcactgttccacattgtggccatggcctcggaacatttgggcgaaagttggaactccgaagcggccgagttcaacgagcaaattga

SEQ ID NO: 85193 - DNA, 669 bp, Heterodera glycines
atgcatttaaaaatatttttattaattttatttgtgacaatttgctcggtttggtcactttcacccaaaatccaccacaactaccaccaacagcagcaacagcacaacattaagaataaattgccaccaaaaaatattgggacaaaacatttgaaaacggaaattaatgggcacaacaaacacaagcacaacccggcgagcagacacgggcatgctttgcttcaaaaagtgaaagaccaattgaataatgatggatgggccagtgaagatgcaaacaaaacatcggtattgctctcttcactgttggccatcgaatgccatatgaaaaaattggacaagaaaaggaccaacgactcggccgagatcaaacatttgacggagcaaatctgtgccgccgagaacaaagaacaaattggcattcataaactgataaatgaagttgcgaaaacatttgaaaaagatggaaagaaaatggtagaacaaatgaaaagggacgagcatacggtaaaggtgcatcttgacgggcactacggtacgttggccgagattttgccaagcgccaaaaagcacgcgaaggcaacaaggcttcgaacgtatcatgcagtgctccatttgttgcatttgatcactccgaagatggaggagggaccggccaaagaagcgatgtaa

SEQ ID NO: 85194 - DNA, 336 bp, Heterodera glycines
atgttgttcggctttttcccatttcgcgccggctgtccgggcaaaaacgatataaaagcggggtcatcatcacatgtgagcagcacaattatgataattgaggaaaaagaggacagcgaatcggacgaacaaatggacggcgccggaggggacgaggagaaacggggaggagagaacggcagcgaagcgcagggcggcaaaggcgccgcaagggacaacgaaatggaagacgaagaattgaaagtgaaagccgtggtggaagagacgacgacaaatgaacagggcaaaactgagacaaacgtcgaacagagcgaaaaggaggggccgatgaactga

SEQ ID NO: 85195 - DNA, 579 bp, Heterodera glycines
atggcatttgccatttcaagtttaagcgctttaatttcgctcgctttattggcagcaccacaaaactcgtaccaacagaaacctaacgatgaaccgaaggtctttaatgatatccaaaacgggtgtgatttgataaattgtaccgatggtcgaacctgcggcattcgagttgggctcgcaaaattcggcaacagaaattttgagaaatttgcttttccaaaatgtataacaaatgaaacggaactaaacatgaacacggacaacgatggaaatgcgcacattgttcctaatggaccagggtgccaaatgatacaatgttctgttggctaccaatgtcaagttcgaatttcaatttccaagcttggcaatttgccatatgctcagtcaattggaaccttcccgcaatgcgtggggcctaatgtaagcttcaactcatcaagttcaactatcgagaatggcccagggtgtgaccaacttccgacgaaatgtgacgaaggcacaaaatgcgtaactgccgtcggaattgcgaaatatggcaatttgccatggtcgcaatttttctggcccttttgtacatga

SEQ ID NO: 85196 - DNA, 566 bp, Heterodera glycines
ggtttaattacccaagtttgagtcaaattaagcatcgcttcggctgatggaaatgcgttgcgttccctcccgtcgcccctttcgtctcatcgccccgctgttcaacgcaattcctaccttttacctcattctcacccttattttctgcattctctccccctgggctgmctctgcagatgcggacgaatggtatggcgcgagacaattacgcgcaccgaaacctaaatttatccgatttggacgttccggacaaaaaatgatacctttcagcagaagtttttcaacagaaactcagtacggcgacgaagggatcaaccaattggacgcgttggttgatgcggtcgataagctgtatcaatcatcgccagaaattagggcattcaaaactgcgccaaaaagggcacaaaagttcatacgattcggctgatgagagagaatttgacgaggaaaagcggacaatctcagaaaaagttaccagcagacgatctcacaatcccttctcttttctgaacaaataaaataagttttattcgtaaaaaaaaaaaaaaaaaaaaaaaaaaaaaaaa

SEQ ID NO: 85197 - DNA, 563 bp, Heterodera glycines
ggtttaattacccaagtttgagatacctcctcctcccattcgttcattcttctccaattcgtcctttcccttctcaaatggcccaattccccgtcgccaacattctcctcgcctcccttttgttgggtttcgtcattttgaacagcaaaacgaatgcgcagtttcaatacggcggcggaatgttagccgaagggccccaaatggaaggccttttggaggattacggtagggtgggcgactatcccttcgaaagtcttgcaaaacgcgcgccgctcgaccgttccgcaatggccagatttggtaagcgcgcaccgctcgaccgttccgcgttggcacgattcggcaagagggcgccgttggatcggtccgcaattgcgcggttcggaaagtgaggagaaacggacggatggatggaaaccggtggaaaatggcggaaggaaaggaaccaccggcggaaaacaaacattttctgttttcattccttctcaaattactttttccatacacattttatggcgaaaaagaaattattttcttgaaaaaaaaaaaaaaaaaaaaaaaaa

SEQ ID NO: 85198 - DNA, 723 bp, Heterodera glycines
ggtttaattacccaagtttgagagtcagccccattcgcacagtctgtccaaatcccccggaataattcattccaaaaaatatataaaaatgaaaagccgcttctcccccggtgcttcttcttttccttcttcttccccctctctgccggtgcttcatcgtgccccgcttttgctgctctgtgccatggcggcggtgcttcagttgatcccgtgctcctcctcctcctccttggccaacgccgctgtcctttttgcagaaagtggccatcccgctgaccagcagcagcaatttggccaatccgattgtgcacagttggccgcaggggacgaagaaaggatgttgttgtgccagctgtacgagagttcggcactgctcgcccaactgggcattctggtcaacgaaggcattggccgattggccgtcagccaaggaatgggcaaatttgttgtagcggaagcaggccgagagaagaggaaacacgagtatctccgttttggaaagcggaaacacgagtatctgaggttcggcagaaagtgatcaatgaaagagagtggaatgatcgtcacagaagcagaacatggatagagtgagagagagtgaagggaacgcagagggcagaagagacaatcagagaaacacgtagaaacaaaatgccaatcattcccattttgaataaaaaaaaacacgcgcsaaaaaaaaaaaaaaaaaaaaaaaaaaaaaaa

SEQ ID NO: 85199 - DNA, 568 bp, Heterodera glycines
ggtttaattacccaagtttgagaaatttcattttaaaatggcactccaaatttcaaacaccgccttcatgctgattgtgttggccacttcgcttctgctgttgatgccgtccagcagcagtgccaaagtgatgccccaacttggcttcgcgaatgcagaacaactgatgaatgacaacagcagtccaatgggcgccggagttgagggtgaagtcatggacaaagtggaggcccgacttttgggtgcactggaacttcttcaaagctataaagaagtcccaattgtgcccaaattcacggaaaagcggaagaacaaattcgagttcatccgattcgggaagagaagacgatgatcaacaagagagagagagagagagagtggaaggacagacagtcagacaaaaccatttgagtgatcagagagcggtgatcaatgatacatttttaacaaatacacgtacaattttggtaatattatcgctggcaatgggacattttttgcttttttgatgggcattgaataaagagaaacactgcgaaaaaaaaaaaaaaaaaaaaaaaaaaaaaaa

SEQ ID NO: 85200 - DNA, 1239 bp, Heterodera glycines
ggtttaattacccaagtttgagcctccgtttcctttccaatgggccatttctttcccggcaccgtttccttcccaatttttctctttatgctcgggtccgctcgttgctggtggcattttggtgccaaacagcctcgggtgttcgcctcttcccatgcccaattgaccccgcccgaagggatcgaatcggccgacctccgaatgcccggagtcagtcctcaaatgaatgagtcgtatttgtgcagtgcgttccctttggactccgagagggaccattttatcgtgggtttcgagccggtgctctcttcacggcacattcaccacgtcattgtctacggatgcgaaatgcccggcagcgaagacaaagcgtgggattgcggggagatggcctcgccccggggcagctacagccattcgcccgtctgtgcctcccaaccggacattgtctacgcttgggcccacaatgcccccgagttgcttctccccgatggggtcgcttttcgcgttggcggttcttccgcggttcaattcctcgtccttcaagttcattatatgcgcgcggaggaggatgacacttccggcattcgaatcattcacacggatcggccacagccgcggcaggcggcgacgcttcttttggccactgacggacgaattgggccgaaaaggaaagaacaattggaagtcgcatgcgtcgtcgatgagtcggtggtgctccatccgttcgcctttcgcgtgcacacccatcgccacgggcgaaaagtcggcggatgggcggtgcgcgaagacccaaagagtgggacggacaaatggacacttttgggacagagggacccgcagctgccccaaatgttccaactggtagccaaccaatcggtgaccatcacccaaggcgacgtattggcggcacgatgttcgatggaaaacgaagagaagcgggaaataaaaatcggaccgacgggggaagacgaaatgtgcaacttttatttgatgtattggaccaaaaatggacagactctcgagcagaatatgtgtttctcacccggcccacccatttaccgatggacgaaaagtgccggactgaaccacaccccaaaaaggaaatgaaagaatcaatgggagcgcactgcgcagatggggaggacgaacccattaaattatgcatcatcatcggttgatatatgtacaacaaagaaattcacatgttagaaaaaaaaaaaaaaaaaaaaaaaaaaaaaa

SEQ ID NO: 85201 - DNA, 561 bp, Heterodera glycines
atgtcttcttccccgtccgtctctgtgctcgccatcgtcgcaattgtctgtttgatgtgccaatgttgcttttcggcaccgcatccgtgctgtcccggcagtcaaaaagtggtttcacttatgtccaattacgttggcacttttgccaattccatttccaagtcatcgctttgttcggatgcccaaaatgttgcggacgcgttgaaaggccaactgatcggctgctcgaatggcggcgatcgaactcttttggccgacatcgaagcatctcttgccagtcattctgctgatgagtgtgcccacagcctcggcttcgtccgtgccatgttcgccattgccgcctctgcttcttctcatgccagcaacaacagcgaatggcaggcattgagtacacagtttgttcagaaagtcactgaaattgactcgaaatgtgcagagtttggcattagcattggaaaagtgcccatcgatggccccaagggagaccactcccaacgaaatgtgcctagtacggacagtgtgatttccatgcccggattgaccggctcacacaaacattga

SEQ ID NO: 85202 - DNA, 687 bp, Heterodera glycines
atgtcttctctgctgctctccatcttcccaattgtgtttttggtctgttgcaatgcaatgccaaatttcccgtgctgcccgggcagtcagcaagtggttgctgtgatgtccatttacattgacactttctcttctgctgctgacgagtctacagtatgctttttcgctaaaagtactgtggatggaataaaaaatgaactgtcctctcgcggcggatgccaaaacggaggagaagcacaaattgtggatgaaatcgatcgacagctgaagaatattgcaaaaatggagatcaattatgaggacgagtgcccgtacaatttgggctttgcccgtgccatgttcgacttggccgctgctgctgctggccatgcgggcaacggcacagaatggcaatacatgaaagtacaatttgagcaggaaagccaagcaatcaaagcaattggacaagaaaagaactttgaagttacggatgtgcattttggagtcccaagcaaaggggtttctgcacatcaaaatgtgccgagtccgagccatgtgattgccaatcctggccaacacagttcggttgggccaaggaaagaaagaagaaccgttgtcatcggacttcgatttttgaggacaaacaaatcaggaggaaatagaatagaaaaccattttgttgacatgtcgaacatttatttaaagtaa

SEQ ID NO: 85203 - DNA, 279 bp, Heterodera glycines
atgtcccttctccgtcctcaatcgctgcttcttgtgcccgctctttccctgtcctttgcgctgctctttgtcacttcgtcggaagagggagggcgagtgaagcccggcggatgcccttgggattgggccggcaaacaactgtgcaaaacatcggcaaattgcaagtgcaaggatggcaaaagttgggccaaatgtgtaaagtcggaaggctacgcggccagcaattgttgcgacaaaaattacgtgtgggcatgttgcgggaagaagcccaaacattga

SEQ ID NO: 85204 - DNA, 717 bp, Heterodera glycines
  unsure (1)..(717): unsure at all n locations
atgagcaactttatatttgtttcctttttaactgcagcgttttttagctcaggcctcgctctaccggctccttatgatgctgaatcggtggtatcttttgttttaaatgttccactactttcagctgacgcaaatgttgaagcatctcctcccaatgaaagtgatgctgtttttgagatacaagctccatcaattccggtaccaattgaacatcaaactgctgctgacattactcatccaactgaaactggcaatgagtcttctattgcatcatcatcatccacgccgaaaagtgagcagacgccaaaaaaagtgatgaacatgaaaagcgcgctggaaggcgcggcggccaacgtgtacggggggcttccgttagacaagcagcccaagacgatcgctgaagcggcngcaaaagcaaagcagacgcccgccaaacttccggctgactacgacgtgaaccgcgtggcggaacgcgcagcagcccgtgtgtacgggtggcttccggaagacaagcagcctaaggcgatctatgacgcggcggagaatgcaaagaacacgcccaaaccgccgggcgactacgacgtggagcgcgtggcgcaaaaggcggcacggctcgtctacggtgtgctgcccatcggcatgcagcccaacttcgccggccctagcactgacaagagcaatgtcgacgactcggagaaaccttctgctgctgcgtga

SEQ ID NO: 85205 - DNA, 528 bp, Heterodera glycines
atgagcaactttatatttgtcgcctttttaactgcagcgttttttagctcaagcctcgctctaccggctccttatgatgctgaatcggtggtatcttctgaattaaatgttccactactttcagctgacgcaaatgttcaagcagctgaaaatgttgagatacaaattccatcaattccagcaccaattgaacaacaaactgctgctcacattactcatccaactgaaactggcaatgagccttctattgcatcatcatcatccgcgccgaaaagtgagcagacgccaaaaaaagtgatgaacatgaaaagcgcgatggaaggcgcggcggccaacgtgtacggggggcttccgttagaccagcagcccaagacgatcgctgaagcggcagcaaaagcaaagcagacgcccgccaaacttccggctgactacgacgcgaaccgcgtggcggaacgcgcggcggcccgtgtgtacgggtggcttccggaagacaagcagcctaaggcgatctatgacgcggcggagtga

SEQ ID NO: 85206 - DNA, 669 bp, Heterodera glycines
  unsure (1)..(669): unsure at all n locations
atggccatggtttgcttggtgatggctgtcctaatggaaatggcaaattcaaaagcagtcaaaaaagacaataaaaaaggagcagtggcggcatcaccagcaaaaggaaaagcatcgccaaaaggaggcaaaagcccagcaaaaggaaaagcggcaaaagttagtaaaaaagataacaaattgaaagcaaagaaagaaaccaaaggcattaaagttaaaaatgcaaagccaacaaaaaaaggtaaatcggcaaaaggcgcaccaaaaacagccaagaaagtccaagccgccaaaaaagcaccaggaaaggacaaaaagtcgctagttaagccaatcgtccttaaagcaccggtaccaccccataaaatgcacccgatgattgaatccgaagctgtgccaccgcccgcccatgcgcgttcgcttgcgaccgttccttacagtacaccgggggcagccgaccgtaactcattgccatcgtacacttcggctggcaccaatttggacatggccgatgataatgatgattatcagaattattactacggaacggaagacggcagcagggaatttgatgcatcggcggaggaggaggatgaactatatgangagggaggtcggggcaatgagtgggcagacggacgactacggtattggcagtggacaggatga

SEQ ID NO: 85207 - DNA, 837 bp, Heterodera glycines
atgcgcaccattctcttcatagccatggtttgcttggtgatggctgtcctaatggaaatggcaaattcaaaggctgtcaaaaaagacaacaaaaaaggagcagtggcggcatcaccagcaaaaggaaaagcatcgccaaaaggaggcaaaagcccagcaaaaggaaaagcggcaaaaaaattgaaacctaaaaaggatgctaaaggcattaaagctaaaaaagcaaagccagcaaagaaaggcaaagcggcaaaagcagtaaagggagcgcctaagacagtcaaaaaactcgcaattgccaaaacagcacaagcaaaagacaaaaagtcaccagccaagccaatggttctaaaagcagtgccgccccaccaaatgcatttaatgaatgagaaagttcaaacagctgtgtctccacccgcccatgctcgttcacttgcgaccgttccttacagtacaccggtggcagccgaccgtaactcactgccatcgtacacttcggatggcaccaatttggacatggcccatgagaatgatgattatcagaattattactacggatcgggagacagcagcaaagaatttgatgcatcggctgaagaggaagatggactgtatgaggagggggacggggcaatgaattgggcaaacggacgactaccggattgggcattgaacaggaatacgggcatcaatcggggggagtggccaccaaagtcggggatgctccaactgaaaaacaccaagaattttggaaaaaacttattttccaaaattttgaaacatttggattttaatattcccgttaaaaaactaaatttttttttacccagcctctaa

SEQ ID NO: 85208 - DNA, 816 bp, Heterodera glycines
atggtttgcttggtgatggctgtcctaatggaaatggcaaattcaaaggctgtcaaaaaatacaacaaaaaaggagcagtggcggcatcaccagcaaaaggaaaagcatcgccaaaaggaggcaaaagcccagcaaaaggaaaagcggcaaaaaaattgaaacctaaaaaggatgctaaaggcattaaagctaaaaaagcaaagccagcaaagaaaagcaaagcggcaaaagcagtaaagggagcgcctaagacagtcaaaaaactcgcatttgccaaaacagcagcgcaagtgaaagaaataaagtcaccagccaagccaatggttctaaaagcagtgccgccccaccaaatgcatttaatgaatgagaaagttcaaactgctgtgtctccacccgcccatgctcgttcgcttgcgaccgttccttacagtacaccggtggcagccgaccgtaactcactgccatcgtacacttcggatggcaccaatttggacatggcccatgagaatgatgattatcagaattattactacggatcgggagacagcagcaaagaatttgatgcatcggctgaagaggaagatggactgtatgaggagggggacggggcaatgaattgggcaaacggacgactaccggattgggcattgaacaggaatacgggcatcaatcggggggagtggccaccaaagtcggggatgctccaactgaaaaacaccaagaattttggaaaaaacttattttccaaaattttgaaacatttggattttaatattcccgttaaaaaactaaatttttttttacccagcctctaa

SEQ ID NO: 85209 - DNA, 330 bp, Heterodera glycines
atgtacaaatttttatttttccctcatttttgtatcttaattaaggcaatttcggggctccattgttggaattcgaacatgattttgctgagtgaaatgccggaaaagggcagtgtcactgtacaccaatgtccgtccgggcatcaatgcgtgacggcaaattgttggcttggagtcggcaattacattgtccaaaaatgcgtgccggaccagccaggggccagaaactattgcaaagacttcaacaacatttgccaaatgggctttttcggcatgccaattcattgctcatcttgtaagggtgatctgtgcaacgaagcgcgtaattaa

SEQ ID NO: 85210 - DNA, 1302 bp, Heterodera glycines
atgaacattctgctgaagtctgttctattcatctctcttctgtcactgtttggtgattgcatgaaaaactcagatcaaattggagtcaaaagaaaatcagcaggaataagaattgaggaaccaaatgatgtaaaaggcaaaggaaaagtcgtcgaaacaagcagaaaaggcaaagaaaaagtcggcgaaaaaataagcgttatgaacacagctgaacgcattgaaaaaatggaccttgcccaagacaaagctaaaatggatatagacaccaatggcaaacccaaacaaaatgaggaaaatgctcctccaaaatatgttttcatttggagcggtaacaatgagaagaagaaccttgaggttgacctcagagtgatccgtcactccaaaaaactcagcgaattattccatgccaaaagtgatcaatccgtcaatgcaaaacacggaaagcaggaagcattaccggttccgaaacaggaagctgaaaaaatgctgaaggaagtggaagaatggtacgcacatcacaaaaatgatgaacataaaaaagctccagtttttgtgttcaagtgtaaagacaatgtcagtctggtgataaatgttcatcttgatgcagtccggctttccaaggagttgtcaaatatgcttgaagatactgccgacgaaggatatccgaagccaatcccgagtccagttcagaatttcaaaagtgacatcatgctaaaactgattaaattgtgtgaagaatacaagtacaaattcgatggcctaaagaaaacaactgatgtgccaactggagaagtcgcggaggcatcggcttcaaatgtccaagagggtgacgttggggaggcatcggcttcaaaggtcaaggctggaacaattgcggaggaaatccaaaaattcgttcctccgccacacattatgcaatgggacgtgaaaacggaccttgagatggttcgggccgccgacttttataacatcaatcgtttgatcaacgatgattacattgacaatgtgtacgaaatcgtaaaagtcaaatggatcaatggcaaaacgccgcaggaaattcgcaagggattcggcgtcgaagagccgtacccgccgggacatccggaatgggcacgagttgagaaggagaacgagtgggaagaatcggacgaggaacgtgaggcacgccatgcaaaggaacgagaggaggaagaggagcgtgagagaaaggaagaacagaagcgtaaggaagaggaagcggaacgcctccatcaggaacaactgcagcaacaacagaatcaggaacagcaacctcagtag

SEQ ID NO: 85211 - DNA, 1455 bp, Heterodera glycines
atggaagcaggagacgttgacataattcgacaacaacatatccgctattatgctgacattgatggcaggaaatatccaactgaaggacccgattatgatgttcttctttatgggacggatcttttagtcgacggaaagttatataaaaatgcagtccccactggttatatcaattatatcaatcgaattgaggaacgaattcccgttctcggctcatcaggccgaagcattcaactgaatgcggcgggagatgatcaaggaaataatgcacgtttacatacgaatgttgttggtcaccaaatttcagggagtgtctccttgccagaaattccgattgggggaaactctgattatataaacactggacataacaagcatgatggaaaacccacttttggagacaccaaacgggaagaaaaacagaagaataaacagaaacagcaaaagagaggagagctaatcggtggaaattttacacatataaacaatcaaaacaatgaaaacattggtggtactcaagacatcggacgcatacaaattggaggaatgccaccaggaggagctcttcatttaaatactggtggaaatcgcaacgttggtggtactcagatgattggaggcataaaaataggaaagatgccgacaggagggacatttggtttaaatattggaggcaatcgaaacgttggaggtactcaggagattggaagttcacaagggctttataatcgcagcaatactggagatttgactcatgcattgcgtcaacaacgcaccgaggacaatcacatttcgataaatggacaaatttactcagttgacggacctaatgttaatgttggtgttgaagggcatgatttgagtgtgaatgggagagtttatcaaaacagggccacagagcagtatctggaaattatacaagacaaaaacataagaaatgtaattgtcagtgtgccattatcgttattttctcgcgaaaacacaaccgttgggcaaacgcgacatattcacgctgaatgcgatggaaatttatatatcgaccaatcggcagatgactgtattcgcatattatgcgttgatgtaaaaaaggatgccgctgcaaagaactttgggtcaacaagtggaggctttaattttggatcgacgagtgttttttacaatttttcggtccgaggaactttacatatccataattcgtcacttgagtgtgctaacattgaatgtgatgcatctttaaatgtaactcactcaccaatagaacgtaatgcgcaaatgaaatgtggtgggagtttaagtattgatgagtcaccaatgggaaatattcggcttaactgtgatggatctttgcggatcgaaaaatcgaaaatggaaagcagtcagattgatgttggtggaagcattgggattgttgagtcaccaatgggaagtattgggattgactgtggtggatcttaa

SEQ ID NO: 85212 - DNA, 384 bp, Heterodera glycines
atggccacttacctattcatcgccgctgctgccttcggagcaggaatttactgttggaaggcgtacctcggcccgatgctcgaccaaccgaagagcgacgacgaggagaagaaggctggcagcaagggcgacaagcacaagaagaaggacaagaagggcgaaggcgcagcagcagcaccagcggcggacaaaaaggaggagaagcgcaaggacaaacaccgatcgaaggaggcggggaagagcgacgacagcaaagcgggcaagaaggacaagcacgggaagaaggacaagaagggcaagaagaaggacaccgccgatgcatccaccgtggacgaagcgctgggagaacagagcacagcggagacgagccaagcagaggaatag

SEQ ID NO: 85213 - DNA, 435 bp, Heterodera glycines
atggccacttacctattcctcgctgcagctgccttcggagcgggaatttactgttggaagacgtaccttggcccgatgcttgaccaaccgaagagcgacgacgaggagaagcccaagccggaaggaggcgaagaagcgacgaccgccggcgaggaggagaagaaggctggcagcaagggcgacaagcacaagaagaaggacaagaagggcgaaggcgcagcagcagcaccagcggcggacaaaaaggaggagaagcgcaaggacaaacacaaatccaaggagtcggggaagagcgacgacagcaaagcgggcaagaaggacaagcacgggaagaaggacaagaagggcaagaagaaggacaccgccgatgcatccaccgtggacgaagcgctgggagaacagagcacagcggagacgagccaagcagaggaatag

SEQ ID NO: 85214 - DNA, 549 bp, Heterodera glycines
atggcttcatctttccgctcctcaatcatttccatcgtcgcaattgtctgtttgctgtgcaaatgctgcttttcggcaccccatccatgctgtcctggcagccaacatgtcgtttcgatgatgaaagatcacaccggcacattctccgcttcgatgccaaagtcttcgctttgtatgagtgccgaaagagtcgccgctgcggtggaaaaccaactgaaaacaatttggtgccctggcaatggtagtcaaacactcatcaacgagatcaacgcaactcaatcatcatcagatgagtgtgctcgcagtctcggcttcgtccgtgccatgttcgaaattgccgcttccgccgcttcccatgccggtgccaacgccgatttggctgtccagttccgagaacaagttggcacaattgacagcaattgtgccgcgttgggcattcatgttgggcaaatcagcttggatgcccccaagggagaccatccgcaagtgcatgactctgagagtgtgcttagtaaccctggcaccagcgggtctcacaagcgcttttaa

SEQ ID NO: 85215 - DNA, 585 bp, Heterodera glycines
atgcttcgtccgtccgttctgcccttgggcacttctgctcgtccattggtcctctcctgcgtggccatcgtcgcctccgttggcattgtctgtgcccattcccaatcgaagggtatttccggcgccccactcaatccgagcccttcactgctttttgtgtgtgggctgagtttcgccacgcttttctccgtcattttggccatgttcggcctttcttggctccgtccgatttttcttttgcccattatttgcgcctcgggcgttgtctgcgtctttcacactctctccgtggccaattggctctccgactggtggatcagtgctgatcagtcactcgacttggattggctgatcattttcacctcggcgattaccttccaagcaatttccatgctggtcttttctttaaagcatttaatgattttcaaattgttaaggccttttaccttcaaattcgctgctatcgccttttttgacagtcaaattcaaaatattccattaattgttgcgttaataatcgcttcgactgctgctgaaagtgagctatttctaaaaggtggcggtaaatcatttttatttccatag

SEQ ID NO: 85216 - DNA, 798 bp, Heterodera glycines
atggagaagatcgtctacttaaagctgttgcaatttgtgctcactttgaccatcatttggcaactccgttcacttcaccaattctgcggcacttttgccgacccaaaagccttcctccatgacatctcaattggccattgcaaaaattttacgctcattggaaaggactcaaaaagcggcgaattcagcgctttgttcgaccaggacaaatggcacaaccaactgattatgatgagcagcaccaatggacaactaatcgaagaacagcaacaccaattcatggacgaattggccacgaaattgccatccgctggacgcatttgtattccgataacgatttcgccttttgactggattttttatcggattgccaatgacagaattctcatcgacaatgacattttgtacttttcttccgtccaactctgcgtcgcattgtgcctgcttgtcccccttgtcctaggcacccttctaatgctactctctgtggaagaatatgaaccctgcgcctatttccttgcctcctattttgtcttctgctggtgcggctttgctgcgatctcatccgatttgctgctcaattggacggacttatggacttgctttaacttccaagcggatcacactaatatgccgttggccactttggtgcttagcattgtcatggcgtgttcgtccgtctttgagattttcttcaaaaattcgctgttcaaaaaacgcctcgtgaatgctccagccgccgccgaaaacaatcaccacaaactgcgcaaacattacgccacgtgtgccatcgagtga

SEQ ID NO: 85217 - DNA, 1086 bp, Heterodera glycines
atgtcggattcggagaaagtgacaacgcgaaatgcgcagccaaaagtgttagacaccagagatgatggcaaatttacggcaaaatttatcgcgcccagaagcagggagcccgactcggtgttcctccacatatttgggagcaaaaaagatcctcatttgtatttggacgtgtccgaagtgcaatggggcaatgtgtacatttttgacttgaacaaaacggaagtgatcgctgttcggccgcgcagagttgcggatgaattgaggaagttggaagaacgggaccgaccaccggtgaagagggagcaaccaaaaccgcaaccgcagccacaaccacaacctcaacctgtgacttttcaaaaaattctgtccggtttggtttggccaaccactgaaaagtacaccctgctggtgtcatcgcgtgattttgatttggatggacgaggatcaccgatcaaacaacgtgccaccaatcccgacccgaccagagccgagacaaactacaagggcacattcgacgtcaaaatggcactgacggaaaggccggaaactttttacgtgtgggtttcaagtgccaaggggggccaaaaacggtttgtcatcccggcttatgaggttgactcgtccaaatttgcgctggatatgcgcacaggcaaagtggaaccattccaacgcctggaaaacgtattgagaaagttgaagtcggttgggatgatcaacaacgagcaaatcccgtccggaccaccgaagagggccgtggcagcagccgaaccggcaagggcagcagtggcaccaagtgccggatcggacatgctcaattccattaaggcaatggtgaacaacttaggcgctgtgttggaaaagaaaattgagcaacagcatgccaagctgaagcaggacattgagaccgagctggagcagcgtgttggccaaaaactggtcgctgttggcaaacgtcttggccttgttgatgacacgctgaaggacatgtacaaaaaattgccgcgcgaaattgaggacgtaattgcggcggagtttgatgtgctgtacaaaaagaaattaattggcaaacttgatggaaaggcataa

SEQ ID NO: 85218 - DNA, 321 bp, Heterodera glycines
atgcgcacttttctgttcatagccgtagtcgggttgatgttggccgtcatcttggagaatgtaaatgcgacagggaaaaattcgccgacaaaggaacttatacatgagcaaggtaacctacagaaccatgctaccggacaatcgccgccagacagtccaaaccataaaaatgaccatgaaaacgagattagtaacctacagaaccgtgctaccggacaatcgccgccagacagtacaaaacgggaaacagaacataaaattgagaaaggaaaaccgtcgccagacagtccaaagtatgatgagcaagccttaaaatggtga

SEQ ID NO: 85219 - DNA, 441 bp, Heterodera glycines
atgtcttcttccccgtccgtctctgtgctcgccgtcgtcgcaattgtctgtttgatgtgccaatgttgcttttcggcaccgcatccgtgctgtcccggcagtcaaaaagtggtttcacttatgtccaattacgttggcacttttgccaattccatttccaagtcatcgctttgttcggatgcccaaaatgttgcggacgcgttgaaaggccaactgatcggctgctccgcttcttcccatgccagcaacaacagcgaatggcagacattgagtgggcagtttggtcagaaagtcactgagattgactcgaaatgtgcagagtttggcattagcattggcaaagtgcccataaacggtcccaagggtgtccatgttcaaaatgtgcccaactcggaaagtgtgatttctatgcctggattggccggctcacacacccaatga

SEQ ID NO: 85220 - DNA, 558 bp, Heterodera glycines
atggcttcatctttctgctcctcaatcatttccatcgtcgcaattgtctgtttgctgtgcaaatgctgcttttcggcaccccatccatgctgtcctggcagccaacatgttgtttcgatgatgaaagatcacaccggcacattctccgcttcgatgccaaagtcttcgctttgtctgagtgccgaaagagtcgccgctgcggtggaaaaccaactgaaaacaatttggtgccctggcaatggtggtcaaacactcatcaacgagatcaacgcagctcaatcatcatctgatgagtgtgctcgctctctcggcttcatccgtgccatgttcgaaattgccgcttccgccgcttcccatgccggtgccaacgccgaattggccaatttggctgtccagttccgagaacaagttggcacaattgacaccaactgtgctgcgctgggcattcatgttgggcaaatcagcttgggcactcccaaaggagaccatccgcaagtgcatgactctgagagtgtgcttagtaaccctggcaccagcgggtctcacaagcgcatttaa

SEQ ID NO: 85221 - DNA, 588 bp, Heterodera glycines
atgcgcgccgttctcttcctggccatggtttgcttggtgatggctgttattcttgagacagccaactcaaaggcagtgaaaaaagacaataagaaaggagcaattacaacgccagcaaaaggaaaagcggcgccgaaaggagcagcgaaaggaggaattaaaaaagacgcaaaatcaaagggaaaaggaaaaaaggacgccaaaggcaaaaaggacaaaaaagctaaaccagccaaagggaaagcatcgcctaaaaatgacaaaaaacccccagctgccaaagcaaatgacaaaaagagcccaaccaaaccaatggcagcagtgaaagccgtgccaaaggcggcggagaatgctcagaagggaccgtcgagtgcggaagtggtggcggaggaaagcaacttggacactgaggcggtcgacgacttgggggttggacctgaggcggtcgacgacttgggggcggaagagtcggactttgaccaattggcagaggacgaactgctcgaggacgacgccatgggcggcgaggcggacgaatgggaaggcatgggggaggagacggagatggacagccaaatggcactttga

SEQ ID NO: 85222 - DNA, 735 bp, Heterodera glycines
atgcgcacttttctgttcatagccgtagtcgggttgatgttggccgtcatcttggagaatgtaaatgcgactgggaaaaattcgccgacaaagggacaatcgccgccaggcagtccaaaacatgaaaaagaccgtaaaaatgagcatggtaaccaacagaaccatgctaccggaaaatcgccgccaggcagtccgagagtacaatcgccgccaggcagtccgagaggaaaatcgccgccaggcagtccgagagtacaatcgccgccaggcagtccgagaggacaatcgccgccaggcagtccaaaacatgaaaaagaccataaaaatgagcatggtaaccaacagaaccatgctaccgttccaaatgtggtgcagaaagttgaagtccacaaccaacctacgccatctgctgctgcttcacaccctgtgccaccaacaccagggaacagccctactgcgcatgacagtcaccacacaagcccaaaagttgcccatgttgctgccgccgccactttgggccatggacgccaagaatgtgccaatgtgtcgtgtggtgatgatgtaaccgaggaaatggaccgcgacgatgataagacagtggaacgcgcggtcggcgagtcaccaatcggcgtttcggaatccagcgccacggatgaggatgattctgctgccgtttcggcttacaacaaaaacaacagctcggccgccgcatcagcgtcagttgctgatgactga

SEQ ID NO: 85223 - DNA, 927 bp, Heterodera glycines
atgctgaggattgctctactcatctccattttggcactgtttggtgattgcatggacaagggaaaaagaaaattaggaggaatcagtattaatgagccaagtgaatatggaaccaaagaaaaagaagccatcgcaacaaaagaaaatgctctaacatcaaaggacccgccgacatcggcgggtggtcaaaatgaagcaatcccttcaccaaaaaagccaagccccaaggggaagttgaaaagcgattttggcctaaacttagccaaggcttttccacggccggttccgaaaggaaaaaaagttgaaaatacactatcatcaaaggactcggcatctgaagctcacaaagaattggccaaagagaaaaatgaagaaaatgcacagacctcaaaggtcccgacatcgatggaaaggcaaaatgaaccaatcccttcaccaaaaaagccaagccccaaggggaagtccaaaagcgatttcgccctaaacttggccaaagcttttccacgaccagttgccgaagcaaaaatgggagaagaagctcagtcttcaaaagatccgacaatgaatgccaaatttgtgcaatttgtttggatgcatcgcttatcactgaccttgaaattgagcaaatgccatcatcgctttcaccgcgaatgcgttgatgggtggtttaaaaacaatgacacatgcccttattgtcgtgctgtagttgcaagcagatatttaccaagacctacgcgtacagatcgaatttttgacgccagaatcgaaaacaaaagacgcttcatgggagaaggagaaggaaaatacacaattattcgccctaacggaagtacgcttatggttcacgataatcattttggaaacaattttacggtcgaaaaaactgaagagggctccattcaactcagtaaaaacgatcgcaaatag

SEQ ID NO: 85224 - DNA, 684 bp, Heterodera glycines
atgcgcacttttctgttcatagctgtagtcgggttggtgttggctgtcatcatggagagtgtaaatgcgactgggaataattcgccgacaaaggggcaaactccgcctggcagtccgaaaggtgggcacggcagcaacaaatcgccaacgacgccgcacagtgccggttcgccacacggcacgcagcatggtaaccaacagaaccatgctgccggacaaacgccgcctggcagtccgaaaggtgggcacggcagcaacaaatcgccaacgacgccgcacagtgccggttcgccacacggcacgcagcatggtaaccaacagaaaaatgctaccggacaaacgccgcctggcagtccgaaaggtgggcacggcagcaacaaatcggcaacgacgccgcacagtgccggttcgccacacggcacgcagcatggtaaccaacagaaaaatgctaccggacaaacgccgcctggcagtccgaaaggtgggcacggcaacaacaaatcgccaacgacgccgcacagtgccggttcgccacacggcacgcagcatggtaaccaacagaaccatgctgccgtttcaaatgtggtgcagaacgttgacaacaaacctcggccatctgctcctgcttcacaccttgtgccaccaacaccagggaacagccctactgcgcatgacagtcgctga

SEQ ID NO: 85225 - DNA, 492 bp, Heterodera glycines
atgaggaaacttccattcttgctcttattttctgcttgttgctacttgcaacggaaggaagtatatttcgccgaaaaaacagaaagaaaaattcatcgagcagcgaacaaaaaacacaaagaagaaaccgagggtatggccgaagtcgcactttttcaaatggcaatggcatgtatggccaatcgaatggattttcaaatggccgatttggcggctccagtgtctattcaaatagcggccggtcgaatagctttccaaatggtggatttggcggctccagtggcttttcatcgatgggacataactcgggcggacttcacggctttgggtccggcccaccttctggaggctacggatacggaagcggttttggtggaagaaaatgaaaaaaagaccgaaagtgatcggcgagagaatgatttgtgctgttgccttttatgcatgcaaaatttaaatggaaaaacgcatttcaccagcagaacacttttttaa

SEQ ID NO: 85226 - DNA, 708 bp, Heterodera glycines
atggtttgcttggtgatggctgtcctaatggaaatggcaaattcaaaggctgtcaaaaaagacaacaaaaaaggagcagtggcggcatcaccagcaaaaggaaaatcatcgccaaaaggaggcaaaagcccagcaaaaggaaaagcggcaaaaaaattgaaacctaaaaaggatgctaaaggcattaaagctaaaaaagcaaagccagcaaagaaaagcaaagcggcaaaagcagtaaagggagcgcctaagacagtcaaaaaactcgcaattgccaaaacagcagcgcaagtgaaagaaataaagtcaccagccaagccaatggttctaaaagcagtgccgccccaccaaatgcatttaatgaatgagaaagttcaaactgctgtgtctccacccgcccatgctcgttcacttgcgaccgttccttacagtacaccgatggcagccgaccgtaactcactgccatcgtacacttcggatggcaccaatttggacatggcccatgagaatgatgattatcagaattattactacggaacggaagacagcagcagagaatttgatgcatcggcggaggaggaggatgaactgtatgaggagggggacggggcaatgagttggcagacggacgactacggtattggcattggacaggagtacggtcatcaatcggtggaagtgccaccaaagtcggtgatgctcgactga

SEQ ID NO: 85227 - DNA, 1008 bp, Heterodera glycines
atgaactcctcatttgtcatctgctgctgcttccacaactttgtgttgttccttcttttgagttgtgttgtgccacatgcttttgcttgttgtcctcatggaaatctcagagtgaaaggtacgcatttggccgatgaaaagggcgaaactgtgcagctgcgagggatgtctttgtactggagccaatgggagtacggctcaaagttcttcaacgagaagacggtcaactgcctgaagtgcagttggcatgccgacattgtccgtgctccgttagctgtggaccagggcggctatttgtcaaatccagaacaggagtatgcgaaggtgaagagcgtagtccaagcagcaatcgacaaatgcatatatgtgctgattgattggcattacacgagcagtgagaaatatacggacaaagcgaaggagttcttcggcagaattagcactctgtgcgctggcaaatgcaactgtttgtacgaaacatggaacgaacccatacaaaacgattggtcctcgcagttgaagccgtaccacgaggagctggttaaagtgattcggcagaatgacaagaacggagtgataatcgctggaacgccaaattatgaccaggatgtgaaggcggtagtcaatgacccaatcaaagagcacaatataatgtacacattgcatttgtacgcggcatcgcataagcaagaactgcgcaacacggcacaacaggcaatcggcgcgggagtgccgttgtttgtcacggagtatggcacaagttcgtacacaggcgatggcgggccagaccttgtcgaaacacagaattggtacgactttttcaacaaaaactccctctcgtacatcaactgggccatcgacgacaagcaggaagcgtcggtagcgctgcagaacacacagcccccagtcgggccggccgacgtgtgcagcaccgatcggctgaccaaatcgggcaaatttgtgcacgaccacctcatcggtgtaaaccagaagccggatggctgttaa

SEQ ID NO: 85228 - DNA, 5368 bp, Heterodera glycines
gttcacatatttgacactgccgtcctcacgcgacgcaactgaagcactgttaggtctaatcaattgcccctttaattatccctcccctaatttggccatttgcctaattaccctgctggagcatgccctggttgcgcagggatcccatgatgaacacaaattcgttgtccgcagcaagaccagtgtcgaaaatggacaacagaaagttgcgacgttcaacttcgacatcgaaacaggaaagcacaactaattgatggtaattagcgatgctatcaaattaattatcccatcacttcgcgatcggttgcgcagatttctcagcgtcgccttcatactgtccacattggactccatctgatgctggaaaacaatggtcacattggtcacgttgagcacatttgtgagactctgtttcaccgagttacagaccctaattaaattatattaatagctaattaattaattaattattcaaaataattcttacattcgctcattgtccggagtgtacacgaaggacacttctgtccaattgaattgcaccaacacactttgtaaggccaacgccaacctgcaataattgttgaaattaataagaaatcattggtcatttgatttggtgacggctcgtaaagcaaatccattttagtttattttattagtagaaataataattttaggggatggaaggcgaagaatattttctccactgacatgtccgagttaacgttcacgttgttcagtgtagggtatacggtagtgttgtaaaattccgaggccacagtagcaccccacaaatacagtggaatgttgtagaaggaggccacgtatcccgcggcgatggcacctttttcatttacgcaatttttggcaaagtgtcaaacaaaaaggcattactggtcacacaaggcggaccgatcaaagcgtccacattttccgtcagaaccagttgagtggcgtagccgacagcccaaggctgaaagcagccgcacattcgccacgtgtaactgaaattggcatttacggccaattatttccgctcgcttggagatttttaaatttgcaaaaagtgatttgaaaattgtgagtttctaaattcattccaattgcccacgtgaagttgatgctgtcgatgaggtgctcctgcctcgcccgttcgagtgccaaagtgacggcgggcgcggattggccaaagccgaaaagcattcgcaaccgttgggtgccgttagcaaagaggaagccgatttttaactgaaccgatgcttccaaaggaccagttgatgggagagaggacgaagaattaatcggcggactgatcggcggagggacgccaaaagtggcagtgccattcgtggagggtgcagtagagattgggatgatcggcgaaggagtgccaaaagcgacggtggtgccaatgggcgaagacgatgagttgctaacagtgactaattggtgccgagaagggctgacaaaaagcataagaaagaaaaggaggaagaaacaggacggcatttccattttgagagattttgggcaaggaaattttaaaatgaaatgaattcattaaaaaggcgatttgtcgggattcaaatcccagcggagaaaccttacaaaatgtttcaagctgattcggtacggtcgttttgcggcagtcgcataatcccttaaagggcatttcaaaattccaaaatgaattcgttcttttgaagtgattccatccacttcctcttcagctttgtttgggagggcatcgttaaataattttaccgccaaagttcaaattttttaaagttcaaagtcctgacagagtgacaaattttaattctaagaaatatcgaaatttttaaaatccttatcaataaacaaaaaattataataatacaagtaaaaatgaaaaaatatattcagcaaaaaataaaaatatatatataaataatcggtgctttttcttaagaattttctttaatttttgatagttttcttttcctcttccgtttgaaatatctttcatttccttttttcagttccatgcgtttaattttttccgttttacattttcccattaaataagtaaaaaatgaaaacggctaaaaattttggaaaatccaccacctagctcgggatttaaaaaaacgaaaaatacacccctaaaaattggctaacttggtcccaactcctaatgtgatcacaaaaactacgccaaattttttaggtgatcaaacaaaatgaacggcaaatttaacaaaatgaatggttaagcaatcaaaaaagccaagtttttggtgttcaaattatttgaacagatgtggaaaagtcataaacaaaagctaatggcgaaacgaattcaacaattgacgtctgaataaatttaaagctatggaaatgaaatatagccaaatgaaagggcaaagtgagccaagaaccggcggatgagttcggtcggcttagaggtggagattggcatataaatatcggcaaatgactgttcgccattcaattcgctttcatcgttcaaatgtgccgactccaagcaactcatctgctcgctcgactctttctgcttcttgcgctttgcactgctctcgttagctctctcactgctgttgccccgccattcggccaattgtccgtttccggcaccaatttggtcggcgccaacggacaacccgtacagctgatcggcaactcactgttctggcaccaatggtacccgcagttttggaacgctgacacagtgaaggtaccataaaagcactcacttttcaaaatggattaagaagccaaacatatttgatcaaaatgtgcaaagtgttaatgttaaataggcactcaaatgcaattggaatgccaatgtcatccggggggccatgggcgtggacgagggcggctatctgagtgacgcgaacacggcttacaatctgatggtggcagtgatcgaagcggccatttccaatggcatttacgtgatcgtcgattggcatgcccacaattcacatccggacgaagcggtgattagtgccgagactgaggcaaatggcaaatttgagcattctcaaggtcaaattcttcacccgaattgctcaagcgtacggctcctaccctcacattttgtacgaggatttcaacgagccgctgagcgtttcgtggaccgatgtgctggtgccataccacaaaaaggcgagtcataagagaacatttttggtgaccaaaaggaacccatctgctgaaggtcattgctgccatccgagctattgacaagaaaaatgtgatcattctcggcactccaacatggtcccaagacgtggatgtggcatcacagaacccaatcaaagactaccaaaatctgatgtacgttttcgatcagttttacactgaaagtgtgccaatatggggggggcaaaatgaacgaccatcaaaacgacaaaaaacaattgtcaatccccttaacaacgacatcccttttaaggtacactctccacttttacgcgtccagtcacttcacgaatgatcttggtgccaagctcaaaacagccgtgaacaacggcaagtgctaatatttgtctgggacgtgccgggctcctcaagggaagcttcttctccatctaaactgcttccctaaaggtttgcctgtgttcgtcactgagtacggcacatgcgaagcgtcgggcaacggcaacttgaacactgactcgatgtccagctggtggactctgctggacagcttgaagatttcatacgccaactgggcaatctccgacaaaagtgaggcctgctcagcactgagccccggtacaactgctgccaatgtgagaaagaggcggaatttcgggacattaatgataaattgtcttgaaaggtcggtgtttcgtcccgttggacatcctccggaaatatggttgcttcgtactacaagaaaaaatccaccggtctgtcccaaattcgttgccatttgctggaactaaacgaattcaggcgtaagctgtagcggctcaagttccggcagctcttcgggctcgagttctggctcttccggttcaagttccggcagctcttccggctcaagttccggcagctcttccggctcaagttcgggctcctctggttcgagctcagggtccagctcgggttcgggatccgccagcatctctgtagtcccatccaacacgtggaatggcggtggtcaggtcaacttcgaaatcaaaaacatcgggtccgtgccattgtgtggcgttgtgttcagcgtctctcttccctcaggggttcgtttgaatagggcgatttgttgccattttcgagtgactcctttcttttccaatgtgtcaccgtccgttttagaccacgcttggtggatcgtggaacatggaatccgcaggctccggccaatacagcttgccaagttgggtcagaattgaggccggaaaatcgagcaaagacgcggggctgacattcaacggaaaagataagccaacggcgaaaattgtgacgacgaagaaatgttagggaaaagacaaagcgcaaaatgggaggaaaagaatgggaaaatgaaagagtggagaaaaagaacaaagggaaagaaagacaaagaattaatgattatgataagagataataactgataaagtttagcataaaatgttgaccaaagtacacattagccaaacccaattaattaattggcatttattcgttgcttaattaggggtcggacttttcagtagaaaaaatcgtcacaagtctcattttcgtttctaaattaatcaaaactagctaaatttagtcaataaaccattgcaacatcaaaaaatagtcattctatacagatacgaaaataagtgaaacctataaatttttccacaaaaattttgaatttttttttcgaaaaggggaggttaccaccggcggcggtagtattacataccaagttgaatctcgtgttttcgctgtaagccaagctttccaatcttggaaaaattgaagaataccgccaattttgattttgtaaacagaatcgttcaaagctaaaaattcaaaaaatattgttcctttcgattcctctagggtaaaattgcaagctaagcagtgttaagtgttaaatttaaaaactaattcttaaagtcgcaaagcatcacgctaatggcgagcatgcgatgacgaagcaagtagtggggtgcccgagcgagcggcgccccaattactggccgccgtagtcgagtgtgcggtgtcttggccaaaatgctaagtaacgtcaacggttttctgatggttcggagtaactgggaaacgccaatttttaatgttcagagtgactggtaaacgacaattttaattgaacgatttttcaaaaaaatttacccaatcaaaagtgcca

SEQ ID NO: 85229 - DNA, 3119 bp, Heterodera glycines
tttttttaatttatagaaagaagtctcagtctcaggaattttcggtctcgaacagcctaattttgatcatgattttttgctacaaataatttttaccacccattaaaattttgatagggaagaaaattattttctcaaaaacttcgtgcttcgagctttgaaaacttcgggtttttggggcttcgaacttcgtgctttgaaaaaaattgggcttcgccttcggcttcgagtgctaagccgagcttcgcccgtccctcgcatttccttcttcatacttcaaaatctgaaagagattttaagtgttttttgtcacctaaattattatttctaatcagtcatttcagtccataatttgacccaaagtgctttccgacaaaaaaataatacattattaaacttacatgtataaattttttcaatcatttcaaaagtcattaataagcatattaaaaatgaattgctcaaaaatgaaaattaatttcataggctgtgctaataaaaagaaaatagaaaaacgtattcaaaatgttggagatttacgtctctgagctgtcaaaatcactcacattaagctgaacaaacaaaatttagccaaaaaatttgaaaagtaaaatattgaacagaaaagcgcataagctttttggatgaacgggatatgatcattagtgcatgcgcaagctgaacaatcaaaatgtttggcgaattcatcaaaattttaaattgtcaaattttttccgtttcgtcgccctataaatactctttccaaaatcagttttggcaatccaataaaatttctcttaataaaaaaatactcttcaaataaataatcattcctagctgcttttggtttgatcacaaatgttcgtccaactcgtcctccttgccatcgttggcattacttttgtcgatgctgccgcaccgccgttcggccaattgtccgtcaaaggcaccaatttggtcggctcaaacggcaaaccggtgcagctgatcggcaattcgttgttctggcaccagtggtacccacaattttggaatgcccaaacagtgaaggttggaaaattaaaatttcattttgagcggtttggattgacacagattttggttaatctttgcaataatgacaaattgaaactaagttgaaattagacactcactgttcttggcaatcaatttttgtatattttgtgattcttttttcgggtttgaattgctaaaaatgggctgatcactcacgccaggcactcaaatgcaattggaaaatttaaaaagtgaaaagactgagtcgagatttggctaggcaaagcagctttttggatgaaattattaatcgagtccgatgcttaaattaaagactccgaataaaaaacaaacaaagtttttggctcaaaaagaaggcaatttttaaaccaattaagcctaattgcatttatgcttgtaggcactcaaatgcaattggaattccaatgtcgtgcgcaccgcaatgggcgtggaacagggcggctatctgagtgacgcgaacaccgcctaccgactgacggcagctgtgattgaggcggccattgcacagggcatttacgtgatcgtcgattggcacgcgcatgagccgaacgcggacaaggcggtaattacataatttgattttgcataatatattttaaaaaatcagagattataatttagcactctgaaaaagatggtttagccaaaatatcaaacatttcccctttattggcccacaattattcatttaatttttgaaatatttacctctgatttaatttttatgaaactttaatagtaggaatcttgggttctcgagtgttagaaatttcgattcttgagcacgattcattgttttgcttcttgagattgaattcttcaccaaaattgcgaaagcgtacggctccaaccctcacttgctttacgaaacgtttaacgagccattggatgtgtcttggaacgatgtgcttgtcccttaccataaaaaggtaattcgctgggaaatgaaaattgctaacattctcccccttaaggttatttctgcaattcgtgccatcgacaaaaagaatgtgatcattctcggcactcccaaatggtctcaagatgttgacgtggcggcccaaaatccgatcaaaggattcagtaatttgatgtaagtggactctccattaagtgtaattagtgcatgccgtaatgctgcacaaaactaattaataattttttgcaaaataattaataataattaattaatcagaattatattaatatattcgcgctattaaggtacactctccacttctatgcgtccagtcactttgttgatggacttggcaataagcttaagaccgccgtaaataagggtaatcatatgatactgtatcgtccaaaaccattactgtttgcaaccgtacattaaggtcttccggtgttcgtcactgagtacggtacatgcgaagcgtctggcaacggtaatctgaactccggctcaatgtcaagctggtggagcctgttggaccaactgaaaatttcgtacgtcaattggtcaatcactgacaaaagcgaagcttgtgcagcgctcactggcggaacatcggctgccaatgtgagtgattttgggggccactgataggaagtgccgtccgagaatttcacgccacaaaaaagcgaatatttctcgagtcgaacactaaatctctcgaattcagccatttctcctacaaatttgctcatttcaggttggcacttcctcccgctggacgcagtctggcaatatggtagcttcgcaacacaagaaaaaatccaccggtttgtctgaccaattaaaccgtcaagggcaggacacaatcaagaaatatattgaggatctggatttacggattaagggatttatttaatcagaaccagtcactcataaaactgaaaagtgcaataatatggacaaataataattcacaggtgtgaaatgctaaataaagtctgaagtccggatgatcaactgaaactgaagaaaatggaaaatgtgaagattgcgaaaaataaatatatataaaatttgcatgcgaatgtttatcgaaattccgattaaattgttttttgagcgcagataaatcgcaaagcat

SEQ ID NO: 85230 - DNA, 1266 bp, Heterodera glycines
accaaaatggctgtccctcaggaagtaattgacaaaattgaggctggctacaaaaagcttcaggcggcggctgattgcaaatcgttgttgaagaagtacctcaccaaggacgtcgtcgatgcatgcaaggacaagcgtaccaagctcggagcgactttcttggacgtcatccagtcgggggttgccaacttggacagtggtgtcggcgtgtatgcgccagatgccgaggcttacacactcttcaaaccattgttcgacccgatcatcaacaactatcatggtggctttggaccgagcagcaagcaaccggcaacggaccttggtgaggggaagactcaactgccgactgacttggacccggaagggaaattcatcaattcgactcgcgttcgctgcggccgctctcttcaggggtatccattcaacccatgcttgaccaaggagaattacgtcgagatggaatcaaaggtcaaagcggtcttcgagcagctgaagggcgatgccgagttgggaggcacctactatccgctccagggcatgaccaaggacgtccaaaatcagctgattgccgaccacttcttgtttaaagagggcgaccgttttctgcaggaggccaatgcttgccgttattggcccaccggacgcggaattttccataacgccaagaaaacctttttggtgtgggtcaacgaggaagatcacctccgtatcatttcgatgcaaaatggcggcaatgttggacaagtgctggagcgtctcataaagggagtcaaggccatcgaatcgaaagttccgttttcgcgtgacgaccgtcttggctggctgactttctgtcctaccaacttgggaacgactgttcgcgcgagtgtgcatattcgacttccgaagatcagcgcaaaacccgacttcaagtccatctgcgacggcctgaagttgcaaatccgcgggattcacggcgaacattccgagagcgctggcggcgtttacgacatcagcaacaaggcccgtcttggtctcacggagttcgaagcggtgaagcagatgtacgacggagtgaaacacctgatcgaattggagaagaaagcataatgggaggaccgatctatgatgatgactttatattgcgtaatgtggagatttgctagttgttctgaatctcttaggctttaactatttaattattgtcccaaaatcgtgcttcatccgtatgattatttccgtgcataaatttgtttgtgttcaaaaaaaaaaaaaaaaaaaaaaaaa

SEQ ID NO: 85231 - DNA, 950 bp, Heterodera glycines
ccaagtgattcctattcaccacctacctgctgtcctgttgggctagcgttggcaccaccaaatgcccccgtccgctgatgggcacaggtcgttcgagatgacttgtggacgctgcccaacattacggggcagctgcctcacgagccatgcttttggggtgcttccatacgttggagctgtggtataccgctcagtgctgcacatgtgaaagcctgtgtatggctgctgcgtggcaatgtgtcggtggcgggccgcctcgcttggctggttcgctgcgccaatgtgggatgcacgctcgtggggcgacctaacggctgtgctggcgtctgtgcgtcgttgagcggttgttgtggcaggcacataacacactgactggggatggtggtttcgttcccggtcttacgtgccgtaactagcggtgtgtttgtgcttgctgctacgtccgtggccgtgatgagacgacgcggtagggcccgtgcttggcctagcacgtggcttaagactcaatgagtgtcagctcgggcaccgccagctttttcttttttttcattatttttttttacacttctgttgaagaatgaattctagtcttatcggtggatcactcggctcgtggatcgatgaagaacgcagccaactgcgataattagtgcgaactgcagaaaccttgaacacaaaacattcgaatgcacattgcgccattggagttacatccattggcacgcctggttcagggtcgttaccataaaatgcactgcttgtgcgttgcttcgtgggatcatgtacttgtacgtgttcttacgttacttgctcagctcggctgtggggttttggtgtgctggcgcgaacttgtggttctaattcgcgttttacggaccgtaactcgggcgcaccaatgctttgcatgctgtggcggagtgcctggattactggcattcctgctttgattt

SEQ ID NO: 85232 - DNA, 270 bp, Heterodera glycines
atgaatttgatttttgaaatattcgcctttggaatggacaatttctcatcggaaaaaaatgtttctcttcttcgtcttttcttattctttttctcgaccgtagtattatttggaagcgcacaccctatggtaaacaaattatgcgaagacctagataaacctgaaggttggcaattattgaaaaagttaacaatcgaaaagtgccggatgagtataatgtggaattccccaaatggaaagacagctacaaaagcattaaaaagtttataa

SEQ ID NO: 85233 - DNA, 338 bp, Heterodera glycines
tgaactcaccggacaaggcgtgccaactcgccaaacaggcgttcgatgatgcgattgctgagctggacacgctcaacgaggactcgtacaaggactccactctgatcatgcaactgttgcgtgacaacttgacgctttggacatccgacacggctggcgatgagcaggaggctggtggtgaggcgggcgaagctggtggcaactgatcgggcggacagacgttgaagaccaagaaaatgccccacgaaattttttccaccgaatcatttaatgacaattatgcttttctcaatatggcacttttgattgggtaaatttttttgaaaaaaaaaaaaaaa

SEQ ID NO: 85234 - DNA, 1871 bp, Heterodera glycines
atgttggttcaactcgtcctccttgccatcattggcatttcctttgtcggtgctgccgcgccgccgtacggccaattgtccgtctccggcaccaaattggttggctcaaacggcaaaccggtgcagctgatcggcaattcgttgttctggcaccagtggtacccacaattttggaatgctgaaacagtgaaggtattagaaaataatagacaatttaaaaagtgaaaagactgagccgagatttggctaggcaaagcagctttttggatgaaattattaatcgagtccgatgcttaaattaaagactccgaataaaaaaacaaagtttttgactcaaaaagaaggcaattttttaaacccaattaagcctaattgcatttatgcttgtaggcactcaaatgcaattggaattccaatgtcgtgcgcaccgcaatgggcgtggaacagggcggctatctgagtgacgcgaacaccgcctaccgactgacggcagctgtgattgaggcggccattgcacagggcatttacgtgatcgtcgattggcacgcgcatgaggcgaacgcggacaaagcggtaattacataatatgattttgcataatatattttaaaaaatcagagattataatttagcactctgaaaaagatggtttagccaaaatatcaaacattccccctttattggcccacaattattcatttaatttttgaaatatttacctctgatttaatttttatgaaactttaatagtaggaatcttgggttctcgagtgttagaaatttcgattcttgagcacgattcattgttttgcttcttgagattgaattcttcaccaaagttgcgaaagcgtacggctccaaccctcacttgctttacgaaacgtttaacgagccgttggacgtgtcttggaacgatgtgcttgtcccgtaccataaaaaggtaattcgctgggaaatgaaaatcttacacattctcccccattaaggttatttctgcaattcgtgccatcgacaaaaagaatgtgatcattctcggcactcccaaatggtctcaagatgttgacgtggcggcccaaaatccgatcaaaggattcggtaatttgatgtaagtggatgtaattagtgtattggtaatgctgcacaaaactaattaattaataatttttttgcaaaaaaattaataataataaagaaatttattaatcagaattatattaatatattcgcgttattaaggtacactctccacttctatgcgtccagtcactttgttgatggacttggaaataagcttaagaccgccgtaaacaagggtaatcatatgatactgtatcgtccaaaaccattactgtttgcaaccgtactttaaggtcttccggtgttcgtcactgagtacggtacatgcgaagcgtctggcaatggtaatctgaataccaattcaatgtcaagctggtggagcctgttggaccaactgcaaatttcgtacgtcaattggtcaatcactgacaaaagcgaagcttgtgcagcgctcactggcggaacatcggctgccaatgtgagtgaatttgggggccactgataggaagtgccgtccgagaattgcacgccacaaaaaagcgaatatttctcgaggcgaacactaaatcgctcgaattcagccatttctcctacaaatttgctcatttcaggttggcacttcctcccgctggacgcagtctggcaatatggtagcttcgcaacacaagaaaaaatccaccggtgtgaactgcagcggtggtggtggcgctgctgctaagccagctgctaagcccgccgctaagccagctgctaaatcgaagggaaagtcttccaaagccaagaagtccggatga

SEQ ID NO: 85235 - DNA, 1008 bp, Heterodera glycines; identical to SEQ ID NO: 85169

SEQ ID NO: 85236 - DNA, 1126 bp, Heterodera glycines
ccaagctccactaaatttgtttttttgtgaataacagtcagcaaaaacaaagcaaaaatggacgccatcaagaagaagatgcaggcgatgaagatcgagaaggacaatgccatcgaccgggcggacgccgcggaggaaaagtgccgtcaaacgcaggaacggttggagcgtgttgaggaggaattgcgggacacgcagaagaaaatgatggcgacggagaacgaattggacaaggcgcaggaggacctgacggctgccaacaatttgttggaggagaaggagaagaaagtgcaggaggctgaagccgaagtggcgtcactgaaccgtcgcatggttctgttggaagaggagttggacaagcttgaggagcgccttaaacttgccaccgaaaaaatggaagaagcgacggccaattgcgacgaatcggaacgtgtgcgtaaagtgatggaaaaccgttctctgcaagacgaggagcgtgccaatgccatcgaagaacagctgaaggaggcccaatcgctggcggaagaagcggaccgaaaatacgacgaggtcgctcgtaaattggcaatggttgaagccgacttggaacgtgccgaggagcgcgcagaggccggggagaacaaaattgtggagttggaggaggaattgcgcgttgtgggcaacaacttgaagtcgttggagctcagcgaagaaaaggcgttgcaacgcgaggaagcgtacgaagagcaagtgcgtcagatggaagtgcgtctgaaggaggctgagactcgcgcggaattcgctgaacgttcggtacaaaagctgcagaaggaagtggacagactggaggacgaattggtccacgagaaggagcggtacaaagcaatttcggaggagttggactcgactttccaggagctttccggctactgatctgttcggtcaacggatgcgagcggaagtgtgctgccggacggacttggaaattatttttgattttcctgacaaaacgaaaaacaaacatcattctgttaatgataccgaagagccaattgcttccttagtaaatctgctcaccgttcttttttgatttcgttgggaaattacggcaaataaataaataatgttcaaaaaaaaaaaaaaaaaa

SEQ ID NO: 85237 - DNA, 1211 bp, Heterodera glycines
attccaactaattttctcccaatctaaaaaagtctctctaattaatactaattagtacaaactgctgttgatttgatcacagaatgttggttcaactcgtcctccttgccatcgttggcattacttttgtcgatgctgccgcgccgccgtacggccaattgtccgtcaaaggcaccaatttggtcggctcaaacggcaaaccggtgcagctgatcggcaattcgttgttctggcaccagtggtacccacaattttggaatgcccaaacagtgaaggcactcaaatgcaattggaattccaatgtcgtgcgcaccgcaatgggcgtggaacagggcggctatctgagtgacgcgaacaccgcctaccgactgacggcagctgtgattgaggcggccattgcacagggcatttacgtgatcgtcgattggcacgcgcatgagccgaacgcggacaaggcgattgaattcttcaccaaaattgcgaaagcgtacggctccaaccctcacttgctttacgaaacgtttaacgagccattggatgtgtcttggaacgatgtgcttgtcccttaccataaaaaggttatttctgcaattcgtgccatcgacaaaaagaatgtgatcattctcggcactcccaaatggtctcaagatgttgacgtggcggcccaaaatccgatcaaaggattcagtaatttgatgtacactctccacttctatgcgtccagtcactttgttgatggacttggcaataagcttaagaccgccgtaaataagggtcttccggtgttcgtcactgagtacggtacatgcgaagcgtctggcaacggtaatctgaactccggctcaatgtcaagctggtggagcctgttggaccaactgaaaatttcgtacgtcaattggtcaatcactgacaaaagcgaagcttgtgcagcgctcactggcggaacatcggctgccaatgttggcacttcctcccgctggacgcagtctggcaatatggtagcttcgcaacacaagaaaaaatccaccggtgtgaaatgctaaataaagtctgaagtccggatgatcaactgaaactgaagaaaatggaaaatgtgaagattgccaaaaataaatatatataaaatttgcatgcgaatgtttatcgaaattccgattaaattgttttttgagcgcagataaatcgcaaagcataaaaaaaaaaaaaaaaaa

SEQ ID NO: 85238 - DNA, 2995 bp, Heterodera glycines
gatcttttaggccaaaccaaaatttttgtttagtaatttattttgtttactttcatttttatttacaacagtgtccaattttctggtgtccatttttccattggtgtccaattttctggtgtctttctggtgtccaatttaccgggagccttttcatattccaatgcagaaaattgttagaatttagctactttttgctatttatttttaaaagaaagaaaataatttattaatttaaattaaaaaaaaattattattatatacaaacaaaaattttcaatcatcatttcaaatttaatgaagaatattcggaaatgaggtgatgaggtgttcgaaaatgaaatgctaattttataaggctgtgctaataaaaaaaatagaaaaacgaaatcaaaatgtttgaaaagtttatgtctcggagctgtcaaatccactaatagtaagctgaacaagcaaaaaattagccaaaagttgtgaaaagttaaaataataatcagaaaagcgcaccagttgtttgggtgaaatgaaaatgatcaaaggcatccgtaagctgaacaatcaaaatgtttggcgaattcatcaaaattttaaattgtcaaattttttgccatttcgtcgccctataaatacgctttccaaaatcagttttggcattccaactaattttctcccaatctaaaaaagtctctctaattaatactaattagtacaaactgctgttgatttgatcacagaatgttggttcaactcgtcctccttgccatcgttggcattacttttgtcgatgctgccgcgccgccgtacggccaattgtccgtcaaaggcaccaatttggtcggctcaaacggcaaaccggtgcagctgatcggcaattcgttgttctggcaccagtggtacccacaattttggaatgcccaaacagtgaaggttggaaaattaaaatttcattttgagcggtttggattgacacagattttggttaatctttgcaataatgacaaattgaaactaagttgaaattagacactcactgttcttggcaatcaatttttgcatattttgtgattctttttcgggtttgagttgctaaaaatgggctgatcactcacgccaggcactcaaatgcaattggaaaatttaaaaagtgaaaagactgagccgagatttggctaggcaaagcagctttttggatgaaattattaatcgagtccgatgcttaaattaaagactccgaataaaaaacaaacaaagtttttggctcaaaaagaaggcaatttttaaaccaattaagcctaattgcatttatgcttgtaggcactcaaatgcaattggaattccaatgtcgtgcgcaccgcaatgggcgtggaacagggcggctatctgagtgacgcgaacaccgcctaccgactgacggcagctgtgattgaggcggccattgcacagggcatttacgtgatcgtcgattggcacgcgcatgagccgaacgcggacaaggcggtaattacataatttgattttgcataatatattttaaaaaatcagagattataatttagcagtctgaaaaagatggtttagccaaaatatcaaacatttccccattattggcccacaattattcatttaatttttgaaatatttacctctgatttaatttttatgaaactttaatagtaggaatcttgggttctcgagtgttagaaatttcgattcttgagcacgattcattgttttgcttcttgagattgaattcttcaccaaaattgcgaaagcgtacggctccaaccctcacttgctttacgaaacgtttaacgagccattggatgtgtcttggaacgatgtgcttgtcccttaccataaaaaggtaattcgctgggaaatgaaaattgctaacattctcccccttaaggttatttctgcaattcgtgccatcgacaaaaagaatgtgatcattctcggcactcccaaatggtctcaagatgttgacgtggcggcccaaaatccgatcaaaggattcagtaatttgatgtaagtggactctccattaagtgtaattagtgcattccgtaatgctgcacaaaactaattaataattttttgcaaaataattaataataattaattaatcagaattatattaatatattcgcgctattaaggtacactctccacttctatgcgtccagtcactttgttgatggacttggcaataagcttaagaccgccgtaaataagggtaatcatatgatactgtatcgtccaaaaccattactgtttgcaaccgtacattaaggtcttccggtgttcgtcactgagtacggtacatgcgaagcgtctggcaacggtaatctgaactccggctcaatgtcaagctggtggagcctgttggaccaactgaaaatttcgtacgtcaattggtcaatcactgacaaaagcgaagcttgtgcagcgctcactggcggaacatcggctgccaatgtgagtgattttgggggccactgataggaagtgccgtccgagaatttcacgccacaaaaaagcgaatatttctcgagtcgaacactaaatctctcgaattcagccatttctcctacaaatttgctcatttcaggttggcacttcctcccgctggacgcagtctggcaatatggtagcttcgcaacacaagaaaaaatccaccggtttgtctgaccaattaaaccgtcaagggcaggacacaatcaagaaatatattgaggatctggatttacggattaagggatttatttaatcagaaccagtcactcataaaactgaaaagtgcaataatatggacaaataataattcacaggtgtgaaatgctaaataaagtctgaagtccggatgatcaactgaaactgaagaaaatggaaaatgtgaagattgccaaaaataaatatatataaaatttgcatgcgaatgtttatcgaaattccgattaaattgttttttgagcgcagataaatcgcaaagcat

SEQ ID NO: 85239 - DNA, 1455 bp, Heterodera glycines
caagcatctacagccttcgactgaccatgaagatcgccgctttcgccacgctccttgtcgccgccatcgcccttgttgaggctggcaaccctgctcagcagcagcaacagcagcagcagaagcctaccccggctccttcggccaatgtgaccaaggtgccagccaccacggtccctgccaccactgtgccagccaccaaggtgccagtgccatcgaacgccaccaaggtgccaggcaccaaggtgccagcgaccactgccccaggcaccaaggtgccagccaccacggccccagcgccaacccctgctggcagcaagccaaccccagccggcaacaccaccactgccccaaagccaaccccagctgcttcggtcccaaccaagcagggcaactgcattgaagtgtccgttgaacgtgatgccacctactgcattgctggcccaatctgctcgggctcgggcgacaagccagccggcgacaactgcccaaagaagggcgatgttgccgtcaaggactgcttgaagaccttgaagagctacactgaatcgggcaagtgcgttttgccagaggatgccaagtgccagaagatccacaccggtgcttggggctgtgtgattggcggcggtaacgccaccccagctccatcgaagccagtgacccctccatcgaacaactcgaccactgctccaccaaagccaaccccagcggcctcgaccccatgcccatcgctcccaatcaagaccccagcgccaagcaacaccacggccgccccaaagccaaccccagcggcttcgaccccatgcccatcgctcccagtgaagactgagacgccatgcccttcgctcccaatcaagaccccagctccttcgaccaccaccccatgcccatcgctcccaatcaagaccccagcgccaacccctgcggccaccaccccatgcccttcgctcccagtgaagacgcctgctccttcgaccaccaccccatgcccttcgctcccagtgaagacgcctgctccttcgaccaccaccccatgcccttcgctcccagtgaagaccaagaccccagctcctaccgccactaagacccctgccccatccaacaacggcaccaaggtgccatccaagaccaccccagccccaaccaccaacaccaccaaggtgccagcgaccactgctcctgccaccaagacccctgccccaaccaacgccactgccgtgccaaccaagaagccacagcagcagcaacagcagcagcagaagctctaaatggctttgagtgatgtgtgctgaccgtgtgcagtggtgcgatattcacgatggaagtgcatttagacgctactacggcgacactattcggaagcctttgagagtttctatttgacgacgaatagttgagtcatggtaaaaattttggctatcggaaaaaaaaaaaaaaaaaaaaaaaaaaaaaaaaaaa

SEQ ID NO: 85240 - DNA, 2066 bp, Heterodera glycines
cccacccgaaaatgttccatttggccgccatcgttgcgctagcggcgctcgcactgcccctggcatcttcagacaagttcagaccatgcctcgagggctacgcacaatacggcaaatactgctacaaggcagacaagttcagaccatgcctcgagggctacgcacaatacggcaaatactgctacaaggcaggtgccgaactcgcgtcagtgcacagcgaaacggagcgcgaatttgtgaacatgctcgtccttagggaagcgaacaaaatggaattcaactgcaaacagccgggccgcgccttcttttggtttggcctgaagctgaaatggagcgaaaagaagctggaggatgcaagttggacggatggaaagccggtggactacttgagcccgaccgagtggggcgcgtacaaacggccgttgacgatggacaacgcaggcggggccggctacaacaaagagaacgaaaactgcgttttccttggccaatggccgcgcaaagtgaaggaatatctgtcgctggagacggcgctggacaaaagcggcgtggatgtgctgtggatggacgtggtgtgcgagaagccggaggagtactgggcaccgcacggcgccgtgtgcaaaatgcgcgccaaggaggaggagaagggatacggtaaagacaagtacggtgcaaaggaggaagaggaggaggaggacgaagagcttcgcaagatcaacaagtacgtcaccatcggctcgggcaacttcatctacgccaacaagaacacgtacatgattctcctcctgaaagacttgtacggcaagcagttgaaggaggagagcaggaagaaggtgtgcgaattgtacaatggcgaatatgtgaaggtcaaggacgagccgaaggaggcacaagaatacctggacaaagtgctggccaaggaaaaggagctgtactctgacgccagcgaccacatgttctgccgcttcaccggcatcatcggcgcgtgcggcgagtcgtgctacaaagtgccgttgccaatctgtgccgagggatacgcgtacttcagcgggtactgctacaaggcgttcaccaacgcggacaaagaagtcaaatattcggaagcgcagaagatttgcaagtcggacggggccgaactcgtgtcgatgcactcggagttggagcgcgagtttgtgaatgttgtggcactgactgcggcgaagaaatacgaatacaacgccaaagtgccgggattggccttctactggaccagcatgcagttggagtgggacgagaagaagctaaagaacgccagctgggccgacatgacgccgatggactacttgagcccgatggagtggggcacgaagaagcgtccggtgtacgtggacaactcgaacggcggcgagtacaacaaagaaaacgaaaactgcgtgttcattggccaatggccacgcgagggcaagcagtacctgaagttggactcggcagtagacaagtacggtctggacgtgctgtggagagacgaggtgtgcgagaagccgggcgaggactgtccgcgcggcgccgtgtgtaagaagagggctacggtgggcgaatgctacggcacaggggcgtatctcctggacgcggccgaggaggaggagatgaagaagctgctcaaattcatcactgtcggatccggcacttttgtctatgctgaaaagaacacatacatggtcctcctgctgaaggacttgtacggcaaacagatgaaggaggaggacaggaagaaggtgtgcgcttactacaaggcggagtacgtcactgtaaaggccgagccgaacaaagtgcaagaatatgtggacaaagtgttgtccaagcagaagcagatgtacgcggatgcgagcgaccacatgctgtgtaagttcagcgggacactcggcggatgcggcgactattgcaaaacgggatattgagaagggacggacggaagggaaggaacactttctcattagcatttagtcgtcctttgttttagttaaaatggtgcgctttttctctctgatttattgcataaataaaaaattttaaaaaaaaaaaaaaaa

SEQ ID NO: 85241 - DNA, 622 bp, Heterodera glycines
atgaattggatgcattattgtttaatcgcttgctttgctttttattatttcaatactgttgagtcatccactattaattcggtaaccgtacaagtgaacaagattgaaaacaatgaaaatggaagacaattcaatttggaatttacaaaccaagtttatgagcgagtgtgccacgttgactttcgaattgatctgccagacacagtaagtttttttttttttttggtttttttgaaaataaaaaataagtaaatttaatttttaaaattattaaattgaatttattagtctaaagaacgagttaaatttaggaatgaaaatttatgtaaatgctcttcatgaaactctaggattttctggaagaagcctaaaatggacgaaacgaatttaaattaagaattcgatgaattaaattatctatttaataatgtaattgaacaaatattcaaaaatggtgccaattcctgacacctgcggccagtacgcattgcccaagagtttggacttgcttcccggcgagtcatttgatgcacaattaacactgcttggccatgatgggaagccgaatgtgactgtgctgaacacgaacaatattccaaccagcaaacaatgcaaaaaatga

SEQ ID NO: 85242 - DNA, 2941 bp, Heterodera glycines
atgaactcctcatttgtcatctgctgctgcttccacaactttgtgttgttccttcttttgagttgtgttgtgccacatgcttttgcttgttgtcctcatggaaatctcagagtgaaaggtaagaaatgacaagtcaataattttttaaaatatttcccgggcagatcccaattagctctttggagattcattgtttaacttttcacaattctcgaaattaaaaagccaatcgaatttgtcaaataaaactcaataattaccaaaattatgtttttcgctttttgagctgttatttcatatataatttgtttaattacctcaaaaggtgcatagtttttgaatgatttcaatatgaaattagattgaaaattttgagaatgaattgcctttcccgcgctatttaaatccggatttctcgaattaatctgacattccttaaaatttttgccttaaaattcgccccataatctcatttgacggcttttaattctgtgctcataaaaccgaagaaatgcgcacataaattttaccaaattgaggttaatttctcaaaatttcttcaagtcctttaaatttaagctacaactctcgaaaatagctaagatatgcctatctaaagggaaaacgctaaaaatttataaattctaagaaaacaactaaaaaatagaaaatttctttttgatcttatattttgtcgtaatttccaatttttataaagatttatgattatattattattaaaatgccaaatatttttctaattgatttatgaaaatttctgtccttatgagtcaaaaggtccaatataattaaggtgctagttttaatggtattttttaaaaagagctccaatatcataaaaataatcacaaaaggacgtgaatatatacagatatacaaaatatgcatatcgaaatgggtcatagaagtttcaaaccaaggcacaaaattgttttatgtgcattttaacaagctgtttccagcccaagaaaaatgcttttgcacttaattaattacaaagccctattcatttgtaaggtacgcatttggccgatgaaaagggcgaaactgtgcagctgcgagggatgtctttgtactggagccaatgggagtacggctcaaagttcttcaacgagaagacggtcaactgcctgaagtgcagttggcatgccgacattgtgggacaaagcggggggcgggagacatttcaagaaattcaaaattatttactctttcacagtgttttatggcagggatttattcagattaagtgaggccaaaaagttggggtcaatttagcagtgaaattacaattatttatttttaaattcattgttgtttaatactcaccagaagacgccacgaggggtgttcagccaatgaggaaaattataattcatccgcctcattttaatccaatcttatgaaaagttaccaaatcggtccctagcattttctggcactccccacggcgaatataaaaaaaagtgttaaatctctgtccccaaaaggtccgtgctccgttagctgtggaccagggcggctatttgtcaaatccagaacaggttttgtccactgatcacgttgacagaaaataaagagccaattcaaggagtatgcgaaggtgaagagcgtagtccaagcagcaatcgacaaatgcatgtgagaattaaggggggcgagaaatccatttaacgagaaacgagaccgagaaatggagagagagagcaagagagagagagagaccgagaaatgaccctgaaaagtgccaaaaatcacaataacaaaaatataagcgagaccacgaaaatcccgagaaactctcggagaattaattctctcccccatccacctgtgttatgctgaagagcaatctctttaaacgaatttttacaattttgaattgggacaaacactcaagatatgtgctgattgattggcattacacgagcagtgagaaatatacggacaaagcgaaggagttcttcggcagaattagcactctgtgcgctggcaaatgcaactgtttgtacgaaacatggaacgaacccatacaaaacgattggtcctcgcagttgaagccgtaccacgaggagctggttaaagtgagattttaaatagccatttaatgggtgttggcggaaaagtgattgatcaggaccatgttttggaggttctcattcttaggtagcaccgtaataattagatctaagccattgagacagtatattttttatcattggaaatcaacttttttcccctcaggtgattcggcagaatgacgagaacggagtgataatcgctggaacgccaaattatgaccaggatgtgaaggcggtagtcaatgacccaatcaaagagcacaatataatgtaataaataccgaataaatgatagtgggggatttggggtgggggggggggaatggtgggccaatgcttatccgaatacgaggatttgatatcctacgcctcttccccgccgcacaaaaggtacacattgcatttgtacgcggcatcgcataagcaagaactgcgcaacacggcacaacaggcaatcggcgcgggagtgccgttgtttgtcacggagtatggcacaagttcgtacacaggcgatggcgggccagaccttgtcgaaacacagaattggtaattttccagggaccctatttcgaaaaggataaatgtttacaaattagagagggctttcaacgaattggaatatcgaccttttgtttcgaaggtacgactttttcaacaaaaactccctctcgtacatcaactgggccatcgacgacaagcaggaagcgtcggtagcgctgcagaacacacagcccccagtcgggccggccgacgtgtgcagcaccgatcggctgaccaaatcgggcaaatttgtgcacgaccacctcatcggtgtaaaccagaagccggatggctgttaa

SEQ ID NO: 85243 - DNA, 1366 bp, Heterodera glycines
gtttgagagtaaataagcaaaaatgtcttctgtgagcaaatttatcaccaacaaagggccctttattgctgttggaatgggtgtggttggaatgggctattttggctactacaaattttggcgttcgtcgcgtgagattgctatgtcttacaaacaagaagacgaatcggatggatacacagtgaaacgcattgaggaggcatacaaaactcttcaggaggcaaaggattgtaaatccctgttgaaaaagcactttactgctgatgtgaaagacaaattgaagtacaagaagacgaaattgggtgcctctctcttcgacgtcatcagatcgggtgtcaagaatcttgactctggagttggtgtgtatgcagctgattccgagtcatacaaagtgttctcgcctctttttgaccctgtcatcgacgaatatcacggcgggtttggacccaaacaaaagcatccgccttcaaactttggcgaggaccgattgggcgaattgaaggacttggacccagatgggaaatacattctttctaccaggattcgctgcggtcgttctttgcttggctatcctttcaatccgttgttaatgcgtgacgattatttggtcatgcaacaaaaggttcgaatggctctcgagaatttggaagatgaccctgaaatcggtggaacttattatccactcgaaggaatgacgaaagaaacccagaaacaactcatcgccgatcatttccttttcaaggaaggcgaccgttttttggaggccgcaaattcaaaccacttttggcctgcaggacgtggcattttccacaatgctaaaaagacctttttggtgtgggttaatgaagaggaccatttgcgcattatctccatgcagaaagggggcgatgttggcaacgttttgaaacgattgatccgcggtgtgaaaggtatcgagaagcaagttccatttgcgcgtgatgatcgactcggctatctgacgttttgcccctccaatctgggcacgaccatccgtgctagtgtgcacatccgtttgcctaaaataagcgcaaagcctgaattcaaaaagatctgcgaggacctcaagttgcaagttcgcggcattcacggagaacactcggaaagtgaaggcggggtttacgacgtgtcgaacaaggctcggcttggacttaccgaatttgaggcggtcaagcaaatgtatgacggtgttaagaaactcattgaacttgagaaggcgtcgaagtgaatgaattaaatatctatatccatttgacgcctcgtaattgcattgctttaatcacaatattgtatttttgtataggtctatagggtcagaaaatgtattgcaaaaaaaaaaaaaaaaaaa

SEQ ID NO: 85244 - DNA, 1890 bp, Heterodera glycines
gttgagttcgatgcattttcacaaattgtttttgcttttgcctattttgcttctccatctccaacaatcccaagcttgcttttcacgtggcaacagtggcgaaccgtcggatggcaatcccgaggcccaggggctaaaatcggaaaacgatgttcggactgttcagttgaagaaggaaaaacaaacggatgaaacggaagaggagaaagacgaggaaagttcggcagaacaaaaattgccatctgaattggacccggaatttgtgaaaacttatctgcgagaatttggtcatctgaagcacaatgagaatggcctttcccatggcgttaagcatttccaacgctttttgggctaccggcagacgggcaatgtcgacttggcaacccttcaaaaaatgtcgtggaaacgctgtgccaactctgacgagggctacacagcacaagacccatcgcaactttgggaacgttcgacattgttctggaacctgaacgcgtcgcaccccaagcagttcactcatggcgaaacgaaggaattaattgcgcaagcattccgcgcatgggaaattgtgatcaaaatcgactttctggagacgaacaatgcggacaatgcgcagatcattttcacatttgaaagcgacggagcaaaaaaggagaaaagcaaaaatggggaggaggagaaggaaaaggagggcaaaacaggcctcgccattgccaaggcgtcgtcgccgcccgttgcgcgaattgttttgaatgccgacgagaattggtccacttttcaaacacaagaagagggaaaaatcgacatttttgtggttttactccacgaaattggccatgcgcttggccttcgccattcgggagacgaacattcagtgatgttcccaatgtttgagcgttctgttggcgaacatttgccagtcatttcaaatgatgatgtcgagcatttgagagcactttacgagggcgacctcaccgatcgaccaacacttgcggccgatctgcgcccaacgaggcccgtgcccgtccagggcggtacgcacagcacagactcatacggcggcgaaggagctacgacagcagcaggaaaagaagctgaaaaatgccctcactccatcacaacggcagcgaatgttaattccgagactttgttcctcttcaaggacggttacgcatggcatttgagcagaggaaaattggtcggaggcccctacaaaatcagcgagtttttcccggacggtcctgaaaaggtcgacgtcgcattttcatccggtcgactgacagtgctggtcaaatcgcgcatgctgttcggctatgagtttgatcagaaaacggcccaattcacgcgtgaccaccgttacccccgcgaattgcacagccgaattcttttctaccccgagggcgcttttccgattgtcaatggaagcgtaattttgttcaaagacgatgtgttcgccacttacaacgtggagagcaacacgccgcatttgttcggaagcatgtccgaatttttccccggactgccccaaaatttgcgcgccggttttgccgccacgcccgattttaccacctaccatatgctgaccaatgattacgcatttttgtacgatgttcgcgtggcacgaacagtcagctcacaaagcattggccagtttgttggctgtgaggggaacaaattaatgcctcctggtccaccgatgcctcatcttttcttcccataccagccgtctccacctcaaaatccgcgattcccacaacaaaattatggaaaataaataaactggtttttggcaattttatgccaattttattcactcgtacaattttatttgtgaccatttcaagcattttttcaaattaaattaacaaattgtccaaaaaaaaaaaaaaaaaa

SEQ ID NO: 85245 - DNA, 1268 bp, Heterodera glycines
gaacaatttttgcaagacgagaggcaaagagtggacaaactgttcaacaacaataacaacaacagcaaaagcaataataagccattagaaaaagcatatggaggagcatttgcaacctcgagttcacatgacatgcaaatggcagcctcaacatcaacagttggggaagaagcagcagcagagaatgtgcaccacaccaatcagaaattgcagcaatcggcaacctcagcggcggaaggtggtggcaaattttccgattttgaggatggaagtgacaatgaattgttcatttccaccaccaccatcaacaacaatgatggtgatgatgatgatgatgaggaggaagaggagggaaaggaagcgattccatggcacgggggcggcaaatatgccaaatgttttgagcaaattgtcagagatggcacattggtggccaaagtccggtgcctcatctgtgccaaagaattgagcaccaaaagccgaacaagcataagagagcacagcaaattgcaccagttggttgccgaatcaggcatttttgaccattcgcaagagggcatttttgacggaatgatgccggaggcggttggcactgcgttagtggaagaacggacgccaattgttatcccatttcgacgccgggttacgaccacggaaatgatgccatcaacatcagcacaacagaaaatgcgtagtcaatcggtggaggacgacattttgaatgatgaagagctgcagcagcagcaaaacttggcacattttgattggaacaaacagaaaattgaactgcaaattttggaggccgaactcattcagaaacagttgtccaatttccagcggtgcactgagcttggcataccagctcgtgtccatcttccggttggcattgtgccaagtggctcacaatcagcgaccggatggaaccgccgctttgccaccttttcaaatgcgcacgcgcttcagcaacattcccccgcaggaaggcaacaacgacaaatgccgcatgggcacgcggacaacggctcgcgcgacaacggcggcattgccggaatgtttgctgctgctggcgatgacgacgacggcacgccttgcgatttcgtggcatttgccgacatttaattaaaaagagccccgagcttttcttaatttgtcattttgtttatagataataagtattattatgcgttcctctttttttatatacacaaattgtgcgttccttttcaatgtaaaaaaaactaatttttccaaaaaaaaaaaaaaaaaaa

SEQ ID NO: 85246 - DNA, 222 bp, Heterodera glycines
cctgaacgtgttcggcctccgctcggtgtacgcgctggtgttgggcggcgagaatgcggccgagatgatggacgagcaggcaatgctcggcatggcacagccacagatggtcgcgccgggccaagacccgattggggcgttcaaatccgaatgggaggcgctgcagctgtacacgcacacgttcaacccgagatagaaaaacggaaagaaaaccgtcgataa

SEQ ID NO: 85247 - DNA, 471 bp, Heterodera glycines
  unsure (1)..(471): unsure at all n locations
tgttgaaggcttgtgacaaaaatatcaacaccaaacagcagcggagtaaggattcgacgtttcagaaatggaccaaacacccgttgaagatcggtctgttgagctatgttccgatgacgacgaaacaaatttaactggctaaaccgattctgaggattactttatggtggaaaaacaattgagagaacgtcgtgttggaatacaaaatttctcttcgatggttttgtttgaccggaaagcgaagcagcgacaaaaaatggcagaaaagcggaggaaagagcgaaacaatgcgaaattgatactctatggtcgtccccgcaaaacgaaacaatgctcttcagttttttcaaaggaagactttgcgcaaattggaaagaaagatggcagttcagcatacgaacgcattaaacgaattcgataaaatacttctttttgttcgtgtttattttaataaattacttttccatgana

SEQ ID NO: 85248 - DNA, 409 bp, Heterodera glycines
gttttttttttttttttttttttcgaattcaaaatgtttatgccaataaaattcattaaataaaacacaaatgaacaaacaaatcaattttaaatggtcggttattttgtttttggccttggaatgatcttctgggattatgtacaattgcgtatcattttttttgggacacctaatttatcattttcaatattttatttgtatctgatagcaacattcctcaattgggtattgagcttccaatttcatggcaagcaacaaatccattcgaatttttcgaaacaattcgatgatgtgaaaaaatccaaacatgtaatttgcatccatttttgaatccggcttttgaaggaaaaattcatgtgaaaagctaatcctaaacaaactgacggatggcattaaattggaatgg

SEQ ID NO: 85249 - DNA, 352 bp, Heterodera glycines
  unsure (1)..(352): unsure at all n locations
tttttttnntttttttnntttttttnnttttttctcttttttttnnttttttttnnnttttttttnntttttttttttttttnttttcccccaaaaaattttttttggtttcaattaattaaataattccctcccgggggacaataaatacccaaaaacaaagtttaaaaaggcctttttcccctgggaaaaaaaaaaggggaaaagggaataatattttgtttgaaaaaaccaaaaaaggggggaaaatgccaaagggaaaacaaaaagtttttttttttttcgggccccctccccggggggggtttttttttccttttttccccctttcccccccctttgcctttcgctt

SEQ ID NO: 85250 - DNA, 627 bp, Heterodera glycines
ggagcaggacgaattgggcaacagcattggcgttggcactcgcattgtttcaattgcagagcaacaacatctccaacagcttttgcccatgtctgtggtggagagcagtagtagcagcatccatggacgaagacatcaacagcaacaggacatcactgcagcacaaccggaacaccatcattatccaattccgattggtcagcgccgatcggcttcatcttcggcatcggactttgttgcgcaacattcaccgtttgacagcggcaataaatggttccatgtggtcgatcttccatcgtctgaacaacgctttgtcatcacggaatacagcgtaccatgctacgacagaggaggcggcggcagcggattagcaacaacaacggaaagtgtacgccggaaaagacgcgcaatcgaatatgcttcacaattgcctgacgaacaacaacaggaacagcaacaaaagactgctgcaaccgaacaaattgcgcttgagcctggcacgttgtacagaattcgtgttcgggcaatcaattcggtgggctgcagtgcatggtcacagccggtcagcttcaagacttgtgttcccggattcccaggctcgccgacaagcatcaaaatcacaaaatg

SEQ ID NO: 85251 - DNA, 332 bp, Heterodera glycines
ttttttttttttttttttttttgcattttattagtaaattatcaaagacataaatagtattaagagcaatcaatcattttgtcaaagtgaatgtgaaaaatcacaaaaaaacaacctaagaaaataatttatttcaaattcttattttttgggccgcctattcgttcgtccgacagccaattcaattggcagtcagtcgagggaattcagtttgttcacggagcatcgctcaaagcggggacgccgggcagaaccttgccttcgagcagttcaagactgggaccaccaccggggctcacgtgggtgactttgtcctctgctccccatttctc

SEQ ID NO: 85252 - DNA, 561 bp, Heterodera glycines
tgggagggagccgagcgcaggaggggacaaagggcgaatgtgtgccggatcagggagttcggatcgacggccgaggccaatggcagggctatcacgcgctgatcagttccgtccagctgtttcgttttggtggcgaagtgaatgcgggccaaagaattggcgtggcacgagatttggaatgtgccgggacgcggcccaagccgaggggcgacgaaaatttcgtgcgcatggaactcttccgagaggacaaacccatcgacccaacccatcatctgatcgactgcatgtgcaccggccaaatttgcgagacaaatcgcgcaaatgccctcgagggactcccatttaaatttgacagccgtttcaacggagtgcgcgggtgggaaatcgtttgtccgaatgttcggcccgaagagccgaattcgtcgggcgaatcgcctgaacaaagtgacaacagacaaacaatgagtcccaaaatttacagtcccatcgaaggcgaagtgatcggtcgcgtgcggctgagtgcgtcgagcaactcgcaaagctattcgggctgtgccaacg

SEQ ID NO: 85253 - DNA, 154 bp, Heterodera glycines
agcgcggagacggcgatgtccgcccagaagcctagaagcgggcgcagggtcgcgatgtgggattcgggagcagacaggaagaggaagccggggcgtcgttctttgtggttgatccactgccggatcgagaacggctccttgttggtcatcaccc

SEQ ID NO: 85254 - DNA, 534 bp, Heterodera glycines
caaagaagcagagaaaaaagagaatgaggagcaaaagcctgctggcaagaaggagaagcgcgccgcagagaaggaggaaaagaagtcagaaagcaaggaagcagagaaaaaggagaatgaggagcaaaagcctgctggtaagaaggagaagcgcgccgcagagaaagaggaaaagaagtcagaaagcaatgaagcagagaaaaaggagaatgaggagcaaaagcctgctggcaagaaggagaagcgcgccgcagagaaagaggaaaagaagtcagaaagcaaggaaacagagaaaaaggagaatgaggagcaaaagcctgctggtaagaaggagaagcgcgccgcagagaaggaggaaaagaagtcagaaagcaaggaagcagagaaaaaggagaatgaggagcaaaagcctgctggtaagaaggagaagcgcgccgcagagaaggaggaaaagaagtcagaaagcaaggaaacagagaaaaaggagaatgaggagcaaaagcctgctggtaagaaggagaagcgcgccgcata

SEQ ID NO: 85255 - DNA, 548 bp, Heterodera glycines
gaaattttcaaatcgtaaaatgaatttgcggcatttattgtttattatattttttaatattgttgtaattgactccggcaaaatccaaccaaattttgatgaaatattttgcaacggatgggacaaaattgaaagtgaagaaattgtgataaaaattgaacaaaatgaaaacagtgaagttgatcaattaggtgaagaaatggcaaatggtccaattgatcaaatgagaaattataccgatcagaaccattcgaaaagtgatcagaatattatagaagaaccaaatgatcagcaaaagagagaaattgttcaaaaatttgatgcaattaaagaaaaattacgtgaaaaaataaaatacaaaaggaaagattatgacaaaattgaaagaaaaattgcaaaattattaggcgcaaatcggcaattaatacacaaatggaaaaatgaattaaaattaaataaaaagaaaatgaaaaaacaattatatgatgagaaaaagcgcaaattcattgaacgatttgatgaatttaaagaattatatggtcaacgaa

SEQ ID NO: 85256 - DNA, 566 bp, Heterodera glycines
accaaattcactcaacatcatcaccaaccatgaacattctgctgaagtctgttctattcatctctcttctgtcactgtttggtgattgcatgaaaaactcagatcaaattggagtcaaaagaaaatcagcaggaataagaattgaggaaccaaatgatgtaaaaggcaaaggaaaagtcgtcgaaacaagcagaaaaggcaaagaaaaagtcggcgaaaaaataagcgttatgaacacagctgaacgcattgaaaaaatggaccttgcccaagacaaagctaaaatggaaatagacaatatagacaccaatgccaaacccaaacaaaatgaggataaaggcgttatgaacacagctgaacgcattgaaaaaatggaccttgcccaagacaaagctaaaatggatatagacaccaatggcaaacccaaacaaaatgaggaaaatgctcctccaaaatatgttttcatttggagcggtaacaatgagaagaagaaccttgaggttgacctcagagtgatccgtcactccaaaaaactcagcgaattattccatgccaaaagtgatcaa

SEQ ID NO: 85257 - DNA, 617 bp, Heterodera glycines
attgattgacgtccctcttccggattcagagttccagttcgcaccatttggcaacttcgaccagttccggcagttgttcatccggcatcggttcgtctaccgctacagctgtcctcccccattgttccgtctttccccccaacgcttcgcccgaagctcccgccagcgcttcctcccgcctctcttccgctggctcttcaactcattgtcgttcttccgcttacttttccatctccgatgggttggattcgtcaattggccctggcgggactttgacagtccaaaaaaggacaaaagaaaaatgcccccgagtaaatatcaccgaaatgatggccaagggcataccggtaatatccaaccgaaggctgttaaatttataatgggattaaaaaaggaggcagagatttatgctgagtggcttcaaaggctgtgcctttccgagtatttggccctgtttcttggccagggctatgatttgccgacattggcacggtcatcgccggaggatttgacaactttgggcattacgcggcccgaggaccggaaaaggcttttccaagacatccagacttggcgaaatgtaacagcgaattgcaaaaaaatcaattgagtcgaat

SEQ ID NO: 85258 - DNA, 596 bp, Heterodera glycines
accaaatcgccggccaaccccaaactgtacgccaaactgaacgcatgtttgaacacactgctcgactacaagacgagcaatggcaaaaagttggccggcccattcgtgcagttgccttcccggcgtgaatatcccgactattatgaccaaattgaacgcccaatggacccgcaacggattcggaagaaaattgaggaggacaaatacacaatgttggcccaaatgagcgcagacgtggatttgctgtgcgaaaatgcacagcgtttcaacatggacgggtcggaaatccacgagggctccaagctgttgaacatggtgtggcgtcgcatcgcggaggcaatcggtggccagggcggcaaggaggaggaggatgagaccactggacggggtggtggagcggcacggcacacgccgcaacaggaagaagcggctgctgcaccgtcgacatccggccacgcaaaggcaccagccgaagacgatgatgtgccagtgtctgctgctgctggtccttccacttcatcgatgatgaactcggaaaaggacaccaattgaacgacgctgtgactgaacaaattcgtcggaagggatcgatgcaa

SEQ ID NO: 85259 - DNA, 626 bp, Heterodera glycines
tatgcgaaggcttacgggagaatgggcgttgcactttcatgtcagaatcgttacgatcacgcggttgaagcgtacaaaaaggcattggaattggatcctggaaacgaaagctacaaaaacaatttgtccatcgccgaagataagttgctcaagactcgcgaaacacttcgaaacaatccgcagccgaaccctttcgccaatatgttcggtggtccgggtggaatgggcggacttatgaacaacccagaaatgatgagcacaatcaccaatattatgcaggaccctagtatgcgaaatatgatgacgcaaatggttcagtctatggggcagccgggtcaacaaaatcaggaccaaggccaagctgggaacccttctgcaaatgctttctctgagatgcttcgtgttggagaggctcttgctagatcgatgcaagagagtaacccggatttggttgagcagctccgtcgtcagttcggtggagaggacggaaacgatggtggcgccggagctggaggcaatcagaacaacaacaaccagcagcctccgcccggcagtgtttgagaagtaaaaatatcagtgaaaaggagggaacggacagaaatttatgtgatggtccgattaattgt

SEQ ID NO: 85260 - DNA, 571 bp, Heterodera glycines
gacactgtaattttggccgtcgaagtgacagcggacgcgcctcatggagtcaattgggacagcaaaaaggacactggatacattggattgaagaaccagggtgcgacatgctacatgaattccattctgcaaactcttttctttacgaacaaactcagaaaggctgtttatcaaatgccaacagaagaagacaatccggagagttctgttgctttggccatgcagcgcgttttttttcgagcttcaattttccgattcaccagtggggaccaaaaagctgacaaaatcatttggatgggattcgatcgactcatttctccagcatgacgtgcaggagttctgcagggtattgttggacaatttagactctaaaatgcgcaatactaaggtcaacgacacaatcccctcactcttcaaaggtcgcatgaagtcctatatcaaatgcaaaaatgtcgacttcggatcatctcgagaggaatgtttttatgatctccagttaaatgtcaagggaaagtcaaatgtccttgaatcgttccgggattacattcaacttgaaattctcgatggagag

SEQ ID NO: 85261 - DNA, 571 bp, Heterodera glycines
gtggcgtctccggtgaaagccggaaaagctactacgaagacgacggctagcggaaagggcggcaaagcgaaggcggacggaaaagtgaagacgggcggaaaaggggcgaagaaggcgggcggaaagggtggaaaagtgaagattgctgcgagcggatcgaagaacacgcgctctgctcgtgctggcgttgcatttcccgtcggacgtatccatcgtttgctgcgcaacggtcgccatgctcagcgcattggggccggagcgcctgtctatatggcatcggtgttggaatacctggcggccgaagtgctcgagctagccggcaacgcggcgagggagaacaaaaagttgcgaatcactccgcgccatttgcaattggctgtgcgcaacgacgaggagttgaacaagcttctcgcggaggtcaccatttctcgtggcggtgtgttgcccaacattcacacggaacttttgtcgaagatgcagcagaagaagcagcagaacgacgacagtcagtgaacggtggaagaagaaacggacggatagaaaatgaatgatcccaaatatctctcctctc

SEQ ID NO: 85262 - DNA, 482 bp, Heterodera glycines
tgggagggagccgagcgcaggaggggacaaagggcgaatgtgtgccggatcagggagttcggatcgacggccgaggccaatggcagggctatcacgcgctgatcagttccgtccagctgtttcgttttggtggcgaagtgaatgcgggccaaagaattggcgtggcacgagatttggaatgtgccgggacgcggcccaagccgaggggcgacgaaaatttcgtgcgcatggaactcttccgagaggacaaacccatcgacccaacccatcatctgatcgactgcatgtgcaccggccaaatttgcgagacaaatcgcgcaaatgccctcgagggactcccatttaaatttgacagccgtttcaacggagtgcgcgggtgggaaatcgtttgtccgaatgttcggcccgaagagccgaattcgtcgggcgaatcgcctgaacaaagtgacaacagacaaacaatgagtcccaaaatttacagt

SEQ ID NO: 85263 - DNA, 584 bp, Heterodera glycines
gatccaaatcaacgcggcacagtaataaaatattaaaagatccgaaaaaatgccaaacattttcaaaatccttctgattgtgcttttggccgtcgtctcattccgtctctcggcttctactggtgacaaaaaaactgctaatgatgggagtggaaacaactcatcagctgggattggtacgaagatcaaaagaattgtcaccgctggactgctcttcacttccctggcgacgggtggggcggaagcgattgggcgaagcaatgctcagggaggaaatgccgccggattggtgccatcgcatgtgaccaatcgctcaatggctccaccacctcctcctgtacaatttgaaatgggggcaaatcgattagaaaaaatgagggcacacctacgcgaacttgctgagaaaatgccggtcaatgaatcgaagcgtctgtcaccgagtggacccgaccctcatcatcattagggccatggatggatctaacggaggaagaaagaatggatgcttagttttcagattttattctatcctcttttatttattagttgttcaaaacaaatttcttccacaactttttaaacta

SEQ ID NO: 85264 - DNA, 665 bp, Heterodera glycines
gctcactatcgcaatcggaaggcgttatgggctggtcggacccaatggaatgggcaagacgacgctgctcaaacacatcgctgcccgcaaattggcaattccgccaaacattgacattttatattgtgaacaggagatcgaagctgacaaaacatcggccattgagacggtccttcgctcggacaaagtgcggacggaacttttggagcgcgaaaaggcattgataattcaattggaagcgggagacatttccgcgggggagaaactgcaagaagtgaccagcgaactgaagaacatcggcgctgaggcggcggagccgagggcacggcgaattttggccggacttggctttaacaaacaaatgcaggaaaaggcggtggaagacttttccggggggtggcgaatgcgcgtctctttggccagggccctttttctcgagcccactcttttacttcttgacgagccgatcaatcacctcgatttgaatgccgttatttggttggacacgtaataattccattcgattatggcaaaacaaaaataaaacattctttcgtaggactttttcaattgttttttccttcgtcagataccttcagggatggaaaaagactcttctcgttgtttcgcacgaccaatcttttttggacaacatttgcactgat

SEQ ID NO: 85265 - DNA, 569 bp, Heterodera glycines
gaacggccattgcttctgctgctattgcgacgaaacgggccaaaccaagttcaaagtgccggtgcgacggttccgttcaatgctaatcagctaattgctcactaattaccccaaataacaaaactgtgcctgcttctcccaacaatggcccccaaatgccttccgctcgaacttttgttcgaaattgtgcctttcatccctgccgaaaaagccgtcccgaatgcgctctcttcctgtcggctgctgcacaaacttttgctgccacgtgtcatcaaatggaaagagcaactgctaaccgatttgatgagtctctcggcgaaagtggacaatctctcggcgaaagtggacaatctatcgggcgtcgtcaacaatctctcggcgaaagtggacaatctggagaagaaagtggacaatcactcggtgaaactggacaatctggagaagaaagtggacaatcactcggtgaaactggacaatctggagaagaaagtggacaatcactcggtgaaactggacaatctggagaagaaagtggacaatcactcggtgaaactggacaatctggagaa

SEQ ID NO: 85266 - DNA, 589 bp, Heterodera glycines
cagtgatatttattttttggtgtgatttaaaagtttatttgagtaaaaaaaaagtgaaaaataaatgaaaatggtggagaaagagaacgacatcgctgccgctgtgccaaacaacgctgcaaacaacggtcatgttgaagctgtcgacccatcggcatcgaagagcgctaaggaggtgccgaacaacaccgagaagcatagtgccgaagatctaatggggttggcccgtctcttcctgaaggaatattacaccaagcttagcgaccttcctagcgaagctgggattttctacggcgatgactcgcattttgtccatgctgatgtggaggagacgggccgcgagaacattcaacgcgctatcggcaacatgggcttcgaggattgtaaggctcgcttctactcgctgaaaacggtgtcgctgccgatgcaaggtgacaatgccaagctgatccaagtttgcggcgagctgacgctggtcaaggcggctgtgcaaaaacagcagcctgttcttccacgacgctttgtccaaaccatcattttggcccaccaaacgcccaccgttttgtacgtgaagagcgatgtgtttcag

SEQ ID NO: 85267 - DNA, 289 bp, Heterodera glycines
tgaccggggcggtggtggtggcggataccgaagcggcggcggtggtggcggcggcggttaccgtggcggtggagggaaccgcgactattcaagatctcgttcgcgttctcgttcgccgtaccagcgtcgcggaggaggaggaggccgttctcgctcgcgttcccgttgaaaaatgggagggatctacaatttccgaagaagttgtgacgaactgatgcgatttcaaccattggcgattttaaatttgtttcacgtttttggtataatcttgggttaaataaatcgccta

SEQ ID NO: 85268 - DNA, 593 bp, Heterodera glycines
aatgctaggtgaatttgttgatgattatacggttaacgtgattgatgtctttgcaatgccgcagtctgggacgggagtttctgttgaggccgtcgatccagtctttcaggctaaaatgttggatatgcttaaacaaactggaaggcctgagatggttgttggttggtaccattctcacccgggatttggttgttggctttctggggtcgatataaacactcagcagagttttgaggcgttgtctgacagagcagttgctgttgtagttgacccaattcaatctgtgaagggaaaggttgtcatcgatgcttttcgcacaattaacccacaggcaattgcactaaaccaagaacctcgtcagacaacgagcaacatcggccatttgcaaaagccttcaattcaagcccttatccacgggctaaatcgccattattattccattccaattgcttatcgtacaaacgagaatgagcaacagatgttgcttaacctcaacaaacaaagttggatggactctatgaatttggtaaattacaacgagcattgtacacgaactgagaaggctgttgagcatatgctaaagcttgcaaagc

SEQ ID NO: 85269 - DNA, 619 bp, Heterodera glycines
aatcctactttgctggggtttatttttttgttttgtatttgctatttttattgaacgatggaagaaggacaaatggaacccggagaaaatgctgcagttaaactcgtggatcaaaagaagtcggctaaaaagaaagtttatgtgccgggaattagccgaattttgaaggcgagcgaagaattggtatacgatgaggaggcgtatttgttgtttcacacattcgaaacgaactatccgtgtttaagttttgatgttttgtccgactctttgggcgacaatcgctccgattttccaatgaccgcttggcttgctgctggctgaccgagcaaaggacaacgaattgctggtgcttagactgtcgaatttgcacgcaaatgaaaagacattggaaaatgcaaagaaaatggcccaaggaaagggcgacgagtcggagagcagcagcagcgaagacgacgaggaggaggaggagacggagggcggcacaaagagtgcgcggatgcacgcggcagtgatccctcaccacgggggcatcaatcggatgaagtgccaaacaattggggctagcaatgtgtgcgccgtgtggaatgaccagcagaaagtgcagttgtggaacttggac

SEQ ID NO: 85270 - DNA, 384 bp, Heterodera glycines
ttttttttttttttttttttttttaggggtttaaatttttttaaaaaaattcaaaacaccaaatagtttaaaaagttggggaaaaaatttgttttgaaaacctattaaataaaagaggatagaataaaatctgaaaactaagcttccttttttttttcctccgttaaatccttccatggccctaatgatgatgggggtcgggtcccctcggggacaaacccttcaattctttgaccggctttttttcagcaagttcgcgtaggggggccctcattttttctaatcgatttgcccccttttcaaattgcccaggaggaggggggggagcccttgaccgattggtcacatgcgatggccccaatccgggggcttttcctccctgag

SEQ ID NO: 85271 - DNA, 119 bp, Heterodera glycines
gtcattcaattcgccaaaaaaaagtttaatttttgcttaagaatccttcgggccatgtgactaataaattttgccggtgtgaaatttgccattgcaccctcgatttatcttcttccttt

SEQ ID NO: 85272 - DNA, 221 bp, Heterodera glycines
atcgaatggccaagcgatcggctaaagaaatttcccgacttgcgcttcaaatacatcgaagacgaagatacggtggacttttttgtgccgtacatttggcgtctgatcaacgacggactttgtctgcaattcgacgctgaggccattcggttgttcaacgtgaacggggaacagtgatcagcagaggacgtcatgaaagagggacaaaacaaactgtgaaa

SEQ ID NO: 85273 - DNA, 508 bp, Heterodera glycines
tattccaaatgaaaaataaataaatttatttgcttacaattaacagattttccctgggaggaattgagaagagcaaaaatggaaattataattgacaagataaacaacagcatggaacgcaaaagtccgacaattaacggtgcaggaaacaatgggaaaacaaaagtctttgttgtgtgccatcatggcaacgactcgcaattggctgcgtgtcatctgcacaaacagttgtcagaggccggcattggcgaccggttcatcgttcgtgatattgtgggcggaatggatggatgggcgttggaggtggacgccgacttcccgcgctattgatgcagccgatggtttagctgttgaatgtgagtggactcggattaatgccttctttaaattaagaaacagatctgccacaattggaaagaattcagaatcccatgggaaccccatttttatgttatttgataacacatttttacattttttgcttacgtgttaaatttttttttcatta

SEQ ID NO: 85274 - DNA, 605 bp, Heterodera glycines
cgtccgggtcgaatccattgcaaaaaaaaaaagtcgcttcatctttctttccgaggcacgaaaagcactcatttctcaaatgaaagggaagcgcaaaagaaacagccaaaaacgcataaacgacgaccccaaacgacgaaagagcgggacgcactgacgaagatttgccatgctcaaaagttgacgcagcaattgcgacgtgtccaaagcgactgggaaagcgcgtcgatggttctgagaaggggcgacgcagtggtggtgaaggcactccagcaggacggtttcagtctctgtgacaacgccgtttcctccggactcgtccccgtcgctcttttgggtccatttgacgagagtttcaccgctccgttctctcccgagtctccggcctccggaaatgagcctcacgcgattgatttggctgttgaatccgccggccataaacaaaataattccgatgtgccttttgcttctgcttgactttataacagcaaatgaaacaaatagttcccagaatgattactcaccggacaaaatgacgtcaaactcgcaactagacaaaatcgagcaaaatgggagggatataaatctgattgatttggaggaca

SEQ ID NO: 85275 - DNA, 576 bp, Heterodera glycines
  unsure (1)..(576): unsure at all n locations
gacacttcggccggaatttttgctgagagttcttccaagatcaaaatccatgatggcgatgaaattccgattactgaagaccctcctgaagcagtacagctaccaaagcaacatgatacgtttggcaatgatcaacagctgaaaaatgcgcaaattcgtgacgatgaccaattcccggatggacgaaatgccaaagagaccttagatgggaaaccgcttcagagcattcaatctggacaacaaaaagtggcaatttcggcacacattgaaccaaaagcatcatcatcatccaatgaatggattcttccgttcaacaaatccgaaaatggtgccaatgctaaggatgcatattctttggccaacaacaacgcatcatcatcatcatcatcctccgttttcccgcaaattaattttgatttaattcgaaatagaaaagtgccaacacaaattgaacaaaggcacggtgaagaacgtgcacgagtcggcaacatttatgaacagttcaggacaaaagaatccgtctacgatttgatcagacaaattcaacaagccgaagctcgccgtttgtccgtanag

SEQ ID NO: 85276 - DNA, 578 bp, Heterodera glycines
ggtacaatgaattaatctctttttacttaaattgttcggaatctgaattcaagttctgctcggactataaataaatgtcagacgaaggtcagcagttgttggagtccaccttgcgcaatgtgttggaccagcagtcgcttcgatggattttcgttggcggaaagggcggcgtcggaaagaccacgtgcagttgctctttggccgttcagttggccaaatatcgtcgcaatgtgctgatcatttccaccgatccggcccataacatttcggacgcgttcaaccaaaaattcacacggagtcccaccaaagtgaacggcttcgacaatttgttcgcgatggaagtcgacgggtccaatttcggggaccatggtgtgcccaatttgggtgacgaggacgacaagtctgatatcttttccatcggaaagaattttttggccgattttgctgccggacttcccggcgttgacgaggccaccagtttttctcaaatgattaaactgatccgttccatggacttcgaagttgttttgttcgacaccgcacccaccggtcacactctccggttgctccaatttccg

SEQ ID NO: 85277 - DNA, 581 bp, Heterodera glycines
gccatattcattatctttctttttttgattgcccgttttctgaaattgaccagcttcgatgaaaagccaaaaatcacgctgagaaagaacaaaaggagaaattcgtctcaaaaatgttcacatttaatggaggaaggaagtcaatgtgcgactggtccgtttgttgagttagctgaactttttgtgcaatgttcgattctgcaagaactttatactccgccgtcaatttggggccgtaatggtcatctccaaacaattgcttatggcctactcggccaccattcacttaagaggacattcgattgtcggcatttggttcgcctgtccgatggaacaactgcaacattcgacttgttcgaacctgtttcaacaccaaaatgggggtgacttcacgttggtcttctgtcccgggattgccaattgtagcgaatccaattacattcgaacttgcgtccatcatgcccaggagaagggttatcgttgtgcagttttaaatcacattggtgttccaaaaaatgttcagcttacgtcacaacggattttttcttatggtggcaatggtgaaatggaagcgatgttca

SEQ ID NO: 85278 - DNA, 478 bp, Heterodera glycines
ggacaatcagcgttcattggtcgacgcgaagcacagtttggacgtgatcagacagaaacaccaggccaccgtcgacgaactgggcaaaattgacctgagattgggcaaactccatgacgaattggccgagaagcacaaaaattatttggactacaaaaatcgtttggacacacaatacaacgaattgttgtcggcggtgctggagaaagtcacgaaactctgcgaccactttcagcagatcgaggaccagaagaaatgcttcgcagaattggccaatgaaatgctcacgaagaacaaggaggatttgaagcaattggaggcgaagaaaaaggccgaagcggaagattaatttgctattatgactggaattatataatgtctgacttcattacctattttgtattgtgattgtagaaccatatttaggtatgtgtccttctgactttttgctgtgtataaaaataaaatgatgaaaaac

SEQ ID NO: 85279 - DNA, 661 bp, Heterodera glycines
tggcccgacgtcgcatgctcccggccgcctggcggccgcgggaattcgattaacgcagagtacgcgggggcaattaattgtccaaataagcctttctttttgactttccattgactgtgctttttatccacctttcgtcttcaattttgttcatccaaaatggcggaggaaaccagcaaaaccagtgaaaacatcgctgaggacaacggcatcaaagtgctcgactctttgtttgcctccgtcgaccacgcctcaaaatgtttggcattcgctgccggcacgcccaacttctgcttggccacgcccgccttcctggctgtcatggtttggtgctgtttcctcatgccgccggtcgctgtgcttttccgcagctatcgccgcgacggcaacgcgttcactgtgcaggcggcgtacaacgtcattctgtgcttcttcctctggatgcccggcatgctgcacgccctttggttctgtttcggtgagacggtgcgtatgcttcgtcgtcacgtgccgccatcggacgacgcacagaaaaacgaataagggaaaagcaacgaaggatgacagagagagacacaacggcaccgattagacactaattagacgataatttatatgtttttaatgtttttcttaaattctaagtgtttttattttgagg

SEQ ID NO: 85280 - DNA, 99 bp, Heterodera glycines
agtggttgtatcgtatttggaagttgtcgtaccgtagtcggaagttgttgtgtcgtatttggaagtcgttgtatcgtatttggatgttgtcgtatcgta

SEQ ID NO: 85281 - DNA, 466 bp, Heterodera glycines
gcgacgaatttaaacaagtcaaaagcgtaactttggggtcgaagccatgcatcattttgcaaggtcacctttttgagtctaacggaatacttcaacggattggcaatttaatggtggatttgtttcgtggccccaaagtggagtacttaccgcttcaaggcacgcgaattgataatttcattgacagcactttccgaagagcggattaaatgcagaggtttacagagcatccctaaagaaggacatggaatctgcgaccccaaaaatacaattggttgaaatgggaccgaatattgacttcaaaatcgacaggacgaaattggcaagcgattcgctcttcaaaactgcactcacaaaaccccacgaagttcacaaaagtgccaaaaagaacgtgaaatttgatgcattcggaaacaaagtggctcaagtgcacacgggaagacaaagtacggacgcaattcaaacg

SEQ ID NO: 85282 - DNA, 636 bp, Heterodera glycines
gaattcgatatcactagtgaatccgcggccgcctgcaggtcgaccatatgggagagctcccaacgcgttggatgcatagcttgagtattctatagtgtcacctaaatagcttggcgtaatcatggtcatagctgtttcctgtgtgaaattgttatccgctcacaattccacacaacatacgagccggaagcataaagtgtaaagcctggggtgcctaatgagtgagctaactcacattaattgcgttgcgctcactgcccgctttccagtcgggaaacctgtcgtgccagctgcattaatgaatcggccaacgcgcggggagaggcggtttgcgtattgggcgctcttccgcttcctcgctcactgactcgctgcgctcggtcgttcggctgcggcgagcggtatcagctcactcaaaggcggtaatacggttatccacagaatcaggggataacgcaggaaagaacatgtgagcaaaaggccagcaaaaggccaggaaccgtaaaaaggccgcgttgctggcgtttttccataggctccgcccccctgacgagcatcacaaaaatcgacgctcaagtcagaggtggcgaaacccgacaggactataaagataccaggcgtttccccctggaagct

SEQ ID NO: 85283 - DNA, 661 bp, Heterodera glycines
gtcaaattgggaattacgaactggcactggacaaaaacaaggagatggtccgccaactccaagccgatttggcggcaaaatgtgccaaagtcgactcgttgaatgccgaactggaggaacatcagcgcgttttccaggcggcgaacaacgaactgcagaacgcggtgggtcgccagcagtgcaacgacgaccaaaaaatacgtcccgaggtcctccgcagtaatggcaggattacccagaagggcaaacgtcgctcgagttcgccatttgtgcagtcctccgcggcgggaccgtcaaagcgttcgcgtcgcattgtaaaaattaatgaagagcagcgaaaatttgcagtcgacgaaagcaccgaatccgatggagaacaacagcgacagcgaagtcgtccgtcaaaggctgtgccgggccgtctgacgaagaaccggtcaatgtccgagtcgaatgtgtacgagccgccgacaagtgaaaatctgcaacaacaacaacagcagcataaggcagcgatgtcggccaagcaaatcagcacattgaacatgcatttcggtccgccccgtccgtgtgtcggccgcggttggaccaagggcaaaccgatcaaccaatgtgtgcacacttacgtgcccgtcagcaacctgttcagtgccgcgttctc

SEQ ID NO: 85284 - DNA, 582 bp, Heterodera glycines
tgacaaaatgagcgacggcacgcgcagcattttgcacgaggtgatggagcagcagacgctgtccattgccaaggcgggcatcatttgtcagctgaacgcgcgcacttccgttttggccgcggccaacccaatcgactccaaatggaacaagcggaagaacattgtgaagaacgtgaacctgccccacacgctgttgtcccgctttgacctcatatttttggtgttggacccgcaggacgaggcgtacgaccgccgattggcacggcatttggtgaacttctatttggagtccgatggcgagatggacaagcaacagcgagtggacatggcctttctcagggattacattgcgtacgcaaaacaaaatgtgcagccggagctcactgacgagacggtgcagctgctgaccgacaagtaccagttcatgcgccagcagggccaacaggcgggactcatttcggcctacccgcgccagttggagtcgctcattcgactcgcggaagcgttcgccaaaatgcgcctgtcgcccaccgtcacggagtcggacgtggagatggcctacgctttgcaccgcgaagcgct

SEQ ID NO: 85285 - DNA, 556 bp, Heterodera glycines
tggctgatgaacatgaccttagcaccggttcggtcggaccgccgcttaggagctgtgaaattcgtcttcgagaatggactgaagctggttatttgccttcaaactcgcctcctcagggcgaagttctgattcacggggccaatgtcgcgttgggttacttcaaaaatgaggaaaagaccaaagaggacttcgtcgagttggacggaaagcgttggttcgccaccggggatattggagaattccgcgaggatggcagtctctgcattattgaccggaagaaagatctgatcaaattggcccacggcgagtacatcgctttggggaaggtggagacggcgccgctgaccaatccgaacgtggacgacatttgcgtttatggcgaatcgcacaaagactatctgattgcacttgtggttccaaatctcaaaaacctgcaagtccttgctgaaaagaatgacgtcaatgagccgagtattgagagaatttgtgccaacaaagaaatgcccaagattctgcagaaggaactccacagctttgtttcgggcaaattgcgtag

SEQ ID NO: 85286 - DNA, 605 bp, Heterodera glycines
gacattagaagtggcaaaaacgagttgaaacgcgtgaaaggtccttacgaaaatgacaatgcgaaaagcgaatcggaccgaaaacgaacagcgaacagaatgagaaattctgcaaaattattccattccgatcgcattgtctgtttgcgttgcacgtcggacggccgtttccttctttccctctcccaaaacagaaatgtttgtgtttgggatgccgaaacgatgcgaatgctttgccatctgaaggtgcccgaatctgaaggcggcctcagcacttttcccgtacaatttgagctttgtgacgaggggcgtttaatttggctgttcattcccaattcgaacaatgttactgtggtgggaattgctgatccgaaattgttctcaaatcgtccgattgttggaaacattcacttccaaacattgcgaggtcatttccaaaatgttttgtcctgcgcctatcggaaagagtataatcagctaatcacttcttcaaccgatcgccttattttggtttgggcccccaaaatggacgagtttcgttccgactcggcaattcaacaaataaggcaacagcttcatgaagatgcgtttagtgatgacgaaga

SEQ ID NO: 85287 - DNA, 473 bp, Heterodera glycines
gactcaatcgccgtcattctctgtccttttacgcactattcgccactttcactcagcgaaaattggcaaagaaagcgacgatgggaaaagaaagacttggggaggagcagcgaaaggaacttttggagcctttgctgaaggagggatgggaaacggtgcaggagagagatgccatcaaaaagagcttcactttcaaagacttcaatcaagcgttcggttttatgacgcgaatcgcactaaaggcggacaaaatggaccaccacccagaatggttcaacgtctataacaaagtggacatcacactgagcagtcacgacgtgcaaggcatttccgagagggacgtcaaattggcatcgttcattgagaacgtgttcaaaacagtgaagtgaagatggcgttcgttgtgaattaaacggatacaaattgtcattttgcaccctttttaaataaaatgataaaaaagtcacaaccga

SEQ ID NO: 85288 - DNA, 266 bp, Heterodera glycines
  unsure (1)..(266): unsure at all n locations
gactttcactattactcgtcgacatttcgtcccattcacacatttccttctctccgttctgtcgtccaactgctgccactttcaattgcccttcacggcaatggctgacactcctcctcctcctccacctnctcctcctgctgctgctgctgccgctggtggtggtgatgaagccgttgatttggagcaacgtgttcgccaactcatcatgtccatcggcctgcgaaacgaacacgccgcgcgcgagatttccattctgatcgagt

SEQ ID NO: 85289 - DNA, 619 bp, Heterodera glycines
ttggtggagtttgggggcgttgacttttgacatgctcaccgggggaccgcctttttcggcagagaatcgcaaaaggacaattgacaaaatcctcaagggacgccttacacttccgccctatttaagtttcgaagcgaaagacttgataaaacggttgctgaagcgacacgtggacactcgccttggggccgggccgggtgacgccgaagagataaagaaacacgcctttttcacccaccacgtcgagaattggacaaatgtttatcggcgagagatcgaagccccgtacaagccgaacatcaccagtgaggaggacgcctctctgttcgactccaaattcaccaaaatgactcccgtcgattctccgaccgccgaattgccaccaatgtccgtcaatcccttcgaaggattcacttatatagcgccttccgtcctcgaacaagtcagccaacccacgttggtccgtccgagacaacagcgcaaaatacatggccccgccatctttcacagtttccacccccaccaatcgacgaccgacaacggacccttggaagaaatggagtgaatgtgcccagcttttctgcttgtgctacatctcttttttcttcactctgtccct

SEQ ID NO: 85290 - DNA, 653 bp, Heterodera glycines
cgacgacggacggccaaatccatttacatttgcaccatcgaaaaagctaatgggctggtcaattcgttgattgagaacggaagggcacacgaattgggcctggtcattgtggacgagattcacatgttgggtgagcagggcggaaggggcgctttgctggagcagtgtctgtgcaaattgctcttccgtcccaccaatgaacagcaacaggaacgagttcagctcattggaatgtccgcaacacttggcaatgcttctgaactgtgccgttttcttggtgccaatctcttccgaactcattttcgacccgttgcgctgattgaaaggataaaattgcacgacaaactgttcagggtggacgagcagggcgagtggaggatggagaaggaattggagaagggcaacaaagaactcgagaggagagacccggacggactgttcaaattgttgggcaatttgctcaagggatctgtgctcattttctgtccgaccaaacaaagctgcgaaaacgtgtgccaaatgctgtccaatttcagtccgaaacaattgcgtgaccatagagccgatgagagaaatgcactgatcggtcgacttatggacgaacacgagggcctcatctgtccggtgctcagtgcgtgcattcgcaacggcgt

SEQ ID NO: 85291 - DNA, 500 bp, Heterodera glycines
aagagaaggcaatcccactcgtgatgtactccaagaaagcatagcgaccctggagagtgctcgccattgccgaattttcagctcaggacttgccgcaattgcagcatgtgtcccatttgcttaattccggacagcatgtcatcgcgtcgggggattgtaacggcggcacaaaaaattatttcgacaaaatttgtgtgccgcatcatggcttggagctgagtcctgtggattagacgcgattggaaaacttggagaatgaatttaagcccaacacaaaaatggctttgtgtgagacaccctcaaatccgcttctaaaaatcgtggacattgaagcggtgtgccgtatggttcgagcacgctcaaaagattgtgtcgtccttgttgataatacgttcatgacaccgtactttcaacgcccgttggaacttggcgccgatgttactgtgcaatcgctcaccaaagacatcaacggacacaccgatgtgctgatgggcaccgta

SEQ ID NO: 85292 - DNA, 241 bp, Heterodera glycines
tggcggcggtggtggtgggctgtccgcgttgaccagtgcgatgttgggcaagaagccacgcaagcagtccgtgctggacaacgcccagtccggctggcgctcatttgtgcaggaggaacagttggagcaggagatggagtcgcacatgcgcagcacggacgcctatttggacaagcaggagtttctgctccgtgcggactacagccaatttgagcgggagcgcgacttgcgtgcgcaggaa

SEQ ID NO: 85293 - DNA, 506 bp, Heterodera glycines
ccatcgctgtataaaaattccaggaatcattggagcaagacgatccacggattgatttacaatgcattgaaacttttcatggaagagaatcagaagttgttcgacctgtgcgtacagaacttcaacaaacagaaggagcaggagcaacagaagcagcagaacaaccgcagacggtgggaactgctcgaaaaagcggccatggaaaacgcacgcgcaattcgacagcaacagacggacggagaggcggagccgtactcaattggcgagggagagaagaagccaaagtgaaacggtggcgaccaattgatgattctgtacaaataaacccccgggaaaaaacggaatgtaccgcttcaacatcacttacacacactgagaatttccaaatttctatgccacgccccccccctttcacctcacacttaaccctaatttacttctcacattttaacaattattattctttcacattttaaaaattattattttattgattatgagctaat

SEQ ID NO: 85294 - DNA, 504 bp, Heterodera glycines
agctcaaaatgagtttatgcgggcggccgttgaggagggaattcggggcgtacaaagcggcgacggtggtccctttggcgcagtgattgtcaaaaacggcaaaataattgcccaggggcataacatggtattgttctccaacgacccaacggcacatgccgaagtgatggctcttcggggggcaagcaaagtgttggacagcttcgacctgagcgggtgcatactgtacacgagctgctacccatgtcccatgtgtttgggcgctgttttgtggtcacggattagcaatgttttctatgctgctgcgcctaccgatgccgcttcggtcggtttcgatgatcagaatttccacgaatttgtctctaatccgaagaaatacgaaaaactgatggcattggaacatttgccagtcgaagggcatatgaaagtgttcaaaatgtgggaacagagggacgagaagagaatgtactgacaaagggccaaccaatttattcaatttacatt

SEQ ID NO: 85295 - DNA, 492 bp, Heterodera glycines
ggtgctgacggacaagtgccggccaagtacaagagcacactgtgcaacatttggttgatggagggcatttgcacgcgcggaaaacaatgccattacgcacatgggatcgaagagctgaactacagacaagatgacacaatgagtcgcttctacaaaacatctctgtgcactttttaccagcagcgcggcttttgtaacaacggcgaccaatgtcggtgggcccatggcgaagccgaacttcgcaagggggcagacggttcttctaatggactggcgaattattacgctgcgacaatgcaagcgatggccaccggtcagcagaacgccaacggctcgtcagccgaagcggcggcggctgccgctgctgccggttggaattgaattgattctcgatcatttgtataactaaccgattgtcaaaaattgttaagaatgcataacatttgggcaaaaatgtatctttcaatttgagcataaatcgcattttggcaa

SEQ ID NO: 85296 - DNA, 375 bp, Heterodera glycines
gacagtggactttacgtttttccattcaaattggaaaatatggcacacataatagtggtgaataaattccaggatcggacaatgatccgtggcacgacattgggccaaaacatgtacaagattggcggagaagaagcagtcccggtcagggaagcacttgtgaataatatgcagcaaaagaatgccaaaacgtgtagagcagcagaagatgaaccaaaaaaagctgctattggaggcactggagatgaactggatttgttgagcttgctggtcaagggtgatcgaagcaaaacaatcggtgaggacgggttcgatttggagctgttcgaccaggacgacaacaacaacgacggggaagagcagggcgtgaataat

SEQ ID NO: 85297 - DNA, 296 bp, Heterodera glycines
tttttttttttttttttttttggtacccatagtttatgcgtattggaaaaaacacacaaaaatattattgtaaaaagaaaaaagcatcatccaataattttgaatgtaaacaaatcgaaagggagggaatggaaggaaatgccaacaatgcgaaggatacaaacaaatttatcccaaaagttaatacaacccaacgaatcagcggcacctccaaactcaccaccgtttgtttatttggtcaccgggatccgatcccaaattgaagtcctttttcccaacgtcggttgtcccaatcg

SEQ ID NO: 85298 - DNA, 579 bp, Heterodera glycines
gattaaataataatggcaaatgccccgacaaaattaatccgtttgttaatgtgtcgtccgactcattttaatgtgaaatacgaaataaacccatggatgaggccaggcgacccggtgaatgtgcaaaaggcaacagatcaatgggaaagactgaaacgcactctcgaggaatccggcgcccaagtcgaagtgatggaacccgtgggggctgacaattaccccgatttggtgttcacggccaatgccgccgtcgtccgcggcaaaaatgcccttttgagcaatttcttttaccccgaaaggaaaggggaacaacacttttacgaccgatggtttaagcagaacgggtacgaaaccttcaaagaccttcacgtgcctttcgaaggtgccggcgatgctttgtggataggaaagtcaaagttattttgcggcattggccccaggacggacgtgcgggcgctgactctcatttcggaaaagctgcgcgactacggagcgcccttcaaagtttatggctttcgactcattgacccgcgtttttaccacatcgacacctgcttctgtcccctgaatgatcagatc

SEQ ID NO: 85299 - DNA, 556 bp, Heterodera glycines
aaacgaattgaataacgaatggaggttaatcctgccgatttgaatttccctaaagcagtgatcgctcgtataatcaaagaagcgttgccagatggagttacagtttcgaaggaagcaaaaaatgcgattgctagaagtgctgctatatttattcttcacgcaacttcactagctaatgacaatgcacaatcaaaaaagagaaaaaatctgatcgccgatgacgttttatatgcaattaatcaattggaatgcgatgagcttgagaacccggtaaaggaagcactcactctttacacgcaaaagaagaatcagcgacaacaacaccgaagagagagaagggcaaaacaaagagaggaaaaacggtttgaaaccaaaggaaaaggggagacagaagaaaaaggacagcaagaggatggacaaagcgactgcgaacagggaatggagaacggtgacgacgatggagaggaggaggaggaggagatggaagacgaagtggggcaatagtgcgcatttatttagactttaaactgcatttttgcataaattctttttacca

SEQ ID NO: 85300 - DNA, 418 bp, Heterodera glycines
attaataaatcattttattatattccaccactgatgtcaacatggtcgaaaaaaatcccctgatcggactgatcttctgcattctgtagcccccggtcgctcattcagtatgcacggaggaataggacattatgggttagatcctcaacatagcgctgtacataatcagctatgtgtcctggcataatccacaccctgtggaacagcctcttttcaggctgaactttgaaaaaacaattagctgttccttaaacaacaaataaaagggcacactgaaacggatcggcaaaaggggctaataggaaaaatttaaccatatcttaactttaaaaaatgaccttaataacccattcaccccactaactgcgacgcattttcctcaagccgatttcttccacttttccctcccttccaaaaa

SEQ ID NO: 85301 - DNA, 650 bp, Heterodera glycines
ggggcttgaccttttgtgagtgcacaaacaaatttcgatgacaatgcaaacagccgttgccctttgttacttttgtgagaaccatggctctcgagttgtggtcgtatgccaaccgatgcgaaattgtgagcttcctcgaccaaacagtgcgaattcaatgggaggtccaattgttaatgatcgccagcctcaacagcagcaaccttcaacttcgtcctttgtgcattgtcaagattgtgacggcgatggcaatgtggccgagtcgcctcagcttttcacggatttttttgccgacaacgaagtggtggacgacgaggcacgctgtgccgcgtgttcgtcctttgagcacggcgttgggctgatgtccaaagacggcgatgcggagatcagttacatcagcacacaggtgccaagaaacgaaagacttggtcatcttctgaggcaggcatccctccgatctttgagtgtcgaaatatcggtgcctcttccaacgacggaccgctcgcattcaaatcacatcgatgcgtcgccttcctcttcgagcagtgactttcgcccgaagtacgaccaaagaattggcaatgtgcgcggcgacttcactgaaagggatggcatcgttctgtttggggatgatgaacattggtacacat

SEQ ID NO: 85302 - DNA, 612 bp, Heterodera glycines
aatcccaatttcgcattcatctcactcactcataaaatgctccaaaacggccttaccattctgcttctgatcagtgttgtgatcggccattccttggccaaccttggcccaaccatcaaacataatcctcattttaaagccgtacaaactgcgcatcatttgcatgatgccattgcgaagaagcacgaggccgaagttacgcaagtcatttgctctattagcaacgaacagcgtcaagcattggctttggagttcaaaaaacaattcggcactgatctgattgccatgctgaaaaaggagttcaaaagcgactttgaagaactgatcatttctttgatgcaaacgcccgccgtttacgatgccaaccaaatgcgtgccgcattgtccggctccaatgaggcggtgctaatcgaaattttggcgacgcgcacaaaccgacaaattacggcgccgaagcaggcgtatgagcagttggacagaaggcatcagcacaatcagctggaggaggacatcaaagcgaagacgaagggacccttccaaaatctgttggtgtctttgctcagctgctctcgcgaagaaagtgcgcccgcaagcattgtattggcacacgac

SEQ ID NO: 85303 - DNA, 530 bp, Heterodera glycines
gggttaatgaagaggaccatttgcgcattatctccatgcagaaagggggcgatgttggcaacgttttgaaacgattgatccgcggtgtgaaaggtatcgagaagcaagttccatttgcgcgtgatgatcgactcggctatctgacgttttgcccccccaatctgggcacgaccatccgtgctagtgtgcacatccgtttgcctaaaataagcgcaaagcctgaattcaaaaagatctgcgaggacctcaagttgcaagttcgcggcattcacggagaacactcggaaagtgaaggcggggtttacgacgtgtcgaacaaggctcggcttggacttaccgaatttgaggcggtcaagcaaatgtatgacggtgttaagaaactcattgaacttgagaaggcgtcgaagtgaatgaattaaatatctatatccatttgacgcctcgtaattgcattgctttaatcacaatattgtatttttgtataggtctatagggtcagaaaatgtattgcattatgaaattgtatggac

SEQ ID NO: 85304 - DNA, 533 bp, Heterodera glycines
tcaaatcgcacattgacaacaatggcccatctcaacaccggctacttgagcaccaaccgtggcgtcatcaaaattctgcagatcatctgcggcttcatcacctgctctctgttgtgcgcgaactggtacggcggcaagacatgcttcttcgagggccgtcttggatatgccagtggactcaacttcgtcatcgtgatcatcaacattgtgctgttcttcctcaattttctgtcgatggccgcctaccgaatggagcgcatttattcggtgatcggcaccattctgttcatcgtggcattcatttgcatggtctggtatctgatcgactatgacatcaatcgtggacagttgatcgctgctacggtgttcatcggcatccaaatggtgctgttcatctgggactatcagatcctgcatggccaggccttcaactgaatgaatggatggatggacttcttcggtcggaaatgaatggagatgaaaatggcaaatgatggaattttgaatttttttttgcgctctgatttttgctg

SEQ ID NO: 85305 - DNA, 378 bp, Heterodera glycines
gacccgatcattcaatttttattaaaattaccctaaaatctccatgcaaaaaatgaattctgcgacaatgttcactctgctgttgatcattggcactgttcttgcactgacaattggcatgccagcccccggcggatctgatgaaagtgttgcatcgatgcgccaaaagcgcggctacggaatgagcaacggaggcggaatgggcaatggattcggaggcggaatgggcaacggatttggaggcggaatgggcaacggatttggaggcggaatgggcaatggttttggaggcggaatgggcaacggttttggaggtggaatgggcggcggaagcggcggtggctatgggtacggtaaacgtcgctgatgaattactgt

SEQ ID NO: 85306 - DNA, 390 bp, Heterodera glycines
aatttgcgctgtttctgctgttactaattttggaaaattccctcgggcaattcccgacgagtagcacaactgagaagacaatcacagaatatgtgccgtggctttaccgatttggtcaaaagctaatgccgtgccaagacaatattccatcggacgaatgtcagaagcatgaaaatgattgccaagataccataaagcgccgagagatggcattgttctgttgtggcacctgccgaactttgtatccgaattttttgccaaaacaatcggggagaaaataagaggaagcatcagaagcaattacgagaaagaggcgacaaagtgaatgcaaagaaaggaaatgatcagaaaaagccattaacaaaaaaaaaaaaaccaacaataaaacca

SEQ ID NO: 85307 - DNA, 580 bp, Heterodera glycines
gatcacatatatttttcattcattaattaaattaaatatattttttgccatgtcttctctgctgctctccatcttcccaattgtgtttttggtctgttgcaatgcaatgccaaatttcccgtgctgcccgggcagtcagcaagtggttgctgtgatgtccaaatacattgacactttctcttctgctgctgacgagtctacagtatgctcaaccgctaaaagtactgtggatggaataaaaaatgaactgtcctatcgcgtgggatgcccaagcggaggagaagcacaaattgtgaatgaaattgatcgacagctgaagaacattgcgaaaatggaaatcaattatgaggacgagtgcccgtacaatttgggctttgcccgtgccatgttcgacttggccgctgctgctgctggccatgcggggaacggcacagaatggcaatacatgaaagtacaatttgagcaggaaagccaagcaatcaaagcaattggacaagaaaagaactttgaagttacggatgtgcattttggagtcccaagcaaaggggtttctgcacatcaaaatgtgccgagtccgagc

SEQ ID NO: 85308 - DNA, 626 bp, Heterodera glycines
gacttcaccattactcgtcgtccatttcgtccgatttacacatttcctttccctccgttctgtcgtccaactgctgccactttcaattgcccttcacggcaatggctgatgacattcctcctcctcctgctgttgctgctgatggtggtgatgtcgtcgttgatttggagcaacatgttcgccaactcatcatgtccatcggccagggaagcgaggacgcagtgcacgagctttccattctgatcgagtcattcaaccaggagcagctcgtcgactttctggagattatggcaagaatatacgtcgagagcggagtcagcgttgacatgccgggtggccaaggaatcaacatgttgatggtcgctgcgtcctctggaagggtggactttgcgcgctacttgctcgcccacggtgcaaccgttggacacttggacgccaccggaagcgtcttcccactaatgctagctgccgaatctggtgagttggaggtgtgccgtctgctggtcggggaatgggcagctgaagtcaaccagcaagcaattgatggcacgacacctttgatgagcgcgagcagtgagggacgactggacgttgtgatttatctcatcgatcatggcgccgaaatc

SEQ ID NO: 85309 - DNA, 530 bp, Heterodera glycines
gatcatttgtaattcattttttaaataaaaatttccttggaccgacaaaaatggcaaaattcgttgccattgctcttctctcgctgaccattgtttcgatggcacttgcaaaaactggcaaaagtcaaacggcagacgaagttgagggatttcgcaatatgaacatcggcgacaacaataaggttgacgccggaaaggagcccgcggctgataaagcaaccaaaaagggaaaagctcagaaagccggaacgaaatcggcggcggccactaatgagcccgcggctgctaaaggaactaaaaatggaaaagccccgaaaaccaaagcgaagcaagaggtggccactaatgagcccgcggctgctaatgaatggaacgaccaattgatgggcatgagcgttgagaaatttaacgaggagcttgctgtgttgttgccaaaagccaacacttttatggaaaatgctttgagcttcatcaatgaacaagtggaaaaaaatggtattgcaactggcgctgccggggactcgtgctcg

SEQ ID NO: 85310 - DNA, 532 bp, Heterodera glycines
attcgtggtctcgtcgactcggacgatttgccgctgaatgtgtcgcgtgaaatgttgcagcagcacaaactgttgaaagtgatcaagaagaagttggtgcgcaaggtgttggacatgctgaagaagatttcgcccgaaaagttcgacgagttttggaaggagtactcgaccaacctgaagctgggcgtcatggaggacccgtccaaccgcaaccgcctggccaaactgttgcgcttccacagctccgccgactcggccaaacagacaacgctggaggcgtacgtggagcgaatgaaggagaagcagcaggccatctactacattgctggctcatcccgcgaggaggtggagaactcaccgtttgtggagcgtctgcttaagaagggctttgaagtgctgtatttgaccgagcctgttgatgagtactgtattcagtcgatgcccgaattcgaaggcaaaaagttccaaaatgttgcgaaggagggactgaagctggacgagggcagcaagtcggaggagcagcacaaactgc

SEQ ID NO: 85311 - DNA, 669 bp, Heterodera glycines
attgcttttcttttgctcgttttggcaaagggattcgaaggctacactttcagttgtttggacgggtgcgaatgtgacactgatgacgaggccatccattgtcacaatcgtcccgatcggcactttgtccaattgcccccgtcgcgtctccgcggtttcactgtgctcgcgctcacccgcaataacatcgatgtgctgcccagcgaagaagtactgctcgagaaactgcccgacctgaaggccgttgacgtcgaagggaatgaacatttcgactgttccacgctcgaccattatcggacattgatggtgatgagcgattgcggaaagactcctgaacaattggaggccgaccgggccaaactgccgacggacacacagccaaatgaggattgcgacttcgaatgcgtggcgaaccgacgcagtcgcgagttgcgcgagtacgtcaaacacttgtgggagatggtcaaagagaaggtgagccgactggccaagaagcacggattggacaaagtggtggacgacgtgggcaatttcttcaacgacgtgggcgaacgcatctccaacatcaaactgaagaagaagaaatgagacggacggacggaaggaacaaaagagaaaaacaccaaaaaaaattggaaaggaaattgaaagattgccatttaaatcgac

SEQ ID NO: 85312 - DNA, 374 bp, Heterodera glycines
cgccatcaccccgtcgccgccctcggcttcttcgtccgtttttcgtggagggagtgcaacccgcgcgaggggaggaggttttgtgccgcgaatgatgcgcccaaggggcaatgaaatgaacggctaatcccttcggaaaaggcaatgccaaaaatgtaaggaaaacaaaaaaaaatgaaaaaaaacactgactatttattccatacaaaaaagaaagaattaaaaaagaatcgatcgtaaaacagaaattaacgttttaatgtcctctcatttgttgcgggtccttaaatgagtggcgaattgtgcattgactgcgtgatggaaaataaattattcaacgctttcaaaaaaaaaaaaaaaaaaaaaaaaaaaaa

SEQ ID NO: 85313 - DNA, 581 bp, Heterodera glycines
aagatcgctgacccggaggccaagaagccagaggactgggacgaggacgcgccattcgagatcgtcgacgaggaggccgagaagcctgctgactggctcgagaacgagcctctccaggtccctgaccctgaggccgagaagccggaggactgggatgacgaggaggatggcgactggatcccgccgatggtctcgaactcgaagtgcgatgaggtgtctggttgtggcccgtgggagaagcccaccatccgcaacccggcgtacaagggcaagtggaacgcgccgaagattgacaatccggcgtacaagggtgtctggaagcctcgcaagatcgccaacccggattacttcgaggacaagactccggctaactttgagcctgttggcgctatcggcttcgagctctggaccatgcagaacgacatccttttcgacaacatctacatcggccactccgaggctgacgccaaggccctccagaccgagaccttcgacgtcaaggtcgcggtcgagaaggaggaggaggagaagagcaagcccaagaaggaggacaagaagccggacatcaagagcccgatgga

SEQ ID NO: 85314 - DNA, 645 bp, Heterodera glycines
ggcagaattgaaaagcatcgagcagaaccacaacagcaattcgaccagcgcaaccggcacaatttcatcgaccgattcaaattcggatgagcacaatgacacgagttcacgcgcgaaattcacttccaattttgaacggatcgccaacgcatacatcaaatttgtttcgaacatttttgcctccattggcattgtcatcgtttcggcagtgtttttcgtcatttgctttagggcggtgctcggattcgaaatcaatctgacaatggtcaaattgttcccgccagactcgcctctgctggaagtggacaactatcgtgaagacaaattggtgcccttctacacaatggcacaaatttttgtgaacaacccaggcgatttgtcaaacaattatgtgaaggatttcaatgtgtccgtgctccatgacttcggtctcttcttgggtctgctcgaaaatatgcaggaccccgtggtgattgcaggtgtgatcatttccattggcttcagtgtggacattccggcacacatctcagcattctatgggcatattatttaaatgtttaaaatgaatagcatattaattggttgttaccaatattgttcaatggatctctcttatttaaaatgaataatatcttattattgttg

SEQ ID NO: 85315 - DNA, 480 bp, Heterodera glycines
gaatcccaatttcgcattcatctcactcactcataaaatgctccaaaacggccttaccattctgcttctgatcagtgttgtgatcggccattccttggccaaccttggcccaaccatcaaacataatcctcattttaaagccgtacaaactgcgcatcatttgcatgatgccattgcgaagaagcacgaggccgaagttacgcaagtcatttgctctattagcaacgaacagcgtcaagcattggctttggagttcaaaaaacaattcggcactgatctgattgccatgctgaaaaaggagttcaaaagcgactttgaagaactgatcatttctttgatgcaaacgcccgccgtttacgatgccaaccaaatgcgtgccgcattgtccggctccaatgaggcggtgctaatcgaaattttggcgacgcgcacaaaccgacaaattacggcgctgaagcaggcgtatgagcagttggacag

SEQ ID NO: 85316 - DNA, 495 bp, Heterodera glycines
agggcgtttaaccgaattggaggaattcattacggagccaaatcacgcccaaatacaacttgttggagatcgttgtgcggaagatgggatgaacgacgcagcacgaattctgttcatcagcatcagcaacttcgcaaagttggcaaagacccttgtcgaactcggtgacttcccgggtgctgttgatgcaggacgcaaagccaattccacaaagacatggaaacagatttgcttcgcatgtgtaaatcatcaagaattccgtttggcacaaatttgtggtcttcatattgttgtgcatgccgatgagttggatgagctgataaattattatcaaaaccgtgcccatttcgacgaactaatcgctctcctggaaaatgcgcttggtcttgagcgtgcccacatgggaatgttcacagaattggccattttatacagcaaatacaaaactgagaaaatgcgtgaacatttggaattatcttggtctcgagtgaacat

SEQ ID NO: 85317 - DNA, 479 bp, Heterodera glycines
  unsure (1)..(479): unsure at all n locations
gagtgcccgtgcaggggtccaaatatgctgcagatttgagccagcgtcgacgttttgcgggtccacgacggaattatttcttccgcggaaatcgaaaccgccgtccccggcatagcgaagaagcggcaggtggcgtcgnttcggtgggcgaaaagaaagaaggcgcagaagaaaacaatggaaaagaggctaagaaggaagaggttgcaaaggacgccaacggaggacgtggcggtgggcagcgtcgaggccggggcgttcgtttccgcgggcgccgcaacaatcgtcgaaacgtcgcgggctcaacatctggtggcacagaaaatgaaggcgaacagaaaaaagaacaaacgcagccggaggaagagacgaaagtgaacggaggcgaatgagcgaaatgcgacctcttttgtttagcgataattaaaaaagtaataagtctgcttcctacgatgtgttatgaattgtgtcgaccattt

SEQ ID NO: 85318 - DNA, 185 bp, Heterodera glycines
ggggcggtctcctcccaaagcgtaacggaggagtacgaaggtacgctaggtacggtcggaaatcgtgctgatagtgcaatggcataagcgtgcttaactgcgagaccgacaagtcgagcaggtgcgaaagcttgttttattgatccggtggttctgtatggaagggccatcgctcaacggataaa

SEQ ID NO: 85319 - DNA, 137 bp, Heterodera glycines
gcatctcagcgcactccgcctgcaaatgccccattcgccactgaacagaaggacagcaaaccccagtctggaggctagcagtccaacgtacagcaacaaacgggtgaatgcagaccagatacgccaactcttttttt

SEQ ID NO: 85320 - DNA, 592 bp, Heterodera glycines
gataacgtaaataacttgaacatccttaatcctaatcatttgaaaaatcaaaaaaccagattttcaggaatttaattcaaatattatcgaaatattatttaaatttgatttgatagacacagagacaaagtcctggaaaaagaatatgtgataaatatagataaagcgtacctcatgccagagaaaaaaaacggagaagatgatgtaacagatgattgagtgaaaaataatttataaatttgaaactcattacatccattcttaaatacaaaactcatcaattttaatcagttaatataaaataagaattaacaattaaaaaaaattttttttattaattttcttaattatgattcgattagataatataaaaaaatgttctactaaaaaataagcagcggatttttgaatttttggaagataggtcaccaatatgttatatttttttgtaattttgccactgttatgtactgtactatactgtacttgttgtttagttccaactaccgtacatgaagaggcgtgtgcatgtcggcacctgtttcagcccacttttcctggcagaacagtggcaattggttgtgttagccat

SEQ ID NO: 85321 - DNA, 503 bp, Heterodera glycines
gagtgcccgtgcaggggtccaaatatgctgcagatttgagccagcgtcgacgttttgcgggtccacgacggaattatttcttccgcggaaatcgaaaccgccgtccccggcatagcgaagaagcggcaggtggcgaagtgccggtgggcgaaaagaaagaaggcgcagaagaaaacaatggaaaagaggctaagaaggaagaggttgcaaaggacgccaacggaggacgtggcggtgggcagcgtcgaggccggggcgttcgtttccgcgggcgccgcaacaatcgtcgaaacgtcgcgggctcaacatctggtggcacagaaaatgaaggcgaacagaaaaaagaacaaacgcagccggaggaagagacgaaagtgaacggaggcgaatgagcgaaatgcgacctcttttgtttagcgataattaaaaaagtaataagtctgcttcctacgatgtgttatgaattgtgtcgacaatttaaaggatttgctgacacaaagata

SEQ ID NO: 85322 - DNA, 699 bp, Heterodera glycines
  unsure (1)..(699): unsure at all n locations
ggaagcttcctcctcccatcggacagatgagtcccctccagccattaacctaaacgagtccaactcgctttcgcaccgccatttggctgaagaggccaatgcttcggttgcaggcgattcagcgacagagtccacaacaacagcagcggcggcacttttggtcaaaaagggacggaggagagagttggacggactgctgaagatggactttggcaaacactcgcccttccagacttcggacccggacaaatacgcgcaggaagtgctcatcgaggcgcgtcagcagcagcgcactttggcattggcgcaagaggagcaacggaatgcgcgtcggagcgtggagagttcctgcggcggttcagcgacagggaaaagcagcaagcgcgacaaatacgcaaaaaagcctttttcgccgcccgtctcgccactgcccgagtcacgtgccgcttcagtacggtccacgacgccaacactgcaattgcgagcgaagaatcatggggaaaaggcgtcttcgtcatcaaaattggcgacggcaagcggaattggaaagccaacaaaagagggcaccacaacatcagtggagaacaagctgaaaacatcgcccaaggattccttctcgttggagcaacgccgttctggtggtagcaacgtgtcnngagagggcgaggagcgctgtctgtactgtcgccgctcgtttaa

SEQ ID NO: 85323 - DNA, 302 bp, Heterodera glycines
gcactttgaaaatgggcgacgaccaatcgaaggcaatggaggacactgcgcttttttacacgggctaccaacgctttggccaattggccaatgatgtgcggacaaccaagcgacgctgactcttcggcctggcactgtgctggggagtcgacaatttccgagtgatgcacggactaaaagcattggaaggtgaacgagtgcatgtgcgggcgtttatttgaatagagacgtgtttttggcaaacgcaaggccaaaactgtcgccagaattctaccgaaatgtgtgaagaattgggcggggtg

SEQ ID NO: 85324 - DNA, 587 bp, Heterodera glycines
gtggaaaagggcggcaaaatgtgtggaaattgtgcaaaacgggcaaatttatgtaggcggcaaagagtgccaagtcgaaattgaagcggaaagtcgggcggaaatgtacagaaagtggaccaaccttggcaaggcgttgcaattcagaattggcgcactgtacaaagagaatgacggaatgttcgatgagcagaagctgatgcttctgctggagcaggcctacggcgcgttgctgaacggttcggcactgccgccgctgccgcccaatgtcagcggaacggtcgagcaaaaactgtacggcgaaatgttggaaaagtcggcacaaatgagcgagcggacgctgagccgagcgttgtcctccttcacacgtcaaaagtcgattctgtcggagaatccgatcggtgacatgaagcggacactgagcgaaaaggcgcgcgaaatgctgcacaaattttggacgggcgaaagcgtttttctggtgaagacgaaggcggtgaacgcggacacaatttggcgcctcttcgaccaaatcgaccgaacgcacgacgaaaaggcggtgaaaggcgtggagaagcaattcccggacg

SEQ ID NO: 85325 - DNA, 361 bp, Heterodera glycines
tttttttttttttttttttttggtcccgattgtttatgcgttttggaaaaaacacacaaaaatatttttgtcaaaagaagaaagcttttttcaattattttgaatgttaacaaatcgaaagggagggaatggtaggctccgttaaccatgcgaaggattcaaacaaatttatcgcaaaagttaattccacccaacgaatcagcggcacctccaaactcaccaccgtttgtttatttggtcacagggatccgatccaaaattgaagtcctttttcccagcgtcggttgtcccaatcgcccggaattgccttcaactgccaccatttttatgccccgcgttgtgctgatcaccggacgacttc

SEQ ID NO: 85326 - DNA, 545 bp, Heterodera glycines
gtctgctgctgctactgttactggcgaggacgaaacgggccaaaccaagttcaaagtgccaatgtgacgacggcggtttttgttcaatgctaatcagctaattgctcactaattaccccaaataacaaaactatgcttctcccaacaatggcccccaaatgccttccgctcgaacttttgttcgaaattgtgcctctcatccctgccgaaaatgccacaccgaatgcgctctcgtcctgttggctgctgcacaaacttttgctgccacgtgtcatcaaatggaaagagataaaaatgcacgctgaaaatatcgtttggctcgaaaaatacccgcgttactttcgcatcaactggaacggaatggaggaccgaagaattgaccgttatgaggcatttgttaagcaactgtccggggtggacgattgggcacgaattggaagtcttcctgttcgcagctccatggagtcttacagtttgacgtttcaagtcggagcgccttccaacgaagaatacaaatttaaaattatcgcgattgatgcgcgcgg

SEQ ID NO: 85327 - DNA, 670 bp, Heterodera glycines
  unsure (1)..(670): unsure at all n locations
atacacaaacacaaggaggaattgaacttgagagcatctttttggtgactaactcacagaccactaagacgaaaaatccaacttaattgtacttggagcccaaaattgaatcgccgtgtttaggtttttatctttataaatggctggtgaagagaagcgtattacttgggttccgcttgagtcaaaccctgaagcatttaataagtacatcgaaaaaatgggcgtgaaaggagctgagtgccacgaacttttcggttttgagcctgacttggtcagcttcgtgccgggacctcacttggcgctaattttctgctacccttaccaagacaaagcaaatgactatcagaagggaatttacggacaattgacggcttcagacaaaggaggcgtgccggaatgggccttcttcatgaagcagaaaatacacaacgcttgcggcacttttgctctttttcatgctctgacgaataacaccgaccgaattgacattggaaacggcgtcttctatgattggtttaaggcggcaaaacaactcaatgttgaacaacgctcggaccttttggcaaacgattcggagttggctcatttgcatgaacactgtgctttgagggaatcggagacagatgtcccaaggaatgttgctcaccacttcatctcatactntacacat

SEQ ID NO: 85328 - DNA, 586 bp, Heterodera glycines
atccacggcacacgatccgctgtcactttcatttgcgaacagcccgacatcaaagcaatttcttttgttggcagtgaccaggccggcaaatacatttacgagcacgggtctaagtttgggaaaagagttcagtcgaatatgggcgctaagaatcacggagtcatccttcctgacgcgaaccgagaacacacgttgaatcaggtcgctgccgcggcattcggtgctgcggggcaacgatgtatggcactctctacggccatttttgtgggtgatgcgcgcggatgggtttctgatttggtggaacgagcccggaaattgcgcgtcggcccgggatgggaggcggggacggacattgggccggtgatttcacaaaaagcgaaggagcgcatttgcgagttggtcgaatcggcgctggaagaaggagccgatgtgccattggatggcaccaatgtgacagtgaaaggcttcgagaagggaaactttgtcggaccgacggtgatcactggagtaaagcccgaaatgctctgttataaggaagaaatctttgggcccgttttgtgtgtgctcgaaacggaaacacttgacg

SEQ ID NO: 85329 - DNA, 521 bp, Heterodera glycines
gatcatttgtaattcattttttaaataaaaatttccttggaccgacaaaaatggcaaaattcgttgccattgctcttctctcgctgaccattgtttcgatggcacttgcaaaaactggcaaaagtcaaacggcagacgaagttgagggatttcgcaatatgaacatcggcgacaacaataaggttgacgccggaaaggagcccgcggctgataaagcaaccaaaaagggaaaagctcagaaagccggaacgaaatcggcggcggccactaatgagcccgcggctgctaaaggaactaaaaatggaaaagccccgaaaaccaaagcgaggcaagaggtggccactaatgagcccgcggctgctaatgaatggaacgaccaattgatgggcatgagcgttgagaaatttaacgaggagcttgctgtgttgttgccaaaagccaacacttttatggaaaatgctttgagcttcaccaatgaacaaatggaaaaaaatggtattgcaactggcgctgccggggac

SEQ ID NO: 85330 - DNA, 593 bp, Heterodera glycines
atcaatcgaccggaaatcactcagaaattttattttatcaatgcggcaaccgaacggaagttttaccattcacaagggaggcgaaagtgatgttagggccgtgtatcgtgcactttccgttgcgtccatttgtgaattgccaggccaagaacagctttttggggacaccgctgcttggcttactcgttgtcaggtggctaattctcatttaaatgactgaactcgtcgatttttcatttctaaataattttggcagaaattccgctaatgcgccggaataagataccgatttttaaatttgagatcggcaatgttccaaaataatatatgccaaaaattatctaaccccaaagttaattgtaagacatacgaaggcggttttgggggcgagcctaactgtgaagcgcacagcggctacactttttgcgccttagcgagcctctctttgttgcggaaggtccatttggtgaatagagattcagcaatcagatggcttgtcaaccgccaaatgtcctccgaaggcggatttcaaggtcgtgccaataaacttgtagacggttgctattcttattggaacactgcatgtttctctg

SEQ ID NO: 85331 - DNA, 560 bp, Heterodera glycines
gaagtgccaccgattgcgccttccgttggccaaatgtccgtggacattttgtcgcgtcattttggcctcacatgggaacagctgatggcacagtttgtgctgaagttgcaaattcgagagcgcgtcgacgacacggaagcagtgtttatggacattgaagaagcggaatgggacaccaaattggttgaacaccgaaccatttacaaagcgatgctttacccgaaattggaggaggaaaagaacagcgacggaaaatgtgacgtcaaagtgcccaagctccctgccgatgccgaacccttggccaaacgcgggggccaaattgtgttccgaatgaccaacttcaagtcattttccaagggctgtgggccaaagattgtgttcagcgaaccgtcggtgcccatcaacggaatgccgtggcgcattcgcgtcaaacactgcgacgagtgcgtccgagtcgatttgttctgtgccgccgaccaaaacgacatggcttggtcgtgccgtgccgcgttcactgtcggtgttctttcgtgcgccaacagcgatgtgtacgtgaagaa

SEQ ID NO: 85332 - DNA, 561 bp, Heterodera glycines
  unsure (1)..(561): unsure at all n locations
gaaaatttgattttatacaataaaaatattataatatttttgaataaaaatgaaaaattctttcctcttcctgcttcaaatttttattctaaccaacattttaactgaaatactttgtggagataagtcaaggccgtcgacggaaatcaatgccaatttgggaacaaggaaaaagcctgaaacaattacggcaacaaaaaatgccaatttgggaacaggaaaaatgcatgaaaccgatgggaccagcaaaatgccaaaacatggcaaacctgtgtcaaatcgaatggcagccaaaagcacgacgattaaaaataataatgaagcagcagggccaagccaacaatcaaaacaacctgcggcaaacattacgccacagcaaaaggggccaatgcaaaattcaaaaaagcagccaccaaacgaattgtttggcaagaagcaaaggtcaacccctgaagagatcaaagctggcaaacaaccagcaatggagctaatgccatgctatcgaggaatcggcaaanagacgatgccaacaattgcacagcgaaatgccaccatgctaaa

SEQ ID NO: 85333 - DNA, 555 bp, Heterodera glycines
gggtcacaaaagacggcaccaccacggccagcagtcctccgttggtgccgcttgctcttccacccaatcctccgccccttcttcaagtcaatcggaacaggctgattcaacactccatccggaagagcggaaacgcattttgcatttgcatgcggaaaagaatcgccgttttgcgctgaaggaaggcttcgagtcgcttgtgaatgccattccggtagttgagcagacgggcgttaaatgcaccaatgcggtggtgctgaacagggcggcacagcacatcaaacaattgaagagcgaacaggatcagcagcagatgaagttgagggtgttgcgggagaagattaccaacatgaacgaacgaatcgccctaatccaatccaatttgccttcctcatcaaccggtggttcacggccttgtgaagctcagactcccagcatgcgcattcaagtggaacaattcttcgaacattacaaaaaggaacgttcccgtgaagattaccgcttttggctgatgggtgaggtgctcaagcctattgtgcattcgtttgccgaaca

SEQ ID NO: 85334 - DNA, 599 bp, Heterodera glycines
gaaaatttgattttatacaataaaaatattataatatttttgaataaaaatgaaaaattctttcctcttcctgcttcaaatttttattctaaccaacattttaactgaaatactttgtggagataagtcaaggccgtcgacggaaatcaatgccaatttgggaacaaggaaaaagcctgaaacaattacggcaacaaaaaatgccaatttgggaacaggaaaaatgcatgaaaccgatgggaccagcaaaatgccaaaacatggcaaacctgtgtcaaatcgaatggcagccaaaagcacgacgattaaaaataataatgaagcagcagggccaagccaacaatcaaaacaacctgcggcaaacattacgccacagcaaaaggggccaatgcaaaattcaaaaaagcagccaccaaacgaattgtttggcaagaagcaaaggtcaacccctgaagagatcaaagctggcaaacaaccagcaatggagctaatgccatgctatcgaggaatcggcaaaaagacgatgccaacaattgcacagcgaaatgccaccatgctaaaaaggggggacagtttgacacggagtgccgactttgagg

SEQ ID NO: 85335 - DNA, 686 bp, Heterodera glycines
ggaattatttaataaacaaaaaaacaattaattaccgccaattgcccattagaagaaatgttcagctcttccaatttgtctgctctctttttggcctcctccgttttggccgtgcttataattggcattaaaatggacggaccgacggaggcaaaaggcgccgcccctccaaacgccgcggggccaatgggacttttgcttttattgaatggcaaacaatcggcggctaatgaaaagggaaaagcgccctctggcgaaagtaagccaaatccggggcagaagccgagcggagaacggcgaaagagggacgttttggggcacgccggcggatacgtcggaggatgggaccatcccattgactcgacacttgattgggcaaagagtcagtggaatgatgccaattggctcgccgatgttgtcaacagaaacggatgggaaaacaccggcactccaaccggcggacgatgaatcagtgaattgtgccgaccaaggaatgaaagacggcatttttgtttgggaatttaattgacttttcggaatcaaacacactttcctttttagttgcctatttattctaaattagcgttttttctgttcattttctacgcaaaacaaattttttacatattttttggttggggattatcccaatggtcccatttttcgcataaatatgaattgataaa

SEQ ID NO: 85336 - DNA, 634 bp, Heterodera glycines
ggaggaaaatggtgaagaagaaacggcggcgacggagaaggcttcatcctttccacgccaaatgacggtggaccaattcaagcagtacatcaacaccacggataacaacacgggagaccaaggggatgccatggaggaggaggagttgacggaaacggcacgaaagcggtgcaaaatgatgccgatacgggaggatgaggaggagggcacagtgcctgaaatggaaactcaaactattgttcggcaacaaagcaaacgccaacaaagcctttggcagtccaattacgtacgcgtcgacgcgcatttgccgtccactgacacactgctgtttgtgccacccaatttgaacgtgtttgtcggcgcggaactgtactacgaccgtgaccaggacacctttgtgcatcgcatgggcattaaggagcgaaaatggggggaagacggacaaaactggacggatgaggacgatgatgatgatgaccataaccacgaccatgaccatgattacgaaacttcgtccgtctcctcctcgtcgtcaattggcgccacgagttcttcttcagcagtccgttcactacggggcagagacaatgcgtcacttccgcctgctttttgttgctgttggtgccaatgacaa

SEQ ID NO: 85337 - DNA, 564 bp, Heterodera glycines
aagctgggcctgttttgtgccaccccggcggttccgttgtcgcgaaatgtgccaccaaaaattgcgcttgacatgctgctgactggacgtttcttggaagctaacattgcgcacaaatttggtctcgtgtcacgcctcgtcggcaccgcggagctccggcgcgagacgctcggcgccgcgcaacacatttgtgacaacagtcgtgcagtggtcggcatgggcaaggcgttcttctacgcacagctggagcagaacgagcgcgacgcgtacaggcaggcgacggcaacaatgtgtgacaatttgaagtggcgcgacgcgcaggagggcatttcggcattcatcacacgaccaaaacggcagccccagtggacgcacactgatcagagagtgatcaaggactgatcagagagaaagtgagagagagagagctatactgatttggaaattctcatcattgattgatcaaccggggtgattttgttgtgtttgagtgatcggaatggacgaaaaaccttattatactacggcttctttatattattataccaataaattgaagacaac

SEQ ID NO: 85338 - DNA, 571 bp, Heterodera glycines
cgacattcctcggacgaaagagagtgcgaacgttgtgtggtcacttatttttgtggaaacttttcttttcacgggcgattcgcgtggccaattgagtatttacgacgcattgaatggaacacttttgaaattttttaaaacgcaccaagcggcagttctcaccattgccacgaacggtaaagaggtttttgctgcgggggcagattatcggatacaaatcgtaaaaagaatatcgcatgacaatgtccgtttcgagtggcaacaaagtggccagcgccttttccatgccaacgacgtgagggctatttgtgtgttggacaaacgattgcttgtttctggagggtccgactctgagcttttcatttctgataaattcactcatgcgaacccccagataaaatcagaatgcgctttcttcgtctcaaagtccaattgctatgtgattgtgagccaccatttgtctcatcttgacttatggtataaaacaatcggaggatctcttatggaccaaagaaagcgtttgaaactatttcttcgaattaccagtggcaaattagggtttatcaaacaa

SEQ ID NO: 85339 - DNA, 181 bp, Heterodera glycines
attcgcatttaaacgaatcgatgcatttcttttcatttttcccgtgccaattgtctgtttcgatgtcaaattatgctccgctatttcgatacagttgcgattctgtccgctggagtgagtgaaagaaatgctaacgagaggagcggactggcttgaacagacgccttccgctttgtgcccc

SEQ ID NO: 85340 - DNA, 152 bp, Heterodera glycines
cggcagtcggcctcgcggtaagcgaactgctcgcacttcgagtggcaaacgaacggagtcggtctcgagtacaatcatttgtttggctttggtgtgctctactccgtataaatggttctgatggcaaaggtgtataaaacggtaccgtcgcg

SEQ ID NO: 85341 - DNA, 548 bp, Heterodera glycines
gttaaaatccgccggaactttgcccatcgaattggcccgcctttatgtggcggaaacggtgttggccatcgaatatttgcactcgtgtggcattgtgcacagggatttaaagccggacaatttgctaatcacttccatgggacacataaaactgacggatttcggcctctccaaaattgggcttatgaatcggactactttggtgtcggaaggttatctgctacaggacgacacgcagcagttcaaggacaaccaactttgcggaacgcccgaatacatcgcaccggaagtgattttacgacagggatacggaaaaccggtggattggtgggcacttggcgtcattctctacgagtttttggttggaattgtgccttttatgggagatacgccggaggcgttatttgccaacataattaatgaagacgtggaatacccggagggggacgaggcattggattcggatgctgagtcgttgattcatcttttgctggagaacaatccgctggaccgactcggcaccgtcggcggtgctccccaagtgtccg

SEQ ID NO: 85342 - DNA, 247 bp, Heterodera glycines
aagaataatgccgaaaatggggaggaggacaaagggacgacaaaaaacaatgccgaaaatggggaggaggacaaagagacgacaaagaataatgccgaaaatggggaggaggacaaagagacgacaaagaataatgtctaaaatggagaagacatgcaagatgagtgatgccgaaaacgataaattgctactgaatttcccgttaaacactgtcattccgtaaaaaaaaaaaaaaaaaaaaaaaaaa

SEQ ID NO: 85343 - DNA, 561 bp, Heterodera glycines
actcaaattttcgggctttcattgcatttacaggaacttaagcattttgatggacaaaatggcaaattaattggcaatgacagcgacgagtcattggaatcattggtttcatttatttctaaaaatggctttggtctcataaacgacgaacggagaacaaaaattgatcaggcaattcaagaaatagaacaaattgttaagaaatggaatcgcaaagcgaaaattattgtcatgggttcctaccaattgggcgcactcaccaaacaatcagacatcgatgccatttgtgttgtgcccgaattacgcacttggagagcggcaaaattttttgggaaggcaaagtgccaaattcaatggaacgggttcagaaggtgcgcggatgattcactgttttgccacttttgtttggcggcccaagtaacggggctcaatcggatccaagacgcgtgggtgccgctgattaaattcaaattcgaaatcgacccgaaaacttccgtcgattttgacattggactagaaacatttgcaatccatgacgacatttttaaatccgaagagcca

SEQ ID NO: 85344 - DNA, 557 bp, Heterodera glycines
aaagcgcagaatttggccatggaagcggccaatttaacagacgccactgaacaaacgatggctggggccacagaaacgaaaagtgcgctggacactctcagcagcgaattggactccgttttgaccacaacaaaggattttgagaaccaagcaatttccgacgcggaacgttccaacgaagtcgcgaaaaaagcgactctctccgaagcgactgcaaattcactgcaggaaaagctgagtgactcggacacaaaacttacggaagcattggcccaactcagtcaattgatttgcgtttgttttgtcgaaattttatttttattttaggttccttagacaatgtggacgatgcgcaattggacaccgtggagaaactgctgaaagaagcggaaaatcgtttcgattcgagcggcgacgaagtgaaaatgcgagaacggatcatacaagcggagaccaaagcggtgaagcagaagagggaaatcgatacattggcaaaagagttggagaatttgcgtcaaatcagagattcattgccgactcgctgctacaattatgta

SEQ ID NO: 85345 - DNA, 567 bp, Heterodera glycines
agccaaatgcctcgtcggctaactaccgacgcgcacgaatggatcaacgagattcccactgtccctatctactatctagcgaaaccacagccaagggaacgggcttggcaaatttagcggggaaagaagaccctgttgagcttgactctagtctgactttgtgaagaatcatgagaggtgtagcataagtgggagccgcaaggcgccagtgaaataccactactttcatcgattccttacttaatcggtaaaacgggagtgcgcccgaaagggtgtccattttggtgttaagtcgggccacccggtggcccggcgacccgcgccgatgacagtgtcaggcggggagtttgactggggcggtacatctgtcaaagcgtaacgcaggtgtcctaaggcgagctcagagaggacggaaacctctcgtagagcaaaaaggcaaatgcttacttgatcctgattttcagtacgaatacggaccgcgaaagcgtggcttatcgatccttttgaatgtgtaaagtttccagcaagaggtgtcagaaaagttaccacagggataactggcttgtg

SEQ ID NO: 85346 - DNA, 393 bp, Heterodera glycines
gagttcaacctgctctaccacctggacactgtctatgtgattgacctcgcccaagccatggacatttctcatccgtcctcgctgcgcttcctccaccgggacatcacgaatgttttgaacttttttggtcgcattggctgtgagccgttgcccacgccgcacgcattcttccacggaagtgaccgacattgagttcgacccgaacaaaaatttgtatgttcaggtggagtctttcgagcgcgagaatcggaacatggacttgaagggggcgaaggcgtcgccagcaaattatgaactccatttacaccagcaggagagcacaggccgagcggactcgccttcacggccttacaattgaacacgaaacgatgaacataaatgaaaactgtgaga

SEQ ID NO: 85347 - DNA, 649 bp, Heterodera glycines
gatcgcaagttgacccgttcgggtgttctacaacctctacgttcaagcccatcatcccgtacgcgggacagcgaagattcccgagtttattttcccatgtaacgaagtgtgtgctaccaacgaggagttggatgcatttatcaacggactttgtcactcatgacaaattgtgaaggcggcgacgtcactgccggtccccgtttaccaggcccacgaacttgcgaagcgtggaaggtccaattacatggagctgaggagaatggcgcccgaacgaattccacggagtgctgacggacaagtgatgtgcgaacaattatccgagttgctctcttacaacgacagtcctctcagagaatcgcgaacaacggcttaatccaaaaatcagataatgaaactgatggactaatattataaaagcagtaacaattttaaataacaacaacatcgaaaaagaaaaagtaaacggagggacaaatcatttattattggagaattggcagaatttggaaattgaaatacactcatttataagctaaataatttattttgtggtcatctcacgcctcattaccattcccagttcctttcaccattccctttcctttgaccgattctgtcttattgtacctgatccctttgtctttattta

SEQ ID NO: 85348 - DNA, 610 bp, Heterodera glycines
agatcagaatgttcaacaagcgtggcgaggagcacggcacggtgacatgtcggataaacgaccgcgagaacttcgaggtgacaaccctccgcgtggacgtggtgtgcgacggacggagggcgaaggtcaacttcaccaccgactgggagttggacgccttccgcagggacttgaccatcaactcgctcttccttggcctcgacgggctcatctacgattacaccggtggcatcgaagacgtcaaacagcggcgcatcatttttgtcggtgaccccatccaaaggcttcaggaggattatttgcgtattttgcgatactttcgcttcttcggccgtttctccaaattggacgcgccccatgaacagaaaaatttggaagcgatcgtccgttgccgagatgggctcaaaggtgtcagtggtgagcgaatttggatggaattgcatcaaatccttgtggggcggttggctgcccccgtgctgcgctgtatgttggtcgattgtggcctcggtcccctcctcgcacttcgccccgatcgagtggatgaattcgagagggtttcgcgtctgaatgcccccaacggcgacgacgggaaattgagtattgagccgag

SEQ ID NO: 85349 - DNA, 569 bp, Heterodera glycines
actcaaattttcgggctttcattgcatttacaggaacttaagcattttgatggacaaaatggcaaattaattggcaatgacagcgacgagtcattggaatcattggtttcatttatttctaaaaatggctttggtctcataaacgacgaacggagaacaaaaattgatcaggcaattcaagaaatagaacaaattgttaagaaatggaatcgcaaagcgaaaattattgtcatgggttcctaccaattgggcgcactcaccaaacaatcagacatcgatgccatttgtgttgtgcccgaattacgcacttggagagcggcaaaattttttgggaaggcaaagtgccaaattcaatggaacgggttcagaaggtgcgcggatgattcactgttttgccacttttgtttggcggcccaagtaacggggctcaatcggatccaagacgcgtgggtgccgctgattaaattcaaattcgaaatcgacccgaaaacttccgtcgattttgacattggactagaaacatttgcaatccatgacgacatttttaaatccgaagagccaataaaata

SEQ ID NO: 85350 - DNA, 528 bp, Heterodera glycines
atttggcgccacggcaacgcaaaatgaggctgaatgtggacccgaaacaacttctgcccaatttgcccaaccccaaagacttacagccttttcctactactttggcattttatctccggggccactcgggccaagtgcgtacactggcagtcgaacctgaaattggcgaacttttagtgtctggcggagcggactctacggtccgcgtttggctgttgcccagtggcaagtgccttcggctcttcgaaatgccagcctcggtcacttgcgttgcgttctgtcccaactccaaccgaacactcactttggtctcttgtgagtccgacttggtcactgtgcttaacattcaaagtggcgatcggttggccgtgtccaacacgcgccaattcatcgccggaattccttttggcactgagaacaccgctggcgttctatggacacacattcacagcaaaacgatgaatggaatccgaataaaaatgaacgacaaaatccgaagtctttgttggcacaaaagtggcgattatt

SEQ ID NO: 85351 - DNA, 594 bp, Heterodera glycines
gacacgtagttgtccaataagaaaatatttgaaaagatgggaatacatcctttctggaacattggtgtactgcgaaagaccgatgataaatcattaatgaatggacagttggcgttaaaggggtgtgaaatctttgtactttatttcggcgctcacatgtgtcagcgatgtcgtgaatttataccggtgctcaaacaattctacgatcagttgaaaaaatctcccgaaacaatgccttttgaaattgtttttgtgccctttgaccgttccgaggatgaattccgcaactctttgcgcgatttgcacgacgattggctgtacattccctatgggagtgttcacattaactcattggccgcgaggtttaacatcattaattggggagtcattccgacattggttgtgcttaaggaggacggcactttgataaccatggctggacaagcaaatgttcagcatttgtcggcatcagaagcaatggtccgctggcgctctattcctaatcccgaatccggattcaaagatttttcgaaattttaaatttccatatcttttttgttaatgttgctaaagcattggtttgatgtgtacaac

SEQ ID NO: 85352 - DNA, 588 bp, Heterodera glycines
gggtcaacgcggacgaactgaagaaattcccgtcacttacggatgcgtttaagaagaagaggggcaacatactcaatttcgaggaagaggaatttgacgagatcatcagcaatggcaccagcaagcgcgacaacagtccgtacaccgaccacgactacgcaggcacgcgccaattggcgacggcgaagggagcgaccggcaaacaccaacggcagaagggcggcggagggacggcgaaagagccgaaaaagaaaacggcacttgtcaatgggaccgattcggtggtccgttcatcggcacggccgcaccgtccgaccaaacgttttgtagaggaaacaaacgaatcattcattcgtgggacttcgaaagtgcgccgaacatcgccacgcaaacatggcaagaaatcgactgcggagggaggaagcgaaggggaagaatcggaggatgacgggaaggagtacagcgtggaaaaagtgttcaagaagcgtgtgaagggtggaaaaatggaatactttgtcaaatgggctgggtatgacgacggttggaacacttgggaaccgcgtaagagcttgaaacatttggaagtgt

SEQ ID NO: 85353 - DNA, 504 bp, Heterodera glycines
acggagcaaaactcttcgagaaagtgctaaacgaattcgatttcgcccgtcgcgctgagtgggaattggtccaaactctctttggcattgcctccgacaggacaatactttttcccgacgatcagattcgcctttttatcggctgtcctcagaatagcgatgcgtacaaatttctttgttcgattttcgtcgatggaagctccgaaggaataaattacggaacaacgtccacttcagtgcttctggtagacattgaagggacggccgtttttcatgaaagacgtttggtcaacccacaaagtccgatggacgacccccaaaaatggaaattctcccgggaacggttcaccatttgctattaaagaaggtcggcgtcctccgtcggtcgtttatatgtcatttatttcaggccaatgttgcacttttcgcttattcattttgtttcggttatttgtcaattgtttttgtaaatattttttttattaaaaataaattttaaatgcg

SEQ ID NO: 85354 - DNA, 657 bp, Heterodera glycines
gtggacattttgtcgttcggcgcctccaaaaacggctgttggtgtgccgaggccattctcgtgttcaacgacttgcagcaggctcacaaagactttcccttcctgcgcaaaagggccgcccatttgttctccaaaacgcggttcatcgccgcccaattcgaggcgtatttccacgactcactttggctgcgcaatgctcggcatgccaacaagatggcttcccatttgacttcggcaattcgttcgttggatccgtcggtgattcgtttggcatggaccccccaggccaacgaagttttcgttgtgatgcgtcgttcagttgccgaaacattgcgcaaaagtggcgaaatttcgcatttttatgagtggaatgttccggacggagagcgacgcgagttgaagctgtacacggaggagggactgttccgtttggtcaccacatttgccaccaaagaagctgaagtggacgagttcgcttctcttctgaaggcgcattatttgggaaaatcggagcaaatgcgaagcatcgcttaacagcagaagagagtgaaaaagacagcaaacgcaacacaattgggacacaacaaacaataaaattgtacatttatttcccgcatcgttatcaaaattaataacattaaaataaaaataaatggc

SEQ ID NO: 85355 - DNA, 506 bp, Heterodera glycines
tacaagaccggactgcgtgacgccgtgccgattgccgccttctggaagaagttctccgctttcgtcatgatgccactttgcggatggaaggaccatcagaatgtgcaccattctccacgccctgagtacgtcgcatacgaatatttggccacgcgtcgaaagcctttcccctggggcgacggcaaccattctttattgcacaacccggccactaattgggtgcctggcgttggctacgaagccccgtggcccggcgatgcgcacaaaaaggagggggacagcggcggcgaggggaagaagcactgagcggcgcccactgaccgatggatgatgaaatgaatggcacggcacgcacacgatttttttcatttgtcggctaatttaggcgcttccccccccacgacgatgtagaaaattatggtggagcgacacagttagggttctcatgaaaatgtgtcttctttgttagagaatgtggataaacaacatacaacagcaaaaaaaaa

SEQ ID NO: 85356 - DNA, 115 bp, Heterodera glycines
ttttttttttttttttttttttttttaaaaattttaaaatttttttgaattttttactttgcaacaattggttttttatttttaaaaaaaggttggttttttttttttttttggt

SEQ ID NO: 85357 - DNA, 549 bp, Heterodera glycines
actgaaacggcgatgagaaagcaacaggagacaaattatacaggtgctccttccgctcatccgtcttccccttgctcttcctctttgcttcccccgcccgtctcgtctctctccgtcccattgcatcaccgatccagcatttctggtggcgggtcccgcccaattgtcattcggaaagggccccaaggcttcggattttccatacgatccgtccgcgtttatttgagcgaaatgtccgagtattactccattgaacatattgtggccgctgtgcgcgagggttcgcccgcttgggaagccggtctccggacaaacgatttaatcacgcgcgtgcacgcccaatcggtccacaacatgactcaccccgaaatgatgcgccgtctcctctcctgcggcaatgaactcactgtccatgtcgttccattgtccagcacctccataaaagagggcgaaccgcgtcgaaacattggcaaacccttgcgcaagaagccgcgacggccgccaaccgcacaacagaaaaacaaacaacagagtcgcaaaggttctgca

SEQ ID NO: 85358 - DNA, 601 bp, Heterodera glycines
ctgtgactggattttacacacagatacgtgctcctccaaatcccaatgttcagaaggataaaaagggaggtgagtcgttcatcctcatggaccaaataatcggtgtttcttgggcaaccaaaccttacatgttgctccaaaggccgttgacaatcgtcctgaaatttcgtcattttcgtgatgaaagaatatgtcaattgccttattggaagaaatccgatggaatttcccaggaaatttacaaccattggttgaatgatatgcgacaatgggatgaggaatatccttctttggaattcatcgagaaaaagtccaaagagttggtcaccgttttgtccgaacctcccagaggaccgccagtcgatgtcatcagattggctacaatcgaagcagagagagaaaattcgactaaactgctgaaaaaactaaaagaatggcaagaagaacaaaaagttggaaatgcaatgcatcagccttttccgtcacctcgtcaacccttttaccctccctctcgtcctattcgattcccgcattggccatttcatcatgatccttcacggccaagaccgcacttgatgtatgggaggtcagtgggttacca

SEQ ID NO: 85359 - DNA, 640 bp, Heterodera glycines
caatttaccgatggatcaccgtcaagaatttgaatgtgatgaactttgacaacgatttggacaacgataccccaatgggactattgagaggcatcaaatacggtaccgaaagttaccacgtgttgttcaaacggctgtgcagttacgccggcctccactgtgtggtgattaaggggttcagcaaatccgccggatatcagcccggacttggcttcgacgacagccgcttcagaaacacatggaacgcggtttttttggacggttcttgacgatttgtgcaatgcaattggggcgcaagacatttggtgaacgccaaagaaaatgccagaggcaaaagatcaatgacggtacaaaacggacacgaaaaagacggcaacggagcagtgggcagtaatttgcgatatgaatacgacgaccattacttcatgaccgacccggaagagatgatctacgaattcttcccggatgagtcccaatggcaactccttccgcggcccgtctctctgaagcaattcgaacagtttcccttcgtccgttcgctgttcttccgctacggcctccgcttcagtgacccgcggttgtcagcggttgtccgcgcggacaaaacgggcgcagtgtcaattgccatcgctttgggtgc

SEQ ID NO: 85360 - DNA, 655 bp, Heterodera glycines
agcaccgaaattggtcgaaaatgacaaagtgacactttttgtgaagggaaagaaatgttcagtgatgctcaacaaaatacttggcgaactttaccaactgaagaagccattggccaatcgactgcaacgaaataatgacagccatccctttgaggatgattcgttattgtgcagattttctcacaaatttgacgcttctttatttgtcttcgggtccagcacaaagaaacggccgaattcattgctttttggcagaatgtacgaccatcaaatgttggatatggtcgaattgcaagtggagaattttgtctctagcgacgaatttaaacaagtcaaaagcgtaactttggggtcgaagccatgcatcattttgcaaggtcacctttttgagtctaacggaatacttcaacggattggcaatttaatggtggatttgtttcgtggccccaaagtggagtacttacggcttcaaggcaccgaattgataatttcattgacagcagtttccgaagagcggattaaattcagagtttacagagcatccctaaagaaggacatggaatctgcgaccccaaaaatagaattggttgaaatgggaccgaatattgacttcaaaatcgacaggacgaaattggcaagcgattcgctcttcaaa

SEQ ID NO: 85361 - DNA, 515 bp, Heterodera glycines
gacttctaaattaactctaattaccactcattagtgctaatgatgctgatcaaatttgctttgccgctcctctttgtgcttctccatcccttcgtttgttcggctgccgaggaaaatgccggcgctgccgatttccctcaacaattttatggcgccttcaaattggaccacagcgacaattgggacgattatttgattgccaaagggtacagtgaccctgagatgcgcaagaaagtggagctgcccaggttcacacgcattttgtaccgtttcccgaacggcacttatcggatgatggtcggcacggggctcgagggcagcaaatgggtgaaggggtccaagaagaacgccgattggcagttcaagcctaacgagccgttcattggcaattattgggacggctccaaacacgaaatcactttcacgtacgacccgaaagagagtcggctgacggaacggcacgtcaaagtggacggcaccggcacgccggaggagttcaactacaaaattgacca

SEQ ID NO: 85362 - DNA, 616 bp, Heterodera glycines
atctttcgattgcggacagagaagcagcggagaaagaggtttccgacaataagacgctttctttgttgatgagtttatttgagaagaagcgggtgatgaataactctttgcccgaaaatacatcgaacagttcggcggacgatgtttatggcggcgtctccgccattgaatatctttcgagaagagtgggcaactgtcacattgggaaacggagtgaggagcaaataaaatccaacgcattcaatgcaagcctttggctttccgaaacttttcctcttaaattgcatgaacaaatttttccggttatcgatttgttggccgttcggaatacaaaattttcaagactgaagagctttattcaattgcaattgccttccggctttcctattagggtcaaaattccgattttccacctaatcaatgcacaaattacatttcggaatgtcaatgatccgaaagaagaagctattgaacggattgccgaacactctgaggacgatgggccacaaatgttgcaacttcgccagtcacttttccaaatccccgatggatttgaacgttgtgaattatcaggctcttttctgtttaatcgagctggcgaattcgagaggacaca

SEQ ID NO: 85363 - DNA, 533 bp, Heterodera glycines
atgtgcagtttgagaatcgtcagaagcgagctcggccgacctctgagggcctttttttcacaacactttgccatcggtggcttcgttgttggaatcggacgacgatttgctaagagtggacataaaggaagagaagttttacgtgtcggaggaggtcactcagacgcacctcttctgtctgagcaagaatttgtgctccaatttgttccgtcttttgcgtcgctgcagctccaacaatgccatccgcgtccagcatttgcttgaaatctcttcccaattggtgcccatcggcgcccccatgcccaactccaacgctttggtcgacctgtgcaatcgcttcccgaccattttcaaattgcgttgttcgcctcaagacaattatcgctttgacaattcggtgattatgctcaacgaacagttgctggacagcgagaatttggcgtggcgcgtcgttttggacactgacgaattttaaagggtgaattggcgaagaagcggactctgaccaaatttgccataaaatctttttgttg

SEQ ID NO: 85364 - DNA, 578 bp, Heterodera glycines
gatccaaaccaacgcggcacagtaataaaatattaaaagatccgaaaaaatgccaaacattttcaaaatccttctgattgtgcttttggccgtcgtctcattccgtctctcggcttctactggtgacaaattttctgctaatgatgggagtggaaacaactcatcagctgggattggtacgaagatcaaaagaattgtcaccgctggactgctcttcacttccctggcgacgggtggggcggaagcgattgggcgaagcaatgctcagggaggaaatgccgccggattggtgccatcgcatgtgaccaatcgctcaatggctccaccacctcctcctgtgcaatttgaaatgggggcaaatcgattagaaaaaatgagggcacacctacgcgaacttgctgagaaaatgccggtcaatgaatcgaagcgtctgtcaccgagtggacccgacccacatcatcattagggccatggatggatctaacggaggaagaaagaatggatgcttagttttcagattttattctatcctcttttatttattagtttttcaaaacaaatttcttccacaacttttt

SEQ ID NO: 85365 - DNA, 624 bp, Heterodera glycines
gataatacttaatctcttttaatattcctgcattaaacaaattctgtcaaattgagcattttatttgaaaaaatcgtaatattttaaaagaatggatttgaaattatgcctattattcaatttaattatatttttgatcatccaaactgatcaaattgcctcagaaaataaaaattggaacaaaaatcatttggagaaatatttggagaaaaatgggaagaaaaaagaaacgaagaacagaaaaaaaagagaaataagtggaaaattctataaaataaaagaaaaaataaaacaaaaaggaaaaaaatattcgaatagagaatggagtaaaattgaaggaaaaatagcgaaaaaattaggcataaatcgcaataatatttatgaatggatcaaaaaaattggattaaatcaaagaataaataaatgttataaaatacgaagaaaacttttaacattgtctaaataatttttttatgaaatgaaaaaaagtcttcaccgggaaaatttgaaaaaaaaatagttgaacgcagaaaattggcggaattctttatttgttttttgtctaaagctaagagttttcggagtcgcgaaaagcgcaatttccgcacagcccaagcaataatg

SEQ ID NO: 85366 - DNA, 549 bp, Heterodera glycines
acgcacagaacacaaagccatggtccttcccttatgagcagccattcgtcgcgccggagaagcttttctgcgtgttggacatggacgagggccaattggccttcgccaccgactccaaatatttgggcgtcgccttccgcggcctcaaaggcaaaaaactgtacccggccgtcagtgcggtgtggggacactgcgaaatcactctcagatatttgggcggactcaatccggacagtcaattgatggacacttgtcggaggtcaattcgggttcgcgtaggcaaggagcgagtcgatcgtattggagaactgaaccttccgcctaatctcatcaaataccttcattacaaataaccatgaacgacgacactttccttaccaccaatgtttcctgttccttttttcctatttccttattcattttcacttaatttttctgttgctttagcctccattttctcctcttcctgaaccatttgatctcgttattccactgctttcttgtcaaatgctacttgtgataagtcagaaaataaaacattcattccaa

SEQ ID NO: 85367 - DNA, 295 bp, Heterodera glycines
agcgtgccaagtgccgaaatcccgcaaattcgtcctccattttccaatatgtgcaccaccccaatccgccgccgccgcgtaaatgatcattaacaaacctttggcatttcattttgtcgcgtatttctctcttatatctctatttacctgttggttcatctctcgtttttttcggactgacgtgtttttatggtgtaagaataaaatgcaattttcttaaaaaaaaaaaaaaaaaaaaaaaaaaaaaaaaaaaaaaaaaaaaaaaaaaaaaaaaaaaaaaaaaaaaaaaaaaaac

SEQ ID NO: 85368 - DNA, 429 bp, Heterodera glycines
tattcttgagacagccaattcaaaggcagtgaaaaaagacaataagaaaggaacagttgcaacgccagcaaaaggaaaagcggcgccgaaaggagcagcgaaaggaggaattaaaaaagacgcaaaatcaaagggaaaaggaaaaaaggacgccaaaggcaaaaaggacaaaaaagctaagccagtcaaagggaaaggagtgcctaaaaatgacaaaaaatccccagcggcaaaagccaatcacaaaaagagcccaaccaaaccaatggcagcagtgaaagccgtgccaaaggcggcggagaatgctcagaagggaccgtcgagtgcggaagtggtggcggaggaaaacaacttgggcactgaggcggtcgacaacttgggggcggaagagtcggactttgaccaattggcagagggcgaactgctcga

SEQ ID NO: 85369 - DNA, 390 bp, Heterodera glycines
gaaccgcgtggcggaacgcgcggcggcccgtgtgtacgggtggcttccggaagacaagcagcctaaggcgatctatgacgcggcggagaaggcaaagaacacgcccaaaccgccgggcgactacgacgtggagcgcgtggcgcaaaaggcggcacggctcgtctacggtgtgctgcccatcggctttcagcccaacttcgccggccctagcacgaactagggtagatacgaaaaattgttgtgaattttttcacgacaattttgcaaaaagataggcctgtaaaatatttgggaattgattttatgatatgttttcaaagggtatgtgataaactttgtgtcatgctttgtaattaaacttactttattaaacccatcaaatttttaaac

SEQ ID NO: 85370 - DNA, 582 bp, Heterodera glycines
gacattttttctctctctctcggtacctccacatcctaaagtcgatcccatcaaaactgtcccctcaccgaaacccggaaaagtatccctaattcctataaaaacaaatggctaatatgaaatacttgccgcctgaacttttggacgaaatggctttttacgtatatcctaaccaacgtttttctaaaattctgacttcttcctggctactcttggaatttttgatgccccgtatcaaaagatggaaagaaatattgaaattaagccgttccgaggtcattaaaaagcacaaattggccaaagacgatctcccttggaccaattttgtcacggtggcaaaaaaaagacagtgtctgcactgattttcttaacacgttcaccgaactgtttaaagaggaagatttttataactcgatcgacggaagtatgttgaatttgttgctttcaaatctccgcgagctttacccccgtgttaaacaaacatgtgcgtggttggatcttttaatccaagccaaactctttccggcgactatgcttctgattgaagaactttgcaagttcatcgaatcgccgggtctttat

SEQ ID NO: 85371 - DNA, 428 bp, Heterodera glycines
atgatccggcggaaacgttttacggtccacccggcggtgaacagaccattgacggagttgcggtgccttggtcttctccgggggacttcgataagctgacaaaagtgcacaatttgcggcacaacaaatccactcgcgttctcggaagcgtgcacgggctatgaagtttttgagcacaaagttttgctgggcgattggtcccggggccgagcttatgcccgcgacattctcaacgatttgcgcacttgggtggtcggatggactgactggaatatgtgtttggatttggagggcgggcccaatttggcacggaattttgttgactctccgatcattgtgaatgccagtgctggcgagttctacaagcagccaatgttttatgcgatggcacattttagtcgctttgtcccgcgcgattcatcagtcat

SEQ ID NO: 85372 - DNA, 581 bp, Heterodera glycines
atatcacattttcatttaaattatcctcccaaaatgcgtaccattctcttcatggccatggtttgcttggtgatggctgtcctaatggaaatggcaaattcaaaagtagtcaaaaaagacaataaaaaagcagcagtggcggcatctccagcaaaaggaaaagcatcgccaaaaggaggcaaaagcccagcaaaaggaaaagcggcaaaagttagtaaaaaagataacaaattgaaagcaaagaaagaaaccaaaggcattaaagttaaaaatgcaaagccaacaaaaaaaggtaaatcggcaaaaggcgcatcaaaaacagccaagaaagtccaagccgccaaaaaagcaccaggaaaggacaaaaagtcgctagttaagccaatcgtccttaaagcaccggtaccaccccataaaatgcacccgatgattgaatccgaagctgtgccaccgcccgcccatgcgcgttcgcttgcgaccgttccttacagtacaccgggggcagccgaccgtaactcattgccatcgtacacttcgactgccaccaatttggacatggccgatgataatgatgattatca

SEQ ID NO: 85373 - DNA, 529 bp, Heterodera glycines
gagagcgaccattgccattgccacgcataaagcggaaatgcattcggcacttcagcaaaaggaccaggaaatcgagggatggatagaaaagtgccattccatggagaaacgggataccgattcaaatacactctggcaggaaaaggtggacacacttcaaaaagccatcgtggcattggaacatgagaaggcggacatggtggagaaactgtcgcaagccaaacaggagggagtcaaattggtaaaagaaagcgaggagaaacggcatggcgaaattctaactgaacaattgaagaaaaaggatgaagaatggagtcgtcgcgttaaagaattggaggaacaaatgcaattggcggtggaagaaagtgaccttcaaagaaagacgagtgttactggccacgaaagggaactttcgaatttgagaggacgagttgcagaattggaaaaggaaaatacacaaattttacaacaattttgtggacaaaaggaagaattagagcaaatgaagcgaaaagaattgacggaaacg

SEQ ID NO: 85374 - DNA, 450 bp, Heterodera glycines
  unsure (1)..(450): unsure at all n locations
ggtcacatttttgctagaagagctgatcgagaataaccaatgttgttgtcagcaaatttccggcatcttcatttattgagaattttcaatcgaattgtccgattgtctcctcgctgtgtctgtcagacgacggaattattctccgaacggtttctttcaacgtctttccttttattacaaaaacgttctacgcctaagcctactggacctgtccgtcgagttcccgctgttagcatcggaagtgatgtgcgacaaaagcattcggaaagaaccgcaggaaaaggtgatggaacaaatggattctggcaaccatggaatgcttcggatgattacagtgaaattaaaaaacgtcttttgcgtcctccgaatgatttctccgagctcagggaaattatacgcaaagacattgaaagaatggcccngannaaaaaaaaaaaaaacaaaaaaaaa

SEQ ID NO: 85375 - DNA, 439 bp, Heterodera glycines
  unsure (1)..(439): unsure at all n locations
gggattgtcaatttgttgaacggtgatcagaacaaagatgaatttttgtccaaacttccgttcgccaaagtcccagtgtttgtccatgacaatttagtgctgtccgaaagtatggcaatcattgaatatttggacgaaaaattccccgaacccaaccctttgttcccaaaaagtgccgaagatcgtgcacacgtgcgggcacttgcgcttcaaattgtcgcaaatacgcaaccgctacaaaatttgggtgttctcaagcacctttctgaagagccggccaaacgaaatgcctgtgctcgtcattggatcgagcagtcattcaatgtttttgagaaagcattggccaaaacggcaggcaaatatgcctacggggatcagatcagtttggccgacatttgcattccgncacaagtgtataacgcaaagcgctttggcgtcg

SEQ ID NO: 85376 - DNA, 405 bp, Heterodera glycines
gggcgcaacggttggagccaaaaaacaatcaaccgcacaacaccaaggcgaacagcaacaaaaacaggctcaacaagtacaacaacaaccgttgaaaaatgccaaattgcaaattgtcaacaatcggcggatggcacggctggcccacgctgacgacgaatcggccgaccaattggctgcccgggaggactgggcccattttgaaatggttgagcgtcagctggacgaactgcttgaacatcatgcggacaagttggacgaggagggtgatgtgctcggcgttgacatggtggcggaaccgctcaacgagcccgacatctccgagatggagaccggcgatgagacggcttctcgaccgatcaaccgattccgcccaattttgtacacggagggcgagctggacaa

SEQ ID NO: 85377 - DNA, 341 bp, Heterodera glycines
tttttttttttttttttttttttttaaaaactatttatttattcattgttaattaagaccaataagtgaaaattataccgaaacactaaaccatactaaacatacagatacaataattagtaattatcccaattcaattttcataatatttcatccttcattgagagcaaagtcccgtggctttgtcacatttgtcatttgctttgcatttgctgcacggctccccggccaaatagacaggcgcaccaaagtaattaccacccgtgtaataccagcagaccacatatgttttccaattggtatttgggcagttttgtgccatggcacagccaattcggtcg

SEQ ID NO: 85378 - DNA, 127 bp, Heterodera glycines
tttattctttgagcgatggtcctttcatacataacctccggatcactatgacctgctttcgcacctgctcgacttgtcggtctcgcagttaagcacgcttatgccattgcactatcagcacgatttc

SEQ ID NO: 85379 - DNA, 379 bp, Heterodera glycines
tttttttttttttttttttttttttttgatgaacacattttaacatgataaatattattattaaatagaacacgggaatggcatcagatttaacgaaatcattcattgaggggcggagcattggcatttccgtttttattcggaaatgacgggacgaagggaccattctgttgttgtggaatgtgaggcgatcgcagtgggggcggaatgttgtgagatttcatgaaggagcacacctgatcaggcagttcggacagcacttccttggccagggcggacttgaggtactcttgacaaagagcagaagacgcattttgggtccaatcggttcccaaaaagaattcgcggaaagggacaaattggacaatgtctctgacgg

SEQ ID NO: 85380 - DNA, 321 bp, Heterodera glycines
ttttttttttttttttttttttttttggtgcttcctcttttctcatcatcttccgttttctttttctcgttttcttttcttctccccgcttcctgctctctggtgctttcctttttttcttttccactctcttcccttttctcactgtcttccccgatctgatcaatcggcttctctggctttgggtgcttcttattgggcacatcctccgccgctatttcatttctttgcgcttcttcttcttccttttttgagatgccaccggcttcaccggtttcaccggcttcaccaccactgatcacacttcccaagcccatcacg

SEQ ID NO: 85381 - DNA, 451 bp, Heterodera glycines
  unsure (1)..(451): unsure at all n locations
gggacttacagttggatccgtcaattttcaaggagagccaaccacaaatcatcatgcctgaaggttatgagtctggtcggggaaaatttgagttcgctctcggttacatcggttgttcggttatcggaggattcggagttggaagtgttcgtggaatgttcggcgagttaggaaatccacagaacagaactttggcttggaatccgtggtacactcggatgctgaatgccgccactaagcatggcagcggatacgcacaaactgctgggactgccatgtttctctattcggtcactgagttggggctgaagctgtcacgagccgatgacttgcttaattcttttatcgccggaccaatcgctggcggacttttccgcggattgcctcatgggctgcgtgctggcggtgttggtgcattggccggactgggtttggtcaccgtctggaatnt

SEQ ID NO: 85382 - DNA, 327 bp, Heterodera glycines
tttttttttttttttttttttttttcatggaaaagtaatttattaaaataaacacgaacaaaaagaagtattttatcgaattcgtttaatgcgttcgtttgctgaactgccatctttctttccaatttgcgcaaagtcttcctttgaaaaaactgaagagcattgtttcgttttgcggggacgaccataaaggatcaatttcgcattgtttcgctctttcctccgcttttctgccattttttgtcgctgcttcgctttccggtcaaacaaaaccatcgaagagaaattttgtattccaacacgacgttctctcaattgtttttccac

SEQ ID NO: 85383 - DNA, 422 bp, Heterodera glycines
gggatttcatgcccaatgaaaatgggttggccaatgccattccggcggctttgaacggaggcgacgcgttgctgttgagaaagaagcgcgaagacgaagatggagcaggtgatggtgaagaggggggtggagatgatgccgagggtgcccaagaagacgccgaaggtgttgaggatgaagaaaaagccgacgaggatggagccgaagatgaagcaaaagagaacgaagacggagatgataaggaggacaaagatgaagacggcaaagacggcgaggaaggcggtgacaaaggaggaaaagacaaaggaaaaggaggaaaaggaaagggaggagaaccaggagaaggaggaggtaaaaaaggaaatggaggtggcagtggtgtgccgcaaccgacaggcggaggaggaggtggcactctccca

SEQ ID NO: 85384 - DNA, 134 bp, Heterodera glycines
  unsure (1)..(134): unsure at all n locations
ggggtcgncgttgcattaataaaattggatttcgtatactcgggcacagagtacaaaatgaggacggattgcatataagcagagaaagaatttggggacgcgaaaggacggaagagaacattgaagaagcatnc

SEQ ID NO: 85385 - DNA, 155 bp, Heterodera glycines
tttttttttttttttttttttttttactttttttttttttttttttttttttttttttttttttttttttttttacaaaagaattttttgctcacaaagattggggggaaacaatttttttccccgaaaaaaaaccaacgaatttaaaaaccaaa

SEQ ID NO: 85386 - DNA, 345 bp, Heterodera glycines
tttttttttttttttttttttttttttatttttttcgggttttttcatatttatagacatgaaacaacgaaaagacacacatttttcatataaatagaattaagttttgcaacaacatcacaaaatcaaatcactcctttttccattcaagttcgagcacccgctgcaaaaaacagtacaaatcgacaagttcggcgatctgaacaaaaagcagcacagagagtatcatttgcctgtttccccaagagttttgcgttaccgttttggtggttggcttgccggctccgtgccccgcctttgtctcaatgcgcgccagcaccggcctccgttgccattcgcttgcct

SEQ ID NO: 85387 - DNA, 436 bp, Heterodera glycines
ggggggcatcttcatttattgagaattttcaatcgaattgtccgattgtctcctcactgtgtctatcagacgacggaattattctccgaacggtttctttcaacgtctttccttttattacaaaaacgttctacgcctaagcctactggacctgtccgtcgagttcccgctgttagcatcggaagtgatgtgcgacaaaagcattcggaaagaaccgcaggaaaaggtgatggaacaaatggattctggcaaccatggaatgcttcggatgattacagtgaaattaaaaaacgtcttttgcgtcctccgaatgatttctccgagctcagggaaattatacgcaaagacattgaaagaatggcacagataaaggaggaaaacctaaaaaagaggaagggaacgaccaaagggaagaagcaaatgacggatgagcaga

SEQ ID NO: 85388 - DNA, 468 bp, Heterodera glycines
ggggatccaaatcaacgcggcacagtaataaaatattaaaagatccgaaaaaatgccaaacattttcaaaatccttctgattgtgcttttggccgtcgtctcattccgtctctcggcttctactggtgacaaaaaaactgctaatgatgggagtggaaacaactcatcagctgggattggtacgaagatcaaaagaattgtcaccgctggactgctcttcacttccctggcgacgggtggggcggaagcgattgggcgaagcaatgctcagggaggaaatgccgccggattggtgccatcgcatgtgaccaatcgctcaatggctccaccacctcctcctgtgcaatttgaaatgggggcaaatcgattagaaaaaatgagggcacacctacgcgaacttgctgagaaaatgccggtcaatgaatcgaagcgtctgtcaccgggtggacccgaccctcatcatcatta

SEQ ID NO: 85389 - DNA, 285 bp, Heterodera glycines
ggggacatcactaagaaggaattgttggccgagcgcgacgaagcactcgcagcatgcaagtaatggaaagggagagacaaacgtagaggaaatgacagaacgacagaaataaacattcagtgccgacctcaatttggtgggagtcggtaaggcgaattcacatttatgacttttaataaattataataggcgagcaattaaattaaatagcaaaataaagtgaccttaaaacttggaatgtttgtccattttttcactttttgcaaataaattttgcttacgaca

SEQ ID NO: 85390 - DNA, 376 bp, Heterodera glycines
ttttttttttttttttttttttttttttgatttttttaggggtttaaatttatctaaaaagattcaaaacaacaaatagtttaaaaagttgtggaaaaaatttgttttgaaaaactaataaataaaagaggattgaataaaatctgaaaactaagcatccattctttcttcctccgttagatccatccatggccctaatgatgatgagggtcgggtccactcggtgacagacgcttcgattcattgaccggcattttctcaacaagttcgcgtaggtgtgccctcattttttctaatcgatttgcccccatttcaaattgcacaggaggaggtggtggagccattgagcgattggtcacatgcgatggcaccaatc

SEQ ID NO: 85391 - DNA, 249 bp, Heterodera glycines
ggaattctcgacttcatcaagtcggcgactgatcttctctttttccacgttgaccatggtgctgatttgccttatcaccaatttctcatcgatctcattaatgcctacaagcgaacgcaattccatccctttcgttccggtgtttttgtgctgcgcggtgacagaagtgaagaggagcagcatacgcaggatttgagctcgctgatcgaaatcctttgtctcttccactcgaaaacctatgtgccgcct

SEQ ID NO: 85392 - DNA, 290 bp, Heterodera glycines
ttttttttttttttttttttttttttgacagtcgaaatgtgtaataagtgaaatgattgacgtggaagggaaatacaatgatgattgatcgccgtaattattaataatgaatgaaacctaagcaaatttctgcttattttggaagaaaaagctgccgatcggcgaaaaggacaaaaaagatcaaaccaggggaagtatatgccaaaatgagaagcccacggaagggcagagaaaatgaggaaaatattgtaagacacacacaaaacaaaacaaaaaggtgaaagagagga

SEQ ID NO: 85393 - DNA, 310 bp, Heterodera glycines
tttttttttttttttttttttttttttttttttttttatccattttataaaccagaggagatcaagcaaagaaacaataaaaataataaatcgaaaaattggtgggttttttttggattggttttggttcattaataatatgggggcggctggtgctccatggcactgggttcaaagggcaactgttcctgcatggcgatcagctttttttttagcacttggataccactgaacacaatgttttccgcacgcaatgcgccgggcgactcgacgcccaaccaaaacttgcacgggttggcgtcccccttgt

SEQ ID NO: 85394 - DNA, 98 bp, Heterodera glycines
ttttttttttttttttttttttttttcttttttttttttttttttttttttttttttttttttttttttttttttttttttttttttttttttttttg

SEQ ID NO: 85395 - DNA, 406 bp, Heterodera glycines
ggggcttattgagattttggtgacccgcagcaatgcccaactgcgtgccatcaaggcggcctaccagaagttgtacggtcatgggttggagaaggacctggcggccgagacaagcggcagctttaagactctgctgctcgacttggtcgaagcgaaccgggatgagtcgtaccgtactgatctggccaaggcgaagacggatgccgagaaactttacaaagccggggaaggcaaatggggcactgacgaagatgcgttcatcaaagtgttggccaaccaaaacttgagtcagcttcagctgatgttcaacgagtatgaaaagcttggcaagaagcacaccattgaacaggcaatcaaagctgaattcagtggagacgagttcagtgctctgttggcaattgtcagc

SEQ ID NO: 85396 - DNA, 291 bp, Heterodera glycines
gggatgttgcagcccgcctggtagagcaggcccgagacggcgtggacaatgcccttggcgtcctggcaggacagggtcagaacgaattcttgcgaggtcttcatgatggacccgattgtagggtcgtcatctgacagccgcgcgaaaccgccagtggcggccggtctcagtgaccgtggccgatgtgctcgccttccttgaccttgtagaccgtgccgcagtaggggcacatgccttcgccggtcttggccacgtcgatgaagacacgggggtggttgctccacagcggca

SEQ ID NO: 85397 - DNA, 449 bp, Heterodera glycines
ggggatccaaatcaacgcggcacagtaataaaatattaaaagatccgaaaaaatgccaaacattttcaaaatccttctgattgtgcttttggccgtcgtctcattccgtctctcggcttctactggtgacaaaaaaactgctaatgatgggagtggaaacaactcatcagctgggattggtacgaagatcaaaagaattgtcaccgctggactgctcttcacttccctggcgacgggtggggcggaagcgattgggcgaagcaatgctcagggaggaaatgccgccggattggtgccatcgcatgtggccaatcgctcaatggctccaccacctcctcctgtgcaatttgaaatgggggcaaatcgattagaaaaaatgagggcacacctacgcgaacttgctgagaaaatgccggtcaatgaatcgaagcgtctgtcaccgagtggac

SEQ ID NO: 85398 - DNA, 446 bp, Heterodera glycines
  unsure (1)..(446): unsure at all n locations
ggctgttacactgtttataatttgttgctttatttcgatccgaatgttcagagaatttacattgaacggcatggacagcgcagtctgatcccagtccttatcaatgacgttgtgttcgcttcccatgctttgttggcatgcatcataacgggcgttcagtgctttttctatgagcgtggaaaccagcgcatttcgtacattggccgtgcctgggcttcccttctgctctgtttctcttcggtgtctttggcgttggcgcttttccgtgttttgaattggctcgatttcatcaattacctttcttactcaaaaatggccgtcactctgagcaaatatttcccgcaggctattctcaactntaaacgaaaaagcaccgtcggttggagcattggcaatgttttgttggacttttccggtgggttcatgggcatttgtcagatgtgtct

SEQ ID NO: 85399 - DNA, 357 bp, Heterodera glycines
ggggaaccaaccaataccattaatttcataaatccgaagaaatccctccaaaaatgtcttcttccccgtccgtctctgtgctcgccatcgtcgcaattgtctgtttgatgtgccaatgttgcttttcggcaccgcatccgtgctgtcccggcagtcaaaaagtggtttcacttatgtccaattacgttggcacttttgccaattccatttccaagtcatcgctttgttcggatgcccaaaatgttgcggaagcgttgaaaggccaactgatcggctgctcgaatggcggcgatcgaactcttttggccgacatcgaagcattccttgccactcattctgctgatgagtgtgccctaa

SEQ ID NO: 85400 - DNA, 180 bp, Heterodera glycines
tttttttttttttttttttttttttttttttttttttttttttttttttttttttttttttttttttttttttaaaaaaatacttttttacccccccaatttttgtttttccaaattttaaacaaaacaaaatttggtttggaaagggaaaaacaaaaaatggggggaaataaatgaaat

SEQ ID NO: 85401 - DNA, 363 bp, Heterodera glycines
ggggattttgagaatattcaacatgtgataaattttgaaatgcccgaagacatagaaaattatgtgcatcgaattggacgtacgggtcggtcaatgagacgcggaattgccacgacattcatcaaccgaaaagcggatttgcctgtactgttggatcttaagcatttgctgatcgaagccggacaacaattgcccgcgtttctcaaacaattggccggggaagatgaggatttgggagcgattcaagaaactgaaccggtcaacgacatggacaagggttgttcatactgttccgggcttggccatcgcatcaccaactgcccgaaattggagagcgtgcgcacaaagaatgcttccaacctc

SEQ ID NO: 85402 - DNA, 315 bp, Heterodera glycines
tttttttttttttttttttttttttttttgagtaaacaatgtttttatccaattaacatagggtcatataagcacattaagtaaattggtatcacacatttcaattagagaattaacaatttgaataattgggggcgtaaagaaacttaattatgggatacaatccttttcaaaatctaagggaacaaaaattgtcggaggggataaaatttatcgactgggcatcaataccattttaataattgatatcatttgtcttgaggagcaattaagtcaattcagttctcttcataaagctgcctgatttcctcctcg

SEQ ID NO: 85403 - DNA, 365 bp, Heterodera glycines
cgtctgtatcttgcaccaatccatacgcattaacgttctcgtcgggcacgaacttttccgggatgacattgtccaaataccatttgaaacttttacagcccaaacgctccctcaacgctttgcgggcgcttaaatcgccgacttcaacatccttcaatcccattctgtgcacataaaacaaccgtttgtagtcgtccacccaaacttcggccagacgcttggagttggtgccgtgcacgtccttgttgccgccagggcccgtcatgttgtacgggtggccggcacggaaaatgtgcccgacgtgggagcaggggacgacttcgatggacccaccgcacatccacaccctaaacgaaatctgcaaa

SEQ ID NO: 85404 - DNA, 353 bp, Heterodera glycines
gggagaaggagtccacgctccacttggtcctccgtctccggggcggaaatgggaagagaaacacgggtaagaacaagaaaagcaacaaaaagcttgatcagaattgatcagcagcgaacgcaccatcacatactattgattggcacagtgattttccaccaccaaattcacaacacttttcccttttccgggttatctttgatttccattttcggttattgttttctgtttttctcctctatcttttgtaaaattctgttactttgatctttagttttatcatttatcatcgcatatatagaagttatcatagtccatatttctgtccctttttatttatttttttgactata

SEQ ID NO: 85405 - DNA, 178 bp, Heterodera glycines
ttttttttttttttttttttttttttttcttaaaaaatgaagatttatttaaccacaaaaaaaaaacaatccttggttgacattgatcatttaaaaaaaaatccgaatgatcgttactgtttttgtttttttatgaatttttggggacattgtgcgatggccggccattgatcagatc

SEQ ID NO: 85406 - DNA, 347 bp, Heterodera glycines
tttttttttttttttttttttttttttttagggaaattggggtacctttttcgcattttcaaatttcctcctcccattcgtccccctcttcttcttcctcctcttttcccttctcctcgtcgtccatttgctcctcaatttcgttgttcgtttcatcacggccaccggcggacggagagcgtcccaagtccgggactccgccgaccgggccactttcaatgccgcactcgtcggagccgcgcaaaatgcggaagaatccgtcctcgccccagtccgtgttccatgagttggcaaccagccaatacggaatgccattgtccgcgccccatccgagcagtttcaccgcg

SEQ ID NO: 85407 - DNA, 391 bp, Heterodera glycines
gggcaacgaaatttggcgacacgcactgtcggctttgatgatccgaattgtctcgcgatggcaattcgggatgaagaaaacatccgagtgaacgacaaaagtgcacaatttggattcaaatcattcaaagaattgctcgagtcgccaatgatggacaaatttgttaaagtagaagtgggcataaaggaagggcggctcagaacgacgtacacagcgaaaatggacgcgacgacgcgaaaagtgatggaacagcagaaatggtttcaccaaacggcggaggggcgcttgaaggagcagcggaggcaaaattaccaatcgcagaacaatgccgccgccgcaaaaagacgctgttcaatggcgccactgtcagtgaatcatccgtcccttttcc

SEQ ID NO: 85408 - DNA, 381 bp, Heterodera glycines
gggcagaatttggccggaagagaagcggcgccgaaatttacggtgccgacagtgcaggattcttatttcctcgcgctgaaggcagggacaagggcaacgaacttggtcgacaaatgggttcgcgagtatgaggagtcccctgaccaggcaattgtccaacttctgcagctaattgttgcttcctgtgggtgttctgggaaattggatgccaacatgattcacaacatgcagtggaaggacatagtcgaacggctcagcgagtattttgacgaagactccggcgactatcccctgaccacacaacaatatcgtaaattccgcaacaattttgcggaatttctccaggccttcgttttgcgaagcaaaaacaacattctattc

SEQ ID NO: 85409 - DNA, 341 bp, Heterodera glycines
ttttttttttttttttttttttttttcatttatcttctttaattcattttcatccgttgcaatttttcgtttcagtgaaatttttaaattaaattatgtgaaatgataaaaaaatgataaaaataaaacgagtaaaaaggcgttgagaatcaagctcccataaatgtaatttgagaataatttcaaaatgctttcgtttcggctgtccctttcttttcccccattttctctgattttccttcgccattccgtaaaattaaactccaaaatccgccgcggtcactttcagctgaaatgccgatttgtggggcggctgctgctccgtaagattgagaaaggga

SEQ ID NO: 85410 - DNA, 352 bp, Heterodera glycines
tttttttttttttttttttttttttggatttaacgaaatttatcgaacgagatatgttttgacgtataataaaaatgcaaaggcaaaataaaaaatcgtcataaaaacatatcacagtgtaaaggaggataatgcggaaagcatctgggtaatgattaagatctggaaaaaataaacggaaaataaattttaattgtaaaacttacaatgaggacccagactcgaaattactcaaaactataaatttagcagtaaaaaatgaaatatatgtaagaatttcctttattgcgctttttgagtctgggcctcacattaatatttaccaagtaatgaaaaatgccttaagataact

SEQ ID NO: 85411 - DNA, 370 bp, Heterodera glycines
ttttttttttttttttttttttggtgaattttatttaataaaaaattaataatttttggacaacctttttttaaattaataaatctttgtccaaataatcaatcagtatagctttttatcgctgattgtaccctcctcctcctcccattagaatggcagcacactggacaaattgaacacgaatgaaggtccaaagttggcacggatggcgtccttgttgtcaaccaaagtgacggcggcaaaaaggcggaccggatcagcagcaagaatccccatgtccaatttctcgccattaagcgtaaagaagacatgacggttgaatgcgttcagtccacatccaattacatcgcccgtcgtgaactgcggaaaa

SEQ ID NO: 85412 - DNA, 361 bp, Heterodera glycines
tttttttttttttttttttttctgagtacaaacagtactaaattgcttcgcttttgtgcgattctgaaaaacaccgaacaaaagctgactgaacacaaaatgactgggatgaggaaaaagttaaaggcacaatccaaaagggacacattttggttacacaattatttacttggatacaataaaatcgaatgccaaaaattacgaaaagaatgtgagaagaaatgaacgaatgaacaaaaaacaaatttttgttggtttgactgacacgcataacatcgaaaatgggaggaagagagggtataatttaatgtagcaaatggatggactcgaattacttctgctcctcttctcactgttaatg

SEQ ID NO: 85413 - DNA, 343 bp, Heterodera glycines
gggcagggaggaaatgccgccggattggtgccatcgcatgtgaccaatcgctcaatggctccaccacctcctcctgtgcaatttgaaatgggggcaaatcgattagaaaaaatgagggcacacctacgcgaacttgctgagaaaatgccggtcaatgaatcgaagcgtctgtcaccgagtggacccgacccacatcatcattagggccatggatggatctaacggaggaagaaaggatggatgcttagttttcagattttattctatcctcttttatttattagtttttcaaaacaaatttcttccacaactttttaaactattcgttgttttgaatcttttt

SEQ ID NO: 85414 - DNA, 440 bp, Heterodera glycines
gggacgtcggaggaggacaccgaagcggacatggaggagggcgatggactcgcagcggatgaacgcaaaatggaaatgttggacaaatacattcactgcgcacgccaagcccaaatggaacctcaagtggccttccgtgccaccgagcacatttgcggttggctgttgtgcggtggtctgcgcattggaagtgcggaaagtgtgaaggcgttggcccatcttttgctggtgatgttcaacacggagagccgtgacagagcgccggaggcgcacgtgtgcctttcccgctttttgccctgtttcgtggcggtcaatcgccgacaccagcagttgctgttccgggccttcatgtccgcattttcactgcttcagacaatgagtttggcactgcaagaagaggcacgtcaaatcgacactgtgaaaatggcgatcagtgtgca

SEQ ID NO: 85415 - DNA, 213 bp, Heterodera glycines
tttttttttttttttttttttttttttttctttttttttttttttttttttttttttaacggatcaaatttaaaccaaatcacaaaacaaaaaaaaacagtcaaaatttcttcatgctcaagtaacttctgttctgctcgcacattttgggcaactcctgcttcccctgaatgggcaatccttcgttttccatcgcggggagcaattcggacc

SEQ ID NO: 85416 - DNA, 332 bp, Heterodera glycines
tttttttttttttttttttttttttttggggagctaataacaaaaatccaaaaaagcgaatttagaaatgaataagatttttgaaaaaatgtcagcgtttttgtgtctgtcctccaccgccttcgttttgaaatttgtcattcaaagcatcgattctatcaaagtgtcgcgcaaatcggtggaaattgcgctcggcgccgcgtctcccaatttgaagatggactccaacacggacagttcggcggaagtcgtgtcgaggcctatgaatgcgatccaatcgttgacgcaacagctgccattggcgtcatcatgggccgtgtgttcgtcgtcgc

SEQ ID NO: 85417 - DNA, 402 bp, Heterodera glycines
ttttttttcaacacaaacaatattgtgacagaatatagcaagaaaaaatgattgggtgtgtctatcccaagatgacgattttccatggtaaaaaatgtaacaccaattaattcataatcagtcagtcataaaattgactgtttaaagcgtgacgatgaaaatgcatgtttacaagacgaaattagcagattcagattaaagaacaaagaagatgaaggattataattagagagagaggacagacacacaatgaacgaaagttccgacaaaaaaattaactaattaattaaaaaacagacaaaaaattaaaattaaaatacacaaaagttgaggaaaggagagggaaaaaggaaagaaatgggagacacaaagaggaaaaaaaaggaggacaaaaaggaagac

SEQ ID NO: 85418 - DNA, 320 bp, Heterodera glycines
ttttttttttttttttttttttttctttttttttttttttttttttttttaaacccaaaatggatttaacaacaaaaaaaaggggcaaaccttttttttacactaaataaaaaagattttaaacaaatattgaaaccccattttggaaacaaaaaaatggttaattggggatgatgaaaaaaaaaattttttgatttggacaaaagtgctaaaatgatcaaacatatggcttttttttggcttgtatttatgggaaggacctggaaaaatgttcaacaattctttgacaaaaaaattttgggaattgaaaatttaaagaa

SEQ ID NO: 85419 - DNA, 201 bp, Heterodera glycines
tttttttttttttttttttttttttttaaatttttttattgagccaaccaattaaaatacacatccctcaggtttttcatcaaagatacaatgcagaaaacgaatctttttattaagggcaatttgaattaagacacaggtattattatcggggagggatttgattaaaagtgggaaagtccaaacggaaagagagagcag

SEQ ID NO: 85420 - DNA, 420 bp, Heterodera glycines
ttttttttttttttttttttttttttgcataaaatattatattaataatcacatgtgaaaatgtacaaatgaggtaaaatatagtaaaaaatcgaatgattaaaaaaagacaaattgcacgaaactaaaaaatgatgtccataatatcgtaaaaaaggggtgtctcgttcatttcaacaacaaactctttgccatttcgttgtccactttttgccaaaaacgtccataacgtccgccatggtaaacagtgcgtgcgctcggttccagcgtcaattccaaatgctgctcggtgttctgtgcactgattggacgccaaaagtcgggtgaaacgagcgtggaattggcgcaatgctcattgtgccatggctgctggtggtggtgttggcattggtcattatcaccatcattttcatgcaattg

SEQ ID NO: 85421 - DNA, 322 bp, Heterodera glycines
tgctccacgcgttgggagctctccctatggtcgacctgcaggcggccgcgaattcactagtgattagaaacaaaaaaagccacttgcatttgcgttgttttattttgttgctacagtaatcacatagttcacctttgtagatgctttactgtactcttttcatttttctctctttctgtccctctctttcttttctttccgcttctggcttataaattcctttttctctattacacaaacattgaattcgattgaatatttgccgatttgaaaaaaaaaaaaaaaaaaaaaaaaagaaaaaaaaaaaaaaaaaaaaaaaaaa

SEQ ID NO: 85422 - DNA, 181 bp, Heterodera glycines
gggatccgtctctatctctctcctctttctctctctctcttccgtttctctctcctctcttctctctcactctctttcttctctctcactctctctctatctccctctgttctcattctctctctctcctctctctctctctcccctctctcttctatctctctctctctactctctttct

SEQ ID NO: 85423 - DNA, 372 bp, Heterodera glycines
ttttttttttttttttttttttttttgcacaaatttattcgattttcaaagaaaaattcaatgaaatttattatgttttcacacacattttttgggtgtttgtgccaaagagatcgaaaggaaattcaaaattttgtcgggaattggtcatcatttatttttcaccgttgcgctgtgttgttttgaacatgaaaaatataacaacaattcatccgaagcgaaacatcgttcctcccaaatcgccaagatgacgcgcatacatttttggagcagtcacctcttcaatgtttcgtccagcccgcaacaaattttgttcctcctccctttgttcggtccgcgcatttaacgcttcgccatcaattgcctcctcat

SEQ ID NO: 85424 - DNA, 407 bp, Heterodera glycines
ttcgtcatcgagtgttgtggccaagaagaagaagtcttggatgaaagcgaacagaagcagggaagcagttacaaacaagttcaaagagatgtacgcggaaagaatcaagcagaaacggagaagccggacagcgtaaaagccgacagcgccgagaagacacatggaaaagacgaaggaaaggccagtggcgacggacaacgactcgaaaatcatcgactgcaaaacgtagccgaaattgagcagcaaatggccaaccgccacggccaaaacacaggcggccacggagtaaagccatttggtctcccgctttcgcgtctcagtccattgttggtccgcctgggccatttccgagtccattttgaatttgacacggagtgaaagtgccgtgccgaatgcacgcggtgcca

SEQ ID NO: 85425 - DNA, 342 bp, Heterodera glycines
tttttttttttttttttttttttttttgataatgatttatttatcacatcgattgataattacatggggattacaattatcagactaggaaaaatagtttactcataggcttcgtcatggattaaaaattgtataaaactgaaaattgcataaataaaatcaattttcttcagtccgtcattacaaaatcgccctcaaccatctgctgatcaaaatcgtcaactccgttggaatgatcaaagcaaagtgcgcctccccttacgcaatcgcgcacttgaggctcaattggaatttcatttccgtctttggcctgcgcaaaaccaacacgactttggcccacat

SEQ ID NO: 85426 - DNA, 467 bp, Heterodera glycines
tttttttttttttttttttttttttttcgtaacaaagaggaatttatcaattcatgcaaaattattaaacggagataatcaagttaaacatggcaatttcaatcctcatcttcaaaactatcgcccgtaaaagcgaaaggtttaaatccctctttaagtgctattgtcagcttctcttcttcctttttgcctagcgaacagttcctccaatccaccttttcttcacagtccaaaagggccttgttggcaaaaacctctctcccaaattggaggggaaactgtgccattgaacggctcaacattttgctgccgtcgggaaattcggcataaaaatagggagaaccctctccgacgaggtcccaaagattgtcttcatcctttaaaaatgaaaattcaatgttcttgagacgtgccaaattgagaaacgtactgcgcaatgctttgctttttgtttttggaattggaac

SEQ ID NO: 85427 - DNA, 387 bp, Heterodera glycines
ttttttttttttttttttttttttttacatctatcctaatctcttgcaaaatcccttctgccgctgctccatcactgctccgtgttgcccttgaccaatgccaaaagtgcgtctcggtaagctccgctggtgtcccctttgatcgcctcctccaggctcttcttgtgcaacgtgtgaaaagcgtgtttgatgtcagccaggtcaatctcagaccgagaaatgaccagacgaatcaaatccgagtcgcgtgtgccgagccctttcatcgaattgaacaacaaatccgcaaaaaacacagaagcgttgcggacatatttgattagtgccaaaaaacccgcttcgttctgaccgctgaattcttgctcaatgcccttctcaatctcgtgg

SEQ ID NO: 85428 - DNA, 296 bp, Heterodera glycines
tttttttttttttttttttttttttgcaaaaatttagatgcaaatatcttacagaaaatggtcatagaaaaataggcaaaagaaacaagaaaatgcattaaaacccgcatatagacacacaatcatatgaaaacaccaccattactcctccatggatttttgcctcgtcaaattcgacgcgtttgaggcggtcgaactgcgtcgcttgtcctgttttttcggttcgcccatgtacaaattgacccgtaacactgctcccgggttccttttgtaatctatcaaaaactggcgccctt

SEQ ID NO: 85429 - DNA, 436 bp, Heterodera glycines
ggggattattcatcgttttctttcagctgtcatcgttttcccttttccatcctttcaattcaattcgatgtcaatcgatgaaattgagcggacaattcctttgccttcgtcccatctcttctctcattcgcaattcgtccgggctgagattcactctttcgaagaagcttttgtccacaacaaacgcttcaaagagttcgaaggattgctcagaacgaatcacaaaacttacgaaagtgtcgaagcgaaattcgacctgcaaaaaatcgaaaaaatgagcactttgacgaatcgactgaacaaattggcggatcatttgggggaaattggccatttgcattttgaaaagggtgagcttaatgcaatggatttggaggagaagccaatgttcgaaattgttcggcttgcggaacaaaaacagcacgaaattgaagaa

SEQ ID NO: 85430 - DNA, 405 bp, Heterodera glycines
gggatccacggcacacgatccgctgtcactttcatttgcgaacagcccgactcaaacaatttcttttgttggcagtgaccaggccggcaaatacatttacgagcacgggtctaagcttgggaaaagagttcagtcgaatatgggcgctaagaatcacggagtcatccttcctgacgcgaaccgagaacacacgttgaatcaggtcgctgccgcggcattcggtgctgcggggcaacgatgtatggcactctctacggccatttttgtgggtgatgcgcgcggatgggtttctgatttggtggaacgagcccggaaattgcgcgtcggcccgggatgggaggcggggacggacattgggccggtgatttcacaaaaagcgaaggagcgcatttgcgagttggtcga

SEQ ID NO: 85431 - DNA, 304 bp, Heterodera glycines
ttttttttttttttttttttttttttggataataacaattcttcaacaaatatgatgtggcaaaacaatgaatgcgatcgattgtctcaaatcccatcgtccgcttgttgtcatttacttgcctcctttctttttcttgggaccaacagtttcccttttgcccacagtttccgtttttgacttcggctgctccttctctgcagtttttaccgcggcaggttgtgtcttgggctgttccttatcaacggtccgtgcagcgacaggttgtggcttcggttgctctttctcggctggctttgtcact

SEQ ID NO: 85432 - DNA, 328 bp, Heterodera glycines
tttttttttttttttttttttttttttgggttaaaaagttggggaagaaatttgttttgaaaaactaataaataaaagagggtagaataaaatctgaaaactaagcatccattctttcttcctccgttagatccatccatggccctaatgatgatgaggggcgggtccactcggggacagacgcttcgattcattgaccggcattttctcaacaagttcgcgtaggggtgccctcattttttctaatcgatttgcccccatttcaaattgcacaggaggaggtgggggagccattgagcgattggtcacatgccatggcaccaatccg

SEQ ID NO: 85433 - DNA, 350 bp, Heterodera glycines
gggagcaggaacggcccgaagaccacgaatcgtattggaattcggtgcttcgccagatgctctgcgccgatttctcctcagtgctcactttgctccaatttcattcagccttcaaaaatgacgaggccctcttaaaaatggcgaaaattttgcagactgtgaatgtgtctctgttcaaatatgaccgtacaaattgcgatgaactttgggcactaagaaagaaagtttgtgatttgactgctcacaagcaaatgttccgttcgcatgacaatttgggagtgatttgttctcttctgatcggcgatcgcggcaccttcaaaaagtacttcgacctcttccgtcccaattgg

SEQ ID NO: 85434 - DNA, 398 bp, Heterodera glycines
tttttttttttttttttttttttgttatcatcatttgattggggaagagaaaaaaaacaaacaattaacaacggggaaaggtgtgtgtgttccaagcgattgtatcggcagaggaaaagtcaaatttaaaaatggtatgaaaaaaagaataaatcattttaaaagatgatgggtggtttaattgaggtgaaatgaaaggaatgtgtaatacataataattgaggtgattgattggatttggattgggtaataaataataataataatgacacatataataaatatttaaggcatttgtcgcagcagttgtggcgccaaacaaagaatcggaatcagaaagcagagtcgggtggtcgacctttcacggcatgttgtccccccattttcagtccaattgc

SEQ ID NO: 85435 - DNA, 221 bp, Heterodera glycines
ttttttttttttttttttttttttttttttttttttttttttttttttttatttttttttttttttttggaaaaaaaagaattttttttagccaaaaccctttttaaaaaaagggaaaggttggaaattttttttggggggtccccgtttttttaaaaaaggggacttggggggttttttgttccccctttaaaccccccccaaattgggcaaaaattggg

SEQ ID NO: 85436 - DNA, 472 bp, Heterodera glycines
  unsure (1)..(472): unsure at all n locations
ggggaatctcctcgagagtctcgaacctccgcctcgaccaaaaatcagttggtccaattacctcagggcttccgacgaacaaagccatttggggagaccgattcagaccaaagtcaccactaaggacgtgagtggaatgcttgccatgagcaccgattttccgatcagcctcaatttggcacttgacattctcagcgtcatggagccggtgaatccgacggtggccaaattacgcgaattttgcaccgctaaactgcctgaggggttcccggtacgcgtggaaatgccaatttttgcgacgattcaggctcgggtcatttttcaacaatttcgctggtgcggtgaaggcgcctctccagcatttccggatgcaatgttcagaacaccggacgattatcgcgaggacccgaagagattcanacggatgtagacagantaataaatactcattagtcttactaagtcattatcg

SEQ ID NO: 85437 - DNA, 121 bp, Heterodera glycines
tttttttttttttttttttttttttttgggtcaggggtatttatggaatcttcaagaacaacaacctttttctatcgatgaataaaacataaataataatttaatcaaatttctccgcgag

SEQ ID NO: 85438 - DNA, 421 bp, Heterodera glycines
gggaacaagcgcagcacttcccgtggtctccgcatcagcctttctctatgcctttcgggggtttgcctccgccccctccgtttctgcctttcccacaacctccgctgtttgccggtctcagtgatgctgaaattgccgcaatggaagggacggaaagacgggcggtcgaggcgcgcattcagtccctgcggaacatttcgacccttttggacgctgcactgctgcagttccagcaatatttgagcgtctctcccgggatagctcctcaacaaacgcaaagggacgaaaactttgcgcaaaacccttcgacatcggccgacagcgcaacggatgcggaaacaaacggcagggaaagtcagcggaatgagacggagacgtacgcaaagaagcggaagagagatagagagagagactcacacca

SEQ ID NO: 85439 - DNA, 475 bp, Heterodera glycines
gggggatccgccaccttacgaagcactggctgccgctttagaacatttgtacgctctcggtgctttaaaccacaaagggatgttgactaaacttggacgacggatggccgaatttccttgtgatccggcaatgtccaaaatgataatttcctcagaaaaatacgaatgttctgaagagattatcactatttccgcgatgctttccgtaaatgcggcggtgttttaccgcccgaaagcgatggtaatccatgcggacacagcgcggaaaggattttggtcgtccagcggcgaccatctgactcttctgaatgtgtacaacaaatggagagaaaccaacttttcgatgcagtggtgtatcgaaaattttgtccaacatcgtacaatgaaacgggcaagggatattcgggatcagttggaaggactgctcgaacgagtggagattgagccgaaatcttcttccgacacaatggccatt

SEQ ID NO: 85440 - DNA, 308 bp, Heterodera glycines
ttttttttttttttttttttttttttttcgaatgtgaaatttttttaaatttcggggtgcaaaacaagaaaaaaacaacaaataacaaaaagtgaggatccaccattaacgcattttgacgtcctccgcccccctttactcctcctccattttttccttcttgaccttttttttggcggctcggtactcggccaccaccaccgcgtggtcacgttcgtacggctcgagtgttacctgctcaatgggtttgaactgctcctcgcgcaatttgttcacttcgccggcaaacaccgcctccggttccgccg

SEQ ID NO: 85441 - DNA, 369 bp, Heterodera glycines
ttttttttttttttttttttttttttttgaatccgataatttgctcgatgtaagccgaaatcgaaattcttatggtcaagctgccactcaatccctgaaattcctggtcaatgtcggccaaatcgatgggtgcgcgagtgagcaaaattcgcgtcacgtttttcaacgcgtccgctgaggcccacttttcgtttcctcgcaatttgtcaagcttttctttcaataattgggcaaaaaaatatgggcgaccatattgaatatccgttaagattgcgttcaatgtttgccaaaaatgttgctcgacatgaaggtccagtttaagtagattctttattcggttttttgataaatgtttgaattctttgatgt

SEQ ID NO: 85442 - DNA, 292 bp, Heterodera glycines
tttttttttttttttttttttttttttttggggtgataaaatttatacttacgctttcaaaaaaaacaaccgaaaatattagcatgatcaattcaaattataacgtctcactaaagggcttatacagtaatcaatttatccggctcggttcatttcgtccgttgccaagttcaatgccatgtccaagtcattgatcagggccgtcttggcctcgcacccgaccgacagtctgatcaaggtgtcgctgatgccgatcaaattgcgcatttgctctggcaccgacgcgtgcgtc

SEQ ID NO: 85443 - DNA, 471 bp, Heterodera glycines
ggggggggtgtcgtcgatggaatgcgctcggccagtgtcatccatccgccagctgccggcgtgatcggtgcgccctcttcgacggtttcgaccgggaacaatgtcagcagcaacaatcccccgtcttcgcaaccgatcggtgctggccgcaatttgcagaatatgtcaccttcacagcagcgcaacggatggccatcttttggatagacatatttcctctttttctctcttccaaatctccctgctgaaatcgtcattattattgttcttgtctttatttaaatatacatacatattcagtcacatttgtactgctgattgcacaaccaaccgtatatgctaatgacaaacaatcgcaaattttcgttggattttgtttacagatttggatttgttgctttccccctcccccctcccttcggattgttcgttggcccatgagaacaatgattattattatgatgatgatga

SEQ ID NO: 85444 - DNA, 437 bp, Heterodera glycines
gggctgtctgttctgctttatggcctcactgattgttttcgcgctggtccttggtttggccatcactttgacagttatcacagtgaacaattggaaggaaatcggcgtgcttcttagcaaacaatcggcgttgaagagccgctcggacattgaagcgttttatgaaattgattgcccaatttacagtgacaactccaaacttccggacaaatgggaccaatttgatttggcattctgcaatcgctattgtgatcgcaaccaaatgttcgagttcatgtaccgtcaactcgaccccaaccggaaatcttcagccaagagcaaagacaatcaagagcttatgtgtcccatatacattgaattcaaacaatgtcagatggaggaagggggtcactgtgaggagaagttattcagcgaggaattcaccgaattcgttcaac

SEQ ID NO: 85445 - DNA, 490 bp, Heterodera glycines
  unsure (1)..(490): unsure at all n locations
gggcatcgttcgccgtttttcgcttttcccgccaacggcggaatgaaacagaggagacggcatacgacaaatctattcggagacggggcatttggagcgcattttgcgggaaaagacgagaacaattgcgaattctccacggtgattcggttcagcacgagctcaaaggacccgggaaaaaagatcaaaaagacaatcacacaaactagacttgtaaatgggaagaaaattgtgacaaaaaaggtggaggacaacggacaagtggaggaagaagtgatggagaacggagttttaaaagcgaaattgatcaatggaacgccagtggacattcgagcggaatgctgaaaatgccaaaagcgaaaggcaaagggaggggaaagggggagaagaggagagagagagcccctccggcgatggtgaccgaatgaatgaatgactntttgttttccatttcgcattttcaccacttttatcgttctttcatacaaat

SEQ ID NO: 85446 - DNA, 528 bp, Heterodera glycines
ggcttttaactcatcattcccatgcctctaaaaaacaatggcccagctaaaaaattggtcccaaagcgattagcactcgaacttttgtatgaaatcactcttttcatcagtccccgcaatgacttgtccagcttctgttcctcctctgctgtatttagagaatttatgtgtccacgtgtgattaagtggaatttattttggcactcagcgattgaaaaactcaagacgagctacaaagaggcgaaaaaaagtcccatttgggattccattatcagtaatgcttctggtgtggcgaagctcggtgacaactcggtcttccgttttctttcagacgccgtgaacttgtgtgaaggtgagccggtccgtttttccagtactcgccctgtcactggatcgctttgcatttcttctccgccgccaaaaaagcagaaggaatgaatggccaattgacaagtgtattaagggagaatcttttgttgttgtgtaagacatttttttgttttcgcgaaaaaacgtggccaaaaaaaa

SEQ ID NO: 85447 - DNA, 497 bp, Heterodera glycines
ggggttcaatggtcggctgtgcgatggagaagagggcgtctggttttctgatgaagaaggagttggagtattttgccaaggcactcgagtcgcccacccgtccattcctggccattctcggcggtgccaaagtggcggacaaaattcagctgatcaacaatttgttggacaaggtggacgagatggtcatctgcggtggcatggcattcactttctacaaagtgctcaccggcaaatccattggcaaatcgctgtttgacgaggagggttccaaaattatcaacgatttgatggcaaaagcgaaggacaaaaatgtgaaaattcaccaaccggttgattttgtggttggcgatgagttcaaagagggcactccattcgccaatgttgacgcaaaggatggaattccgaacggaaaaatgggcttggacattggtcaggaaactctcaaacaatttgccgaagtgattggacgtgcaaaaactgtcgtatggaatggg

SEQ ID NO: 85448 - DNA, 235 bp, Heterodera glycines
gggatcaaaaatcttttttcggaaagagagcccattacattattcccgaccatttttattgagttttatagccattggattgttgtgctaaatatcaaaaattgctaattatatcattgtttttatttttttaaaattattttgtgcttaataaatgctcctccgttcaaaaaaaaaaaaaaaaaaaaaaaaaaaaaaaaaaaaaaaaaaaaaaaaaaaaaaaaaaaaaaaaagg

SEQ ID NO: 85449 - DNA, 384 bp, Heterodera glycines
ggggaggccattttccgtcggaaaagtgacggacaactgattgtgaaggcgagccaacagttggccatcctccattatttgccattgaaaacgaagggaaagggcggtgacggaaatgacgccaaaaaggggccgactgattgtgaacaacagcagcagcagaacggactgacagaagcggacagaacaaacggaggacagcaaaggagcgacgcggacggagggacgacggacgaagcagcaaatttggaccgagcggaaaaattgctgacccggaggggaaatgctaagaacttcaacagaatgggcgagaatttgcgtgtgacccgggcggagccactcgttttggaagcggagatcgaacttggctctaaacaccttaac

SEQ ID NO: 85450 - DNA, 154 bp, Heterodera glycines
gggtgatgaccaacaaggagccgttctcgatccggcagtggatcaaccacaaagaacgacgccccggcttcctcttcctgtctgctcccgaatcccacatcgcgaccctgcgcccgcttctaggcttctgggcggacatcgccgtctccgcgct

SEQ ID NO: 85451 - DNA, 329 bp, Heterodera glycines
ttttttttttttttttttttttttttgcttccttgctttctgacttcttttcctccttctctgcggggcgcttctccttcttaccaacaggcttttgctcctcattctcctttttctctggttccttgctttctgacttcttttcctccttctctgcggggcgcttctccttcttaccaacaggcttttgctcctcattctcctttttctctgcttccttgctttctgacttcttttcctccttctctgcggggcgcttctccttcttaccagcaggcttttgctcctcattctcctttttctctggttccttgctttctgacttcttt

SEQ ID NO: 85452 - DNA, 442 bp, Heterodera glycines
  unsure (1)..(442): unsure at all n locations
gggcattctttccgaacaatggttgggtagcaaacggatgtttttcggcttggacatgtcccacgcgccgccacagactttattcgaacgacgtacgggaaaagcgccggccattccgacgattgttggcatggcctacacgatctccgagcacttgctgcagatgaatggcacctattggatgcagcagccgcgtgttgccaccgtacaaatggcttctccgatggtcaacgcggtcaaggaggcactgatgactttcaatgccaaaaacgggttcttccctgaacacatcttcgtgttcagagctggtgcttcggaaggcgaatacaaaaaggtggcatattgggagggcggggcattcgccactgctttcgctgaactgacgaaggaacgcanaatgtcgaagaagcctgcgttgacactgattgtgtgtcaacgtaat

SEQ ID NO: 85453 - DNA, 441 bp, Heterodera glycines
  unsure (1)..(441): unsure at all n locations
gggggatggcgccgattgtttgaactttgcatggatcatgtcaacggattgggctgttcctatcaaaatgtccgcttgcgtatcggaagctgtcttgccaccatttcatcgtccgatttcaagaaagcacttgtcgaggcgaatggaggagaagcgaacgccgacgacgacagccaattgaaacatgtcaccgttgaggaagtgatctcgcgcataaatgccatgcttactccactgtggagtgaagcactccgttcgtccgttggtgtgtccgccgatgttcctcacaccgaatcggcactttccttggatggcattgtcgtcactcccgccgatgaacacaaacgagaaaagctggcgctaattacactgcttaactacttcagcagtttgagcacgcattgngcacagttactgcgcccatttgcaacgtccatcttc

SEQ ID NO: 85454 - DNA, 346 bp, Heterodera glycines
ttttttttttttttttttttttttttcgttgaccatataattctttaaattcatcaaatcgttcaatgaatttgcgctttttctcatcatataattggtttttcattttctttttatttaattttaattcatttttccatttgggtattaattgccgatttgcgcctaataattttgcaatttttctttcaattttgtcataatctttccttttgtattttattttttcacgtaatttttctttaattgcatcaaatttttgaacaatttctctcttttgctgatcatttgggtcttctataatattctgatcacttttcgaatggttctgatcgggataatttct

SEQ ID NO: 85455 - DNA, 451 bp, Heterodera glycines
gggattcattcactcattttgaaacaaagccacccatttaccaattacacctttcaccttctactcccaccaagtccaaaaaccaaaaacaagtcatggaacgcactttcgtctgcattaaacccgaatccgtccgaaggtgcctcgtaggaaagatcattgaacgctttgaagccaacggctttcggctaattgccataaaaatgatcgttgcaactcgcaaacaagcgatggaccattacgtcgcttgtgccggccaaccctttttccccaaagtgatcagttatatgacctcgggtccggtggtggcaatgatctgggaaggtgtcggtgttgtgagaggaatccgcaaaattttgggtgccacccccgacaaagttcctccgcccggcaccctccgtgccgattaccgtaacaacagcgacgtgggcaaataccatgacacggtttg

SEQ ID NO: 85456 - DNA, 273 bp, Heterodera glycines
tttttttttttttttttttttttttttttgaaattaaactttaaaacaaaaatagaatgttgaaatgcagcgaacaaaaggaaaacatttttcatcgaattgggtcggctacttgttgttcttctcccctgtaatattccacaagtgtcggatgcgttggctcgaacaccttttcgtcctccaaactgaccaattggccaggctcgagtccaagaaacacttggtccgggcttttttgttcattttcgaaaggggggggaccggggaccaatg

SEQ ID NO: 85457 - DNA, 479 bp, Heterodera glycines
ggggattgagattaaatttcctctgcctttcgacaactttttcttcctaacaatggtccaaatgtggtgcatggagacctacccgtgtggtgatccgcgtcttccgcaccactgtttcccaccaaaattggtgaatccggacgaattgaccaaacggacgggcgccctctattataagttggatttggaagaccaagtggcattatcaaaacgaattgcaattatgaaattggagcgcaacttcaccaaggaggacacgtacacattggacgcacagacaacgaacgattttaaggaaaagatcgcagaacttttcgaagagacggaaagtgacgaggatcaagcacggatggttttggaagggtcggcatattacgacgtcgaagccaaagacggagtttggatacgcatcttttgtgagtatggcgacttactcatcatccctaagggcatcgcacatcgaatgaccacaacgccga

SEQ ID NO: 85458 - DNA, 430 bp, Heterodera glycines
ggggacaaataaatttaattttttaattttttcaaatctattacaaaattcaaaaattaaaaccatgaattggatgcattattgtttaatcgcttgctttgctttttattatttcaatactgttgagtcatccactattaattcggtaaccgtacaagtgaacaagattgaaaacaatgaaaatggaagacaattcaatttggaatttacaaaccaagtttatgagcgagtgtgccacgttgactttcgaattgatctgccagacacagtaaaattgaacaaatattcaaaaatggtgccaattcctgacacctgcggccagtacgcattgcccaagagtttggacttgcttcccggcgagtcatttgatgcacaattaacactgcttggccatgatgggaagccgaatgtgactgtgctgaacacgaac

SEQ ID NO: 85459 - DNA, 232 bp, Heterodera glycines
tttttttttttttttttttttttttttttgagaccaaatttgtcatttctgtctccataataatccgtctttgttccgtgcgcactggcggggtattaatcgacccctccagcgcgttcaaaaattgccgttgtcgcaaatgcctctgatagtattggtcgtcgtccataaacggttgagcgaatgtcggatgattgggaggaacgtggcgaggagtggtcggctgggagga

SEQ ID NO: 85460 - DNA, 194 bp, Heterodera glycines
tttttttttttttttttttttttttttgcgaacactgtttttttacacatcccacaaatgttgttcaaaatgataaaattgatagggttggaaatggaccaccaatacaaaatcaattatgtctgaaaatggaatttttttttgcatcgatcccttccgacgaatttgttcaatcacagcgtcgttcaattggt

SEQ ID NO: 85461 - DNA, 311 bp, Heterodera glycines
ttttttttttttttttttttttttgcaaattggggatttatttggttcataagatgttttccaagaatagatttataagcgttatgtgacattaacaaataacgggtcctgctggagagaacacataataatataatagtttttctgatgaaatcaaaaggaatagcacaaggagaaggacaattaatcggaccatcacataaatttctgtccgttccctccttttcactgatatttttacttctcaaacactgccgggcggaggctgctggttgttgttgttctgattgcctccagctccggcgccacca

SEQ ID NO: 85462 - DNA, 509 bp, Heterodera glycines
ggggaaacacttcaccattactcgtcgtccatttcgtccgatttacacatttcctttccctccgttctgtcgtccaactgctgccactttcaattgcccttcacggcaattgttgatgacattcctcctcctcctgctgttgctgctgatggtggtgatgtcgtcgttgatttggagcaacatgttcgccaactcatcatgtccatcggccagggaagcgaggacgcagtgcacgagctttccattctgatcgagccattcaaccaggagcagctcgtcgactttctggagattatggcaagaatgtacgtcgagagcggagtcagcgttgacttgccgggtggccaaggaatcaacatgttgatggtcgctgcgtcctctggaagggtggactttgcgcgctacttgctcgcccacggtgcaaccgttggacacttggacgccaccggaagcgtcttcccactaatgctagctgccgaatctggtgagttggaggtgtgccgtctgct

SEQ ID NO: 85463 - DNA, 458 bp, Heterodera glycines
gggatataaatacccattagcttcaccaacgcttaattgattctcaggatatattaattcatctgttttttaaaaatcccaccgattggcactttcattccttggactttctctgcacttagaattatttaaatggataaattggttttaaaaatccgtgagctcctcgatgagaacgaagtaaattttggggaagtgcagcgaattttggaagagtataaaagtgagccgaaggattggagacaattcacacattttgacgaacacaagtgaacggatgaagtgaagcaagtggaaagcaaagtgttgttcagatacacgcgaaatttggtggacgcggggaatggaaaatacaatttgatgattttgtgctggggacccggcatggggtcgagcatccacgaccacagtgctgcgcaatgcttcgtcaaagttttggatgggcaacttttggagac

SEQ ID NO: 85464 - DNA, 437 bp, Heterodera glycines
tttttttttttttttttttttttttcggcttcaaatgacattttattacataaaaggcacaaacaattcaaaagaaaggcacaatattactcaaaaaagtgaagagaggacacaactttaaacaaacaaaaggaattcaatgatcggaaaaaatgtttgggaacaaaatgttggcatattaaagaggagagatatttgggatcattcattttctatccgtccgtttcttcttccaccgttcactgactgtcgtcgttctgctgcttcttctgctgcatcttcgacaaaagttccgtgtgaatgttgggcaacacaccgccacgagaaatggtgacctccgcgagaagcttgttcaactcctcgtcgttgcgcacagccaattgcaaatggcgcggagtgattcgcaactttttgttctccctcgccgcgttgccggc

SEQ ID NO: 85465 - DNA, 324 bp, Heterodera glycines
ttttttttttttttttttttttttttgattttttttaggggtttagatttatctaaaaagattcaaaacaacaaatagtttaaaaagttgtggaaaaaatttgttttgaaaaactaataaataaaagaggattgaataaaatctgaaaactaagcatccattctttcttcctccgttagatccatccatggccctaatgatgatgagggtcgggtccactcggtgacagacgcttcgattcattgaccggcattttctcagcaagttcgcgtaggtgtgccctcattttttctaatcgatttgcccccatttcaaattgtacag

SEQ ID NO: 85466 - DNA, 371 bp, Heterodera glycines
gggcagggtgagatcactggcctttcgcccggaaaacacggtttccacgtccacgctttcggtgacctgtccagcgggtgtatgtctgctgggccccacttcaatccgacgaacaaaacccatggtggaccggaggatgagacgcgccatgtgggcgatctcggcaacgtgttggccgggcaggacggagtggcaaaactcgatttcacggacaaagtgatttcactggtcggtccgcacaacatcatcggccgcgcgcttgtcgtgcacaagctcgaggacgacttgggccgtggtgaaggactcaagaagccggagagcatggagactggcaatgcgggtccccgtttggcgtgcggagtgatcggaat

SEQ ID NO: 85467 - DNA, 401 bp, Heterodera glycines
tttttttttttttttttttttttttttttttttcaaatcgaaagatttatcaacaacaataaacgatcaggaaaggctaaatgttagccaattgaagtcaaacttttctccacttgatcgagcacttcctttcggtaatcgtcaaaatcgccatcaatttggtagattttctgatcctccacaacccacaaacgacagtttgtggctttgataagccgttcgtcgtgagttaccatcacaacaccgccactgaagtcttcaatgccttcaaccaaagcttggatggattcgatgtccaagttgttggttggttcgtccagtatcaaaatgtccggctgctttagggacagctcggccaatgccacccgcgatttttgaccgccggacaaatttttgatgtg

SEQ ID NO: 85468 - DNA, 144 bp, Heterodera glycines
ttttttttttttttttttttttttttttgcattttggcgcttttattttgtttaaatttgcgaaactttgacaaattgaaatggcagttgtggtttacaaataaaattttctattcccatcctccagtcaggggatggaaccct

SEQ ID NO: 85469 - DNA, 284 bp, Heterodera glycines
ttttttttttttttttttttttttttgcacactttttttgttttcgagaattaaaacagctagcattaattactgtgcatttccattgactcggttggtacgcctcccaacccaaaagttttctgacgacagggtcatgcaaatgacccaacggttctttaaaatcttccaattgggggtcaggaatatatttggagcgttggtagcgcggggaatgtttcttaacaacaattttcattccaacgggtgcgtgcgcttgcaaaagggcaatgaaaagggggagt

SEQ ID NO: 85470 - DNA, 546 bp, Heterodera glycines
gggggccattaatttcattcattaattatcagcaattcatcttcgtcaattatctcttctttgtgtacaacaataacgacgacaattgagcaatgtcggaccatccaaatgttgcgctggccgaccttagccgcgtggcaaacgacgtttggctggacactctgttctggattgatcgcgctgaagtgggcatgaagtttgcactgatcgacgcacgtttcggccggctggtggccacgcatttcaacctgcgcaagtggtggctgggcgagctgggcgttcatcgcgcaccgaggcgatggcagtgcggcggtacggcagcggtcagcgcaatggacgactacgcgatgtccaatcgactgccgctcgccacgtgtcctgcaccgaacggcgtgatcggcttccgtgccatctacatttggtacgtcgacctggaagtgatcgcatttctgcagtgcctgcaacgtgtcatcaaccgcggcatcgctgtgcagttcaccatccactcgacggacgtgcgctgctgggcgctgatggcgcaacgca

SEQ ID NO: 85471 - DNA, 603 bp, Heterodera glycines
gaacggccattgcttctgctgctattgcgacgaaacgggccaaaccaagttcaaagtgccggtgcgacggttccgttcaatgctaatcagctaattgctcactaattaccccaaataacaaaactgtgcctgcttctcccaacaatggcccccaaatgccttccgctcgaacttttgttcgaaattgtgcctttcatccctgccgaaaaagccgtcccgaatgcgctctcttcctgtcggctgctgcacaaacttttgctgccacgtgtcatcaaatggaaagagcaactgctaaccgatttgatgagtctctcggcgaaagtggacaatctctcggcgaaagtggacaatctatcgggcgtcgtcaacaatctctcggcgaaagtggacaatctggagaagaaagtggacaatcactcggtgaaactggacaatctggagaagaaagtggacaatcactcggtgaaactggacaatctggagaagaaagtggacaatcactcggtgaaactggacaatctggagaagaaagtggacaatcactcggtgaaactggacaatctggagaagaaagtggacaatcactcggtgaaactggagacg

SEQ ID NO: 85472 - DNA, 354 bp, Heterodera glycines
ctgttgttccgatgttggtggtactgtgcagcggcggcagttgcggccaccggctgagacaaagacggcggcggggcggtatcaaccgttcttcggaacatcgacaatggaggaaagaggagcaacggcggaaatcgccataacttcatccttcttattcggtgtagacgtcggagagggcaatgagtcaacaacggttggagcagcatcagatggcgcatccggctttttctccggttccttttgaggtgagcgatccacgacaacggacgcctttttaggttccggactcaacaacgatttgatggagtttgccacttccaccattaaccattggaggaggagcaacctggc

SEQ ID NO: 85473 - DNA, 171 bp, Heterodera glycines
ttttttttttttttttttttttttttttatttataggcgatttatttaacccaaaattataccaaaaacgtgaaacaaatttaaaatcgccaatgggtgaaatcgcatcagttcgtcacaacttcttcggaaattgtagatccctcccatttttcaacgggaacgcgagcg

SEQ ID NO: 85474 - DNA, 429 bp, Heterodera glycines
gggcggttcgaagactgtgtcagcgatcggacagttctcaaatactgcactgatggaatgcttttgcgcgaggctatgaacaacccacttctggagcagtacaacgtggtcctcttggatgaagctcacgaacgcactttagccaccgacattttgatggggctgatcaaggaaataatccgacagcgtcaggatctcaaaattgtcgtgatgagtgccactttagatgcggggaaatttcagaattacttcgacagctgtccgttactttcggtccctggccgtacttttccagttgaaatattctatacacccgagccggaaagagactatttggaggccgcagttcgaacagtcattcaaattcatgtctgcgaagaagtggagggcgacattctgcttttcctcaccggacaggaggaaatcgaa

SEQ ID NO: 85475 - DNA, 412 bp, Heterodera glycines
gggagcaggtggtaacaacgcagagtacgcgggactctttcatccgaaaactttttcgaggacgaagaacggccggaggagaacatttacgagaggcattttgcccagcagcaaatgaccaaggaggagacgaggctggtcgagttgcaaaagcgcaaagagaaagcgatggaaaaggcggacgcaacgcaacaaattgcgcaggacataaatgacttgaatcagatcatgcaggacttggcccaacttgttcatgaacaacatgacatggtcgacagtattgaggatcacgtggagcgttcaatgcaagaggtcaaatcgggcgagcgcaatttgcgtcgtgcggtcgcttcaaacagtgccaagtacccagtggccgccgctgcagttggcggtgcggtgatgggcggac

SEQ ID NO: 85476 - DNA, 424 bp, Heterodera glycines
tttttttttttttttttttttttttttctaacacattttaatggctcaaacacaatatatacatcaaaatcaatatgaaacagaattcaataaagacaatttgtcgtcatcttgatcaattgaccatatcattatcccaccaatgcccttttccgcaacatattttgccttgtccttcagtgattgggggttgtcaaaggttaaaaaatttttggtagctgtatcataaatgtatgcagttttggccgttttatgatacgttgtcttggtcatgtcaaaacttttgcccatgttacgccaggctaattcggtgccataagtgcccaactgacgccaaagtccgtcaccgtttagtggtgctccaacattggtccaagattttccgtagaatggcacacccatgttcaactttgctcgattatac

SEQ ID NO: 85477 - DNA, 207 bp, Heterodera glycines
tttttttttttttttttttttttttttgcgggcacacaagtttattaacaataaatatgattttgtgctcaataaaatgtaacagaacatgcaaaagagtaataagcagtcaaacgttgattggtttgaaaacgtggaagccgtccaacgcagtggaaaatgccaacccaggggactgtttgtgccaatgaacttccttcacttctt

SEQ ID NO: 85478 - DNA, 453 bp, Heterodera glycines
gggcacggacatcaacatcagtcagtctcttaccactcgcttccatgaggaaatggtgaagcaagaagtcaggatggatgtgcctatccatgtcatggtgctccaagccggggcatggcctctctccgtgccaacggctcccgctgagccttcgtcatcgtcacaacaacatgagacttcggctgactatgtgccgcctccggtgctgcaaaattcactcaaactgttcgaacagttctacacgaccagtcacagcggaaggaagctgacttggttatacggaaattcgaccgccgaagtgcacctcaattaccttgacaaattataccaagtcacaatgagcgtttatcagctgtccattctgttgctcttctcccaccaaaacacccaacaacttgcacaaattgccttcctttgcagcttatccgtcccagcggtgatcagagcctcgag

SEQ ID NO: 85479 - DNA, 491 bp, Heterodera glycines
ggggtggcagcagccaatgcaatggccgacacttctggtcaactgaatgaacgtttcgctgacttggaatgtttggcggatgcccatcagtcgttgtcccgtgaatccgctcaaggcaataaaaatgcgcaccaaattctacacaaagtgctcacacaattggaggagttgcttaatgatatgaaaagcgatgtttctcgtcttcctaccacattggcccgacttcgtccggtgactgaacgacttggaatgacagaaagagcaattcttggacgtctgacaagcaaagacccggacgcagtggctgggcaaagtccattacctccgcccggaccctttgtaactccaatggcacaaagtcgcttctcgggcatacagccgaaattcgccgcacttttgaagccgaaacaccaatcaaagaaagaaaatctaccagagaaagatggaaacgacaaacaaaatcaggaggaaaagcgaccgagcaaagagga

SEQ ID NO: 85480 - DNA, 503 bp, Heterodera glycines
gggcgactctcttgaaatggactaacggcacttttcccgaaatgaattactctcgtgttgtttgtggccaggatccccggtactgtgctcgcccgcgttcagtacatccttatgtgtggggactgaacatttcgaattggccgatttgcgaaaagcattctccatcaatacccaaatccgaaaagcatatgcactgtacggtcacaggacggccttgctgcattcaaatgcacggacaatgtcggataacgtccagggagtactgcgactttgtccgtgggcatttccacccgaatgcgaccctttgttctcagatttcctgtctgaatgaggtttgcggaatgactccatttctgaggcgtgacattcccgaccaactctaccgtcttttcactccactctttattcatgctgggataatccgatgcgttatttcgctcacactttacctgaccataatgtgccgattcgaaattatgattggttggcttcgtctctcctct

SEQ ID NO: 85481 - DNA, 370 bp, Heterodera glycines
ggggatccaaatcaacgcggcacagtaataaaatattaaaagatccgaaaaaatgccaaacattttcaaaatccttctgattgtgcttttggccgtcgtctcattccgtctctcggcttctactggtgacaaaaaaactgctaatgatgggagtggaaacaactcatcagctgggattggtacgaagatcaaaagaattgtcaccgctggactgctcttcacttccctggcgacgggtggggcggaagcgattgggcgaagcaatgctcagggaggaaatgccgccggattggtgccatcgcatgtgaccaatcgctcaatggctccaccacctcctcctgtgcaatttgaaatgggggcaaatcgatta

SEQ ID NO: 85482 - DNA, 213 bp, Heterodera glycines
ttttttttttttttttttttttttttctttaaataatttattcattaatcggaaaattttcaaatctgtacatggactaaataggagtgggagattttaaacataataaggaacgggcgaatggaaccgtcacaaagcgattttcaaaaagacctaatgatgaccaacaattaacacaataaagaatgggtaataaattaggaatatttgggc

SEQ ID NO: 85483 - DNA, 119 bp, Heterodera glycines
aaaggaagaagataaatcgagggtgcaatggcaaatttcacaccggcaaaatttattagtcacatggcccgaaggattcttaagcaaaaattaaacttttttttggcgaattgaatgac

SEQ ID NO: 85484 - DNA, 299 bp, Heterodera glycines
cgttgggagctctccccatggtcgacctgcaggcggccgcgaattcctagtgatttcggaggatttttggcatttgcgttttacagtttgttttgtccctctttcatgacgtcctctgctgatcactgttccccgttcacgttgaacaaccgaatggcctcagcgtcgaattgcagacaaagtccgtcgttgatcagacgccaaatgtacggcacaaaaaagtccaccgtatcttcgtcttcgatgtatttgaagcgcaagtcgggaaatttctttagccgatcgcttggccattcgat

SEQ ID NO: 85485 - DNA, 393 bp, Heterodera glycines
ggggacacgtagttgtccaataagatttgttacaaacgcttggaacttgcagtgagaacaacaattgcaacaatttttggccttgagccaacacaccatcagttattctgttcaacacttagtacgaccaaagaagacccctttcaattgcatgtgaacatggccgagaaaaggaagcttctgaacgaaattgataaatgttataaaaagatcgacgaaggctttgaaattttagatgacatcatggagaaaatgaacgaagcaaacagcgacaatcaacgagagaaattccaggacgacctgaaaaaggagataaagaagctccaaaggttaagggatcagatcaaaggatggcaaaactcttcggagatcaaggacaaggactctctgtca

SEQ ID NO: 85486 - DNA, 243 bp, Heterodera glycines
ttttttttttttttttttttttttttttggaaatgaaaatttatgaatgctttaaagtgcagaaaatagtgcgaacaaagtacataaatcaaatcctgttgaaatggataagtaccatcaaacgcgtgtgtttaatggagttttcaggcatgacaaataatttgctgggacgtatccttgctgctgatcaatacaatgtctgggttgggtttttttcctaaccaaccaccattcattgtttcc

SEQ ID NO: 85487 - DNA, 437 bp, Heterodera glycines
ttttttttttttttttttttttttttcgtagtaaattttattcatttaaataaaattgtaacaaaaaaatcacggtcataaaaagcactggtttttcaattaataaaaaataaataaataaaattttaatttaaatttaacggattttctgtgataaagccgcttgcttcattatttgtttcttctgctgctgttggccgatcagcagtgaccaaattcccattcacatcgaactgttgcggtggcagcgattgctttacggacaaacggcgagcttcggcttgttgaatttgtctgatcaaatcgtaaacggattcttttgtcctgaactgttcataaatgttgccgactcgtgcacgttcttcaccgtgcctttgttcaatttgtgttggcacttttctatttcgaattaaatcaaaattaatttgcgggaaaac

SEQ ID NO: 85488 - DNA, 499 bp, Heterodera glycines
ggggtgtccaggccattcattattcattttctttaacgaagtaccacaacaacttctgcatcccagaacattcgttcattcattcatcattcataatggccagaccaagaggcggtggaagaaacccagcaaaagcacgcggtgccagggcaaagcgtcgcatcggcaacaaaagaaaagcggccgcagggactgctgcaaacgttcaagctgccgacaggcgccccatttgtccgatctgcttgaagaagatgaccggagtccgtcaggtgcgcaccatctgtgaccacgtgttccactacgtctgcttccaccgttggctcaaatatcgcctgttttgtcccgtctgtgagcgcaactttcgcacggaattgtatcatgcgggaaacgccgtggttgagggagcgtacgccgacggacacgttgtgctccgaactgatggtgaacagagcaacagtggctaattgatcattgatcggcactcacctccaattgtgat

SEQ ID NO: 85489 - DNA, 220 bp, Heterodera glycines
gtgcccgcggtggtcagtgccggcgacgacagcgcaaatggtccgccgctctctctgtccggcgtcacttcgaaaggctcgccgcatgttcaaagcgaatgatggcgaaaagggcaaaaacagcgacaaaaaggaaagtgccagcgacggcgtcggcaaagaggacgacggaggacgagagggcgacatcgacggacatggcggggagaaggaagggacg

SEQ ID NO: 85490 - DNA, 326 bp, Heterodera glycines
tttttttttttttttttttttttttttgaaaattgaaacatttattggatattagccaatttctcaattaattgctttcatttgccttatacactgaaaagtcacaaaaaggcagagaataacaaaagggcatccaatcataaaaggggcagtgcaaagcccattttccttctctaatccgtccccttcgactacaatcgcgaaatgatttcttgcaactccgattcctctaaccacacaattttgcccaacgttttgccttccttgtccgtctgcgggttaatcataacaatttccacatttttggaattgattttctcttccat

SEQ ID NO: 85491 - DNA, 477 bp, Heterodera glycines
gggaagcaatttgcggaaaaaatttgccgaaacggaagacgaattcaccagagagattgaacgagtgactgcagaaagagacgaactgagaaatgagaaggaaactttgagcaatttgcaaacgcagcggaaaaaatcggacgaaaggcaaagccaaacggacgatgaaccgaagcaaagaatgacggagcagcaaattgcggaaatggtcgagcagaatgtgcagctgaagacggaactgaacgagcgagaggaggagctgtacaggctgcgcaacgacaaagtgttggccgaaattacgacgtcggagggacatagcaaaaggcctcccagtgacacggactcagcgacttcaaacaacgattgggaacggatgggcaaagaggaaatcgaagccgaaggggtgagcagcagtgccggcagcgaagagaaggaaacgcccatggcaaatagacacaaaaaatcttcggaactgag

SEQ ID NO: 85492 - DNA, 374 bp, Heterodera glycines
gggtggaccggcattttgctctctgttttgatgaatttcatgttcatgtatacctcaactgtgctggacaaatgttgggtgattctccaacgtcggtggccctccagctacagtaagcagcattgtcgccaaccgtaccccgaactcggaggcagggcatgcgggccgaagttacgagcggcggttgcggcgtgcatcgatctgaaccaattcagcaccaccaccgtttatctgctgctgtccgctaaaaacattcacgatgcgctgaaggcctttctcgacctgaacatttccttctgtctgctgctcatttttctcgttttgctgctgcttccgctgatctttttgaattcgcccgtcgatttttggggtgc

SEQ ID NO: 85493 - DNA, 440 bp, Heterodera glycines
ggggagatcggaccaaatcaacccacgccttcgcgaagaagcacgcagtgatttcccaacgtcaagcagaaacatcatcagagaagtgcgtgccgatttgccaattgaagttagggcagcttctgctccttcaccatcaaatatgcgttggaattacaactatgccaaacgaaaacaccaagaagaggtggtgtggctgatgcatggatcagagggcgtgtcattgccttgaacttggcccattcgaacgcaatgttcccccgtgaactctggaatgtggttgatcgtgttgccgctgggataggaagaacaaataacagtgtcgaggcgtggcactccatatggaatgttcatctgaaaggaaaccaacgattgagctcattcattcgaaaaatgattgaagaggataatatgtgggcaaacagaattgcagattttca

SEQ ID NO: 85494 - DNA, 289 bp, Heterodera glycines
ttttttttttttttttttttttttttttggcaaaaaatgttttattcgtaaaaaacaacagaaacagaaaaaaattccgcccaaggggaaaaacacacaaattaattctgacaatgagcagaaaaacaaccactttcaaaaccaaagaaagagtccaacaaaagttaaacaaagaaagggaattaataaattggggggtataaagggaatgaactttaatggtatgatattctcaaagaacgttacgccaacttattcattaccaaacattgtgatcagagcagaacaa

SEQ ID NO: 85495 - DNA, 348 bp, Heterodera glycines
ttttttttttttttttttttttttttttcaagcagggtaattttatcaaaaaatcagacttttatgacaacccggcaaatgaaagaattttgcaacaaaaaatgcagtaaatatgattcaaaaatgtattaattgcactaactatcgaacataaacaaccgagatttggtcacaagggcaatgagcaattgccacgtgtttggataattaaagcttcactaattaaaggcgtcaacaaatgcttcggcttcttcttccgtatcaaaaacatcggccaagggtgaacagctcgccctcatttcgccaattttcaaattttcactaactgccgcagccacttggaggatg

SEQ ID NO: 85496 - DNA, 437 bp, Heterodera glycines
gggcccaattcgccctatagtggagtcgtattacaattcactggccgtcgttttacaacgtcgtgactgggaaaaccctggcgttacccaacttaatcgccttgcagcacatccccctttcgccagctggcgtaatagcgaagaggcccgcaccgatcgcccttcccaacagttgcgcagcctgaatggcgaatggacgcgccctgtagcggcgcattaagcgcggcgggtgtggtggttacgcgcagcgtgaccgctacacttgccagcgccctagcgcccgctcctttcgctttcttcccttcctttctcgccacgttcgccggctttccccgtcaagctctaaatcgggggctccctttagggttccgatttagtgctttacggcacctcgaccccaaaaaaccttgattagggtgatggttcacgtagtgggc

SEQ ID NO: 85497 - DNA, 221 bp, Heterodera glycines
ttttttttttttttttttttttttttttgcgaatggggctttttttatgcacctcaaaataaaaacacttagaatttaagaaaaacattaaaaacctataaattatcgtctaattaggggctaatcggggccggtggggctctctctggcatccttcggtgcttttcccttattcgtttttctgggcgtcgtccgatggggggacgtgacgaccaaacata

SEQ ID NO: 85498 - DNA, 378 bp, Heterodera glycines
gggggtttaattacccaagtttgaggacaaatggttgccgccaatctgaagctttccctgatttttgtggccggcttttgcctgctgttcatcgccgactccgatgccgggaagtcgtgcaaaccgggagaaaagggaccgccaggccctccagggaagccgggaaacaaggggaagcccggcgtgtgcaagcccaaatatgaaacaacttccaagtacggtacgactacttccaagtacgacaccaccacttccaagtacggtacaacaacacccgaatacgatacgacaacatccaaatacgatacaacgacttccaaatacgacacaacaacttccgactacggtacgacaacttccaaatacgatacaaccact

SEQ ID NO: 85499 - DNA, 225 bp, Heterodera glycines
tgttttttttttttttttttttttttttttttaccaaaattaaaagctttttatgcgttaattaattttaatttcatttccgaatcgtacaacacaaatctcttttgccattatcttaactcccttttcacccattggccattcgatgggacaaaacccgcgcagcattccctttgctcttcgcccccatttccattcgttttgggattggtttcttgcggccct

SEQ ID NO: 85500 - DNA, 492 bp, Heterodera glycines
gggccgtcaactacggcggaactccttctcccgggcggaagcattggtcgtcttcatgcaagcgaactcactcattctaaaagcgaatggagcgaaggaactttcccaatgcaaaactttatggcacggagctcgggcaaaacaataacagtgaaagtgatttgcgtgagccgttccaaatcgatcagtgcccggggacgggagttactcatggaaaggcgtcagagtgacagaatcgtcgaatgcactgccatctccgagaaggttcaagaaccgcgaaagaagctctctcttatcagataccgagaacagtttgactttggaaatgtcgtccccgtgttcatcgtcgacacggcaaaaaaagagggcactgatcagacacactttaccggggagatcaatcccgaattccgtgcaataattcaaatcactcaatcggcaaaaccggcagccaaaaaggacgggacggacactgatcagtctgaaaacacc

SEQ ID NO: 85501 - DNA, 438 bp, Heterodera glycines
ggggagtgcgacggtttcgttcaatgctaatcagctaatttgctcactaattaccccaaataacaaaactgccccctgcatctcccaacaatggccaccaaatgccttccgctcgaacttctgtacgaaattgtgcctctcatccctgccgaaaatgccacaccgaatgcgctctcgtcctgtcggctgctgcacaaacttttgctgccacgtgtcatcaaatggaaagagataatgagtgaaaataccggcttccaaaagcaacttcttgaaatggtaaaggccctccatgaaaaagtcgccgtcattgaaaaaaagcgtcgccatcattgaaaaaaaacgtcgccgtcattgaaaaaaaagccaccgtcattgaaaaaaatgtcaccgtcattgaaaaagaagtcaccgtcattgaaaaaaatgtcaccgtcattg

SEQ ID NO: 85502 - DNA, 266 bp, Heterodera glycines
ttttttttttttttttttttttttttgcttatgtttatttgccagtttaaatatgatgtgcatgtgaagaaatacataacaaagtatagtgagggcagagaatcaaacaagaaaaaaacggaacgtaaagcccttggaaaaattatgaggaaattaaacgtttatgaatttacagcaaatgatcgcatggatttaaagttagggtaggccactctttacacacatatttcgatcgcctcattgccccattcatctgacagtcgact

SEQ ID NO: 85503 - DNA, 461 bp, Heterodera glycines
ggggacacgtagttgtccaataaggttaattattttgtccgtcctttttgtcccactcaaaaatgctcagtcgaatgttgtcctcggctgttgccgtccctcggatgtgtgaatcaaacaaaaaattgttgaggaaaggcgcgattttcgttggtcttctctgtgggcgaatggccaactcaactttcactgccacagttacccctcctcatcggctcttacgtccgttgcatatcaacgaaaaaaaattgttcggacctggtcccagtaacatgccaccactcgtccaggagggactcgttcaaccgttgctcggacatatgcatcccgagttcttcgaaattatggatgatgtgaaagccggcatcaaatacattttccaaactgagaatgcgctgaccttcgctgtttcgggcactggccatgccgggatggaatgtgccattttgaatctgctggag

SEQ ID NO: 85504 - DNA, 340 bp, Heterodera glycines
ggggattttttcatttgcttcatttccgggattcttaatcattccaaattgcaataataaactgaaatgctttttacaatgaacttcgtcctttgcttctcgcttttacgaccacttttggggttcaaccatttactcaagtgctcctcctcgttcatccacgcgggcccatggggaaattgacgctgtgcgactttgatcaacgacctgagcggaactctgcgggccacggatgagaagcggaacatcagctgcatttcctatgcggggtgcatgtgtctgaatgcgacgtgccgtgtcgacagtcgccatgcctatttggcctatcaccactgcgtgt

SEQ ID NO: 85505 - DNA, 172 bp, Heterodera glycines
ttttttttttttttttttttttttttttcttccgatcaaatcgtccttcatcaaaagcccatccgaaacaatcaaatggttttcccagtggcggccaacacgcgcgccttgttcttgttgggcaacaaaaatccctcccgttccaactggttcaccgcatcctcaaagcatt

SEQ ID NO: 85506 - DNA, 435 bp, Heterodera glycines
tttttttttttttttttttttttttttttgagtaaacaatgtttttatccaattaacatagggtcatataagcacattaagtaaattggtatcacacatttcaattagagaattaacaatttgaataattgggggcgtaaagaaacttaattatgggatacaatccttttcaaaatctaagggaacaaaaattggcggaggggataaaatttatcgactgggcatcaataccattttaataattgatatcatatgtcttgaggagcaattaagtcaattcagttctcttcataaagctgcctgatttcctcctcgaacttcttctcgatgttcttgcgcttcagtttcaatgcttcgggcagcattcccgaatcggcagtccacgggtccgcacaaatgatgactttcctggggatttcctccctacgcaatttg

SEQ ID NO: 85507 - DNA, 492 bp, Heterodera glycines
gggcgcttccgtgtggaagcattgggccaattttctgggcaatctttacctggctaaccactctgagagttcagcactgagcaccggtgtgcaggccatggcgtccactttggagcacatttcgatggtcggtgcgcaaaagtcgcgcacttctgtcgccaaattgttgtggctgctcaaaattgcctccgcatgcccttccgaaaagctgatgaatgccgtggatgagctgctgttccgctacgtggacaccattcagccggcgaattggctttttggttgaacgaactgatcactgatgttcaacagcggaggggtaacgcgatggccgagattctaaagcgagtcggtctcctgcagccgcaagaagtgttctgcgcattgcgcgtcgaacttgggccaagccatgttggccgttacatccaacaattcataaatcaacgacaactgcttgcttcttcgggtgcaaatgcctctgctgctactactgcc

SEQ ID NO: 85508 - DNA, 364 bp, Heterodera glycines
gggatcggtctgaataacatcaaagcgaacgactacaccaatgttgagtaccacgctcttttccatgttccgaccttacgcgattatttccttcgcgagcaaaattacatgcacattaagcgaccgaccggtgacaaattgacactgatgccacaacggtttggagaattgttgcgcaagttgtggaacccaaaggcgttcaaagcgcacgtgtcgccccatgagatgctgcaagcagttgcgttgtgcagggacaaaaagtttcaaatcatacgacaaggcgatgcccatgagtctatgatgtgctttctaaatacgcttcacattggcttgaatggcaccggaaagacgaattcgtcaatcg

SEQ ID NO: 85509 - DNA, 404 bp, Heterodera glycines
gggggttcagcgttctcttcgtccgtacatcgcctcctctcatcaattaaattaccactctgaggacaacgggggtgcttctgctgtgaatgtttgcgcggaactctgcgcttttctctgtgctaatggattcgcacgcgcagccaaacggagaaaaacggcgccgggaatcgaagagaatgtggcgcgcgatggaaactgtttgcctgctgaaatgggcaacaaaaagggtcgtggagtgcagcttggacttcgttcgttgctgcgttttcacaacaaacgttacactgcgccaaagtcggaggagaaaacgcagcggcgtctcctcgtggtgctgctggacgccgacttcgcgaagcccatagcactgcgtcatgtgttcgctttgcttgcactcggtccca

SEQ ID NO: 85510 - DNA, 146 bp, Heterodera glycines
ttttttttttttttttttttttttttttctcgcccgatgccgctgcttcctccttcttctcttccgtctcgcgtttctccttcttctcggcctcctttttttcctccacctccttggatgcctccgccttttcctccttcttctct

SEQ ID NO: 85511 - DNA, 418 bp, Heterodera glycines
gggaagagctgttggagggcaccatttacgcgctgtggcccgaggcatcgttgacgttgccccgctttttggccgaccggaaattctttgacgcactgatgagttattgcacaatgagttcacgtccggtgctgccgcccgagctggcgcatgccttccgcttctttcaagcaattgcactgtccggcaagggggagccggagggcgcttggaatctgttcgaagaagttgcttatggtgttgcgcacgaggacgaagtgctgaacacagtgttgtcccaaatgtacgcgtcgccatccaccgaattgttgcctccgaacggcacgaccgcggcacaacgaagcgcaaaggtggcggcgacaaggacgacgaacacaaacagcccagtgctggccaacgaacgtcgcggcagcaacca

SEQ ID NO: 85512 - DNA, 115 bp, Heterodera glycines
aggcgcattcttcgatcaaggggatggcaccagaaatttcggaggatctttaccatttgatcaagaaggcggttagcattcgtaagcatttggagcgttttaaaaggacattgac

SEQ ID NO: 85513 - DNA, 403 bp, Heterodera glycines
ggggctcactttggtcatttactcgttggacaccgttttgcttatgctctttccccgcccatcggctggcgtcggaatggattttggcccatatctgaaattgaccgccattttcatcgtcctctctacttttgggctcggcttatcattggcccacatgaaaaaaatgctgcaaatcggcaaagaattggccaaacaaaacgaaacgacaaaaacagcgtcggccacttttgttggacaggacaatttgcgaacacttcgggcattcaccgggtgtcaggccggcctttccgtactttccatttatgtggccgcctcattagcatttatgaaattttggtatgtgcgtactcatctcgtccaagagttctcctgctctttgatggccattactttggccgtt

SEQ ID NO: 85514 - DNA, 457 bp, Heterodera glycines
ggggaagatgacttctttaagaaagtcatccatgaaatgacaatcaaaaacattgactggtacactttggaccgaacaacgcatttggcagaaaccacgttgggcggtctcattgtgctggtgttttcaaagacaattcaaatcaatacagttcgaattcgggaccgttactttcacatgaattcgttggccactttggcaaatctcgcctccttcttcaagcagttgtcccctttggcctctcagaaactcattggactgctcgagacgatgaccaaacggcgtgcaaaattaattcgattactgagagaacgtgcagaaaatgaaccccagcaacagattaaccgagaggaggcgaaggacgggggaggagaggaggaaacagcgacggaaagactaacggaggcggaggagggcgacgatttgcaccatgacatcactgcgctggaggagggca

SEQ ID NO: 85515 - DNA, 254 bp, Heterodera glycines
tttttttttttttttttttttttttttgggttataatattctcttcagcaattaatatgtaaaagtcagacgccgtaattgaccatcaaaatcatcctttcattgggcacgggcacgttcactgagtggcacatcgcaccgcttgcgggtctccgttgcttgcctcttcgtcgtgcgctcgccggcgtaacatttcttcagagatgggcaccaatttgatagcgttctgcgcgttcgctccgattggttccggc

SEQ ID NO: 85516 - DNA, 344 bp, Heterodera glycines
gggccaattgtcgctgcacaatccctggcgcagttacaacgtcgtccgtctccgtcccctcaccaattacactttctgtctggagtaccatctcgtccattttccacttcatttggctgattcgtcctcatccattttcaaaacttgcatcgacgttcaaacggaagaaccgctcggcttttggacttcgctaagtccgatttcaattggcattcttttggcgttctgtttctgtctgagtgccctcctctgtttccgcgctttgtatctccgtttttacatttggcacgaggcgaagctgcgtgcgagaatgaaccaaagcatgagtgggcaaagctttttgt

SEQ ID NO: 85517 - DNA, 518 bp, Heterodera glycines
gggagcttcattacgtgcaagacaaggacgtggacaaggaaatgtccgatgccaatttggtcggcactgccgaccatcctctgtcgtctttacaccatcgcccatccgcctatgcatggcctccaccttcccactcgttgatggaacgtttccgtcaggctgccgtcacctcagataacggcatttgttccgaaattggccgtgacgtgatgatgcagaaaaatggcaatgccgtggacgccgcggttgccgccatgttgtgcattggtgtgaccaacgcacagagcagtggacttggtggcggaatggtgctgaccttttatgatgccaaaacgcgctcatgcaaagtgattgatgcgcgtgaaacggcgccggcacgcgcgactgccaaagcgtattctgaacgtgtgaccgcaaaccgaacgacagcgcgtgctacgggttaccatgaaattgcaacgcccggagagcttgctggattgtggcttgcatacaaaaagtttggcagtggccgagtg

SEQ ID NO: 85518 - DNA, 517 bp, Heterodera glycines
ggggactagtgatagtccaattaagcatgaatacgaagacaaatcaaaagccgatcaaagttttatgtgcgggcgatgtcaatggaaagtttgcgcaactctcagcgcgtgttaaagcggttgaccaaaaatgcggccctttcgatgcacttttttgtgttggcgaatttttcggaccgaacgacgagcagaacaaatccgttttggagggagagatgcagctgccgctgcccacttacattctcggtgtccttcttgccagttcaccaccgtttactttccgtctgaaagttcggagctttgccaaagtctcacatttttgggtagaaaaggcattttgacaacagcgagcggaatttctgtcgcttatttctccggcgttgaagaaagccctggaggacaccagcaggacgagacgaaaccatttgaattcgaccagaaagcggttgatgatttacttttgccactctccgccaattcgggctttctcggcgtcgatttgctgttgacctcagtt

SEQ ID NO: 85519 - DNA, 331 bp, Heterodera glycines
tttttttttttttttttttttttttttcgggtgggacttttttatcattttatttaaaaagggtgcaaaatgacaatttgtttccgtttaattcacaacgaacgccatcttcacttttctgttttgaacacgttctcaatgaacgatgccaatttgacgtccctttcggaaatgccttgcacgtcgtgactgctcagtgtgatgtccactttgttatagacgttgaaccattctgggtgggggtccattttgtccgcctttagtgcgattcgcgtcataaaaccgaacgcttgattgaagtctttgaaagtgaagctttttttgatggcat

SEQ ID NO: 85520 - DNA, 338 bp, Heterodera glycines
ttttttttttttttttttttttttttttaacacaaacaatttatttatcgagtatttaatggtgttaggcacaataatacaaaacagtatgtacagtcagagcagcagcaaatatcgagcgtgacaagcaaaatatatatggggataaaacatacatatgtacgtacgtatccatacatggaaaatgatcgaatataaaatcacatccgtccgattgtttgtgagccgcaattccctctcatcattgtcagtgccgtgtccatctgctgctgctgttggtcgtccgtcgttttgccttcaacgttccgccgcctccgttcgttcggctgccgtggtag

SEQ ID NO: 85521 - DNA, 292 bp, Heterodera glycines
tttttttttttttttttttttttttgggagaaaccatctttaatttcaaaaagaacaaaaaaaggggaaggggcactgaaagcagaaagaaattggtaatccccggttagtccttaaaaggatagaattttgaattgaataccaagtgataaaagaaagagggaagaggaggaaaccaaaaagtcgaaagccaatgccttccgcgtaaggggaatttgtgagggagggacagagtgaagaaaaaagagatgtagcacaagcagaaaagctgggcacattcactccatttctt

SEQ ID NO: 85522 - DNA, 356 bp, Heterodera glycines
ttttttttttttttttttttttttttttagagagattaattcattgtacattaataaatcaaaataaaagaaagagaaagcaaattaagggttaagattaaaaaacaaacaaaaaaagaacgaataaattacaaaaaaagggaccaagagacagagagatgagtgagtgatacaaagtgaatgccgttgagatcgtccgtctccttcctacgacaaagtgccggtccccgagtcgtcgtcactcgtcggtgtgttggcggccgactcgtaattctgtcgttggtccgtttggtaatcaagcgaaaaggtaggtggaaaagcgagcagtccatcagctcccaattcctccaattcca

SEQ ID NO: 85523 - DNA, 494 bp, Heterodera glycines
ggggggtcgcatgggcaacgaaaagggcattccgattgcggagccggagattgtggctttcaacagcccggataactcggaccgagaatggatgacgatgttcgagcgatgcgtcaacaagcacatccaattcatcatgctggtggatgaaaagcgcaaggacacccacggactgctcaagctgtcggaggcaatgcacaaagtcaccacgcagcatgtgacgctggagaaagcgaatgacgttgtgcggaagaaccagcgccaaacgctggagaacatcctgaacaagctgaacatgaagaactttggcctcaactacgtgccggtgatggagccgtcggcgtgccgtcgcttttcgctcgaaaacggaaatgtgcttgtgatcggctacgatgtcaaccatcctgctcccatgccgcaacagacccgtcgtttgttggcatcgcagggcgaatcgcaattgagctcgcttgacccgtcatgtgtcgggattt

SEQ ID NO: 85524 - DNA, 345 bp, Heterodera glycines
tttttttttttttttttttttttttttttatcaaaaaaaatttgtcgcataaatttgagtaaaaacaataaaatacggagtgtaaatagttttccttctctcatttaggaaggcatttgaaacaaaaatttcatcaaaaagacagtcgaatttgaaagttcccatccaaatatcaatcattttccccatttctttacacaaaatacccatttatctcggcttgctgccgctgttggcctgctgctgttgctgaacccgtctttcctgcgcacgcaagttgcgctcccgctcaaattggctgtagtccgcacggagcaaaaactcctgcttgtccaaataggcgtc

SEQ ID NO: 85525 - DNA, 362 bp, Heterodera glycines
tttttttttttttttttttttttttttttatgcagttcaaatttaaaagggattttcggaataaaccgaatacctaaaaattagctcataatcaataaaataataatttttaaaatgtgaaaaaataataattgttaaaatgtgaaaagtaaattagggttaagtgtgaggtgaaagggggggggcgtggcataaaaatttggaaattctcagtgtgtgtaagtgatgttgaagcggtacattccgttttttcccgggggtttatttgtacaaaatcatcaattggtcgccaccgtttcactttggcttcttctctccctcgccaattgagtacgggtccgcctttccgtccgtctgttgct

SEQ ID NO: 85526 - DNA, 449 bp, Heterodera glycines
ggggggggggccagcctccccaacccaaactctgctggggtcactgcttttaattctaatggaagaagtcgcttcgaatttaactccgaatgaggcgccctttttgaattttgaccattcgaattccatggccgtgccttcccaattcgcggctgaccaatgtccgcttcgttttcctcggcctcttccgccgcctttccccgctgaacatccgaaggaaaagcgagaaaattctctgctccacaatctgatcactccttggaaccgatcgttcgttccttcgtcggatttctcccatcgattgctctcatctcccgaatccactgaatcctcgcagagtttcatggttaagaatgacatgacatgctccgccagacgaagtttgagttcggaattggagaaaaatgcaactggcgatgggaaagtgccaatggccgattgggaattga

SEQ ID NO: 85527 - DNA, 396 bp, Heterodera glycines
  unsure (1)..(396): unsure at all n locations
ggggatccaaatcaacgcggcacagtaataaaatattaaaagatccgaaaaaatgccaaacattttcaaaatccttctgattgtgcttttggccgtcgtctcattccgtctctcggcttctactggtgacaaaaaaactgctaatgatgggagtggaaacaactcatcagctgggattggtacgaagatcaaaagaattgtcaccgctggactgctcttcacttccctggcgacgggtggggcggaagcgattgggcgaagcaatgctcagggaggaaatgccgncggattggtgccatcgcatgtgaccaatcgctcaatggctccaccacctcctcctgtgcaatttgaaatgggggcaaatcgattagaaaaaatgagggcacacctacgcga

SEQ ID NO: 85528 - DNA, 266 bp, Heterodera glycines
ttttttttttttttttttttttttgctaaaattgtttttttttcacaatggccaatgattaagacgcaattagtgtgactaattgccccgcttaacggacccctttctcgcttgggtcgtttttggggctgcagtttcttggtccatcatctccagcagatgtgctcccttacgggaaccttttctggacgggggcttttctgttgatgatggggtttgcttgctccggtctaagtccatctctttcatcgctttgctcaacgacg

SEQ ID NO: 85529 - DNA, 175 bp, Heterodera glycines
agcgtaacatttaaccgtcggcgttccgcgctccaatcgccgaacgtattcaaattgctggacgaagccgaagaagtcgtccggcgatcagacaacgcggggcataaaaatggcggcagccggaggcaattccgggcgattgggacaaccgacgctgggaaaaaggacttcaatt

SEQ ID NO: 85530 - DNA, 492 bp, Heterodera glycines
gggaattaagaaaccaactattgcgatggctgctaatgaaaatatgcaaacagaagacaataaaaaaggaaaagtgaccaatgatgagcgtaacttggtcgtctcatttattcagtttttgcgtcacaaagtctcatcgaaccaatgcactgatgaacagattgaaggccttgaagttgctattcaatgccttgagaccgccttctttgtttctgacagaaactatgcgttccaaccgtccaaacctctcatcgaaattttcaaagcagctgaaggacttcccgatggggatcaagagtttcctaagccgactcaaacggacgttgagaagtcaaacgcattgaaggaagaaggcaacgaactcgtgaagtcgaacaagttcgaagaagccatcctcaaatacaacgaagcaattaagttgaatcgcgaccctattttcttctgaacagagcggctgcttattgtcgtctggagcaatatgatctcgcaatc

SEQ ID NO: 85531 - DNA, 554 bp, Heterodera glycines
gggaatcattcttcatttcacttccttcccattttttcaccagcgttaaactgcacagcaccgcggatggtctacgaggagtactgcttcgatgtgaggctcgacgacttcaacgaggagtactgtttcgaggtgagcaacgccgacatcgtacacaacagctgcctctatgtggaacagacgaatccgaactacatgaccatccatggcgtcgactacgacattttcgtctgtgagaagacaatcagcgggctcaaagatgaccgaagcgaaaatgtgttcaaccgtagacaaggagcatgtgcaagcggggacgaccgatgcgataacgttttcaaccgtggacaagtggcaagtgcgcgcaatggtgaaggaagagacagcatcctcattcaaggattggcgttcgtcattgtgaaagtggtcaatgcagtgtacgatatgattgtttaattgtgatcaggatatattcatcacgtatatgtaaacaattatttttgtgtgtgtcgtatatgtacgaactgaatttctgaacattcgtcatatgtatgtaa

SEQ ID NO: 85532 - DNA, 465 bp, Heterodera glycines
gggattgcatcagttcctgaactcccgcaaaaattcctcaaatcctggtcggttgatcattccgaaaatttcgacgaatacctggaggccaaagggtacggctggttcatgcgccaagtggtcaagcttgccggcatcaccaaaacattttcgaagaatgagaacggcacatatgcatgcaaaattgaaaccaccaaaaagaatgtggagtggcccagcttcaaattgggcgaggagttccaagccgagtatttggacgactcagtgcctaagatcaccttcgactacaacccaacaaccgacgagctgatcgaaacgcacaaaaaggtggactcggaggagaagccggacatctacaaatacaacatcgactcggacggctttctggtgatgcaaatggaatataacggagtgaaaacgaagcgcttctataagaagaatgaatgagcggagggtgaatgcttt

SEQ ID NO: 85533 - DNA, 438 bp, Heterodera glycines
ggggaggcgagcgacaccatcgagaatgtgagggcgaagatccaggacaaggagggcatcccaccggaccaacagcgtctcatcttcgctggaaagcagctggaggatggccgaaccctcgcggactacaacatccagaaggagtctactctccatcttgtcctgcgtcttcgtggaggaatgcagatctttgtgaagactctcaccggcaagacgatcaccctcgaagttgaggcgagcgacaccatcgagaatgtgaaggcgaagatccaggacaaggagggcatcccaccggaccaacagcgtctcatcttcgctggaaagcagctggaggacggtcgaaccctcgcggactacaacatccagaaggagtctactctccatcttgtcctgcgtcttcgtggaggaatgcagatctttgtgaagactctcaccggc

SEQ ID NO: 85534 - DNA, 294 bp, Heterodera glycines
tttttttttttttttttttttttttttgagcaaaagggctttttttttttacaacaaatgacaaaattaaatgctgacactaataaagagaagcagcaaaaatgaagaaaagcaaaggcaacgattggaagaaattgacagcaaaaagtgatcaaatgatggccattttgattgggtgggcatttgattgattattaattggccaattgttgctgattcgtcctcctccttcacttcacaattgcaatgtgcaacatttggctgctccgccacttttcataaattcggacatat

SEQ ID NO: 85535 - DNA, 566 bp, Heterodera glycines
gggtgtgtactctaaggaaggaattaccgggcaacaattaagtgacgaaaaactacgcagaatggccaccagaaacaacagcagtccgtacattttgccccggaggacccccaacagcgcacgccctgggacatttattaccacaaggaatctgtcagcgctgcacatacaaccgcggcctacaccatttttgagtgggactatctcgaaatcctcaccacagccgttgcgagtggtcggtcgaatcattgacccaatggctctcggttcgtctcgtcaaattttattagcaccctcttctacggtgctgtcacctgccgaacagttttcaaatgtccagccagtagtcaatgacaatttccatcgccctctgtcccgtcagcagagaacgcctctgttcaagttgggccaggatcagtccgaagaagacgagtttgaccttgatgagatgtaccgattgcttgacgaaagtgccggctacagagcccaagaaatgagtcttccgaggcggcgagagcgactcaacaatttgtcacaggaagagaaaatcaacagacgaaagcaca

SEQ ID NO: 85536 - DNA, 284 bp, Heterodera glycines
tttttttttttttttttttttttttttgggaaaaagaatttatgcaaaaatgcagtttaaagtctaaataaatgcgcactattgccccacttcgtcttccattttctcctcctcctcctctccattggcggcaccggtctccattccctgttcgcagtcgctttgtccatcctcttgctggcctttttcttctggctccccttttcctttgggttcaaaccggttttcctctctttggtttgcccttctctctcttcgggggtggtggcgctgattcttctttt

SEQ ID NO: 85537 - DNA, 263 bp, Heterodera glycines
tttttttttttttttttttttttttttgtaaataaaaaattttattttataatttctaccggatgtttattgggttttcatgtttatctcttttacatctatcctaatctcttgcaaaatcccttctgccgctgctccatcactgctccgtgttgcccttgaccaatgccaaaagtgcgtctcggtaaactccgctggtgtcccctttgatcgcctcctccaagctcttcttgtgcaacgtgtgaaaagcgtgtttgatgtca

SEQ ID NO: 85538 - DNA, 328 bp, Heterodera glycines
tttttttttttttttttttttttttttatgatttattcatcgtcttttgtatattacagtagtatcaatgatgcaataaaaaggcaatatttggcatgggtatctgtgctgggcgataattaataatattttgaacacagtaataggcgatgcaatgtacaataaacaatcaagtgggagtaaatgcacatgaaggcggaagaaatcattttaaatactaaaaagatgtcccgttgatcttgaacagggtggccgggtcaagcaatttgctcttgaactgttcgacccagtgactgagggaaatctctttgatgttgagtttggcaga

SEQ ID NO: 85539 - DNA, 307 bp, Heterodera glycines
ttttttttttttttttttttttttttagtcaattaaccattttacttgtccatacaatttcataatgcaatacattttctgaccctatagacctatacaaaaatacaattttgtgattaaagcaatgcaattacgaggcgtcaaatggatatagatatttaattcattcacttcgacgccttctcaagttcaatgagtttcttaacaccgtcatacatttgcttgaccgcctcaaattcggtaagtccaagccgagccttgttcgacacgtcgtaaaccccgccttcactttccgagtggtctccgt

SEQ ID NO: 85540 - DNA, 412 bp, Heterodera glycines
aggactcgacggtgaatagcgaggcgaacttggagagtattgaggcgatgttggagaataattaggagacgtcggagtgtagctgggcgacgtcggactgtaggtgggacttgtaggagaatagcgaggcgaacttggagagtattgaggcgatgttggcgaatagcttggagatgtcggagaataacttggtgatgttgggctgtaactggggcttgttggcgaataacgcggagaactcggcgaatattgcggcgatgttggtgaatagctcggagatgttggtgaatagctgggcgacgtcggactgtaggttggacttgttgccgaatagcgtggagagcttggtgagtactgaggcgatgtcaacgaataatttggtgatgtttgagagtagctcggcgatgttgtc

SEQ ID NO: 85541 - DNA, 240 bp, Heterodera glycines
ttttttttttttttttttttttttttttagatattcatttataaatacaaaaaagtttcatttttgtaaaaaaaagacaatctgagcctaatgaaatgtcgtcgtcataatgtaaaacacagtaattcatcagcgacgtttaccgtacccatagccaccgccgcttccgccgcccattccacctccaaaaccggtgcccattccgcctccaaaaccattgcccattccgcctccaaatcc

SEQ ID NO: 85542 - DNA, 239 bp, Heterodera glycines
tttttttttttttttttttttttttttggtaaagggtttttctgaacatttcctttctttgcattcactttggcgcctctttctcgtaattgcttctgatgcttcctcttattttctcccccattggtttggcaaaaaattcggatacaaagttcggcaggggccacaacagaacaatgccatctcttggggctttatgggatcttggcaatcattttcatgcttctgacattcgtccg

SEQ ID NO: 85543 - DNA, 337 bp, Heterodera glycines
tttttttttttttttttttttttttttaccaaatatttattactttaaataaatgttcgacatgtcaacaaaatggttttctattctatttcctcctgatttgtttgtcctcaaaaatcgaggtccgatgacaacggttcttctttctttccttggccaaccgaactgtgttggccagggttggcaatcacatggctcggactcggcacattttgatgtgcaaaaacccctttgcttgggactccaaaatgcacatccgtaacttcaaagttcttttcttgtccaattgctttgattgcttggctttcctgctcaaattgtactttcatgtattgcc

SEQ ID NO: 85544 - DNA, 422 bp, Heterodera glycines
ggggttctttttggcattcgcccaaatttggtgccaatcggccgaggaccccgccaaaacgtcccggcgccttcttctcgacccgcaccccccgcccaaattccgcgtcctcggctctctccaaaatttccccgctttccaaaacgcatttaactgccccaaggacagtttatacgcacctaaagaacactgtgacgtgtggatcagcgaagtgaagcaggtgaacggcgataactttcttccgccgccgccttcgcttaacattccccaaaaagaaagtgaattgacaccgaaattccgcgaagcttccgaatattttgaaaaatccgtggacatagcgcaggacccgtgcaacaatttctacgaatacgcgtgcaatgctttcgatgagatcgctcatttcgacagaatcagcattcaga

SEQ ID NO: 85545 - DNA, 267 bp, Heterodera glycines
tttttttttttttttttttttttttataacaatttatttatcgagtattaaatgttgttaggcacaatatacctaatacaatatgtacagtcagagcagcaaatatccgagcgtgacaaagcacatcaaatatacatgacgataatatatatgtacatacataaaaatgatcgaatataaataacatccgtccgattgtttgtgagccgcagttccgtctcattgtcagtgccaccatcacatctgctgctgctgctactgttggtc

SEQ ID NO: 85546 - DNA, 150 bp, Heterodera glycines
ttttttttttttttttttttttttttttaatgccgatcagtttaccaaaaatttcaaaaaaaaaaacattttttgaaatttgcaactcccaagaaagttgaatgaaaaatgtaaatcccccaatcaacaaccatccattttccaccacct

SEQ ID NO: 85547 - DNA, 414 bp, Heterodera glycines
gggcttcatcgccgccgcatttctgctcaactttggctgctgtcagcaaaatgagagccaaacgacggaaactcttcgcgccagaaatgcgtcgtcatcaccgcaatttcctttgaacaccacaacattcacaaccaccaaaaaagaaacgacggttgccactccttcgactacagaagctggcactgaggcggcgacaactgatgatactaatgacgaacaatcattgctgttttggattttgattggcgtcattgtagcaattgtgctcttcttggtcctgctggtgtgcattgtgtgctgcatgcgaggaggaagccaaaaagatgcacgcgaaaccgtcaatggcgagagcggaggggctgtgaccaaattaacgatgaatggggacaacgccgacagttccagtgcttc

SEQ ID NO: 85548 - DNA, 162 bp, Heterodera glycines
tttttttttttttttttttttttttttctttttttttttttttttttttttttttttttttttttttttttttttttttttttttttttccctggggtaggttattccgaaaacccccgggaattaaaaaaaggggggggaaatttcccccccaaagccggt

SEQ ID NO: 85549 - DNA, 257 bp, Heterodera glycines
tttttttttttttttttttttttttttgcgggcgggtaaaccccacaaataaatcacaacatccatcaaatgcaacaatcagtcaaaaagaaaaaaacaaacaacaacagatcatcatttttttcgcgccctaagggataataccccctccaaaaaaaagctcgtcattttgcggcctctccctctctttaaagttcgtctcgcgccgccggttcctcctcctcctctccctccacaacaattttcttttcctcatc

SEQ ID NO: 85550 - DNA, 454 bp, Heterodera glycines
ggggattccctcaaaagcaaagccatccatccgatcattcgcttcatctgccaatccgcaaaatgtcccttttccgtcctcaatcgctgcttcttctggccgctctttgcctgtcctttgcgctgctctttgtcacttcgtcggaagagggagggcgagtgaagcgcggcggatggccttgggattgggccggcaaacaactgtgcaaaacatcggcaaattgcaagtgcaaggatggcaaaaattgggccaaatgtgtaaagtcggaaggctacgcggccagcaattgttgcgacaaaaattacgtgtgggcatgttgcgggaagaagcccaaacattgatgagagaagagaaagggagagaatgagaagcgagttcacataattcattctgttttggatttttagtcttttttttctttttgggtttttttggtaaatattttctttagcaa

SEQ ID NO: 85551 - DNA, 547 bp, Heterodera glycines
gggggtctgtctgtccgtctccactcaccgcccactctgtcgttcattcgcagtgttacacatgcatctgaacagtttttcgtggcgatgtatcgccagtcgaattggccgtggtcgcacttttcactgaacacgaggggccgtcggtagagtgcgcaactgagaaaggaaatggcgttggtccatcagtcgcggccgattgtgaggcgaacaaattggccgaagtcaccgagggattggcgagaatcaccgcgacggcggagggcggcgagactttctacaaccgagtgcaggagttcaaccgagacttgacgggtttagggtcgtcgttttgagggcattcgctgccgaaatacccaacgaaaaagagccgaaaacggaagaggagggcccaaaagccaaacagaggaaaatggacgagggaaaagcacccgaagcaaatgcagcgcaatcccagccccgtgccttttctgtgctcgatgccttgtccgcttctggtctgcgcgccattcgcttcgcgttggaagtgccaaatgtgacgcgagtg

SEQ ID NO: 85552 - DNA, 119 bp, Heterodera glycines
ggaagaagataaatcgagggtgcaatggcaaatttcacaccggcaaaatttattagtcacatggcccgaaggattcttaagcaaaaattaaacttttttttggcgaattgaatgacccc

SEQ ID NO: 85553 - DNA, 298 bp, Heterodera glycines
tttttttttttttttttttttttttttttgaaagcgttgaataatttattttccatcacccagtcaatgcacaattcgccactcatttaaggacccccaacaaatgagaggacattaaaacgttaatttctgttttacgaacgattcttttttaattctttcttttttggatggaataaatagtcaggggtttttttcatttttttttggtttccttacatttttggcattgccttttccgaagggattagccgttcatttcattgccccttgggcgcatcattcgcgggacaaaacc

SEQ ID NO: 85554 - DNA, 330 bp, Heterodera glycines
ttttttttttttttttttttttgtaatgtaatataaaaaattgactaattaatgacagaatcgatctagggagggtttagggatgctttgaaagtagtcttacaaattgaaatgcattggatgcagaattaaaaatttggttctgtgcttaagttgtttccaatcatattatatcacagggttattaaaataagcatatttggtttcaaaaacagcagcaatgaatggctcacaatcgggtggcattgggcttatcaataataccttaacaattttatttagagagagtcgatatctcaatttgtccccatttttattcgttgccaaagc

SEQ ID NO: 85555 - DNA, 215 bp, Heterodera glycines
ttttttttttttttttttttttttttttttgcgggcgctcaaatcatagtacgctttacatgcacattgccccgggcagctacctcaaagatcattcgaccaagtgccaaagacccgccagttagcaatatgggtcaaagccttggcgtgagcgctggttaaccagcatttatgaaccccacttcacttaccaacgcgcttactgggccgaactc

SEQ ID NO: 85556 - DNA, 126 bp, Heterodera glycines
tttttttttttttttttttttttttttttccttttttttttttttttttttttttttttttttttttttttttttttttttttttttttgggccccaaccccaaaaaattttttttcccctttggc

SEQ ID NO: 85557 - DNA, 322 bp, Heterodera glycines
tttttttttttttttttttttttttttggaaataaaaaattttattttataatttccacaggatgtttattgggttttcatgtttatctcttttacctctatcctaatctcttgcaaaatcccttctgccgctgctccatcactgctccgtgttgcccttgaccaatgccaaaagtgcgtctcggtaagctccgctggtgtcccctttgatcgcctcctccaagctcttcttgtgcaacgtgtgaaaagcgtgtttgatgtcagccaggtcaatctcagaccgagaaatgaccagaccaatcaaatcccagtcgcgtgtgcc

SEQ ID NO: 85558 - DNA, 323 bp, Heterodera glycines
ttttttttttttttttttttttttgctacgcccctcaacagcgcggaacatttacgtcgaaaaattttacatattaaaagtaagaaatgaatccctcaaagatgggcatatcataagtcacaccatcacaacgaaacaacattatttgtagaagggatatgacggaaagccttgtgccgggggaatcgtgccaatgcctcccgtgggatacccgggtgcgtttggagtcgtcgcggcgggggagtacgcgggcagcatcagttgggggtcaatcagacttccgcttcgctgttgctggtctttgacctcctccttgcgttcca

SEQ ID NO: 85559 - DNA, 368 bp, Heterodera glycines
tttttttttttttttttttttttttacgaaaattgaaacatttattggatattagccaatttctcaattaattgctttcatttgccttatacactgaaaagtcacaaaaaggcagagaataacaaaagggcatccaatcataaaaggggcagtgcaaagcccattttccttctctaatccgtccccttcgactacaatcgcgaaatgatttcttgcaactccgattcctctaaccacacaattttgcccaacgttttgccttccttgtccgtctgcggcttaatcataacaatttccacatttttggaattgattttctcttccatcagctgtttgagtgtgttcagtgcgacttgttttgcctcggc

SEQ ID NO: 85560 - DNA, 492 bp, Heterodera glycines
gcggggattatgctattccattcattttcattcctaatcaattttttttaaattttgcctataattaattctctttttgacgaattgagtttgcaatgtctatggatgaactgaagaaacgcgccaaagccattggtacatttgaggaactaagaaaaatcatagatatccgtggtgtgaatcggtacaacccaaacaatgcgccggttttggaacgggcggtggatttgatgattaaagagacgaaatacgacaaggacattctgatgacactgttgaagctgtaccagttgaacccatttctttacaacgaagagtacgtgtgccttgtgctattgaaaacgatgaccaattttccacgcaacgattttgctttggcaaaatatttggtggacgctgccaaagtgaacgctccggagttgcgacgcgtctgtcagattggctctcttcttgagtcttgcaatttcgcgctcttttggcgtctcgtcgacg

SEQ ID NO: 85561 - DNA, 569 bp, Heterodera glycines
gttggattatgtggtggagaggaaaaccctcgacgacctccggaggagcatcaaagaaacgcgctatttggagcagaaacagcggctgaaaaagtgtgggctaagaaatgttgtttttgtgctggagggtggtactacggccaacgaccggcagttggagcaggcgatggtgtcgagcggcgtggagagcggtttcctcgtccatcggacgccgaatgtgcaggggacggccaaatttctgcaaaatttgacgcgatggctcagagagcgttgttcgaagcaaaaggtcactggcccccctttcgactcgtttcaacaagagagcaaaaaagcccatgccgctactgtttccgattattgggttcgccaattgaccgtttgcccggggttgagcaccgaccgagcacgcatcattcgcaatcgcttcccgacttttcgttcatttgtcgaattttgccgcaaaaattccaccgacaaaaattcgataagagacgactattcgagtgccattggagtcgaattgccccaattgtcagctgcccctactaaaaaccttatgagctttttta

SEQ ID NO: 85562 - DNA, 146 bp, Heterodera glycines
ggggacagagctggcgtatctggtctgcattcacccgtttgttgctgtacgttgggctgctatcctccacactggggtttgctgtccttctgtctcagcggcgaatggggctttttcaggcggagtgcgctgatatgctcagagta

SEQ ID NO: 85563 - DNA, 345 bp, Heterodera glycines
tttttttttttttttttttttttttttttttaatatctcattctttatccatttcgctagcacaattgcaaatcaaaatcccttttttctattacatgcattaaaatttccatcaaaaattttcctgggcatataattttccgatgccaaaatgccattttcgtcttccaaaaagtgccaatttcggaaatgcaacattcgcccttccgttgatggcaccaggcgtgttgcagtgttcggctttatgatcactggccaatgaatccacaacgattccgcgcgcgaagtgttcaccacatatttgggatcatcgggctgataaaacgcaacttttgctgatgttaa

SEQ ID NO: 85564 - DNA, 308 bp, Heterodera glycines
ttttttttttttttctttttttttttttaatgatcattttgtatacgggttcacaaatattttcaataatagcattcaaaatattataaaatatttgttttttaaatacaatattaaagcatcgggtctaagtgattgcctcttttggggctccttctaattaacaccgtatttggccaccattttttcgacaattttcacataatcaatccgagccttctcctgagagatgccttgcttttttttccacgcctcccacttggccttcccacggaaatcaaaagtgccaggtttgcatgtgttgttgt

SEQ ID NO: 85565 - DNA, 263 bp, Heterodera glycines
ggggacagcgatgatgagaacagcggcgatgtgccgctgagtgacgaggcggacaactgctccgacaggttgaactcggctacgctcaaaattcggcaacaaattacgacaggagttcccaaaagcagcaaacaatggccgacgatcagtgcgcattggacagcgaatgtgcttcgtcggtgttgcaaaatgtcatctcggatgcccttcgcgcgccttccccgtccaatctgcccaacagaacggtgttcgatggcggtcaa

SEQ ID NO: 85566 - DNA, 276 bp, Heterodera glycines
ttttttttttttttttttttttttttttgccgctcgtttattgattacaattttagtcctgaaaatagaagaaaatcaatgccagaatattcagacagaaatgggagtcacgggtaacaacaattggacttggtactcctgtccgcgccatctgtcaacggctttatattcggaccggggcccatcgagtttctgtccggcaccttgtccaaaatgggttcgggcaagtcgtaaaacgccttttcgatgtttatgtttgccttggccgatgtctcc

SEQ ID NO: 85567 - DNA, 309 bp, Heterodera glycines
tttttttttttttttttttttttttggcctttccttttggtcttgtttttcttctcctcctcctctttcttcttccaacaattggtggtgcttttccttctcttcctcctcattctcttcattgatgggcattggctcatcacagttttcatccctccccttttgctggtggtcttggtcttcttcctcttcctcttcctgtgcccgactttttccggggatcaattccgctaacactgggtttgcgcgtcaatcggcttccaatttggcctggattgcggcctgctttgtctggaactggtcccatgc

SEQ ID NO: 85568 - DNA, 396 bp, Heterodera glycines
ggggatcatcaaaaattcattcaaccatagaatttattttttttaataaataagtttttttgtacaaaatgagcaactttatatttgtcgcctctttaactgcagcgttttttagctcaggcctcgctctaccggctccttatgatgctgaatcggtggtatcttctgaattaaatgttccactactttcagctgacgcaaatgttgaagcagcaattaccaatgaaagtgatgctgctgctgagatacaagctccatcaattccggtaccaattgaacatcaaactgctgctgacattactcatccaactgaaactggcaatgagtcttctattgcatcatcatcatccacgccgaaaagtgagcagacgccaaaaaaagtgatgaacatgaaaa

SEQ ID NO: 85569 - DNA, 323 bp, Heterodera glycines
ttttttttttttttttttttttttttttgggttttaatttgaaaatcaaaaaaatgaaaatgaattctttggccttttgtcccttttctttggcgggtcattccctgctcttttgggcaactggttttcccctcacttttctgttccgtcgtttattttggtaaagggttccccaagaaaagggtcacaattccctcgctgaatatcggcgaactcatataattcaatattaatttttccatggattcgaatcggcgattgccaattataaattgggcgctcgcggcgtcgaattgcacccaaaagtgtttgtttttggccga

SEQ ID NO: 85570 - DNA, 225 bp, Heterodera glycines
tttttttttttttttttttttttttggcattggaatatctttgggtcagcaaatcctttaaattggcgacacaattcataacacatcggaggaagcagacttattacttttttaattatcgctaaacaaaagagggcgcatttcgctcattcgcctccgttcactttcgtgtcttcctccggctgcgtttgttcttttttctgttcgccttcattttctgtgcca

SEQ ID NO: 85571 - DNA, 483 bp, Heterodera glycines
ggggaaataaaaattaaaaagacacaagaaaataatgaaaatgaaagaaacaaaaataaattcattcctgccgaaaatttttgtgagaaaataattaaaattcttcgaaataccaaaagtaaataaattctttccttggctaaatgttcatcgaatttctctctcttccaatggatttgaaatgccgtggagaaaagtgaaaattgacaattagtggcggcatttctgcagagacgaggatggttttattaattcggcacaacaaaaaagagaaacaatgccattaattcaagcggaaattatccaatcggtggcgtcgaattgtgcttttacttcgtcgtttggctttcccattcgcttttggcatttttgctggcgaccaatgcctcgcggagtgtcggccattggctcgaccattggctggagccgagcagctattcgcgcgcactaagaatggacaattcggacattgaactgaaattg

SEQ ID NO: 85572 - DNA, 336 bp, Heterodera glycines
tttttttttttttttttttttttttgacaaacatacttttatacctcgcatttgaagcgtgtttgtatatgaaaggggagaaaagagagagttacggacaataaatatttttatataaatgaaaataattagggaaattcaatgggatagaaatacacaggagaactacaatatatgaccattcgtcagcagcagatttatatttgcttcgcgagatccctccctccattattcagcacatcatcgtccgtttaagcgcctccaaagcgctccaaatttttatgtgcgggcccagcttgaacttcagctccgttttcaactgctccgactggaggc

SEQ ID NO: 85573 - DNA, 455 bp, Heterodera glycines
gggcaacaatgcaacaacaacggcaatgtcacggcaccaaccgaacgcattttccgtgacgcgctcaatcggtcgcgacgccttttcttcagcttcactctgctgacagaacacattgcatttgttgaactgttcgacaaagtttggattgctggatggacttcggccgtggatttgcgtcttcgtgaaaatggctgttccctaaactttggcgacgaggttgaacaaattgatgggagcgtagtgcgcaatttgcgagcactgactgaaatataccaaaggataatgccaggggcacagattccgcttttgttgcgtgccaaccccacaatgatggtcttcacactggtcaaacctgaaaatgcccgcctcaatctcggcatcaaatttaaccgccctgccaaattccttctccgtcacccattcgactgtcttaccatcgattcgatcgccct

SEQ ID NO: 85574 - DNA, 413 bp, Heterodera glycines
gggatccaaatcaacgcggcacagtaataaaatattaaaagatccgaaaaaatgccaaacattttcaaaatccttctgattgtgcttttggccgtcgtctcattccgcctctcggcttctactggtgacaaaaaaactgctaatgatgggagtggaaacaactcatcagctgggattggtacgaagatcaaaagaattgtcaccgctggactgctcttcacttccctggcgacgggtggggcggaagcgattgggcgaagcaatgctcagggaggaaatgccgccggattggtgccatcgcatgtgaccaatcgctcaatggctccaccacctcctcctgtgcaatttgaaatgggggcaaatcgattagaaaaaatgagggcacacctacgcgaacttgctgagaaaatgcc

SEQ ID NO: 85575 - DNA, 317 bp, Heterodera glycines
ttttttttttttttttttttttttttttgctgatggccaatagcttttcaatgtgtcccaccaactcttcgtttccgtcttttgactttcgctcattggtttttcgtccgtcggatttcgcgtgccgtttttcaaattggcaatttcgtcggcactgagcttttcgggcactactggcaattccgtgccatttacaagcgcaacaaacgctttttccaacagttggagtagtttttggtcatccaaaatttcttcgcttattttggattctttggattgcgtttcccccccccgtttcattggcctgccaatgctcg

SEQ ID NO: 85576 - DNA, 401 bp, Heterodera glycines
ggggattttttcaaattcccaaatggctttttccaaaattttttcatcccttttaatcagtttcctttttcttttacgaaaagcattttcatatactgacaattatatcaagccgtatgaagaaagttacggttcccaggagattccaaatgatgggtttaagcaaaatgatgaacaactacagcaacagtattcaaaagatgaccttaatacttatgacagaaatgaccgccgttacggtaattatgcgccacgaagtggctttccggaagattacaactttaatgacctaaatcgtgacaattatgatccaagttatgataattatattccaagcatagataatgacaagcgttattcaaagaatggtaatagttgctataatgtcaagttgccaaaaa

SEQ ID NO: 85577 - DNA, 393 bp, Heterodera glycines
gggggtttaattacccaagtttgagttttttgagtgacgtcaagcaccaatgaatatgagctataatgacaaagttggcttcatcaacagtgccagcaaacagttgggggacagattgtcggagcagaacaaaaagatgcacgaaatgttgaaggaggacaaaaacgaacggagcagcacatcgcattttgatgagggcaataaaaagggaagttcgtataattttgaaaaattttcttcatccgaaagtcgtcctgctccctattcatattcgggaaagcccgcggtttattttcgaggtcctaccatcagagatgtgccaccatgagacggttccattggtggcacagtgaccacttgggaatggggaacagtgagcaattgaaaaagcat

SEQ ID NO: 85578 - DNA, 459 bp, Heterodera glycines
gggggtttaattacccaagtttgagttttttgagtgacgtcaagcaccaatgaatatgagctataatgacaaagttggcttcatcaacagtgccagcaaacagttgggggacagattgtcggagcagaacaaaaagatgcacgaaatgttgaaggaggacaaaaacgaacggagcagcacatcgcattttgatgagggcaataaaaagggaagttcgtataattttgaaaaattttcttcatccgaaagtcgtcctgctccctattcatattcgggaaagcccgcggtttattttcgaggtcctaccatcagagatgtgccaccatcggacggttccattggtggcacagtgaccacttgggaatggggaacagtgagcaattgaaaaagcattaataagaaaaagattgtccatcgccagcaggagaagatttagacgattttgatatgatgatatct

SEQ ID NO: 85579 - DNA, 418 bp, Heterodera glycines
gggccaattaagcctaatttgatataacgaatatcaatggaacatggaagtttgccgcttcaactcattattttattcgttttaacgttgcaaatttcaactcagtcgccagaaatttcagtgccttctgatgttcaaattttgtcagcagtccgaaacgtagatttgaccactcaaattgtcaaggttaaaactgactttgagttgaaaaatggaagaaacgaggaattgagcagttttgtacatgccatgtcggctgaggaggctgcaagactttcttggatgtccgcttatgagagcggcaaagaatcgggcaaattacggatttctcgtgttagagtcaaaggggtctcatcggacatggttttccacaaaattgagtttctcgatttgttaatgtccggttccaatatcaaac

SEQ ID NO: 85580 - DNA, 531 bp, Heterodera glycines
ttttttttttttttttttttttttcccttttaattggacaaaaaaaacttcatacattttacattaacatttaaattgtttttcctacgtttgaacaaagtttcttctcttcatgaaattcgatattgtgtcaaatgttcgtcaattccgaattccttggtcaattcctcgcgtttcttctcccattctttgctgagttttgcgtgttctccaaaaacatttattttggtgggaagacaaacgaaaacatgggccaattcaccgacgaaactcgtatggagacaaatcgggaaaatgttgagcaatttgcgcttttgttctgcaacatatttgtcttcttctttctcatccgacattaaaatgttgaccacaaatgctcctgtaggttttaaaattgctttgattttttgcaatatcttttcatcagagaataccgaagcgggacaaattaaatcgatgtacatttcgcacgcatccaatgccaccaaatcgaactgttcgccgttttccgctgccttttcaattccgaca

SEQ ID NO: 85581 - DNA, 576 bp, Heterodera glycines
ccgtctgtatcttgcaccaatccatacgcattaacgttctcgtcgggcacgaacttttccgggatgacattgtccaaataccatttgaaacttttacagcccaaacgctccctcaacgctttgcgggcgcttaaatcgccgacttcaacatccttcaatcccattctgtgcacataaaacaaccgtttgtagtcgcccatccaaacttcggccagtcgcttggagttggtgccgtgcacgtccttgttgccgccagggcccgtcatgttgtacgggtggccggcacggaaaatgtgcccgacgtgggagcaggggacgacttcgatggacccaccgcacatccacaccctaaacgaaatctccaaattttcgcctccccaaatgtccattcccgggtcgtaggctccgatttcgaaaaagtattcccggctgactgcaaacagtccgccggccattgtcgggctgtccaaatggtccgcgtgtttccgcatctttgccactctctccggaatggggtccattttgaaatgcaaactccaccaaagagtgccaatgccagcggctggtccgcccgag

SEQ ID NO: 85582 - DNA, 371 bp, Heterodera glycines
ggggttctgcggcaccgacgacgcggacgacaaagtgtggagcaaatcggtgctgcagcattgcatccgcccggaccacggctatacatacgattcgcagcaaatcaaatggctgatcgacatgctgcacggatttcccaaagagaagcgtcgtcgctttcttcaattttgcaccggttcgcctcgtttgcccgtcggcggttttaaggggttgtcgcctccgctgactgtcgtcaagaaaaccgcatcattcgtcggcaacgaaaacgaactgccgtccgcgatgacttgctacaactatctgaaaatacctccgtacgaaagctacaacacatttttggaccgttttgaagtggctcttcaacatgtgt

SEQ ID NO: 85583 - DNA, 608 bp, Heterodera glycines
gggatattttgttggactgtaaaggccatgtaaaactgacggacttcggcctgtgtaaagaggccatcgaaggggaccaaaagacgcacactttttgtggtaccattgagtacatggcacccgaaattctgatgagaactgggcatggcaaagcggtcgattggtggagtttgggggcgttgacttttgacatgctcaccgggggaccgcctttttcggcagagaatcgcaaaaggacaattgacaaaatcctcaagggacgccttacacttccgccctatttaagtttcgaagcgaaagacttgataaaacggttgctgaagcgacacgtggacactcgccttggggccgggccgggggacgccgaagagataaagaaacacgcctttttcacccaccacgtcgagaattggacaaatgtttatcggcgagagatcgaagccccgtacaagccgaacatcaccagtgaggaggacgcctctctgttcgactccaaattcaccaaaatgactcccgtcggttctccgaccgccgaattgccaccaatgtccgtcaatcccttcgaaggattcacttatatagcgctttccgtcctcgaacaagtcagc

SEQ ID NO: 85584 - DNA, 510 bp, Heterodera glycines
cgggattatggaattttttactatgaagtgaaagttttgaacattaaacgttacatcaaaattggattcgctaccaaaaaattagagttggataccggggtgggggaaaaaccggacagttacggatatgtgaacggtggatgtctttggcggaacggtacggaatactctgggaatcctaaatttgctcgtgacgacactgttgggtgtggcattaatttggtcaccggacggatcattttcacgaaaaacggagagcaattggatacggccgatgtattcgcttctcccacttctcaatggttcccttgtgtttcgttgttggattcgggcgatttaatcaatgcgaattttggccccaacttcaaattcgatccttccgctgtttgagggaaaaatcgacaaatgatggattattttaatttcctttttgtcacttcgaaattcgaaacaatatttttgaattttttattcggataaaaaatgcactaaaaaaaaaaaaaaaaaaaa

SEQ ID NO: 85585 - DNA, 415 bp, Heterodera glycines
ggcagtgattgagcggtgagtttcgtccgcattccgtcgttttgactcccccaagggtttcccattcggccctctccgtcccctcgggcgccaacttcggctccgacatggtccaattccgtcaaatggcgcactctccgcccattctctccgtgccgttggcgacttcagtccatcagtcttcagctggtcgccttataaattctccgcaagctgagaatacgacagaagagtcgaacggccgactcagcggccaactgaaacattcgccgaccgtcggcagcgcagcgacgtcgccgttggcgagcagttcgaccatcggagtccacgaaatctctctttcctacgtccgtcccaacactttttcgccttcggccggggatgaccgtcgttctttgccaacctatttaagttc

SEQ ID NO: 85586 - DNA, 469 bp, Heterodera glycines
tttctttttttttttttttttttttttatctaaaaagattcaaaacaacaaatagtttaaaaagttgtggaagaaatttgttttgaaaaactaataaataaaagaggatagaataaaatctgaaaactaagcatccattctttctttctccgttagatccatccatggccctaatgatgatgtgggtcgggtccactcggtgacagacgcttcgattcattgaccggcattttctcagcaagttcgcgtaggtgtgccctcattttttctaatcgatttgcccccatttcaaattgcacaggagaggtggtggagccattgagcgattggtcacatgcgatggcaccaatccggcggcatttcctccctgagcattgcttcgcccaatcgctttcgccccacccgtcgccagggaagtgaagagcagtccagcggtgacaattcttttgatcttcgtaccaatcccaac

SEQ ID NO: 85587 - DNA, 485 bp, Heterodera glycines
ttttttttttttttttttttttagcgaaacagccatttaaacaacaaaataaaaatcaacagaaaaacaacataattccgcgtcataggcagaccattttcattcactgttattttgaagtgtttccatttttcagggcgattttggcgatcagttcgttaatcagtttgtcggtatgcaaatccaatccttctggcgacttatcagcctcacgcaatttgtttaactctttcaaaatcgtttcaggtttcgggtgcaaatcgatcagatggacaactgcttgggaagccaactgccgaagattttgagaagacgggtcttgtagaattttgaggaggacactttgcatttgggggagaaacgctttgaggaggagagagacattctccagcaatctcagcaacgcgttgacagcagcgaccttcacggggaccgggtgccgttcacccaaaattctgattaatggaccggccatgttcacaacg

SEQ ID NO: 85588 - DNA, 384 bp, Heterodera glycines
ttttttttttttttttttttttttttttttgacttaattggggatttattctttttgaataccaacaaaaaaacaaaacaattagttgaacaataatgctaataaagtgattttccattggggggctttgcatccgtttttcgtccttaatttccgttaatccaaattcggttctccgtttgaacttttgtcacgtcacgggggtcacccaaacattgcaatgcttttcggggggtattttgaattcaacggacaattgaaagcgttgcggaaggggggaaaattgcgcaaggagccgaacacccggaactttgcgggagaatgaaaatcgccgatcagctgaagggacctctcgaaatcgtcgggctgatcacaccacgggtg

SEQ ID NO: 85589 - DNA, 623 bp, Heterodera glycines
ttttttttttttttttttttttttttttttaaggggtttaaatttatctaaaaagattcaaaacaacaaatagtttaaaaagttgtggaaaaaatttgttttgaaaaactaataaataaaagaggatagaataaaatctgaaaactaagcatccattctttcttcctccgttagatccatccatggccctaatgatgatgtgggtcgggtccactcggtgacagacccttcgattcattgaccggcattttctcaacaagttcgcgtaggggtgccctcattttttctaatcgatttgcccccatttcaaattgcacaggaggaggggggggagccattgagcgattggtcacatgcgatggcaccaatccggcggcatttcctccctgagcattgcttcgcccaatcgcttccgccccacccgtcgccagggaagtgaaaagcagtccaacgggggcaattcttttgatcttcgtaccaatcccagctgatgagttgtttccactcccatcattagcagtttttttgtcaccagtagaagcccagagacggaatgagaccaccgccaaaagcacaatcagaaggattttgaaaatgtttggcattttttcggatcttttaat

SEQ ID NO: 85590 - DNA, 567 bp, Heterodera glycines
ttttttttttttcttttttttttttttcacgtatttgtttatttttggaatcaaattacaatgataaagtcaagcaaaagtgtttgattccaatcatacaaaaactgcttttgtgagaataaattaaatgagtcggcagcggcaaagtccctgagattcgtagaggcctcaacgacgagacatctgagaagacacggcacggcactcaactacggaaggaggcggccggtgacgcgggggagggtgcacagtttctccccgcgcgcatcaatcgcgataattttaaatttgtattcttcgttggaaggcgctccgacttgaaacgtcaaactgtaagactccatggagctgcgaacaggaagacttccaattcgtgcccaatcgtccaccccggacagttgcttaacaaatgcctcataacggtcaattcttcggtcctccattccgttccagttgatgcgaaagtaacgcgggtatttttcgagccaaacgatattttcagcgtgcatttttatctctttccatttgatgacacgtggcagcaaaagtttgtgcagcagccaacag

SEQ ID NO: 85591 - DNA, 551 bp, Heterodera glycines
cattccccattctgttccctcccgtgtcccatcaaaatgtgctcgctgaatggctcagtaaactgaaagtgtctcaattccattgcgcagagtccgaaaagtatgcccatgtgactttctttttcaacggtggacgagaagaggcatttgagggtgaagaacacgtgatggtcccatcgccgagggttgccacttatgacaagaagccggagatgaactgtgaaggcattgcggacaaagtggtcaaacaaattgaattaggcaagcacccgttcatcatgtgcaattttgcagcacccgacatggttggtcacaccggtaaatttgagccgacggtgaaggcgtgtgaagcgactgatgtggcaattggacgcattttggaggcatgcaaaagtcacggttatgtgctgttggtgaccgcggaccatgggaatgcggagcaaatgatagccaaggatggcggcccacacaccgcccacacgtgcaacaaggttccgttcgcctgctcttccacctcacactccttcaaaagtgcgccgcccaccactgcg

SEQ ID NO: 85592 - DNA, 277 bp, Heterodera glycines
ttttttttttttttttttttttttttttggtttttttttttttttttttaaagcttgtcaaatttattgaactcaaaaaacacgggaatttcgtaataatttctttggcatttcatcaatttaattggttttggcacaaagtgcaattgccttgcatgaaatggcctccaattggcccattagctttttgcaaattttcccaacctcagttaaaaaaatctcctcgctggaagggccacagtcgcgcggaaattcctgtccccagtcaaattccaaa

SEQ ID NO: 85593 - DNA, 577 bp, Heterodera glycines
gggtgaaatggccaaagtcaaacagacggaatggcatgagacggacatcaaaaaattttgcttcgctgaaatgagcgttgatggtctcagggcattgaaggccaaaactgctgcattgtgtttcatttttgagaagacaaccaaaaatgattgttcatgcaaagatttggagaaggaactgctccaacttgggctgccctccgaccatgtcagtgtactggttgaactctacaattcaaacagggccgcattgtgtgacagtttggcagggcctgcaatcaaagccccttcactaacagtggtgtgcaaagagcaggttccaacggctgccgacccgtcagtgaaaagtgactattttcgcttggacacaacaagttcggacgggtcaacagcaaccctgctcatccaccgagatgagttggtacagttgagaacctgcatggaagatgccgtgagagtgctcgagtcgttggtggtcaacaaagaatgatgcccgcttattggagacacgccccatgtccaatttttcaatttgtgacttgccacttaaactaaagcatggcacttacaactagtg

SEQ ID NO: 85594 - DNA, 168 bp, Heterodera glycines
tttttttttttttttttttttttttttacttttttttttttttttttttttttttttttttttttttcacattttttttttttttgaaattccattttttttgccaaataattaataaattaaggggtttaacaagggttggaatcaaagtaaatcaaattttaaggg

SEQ ID NO: 85595 - DNA, 440 bp, Heterodera glycines
  unsure (1)..(440): unsure at all n locations
gggcaatgaccagcagaccattcgcgacctttcacggaacaaacaggaaccggtgaagtcggagcagggaaaggcaattgcagaacaaattggtgcatatgcttatttggagtgcagtgcgaagaccaaggagggaatccgagaagtatttgagaaggcaactcaggcagcacttcagcagaagaaaaagaagaagaagggctgcaacgtgctttgattgggcttcgcttctgatggagggaatcgcacttaaaatgaaaaacagaatttccttttttctttggtcgttttgtcgccattttccatcaaatgctttttgtgctaatattctgttcatgagtggcgtcattcaacttgaactttcaattaaatttgactttatttttcctcttcgcaattaaaacattttttgccnnnnaaaaaaaaaaaaaaaaaaaaaa

SEQ ID NO: 85596 - DNA, 513 bp, Heterodera glycines
  unsure (1)..(513): unsure at all n locations
ggggatccaaatcaacgcggcacagtaataaaatatcaaaagatccgaaaaaatgccaaacattttcaaaatccttctgattgtgcttttggccgtcgtctcattccgtctctcggcttctactggtgacaaaaaaactgctaatgatgggagtggaaacaactcatcagctgggattggtacgaagatcaaaagaattgtcaccgctggactgctcttcacttccctggcgacgggtggggcggaagcgattgggcgaagcaatgctcagggaggaaatgccgccggattggtgccatcgcatgtgaccaatcgctcaatggctccaccacctnctactgtgcaatttgaaatgggggcaaatcgattagaaaaaatgagggcacacctacgcgaacttgctgagaaaatgccggtcaatgaatcgaagcgtctgtcaccgagtggacccgacccttatcatcattagggccatggatggatctaacggaggaagaaagaatggatgcttag

SEQ ID NO: 85597 - DNA, 473 bp, Heterodera glycines
ttttttttttttttttttttttttttccctgccaatcagtttaccaaaaatttcaaaaaaaaaaacattttttgaaatttgcaactcccaaaaaagttgaatgaaaaatgtaaatcccccaatcaacaaccatccattatccaccaccttcattatccaaagagctcgtcatcctttcttccctcctccggggccgtcctgtggcattggtctcctagttggccgggatcccggtcgagcacgagtccccggcagcgccagttgcaataccatttttttccatttgttcattggtgaagctcaaagcattttccataaaagtgttggcttttggcaacaacacaacaagctcctcgttaaatttctcaacgctcatgcccatcaattggtcgttccattcattaacagccgggggctcattagtggccacctcttgcctcgctttggttttcggggcttttccatttttagtt

SEQ ID NO: 85598 - DNA, 454 bp, Heterodera glycines
tttttttttttttttttttttttttttttacaaaattcatatttatgcgacaaaagtaattcaaattcacgaactggcaacaaaactttaagtcattatttcggaaaaacatgtgcaaaaaccaacaacaatttattacaactccaaaacgcttaaatgtctcatcaacaatactttgcaacaccaattaagcacacattaaatactaaattttcatcaaacaaatccctccgcttttttctcatcgacgggggcacgtacttggacttctgaggctgctgctgcgactgggctgcctgttgctgttgttcgtcctccttcgccttcttgggctgttgctgtgtctgtggcgtttgctgctgctcgacttccctcggcttttggggctggtgcgtctgtctttgctccttcgccttttgcgtctgcgcctgtgctgcctgttgctgttcggcct

SEQ ID NO: 85599 - DNA, 629 bp, Heterodera glycines
ggggaaatggcattttgtttctttttaacaattaccttttgtttttcatttaccttttccgtgaataacttgatgaagaaatgacttccccagcggaatcgctcaatttggacgcagcggaagtccccgaattgcttaggaaggaactcgatacgcttcacaaagcattgggtgagaatatgcaacggtacacggaatgcaaagagataaaagtggacgaaggactgcgaactttggaggcgaaggtcggcagattggcactgtccataaattcgcacaaaggcattttaaagcgggagcgaatgcgattggcagaaactgcgaaaagattggggctggaccaacgcattgcgcacaatgttcagcggacccgggataatttggcaaagagcccacaatttgggcgcgcccattccgtggattttttacacgaagtggcgactcagaatgaccaatccctggcggaacaatgcgaaaccgtcgaaaaattgcgaaaattgttggaccgactgagcaattcagacgaagagccgtcattgtcgcgaaatgacctggtcgatcatcttactcgatttgaccgcatttttgagcaagttgcttcgcaagtgtatgctctgaatgattcggca

SEQ ID NO: 85600 - DNA, 694 bp, Heterodera glycines
ccacgcgttgggagctctccatatggtcgacctgcaggcggccggaattcccgcggccgccatggcggccgggagcatgcgacgtcgggcccaattcgccctatagtgagtcgtattacaattcactggccgtcgttttacaacgtcgtgactgggaaaaccctggcgttacccaacttaatcgccttgcagcacatccccctttcgccagctggcgtaatagcgaagaggcccgcaccgatcgcccttcccaacagttgcgcagcctgaatggcgaatggacgcgccctgtagcggcgcattaagcgcggcgggtgtggtggttacgcgcagcgtgaccgctacacttgccagcgccctagcgcccgctcctttcgctttcttcccttcctttctcgccacgttcgccggctttccccgtcaagctctaaatcgggggctccctttagggttccgatttagtgctttacggcacctcgaccccaaaaaacttgattagggtgatggttcacgtagtgggccatcgccctgatagacggtttttcgccctttgacgttggagtccacgttctttaatagtggactcttgttccaaactggaacaacactcaaccctatctcggtctattcttttgatttataagggattttgccgatttcggcctattggttaaaaaatgagctgatttaacaa

SEQ ID NO: 85601 - DNA, 452 bp, Heterodera glycines
ttttttttttttttttttttttttgcttcgactttatctaccggtaaccactcattaacaaacaaaatgaaagcatttgtcaatatgatttgtttgcttttcccggggcttttcctcctctcatttcgaatgcttaaccttccaccgtttgtcagtttttcgactcgctttttattacatttgaaaagcccattgatcatgctttgaaatatcgttgcgctttggaatatgcgtcgatatgcacattgtaaattgggtgaacagattccacgatgttttggttaccactgtggattccacctgaataaatttggctaacggaaagtccaaaaagcgtatagcacgtgtggtacaagtcgggacttttgtcgggtttgtccctgagaccccctgaaggcgcttggcatgcctccaacacataggactgcaagggcaaagtgtcaaaaagctta

SEQ ID NO: 85602 - DNA, 400 bp, Heterodera glycines
ttttttttttttttttttttttttttgcatcaaaaatttaaattcgttaaagttgaaagaaaaatgccaaaagcgaaacaaaaaaaaagtaaagaattaaatggataaaaacaataaaaaatgcttaattttgaattttcggaatggccaaaacatattttccattggctcttttctttctcttccgcgttcatttcgtgccaaaaatctccgcgtggggttccttcagttctttgaccgcttcggcgtccaattgtttgttgtccaaaagattgccgacgaatttctcgccggcaacagcgaagtcatccttggtcatgtccttgagcactttcttcttcatgggaaccatttcgcattggtgggccaaacggaatttgcaaatgggcgtctttttgct

SEQ ID NO: 85603 - DNA, 526 bp, Heterodera glycines
ctgttgttccgatgttggtggtggtgcagcggcggcagttgcggccaccggctgagacaaagacggcggcggggcggtatcaaccgttttcggaacatcgacaatggaggaaagaggagcaacggcggaaatcgccataacttcatccttcttattcggtgtagacgtcggagagggcaatgagtcaacaacggttggagcagcatcagatggcgcatccggctttttctccggttccttttgaggtgagtgatccacgacaacggacgcctttttaggttccgactcaacaacgatttgatggagtttgccacttccaccattaaccattggaggaggagcaacctggccaccaccattttcgaggggctgttgctgttcagcgacagtagtcggcggacttggcacagtagcaccggcgttgttggccgcgttgtatttttcactaacggtaaccagaaaggcggtatccaaccactgaaacacatcgctcttcacgtacaaaacggtgggcgtttggtgggcc

SEQ ID NO: 85604 - DNA, 483 bp, Heterodera glycines
tttttttttttttttttttttttttttaaataataaatttataaaaaaagccaaaaatactcaaatatattaaaacgagaatatacaaaagcatgaattaattaaattaaagccagtttgtacacgagctgcgtgggcaattcaatccggcaattcttttccccgcgtttctggcaacaaaaatgttaaaaatgttgcgatgaatgcgtaaccgccaaagaaaaacattggcatcataggcgaaaaggacagcatcactcgaatcattggcgggaaaatgatgcaacacaattgcgagacgggcgtgcaaatgcccatacaaattccacgcttcgatgtcgggaacacttcgctggcgtacacaaaaagggcagtgaacgaggaagcaatggcaaatttggcgatcagccaaaggcacagttggacaaatgggggcacattcggcagccaaagaatggacgtgccagaaaagaatgccaacgc

SEQ ID NO: 85605 - DNA, 409 bp, Heterodera glycines
ttttttttttttttttttttttttcacaatcagttccaattatttatccggtcagcacaacacagcaaaaatacaatatatacacatagcaatcagtgatcagaaaagaacaatacatcgatatgaacattgatcacgcaaatatacaatagacagggttatgtacatctctgttattcgtctgccgcgctcgttctcccgttcttcagctcagctctggccctgaacgatcgccaccacgtcgatcatgacgtacgcgctcttcggtaacttgaccacttggaagaagctgcgcgcagggtacgtgtcctcggggaagaagttcttgatcgtctcgttgaccgcctggaagtcgctcatgtcggccaccatgatgttgcagttgatcacgtgcttgaaggacgagccg

SEQ ID NO: 85606 - DNA, 617 bp, Heterodera glycines
  unsure (1)..(617): unsure at all n locations
gggcagtgatatttattttttggtgtgatttaaaagtttatttgagtaaaaaaaaagtgaaaaataaatgaaaatggtggagaaagagaacgacatcgctgccgctgtgccaaacaacgctgcaaacaacggtcatgttgaagctgtcgacccatcggcatcgaagagcgctaaggaggtgccgaacaacaccgagaagcatagtgccgaagatctaatggggttggcccgtctcttcctgaaggaatattacaccaagcttagcgaccttcctagcgaagctgggattttctacggcgatgactcgcattttgtccatgctgatgtggaggagacgggccgcgagaacattcaacgcgctatcggcaacatgggcttcgaggattgtaaggctcgcttctactcgctgaaaacggtgtcgctgccgatgcaaggtgacaatgccaagctgatccaagtttgcggcgagctgacgctggtcaaggcggctgtgcaaaaacagcagcctgttcttccacgacgctttgtccaaaccatcattttggcccaccaaacgcccaccgttttgtacgtgaagagcgatgtgtttcagtggttggataccgnctttctggtta

SEQ ID NO: 85607 - DNA, 608 bp, Heterodera glycines
gggaatcacgacaaataccattaaatatgtggacgccggcgaaagtgacgatgttgtgcttgcggaactgttgcgttatgagccgtctacggcgcataagaaaatccaagcaaatggactggttgttcgcaaacggcccgaatatttgctcatgtacaaccccaaatacggactaagcatactgttgcccaagtacgccaatgtgcagagcgcgtgcgaattcgatgaaaaattttcacttggcgaattctattcatgcgcatttattcgtgtggccgagcgagaggcgcgtcgtttgacctacgaatggatgtgtaagggtgactttaaattgcatgaaccaatgctgaaaacgcggctgatcatggaccgatttgtgcatgttcatgtcaattgcgaatttaccaaggaaaaaataacgaagcttcatggcgatcattatgttcttaagacagacttgggaaatgttcgattcggcaaggaatttttaactcacaatgacttgtacgacaaatcagcgaatgtttgggtgacttttgtcaaagaaactgaaggctgtcactgggaaattgtgcaggactcgtggggctcactgctggatgacgagc

SEQ ID NO: 85608 - DNA, 324 bp, Heterodera glycines
ttttttttttttttttttttttttttctttttttttttttttttttttttttttttttttttttttttttttttttggggggggccttttttgttgggccaaaaattattaaaaatttttgggaaaaaaaggggggcgaaaattggccccccatttaaccaaggggcatgggggggcccgggaaaaaaaccaaaaattttttttttagggggaaaaagggtggaaaaaggggggggccaaaaatgtcccaaattttggaaaaaaaattgggattttcccccccaaaagggggggggggggccccccccccaaaaagggaagggg

SEQ ID NO: 85609 - DNA, 430 bp, Heterodera glycines
tttttttttttttttttttttttgcaacataaatatttattcaaaacaacaacaaaaaattcttacccgccaaaataaatttcaaaacgagatccgagtgaaattaacaataaaccaatcaagtccatgacagaacatcaattctaacaacagcaggagaaagtgaaaatcgtcctaataattatttcatttgcctctctctctctcttaattcgccgccgttcccaataagttctgaccgtccatctcctccgggttagtcagtcccataagggaaagcacagtcggggccacgtcgcacaatgctcgcgcccggggcacaccctccgcagtggtgggcggcgcacttttgaaggagtgtgagggggaagagcaggcgaacggaaccttgttgcacgtgtgggcggtgtgtgggcccccatccttggct

SEQ ID NO: 85610 - DNA, 616 bp, Heterodera glycines
ggggtccgttgtccaacaaaattcgcttcaaggaccttcaaattgcgtacattgaccattacgtcatcgcatttctccgtgccaataaacaacttttcgatggaaatggcaccgctttgaaattttctatttggtcagccaaaaacgatgtgcagccgatttgggatgttttggcccgtgacatttggcccatttttgcgccaaacattcgccacttgggcttgaccaatgctgaccatcttgacaaattgcgtcgtttcatctcaccaacaattctttctgatctgaaatggcttaattcaatcaatgcctatcgcctgttgcccgaagcaattggtggtgattttgatcagtcaaatgcaactggtggccaaattctgtcaaaatggctgcacacgccgacaaccaatggccaacccaagcgatttaactgtgtttattatcaggagccagcaattaacatcgacgaatggatcaacaccttcaaagaagcatttctccgtgccacttcttctgcttgctacgcaattcaatttgctgttcatgccacgtcgacgtccatggtgccgtttgaagaggtgaacaaacgaaccaacgagaagctgacactgatcag

SEQ ID NO: 85611 - DNA, 580 bp, Heterodera glycines
gggacaaacgagaagttctttttactgtgggctgtcctcttttcatcgccgttttactgccccgtgggtgctgtgccggtgtatttttaaaggtggcgctgaagtggcccaaaagttgcgaaattacgaattcgctgttgaactgctcgaatttcttttggaaactgatcttcttcgcaatttttgcatgagttctcgcggtaaatggtacgaacgcattgcactcaatttggaacgccatctgaagagtttggacaagtcagcacacttttgtcgactcggcatggcggatgagttggtggggaagtcggacaaactcatcctgcagcatcggctgacccaaatgaacaaccgcaagaaacagacacaaagccaaacggacttgggatttgttgagttggaagaccctgaaaagatggaaattaacgggacaactttggccaaaagccttggcgacggagaacaggtcaaccacttttacattccgacaagcgaccggggggaaatcaacaaatgcagcgtcgaggaattggtgttgcaccatttcattacggtggagcatttcacgcacgggttccat

SEQ ID NO: 85612 - DNA, 683 bp, Heterodera glycines
ccacgcgttgggagctctccatatggtcgacctgcaggcggccgcgaattcactagtgattaacgaaagaatctttcttaatcggcgctgaaatggaaattttgtttttataaacgctaataaaaaaatatagaaaaatccaacagagaattttgcagttttgttttatgtcttcatctatatgcgcgctgctttatttcaatcatcaaatgttgtcattattctcgcgtccggtcagaatgcgttccatgtactcaatgtcttttttcatcgacaatagccattcacgagtgttcaacagatcaattaattgatctggtggcaaatccgtatgtttcaacaaatcattcatttctttttcaattgtctttttaaattcgatgatcttcaccgtttgattaggatttttcgattttcgcaaaattttttgcatgcattcagcgaataattgacgactttttttgtattcatcaacatatttttcaattattggttcaaggaatggaattttcatcgaaggaattttatttaaatcaacccgtaaattgttcaaataggtttgtgccgcttcctccgccgtctccatttcactgctgcccaaattttcactttttggcacattgctttccgacgatgatgtcattatttccgccgaatgtatgccgtgcttggtagtgccaatt

SEQ ID NO: 85613 - DNA, 507 bp, Heterodera glycines
ggggggagggaagaggaggaggaagagactgacgatgacgaaataattgtgattgagcagagtaagagcacaggggaagagaagacgaaaagcggaagagaagaagcctttcagaagacacaagcaatgcagggggaaaaggaagaaaagcaaatcgatgagaaggaagaagagcaaatggaagatgaagaaaaggaggcagagcaaattggagaggaaatggaagaagggcaaatggaagatgaagaaaaggaggcagagcaaattgaagaggaaatggaagaagggcaaatggaagacgaagaaaaggaggcagagcaaattggagaggaaatggaagaagggcaaatggaagatgaagaaaaggaggcagagcaaattgaagaggaaatggaagaagggcaaatggaagatgaagaaaaggaggcagagcaaattggagaggaaatggaagaagggcaaattgaagaagaggagagagaagtgcacagccgagggggagaaaac

SEQ ID NO: 85614 - DNA, 287 bp, Heterodera glycines
ttttttttttttttttttttttttttttttatcaattcatatttatgcgaaaaatgggacccttgggataatccccaaccaaaaaatatgtaaaaaatttgttttgcgtaaaaaatgaacagaaaaaacgcttatttaaaataaataggcaactaaaaaggaaagtgtgtttgattcccaaaagtcaattaaattcccaaacaaaaatgccgtctttcattccttggtcggcacaattcactgattcatcgtccgccggttggagtgccggtgttttcccatccgtt

SEQ ID NO: 85615 - DNA, 282 bp, Heterodera glycines
ttttttttttttttttttttttttttttcctttttttttttttttttttttttttttttttttttttaaacaaattttatttgatttttgctaatttttcaaaaaagcaaataacaatgaataaaaccgtaattataaccacaaacgggtcaagcttggtggggtttcccctctctttttttttgaaagggggctggtgccttttttggattttttcgaccagggcccccgccatttaccccccaatgttcccccgggggggggtttttgcctttgccccat

SEQ ID NO: 85616 - DNA, 416 bp, Heterodera glycines
tttttttttttttttttttttttttttgggaaaaaaagtgaaagttttagaacaccaatttttgggcatgtacataaaaattttttaaaaacaaaacaacaaaacgagaagaataccaatttgatgtgtaagtgtgttatatgacattcgatgaaaagaaaattttaaaaaatttacatttcaaaacataatgctgcaggcaaatttttaattcattcatttcttcggagggcgcccatttgggttattggaaaaaggaattgcgggcggacaactgtcagctttgggttgcctttgagaagaattatcagcagaatgacgctgaacattattgtcattggcaccaacagcaacaaaagcaggcggaagtgacgcattgtctctgccccgtagtgaacggactgctgaaaaaaaac

SEQ ID NO: 85617 - DNA, 639 bp, Heterodera glycines
gggaaggctacggtcagacggagtgtgttgcggcagcaacgattaccatcgaaggtgacccagttccgggccacgttggtgtgccggttccgtgctgtgccgtcaagttgattgatgtgcccgatctcaactattttgccacgcatggtgcgggcgaagtgtgcatcaaggggcccaacgtgtttcgcggctactacaaaatggctgaacaaacggcggaaacgctggacacagacgggtggctgcacacgggtgacattggacgatggacagagcaggggacgctgaaaattgtggaccgcaagaagcacatcttcaagttggcccagggcgaatacgttgcacctgagaagattgaactcatctacatgcgttcaaaatacgtggcccaatgctttgtgcatggcgaaagtctgaagacatgtctggtggctgttgttgtgcccgattttgatgtgttgccggaggcggcgaaaaaacaattgggcattgagggaaaaacaatggaggaattgtgccgaaagcagcaagtgaaagcgatggtcatggaggacattcacgaagttggaaagaaggctgggctcttcacctttgaacaggcgaaagacattcatttgtacgccgagctgttcacggtgg

SEQ ID NO: 85618 - DNA, 149 bp, Heterodera glycines
tttttttttttttttttttttttttgttgtcttaaatttattggtttaataatataaaaaaaccgtagtataataagggttttcgtccattcccatcactcaaacacaataaaatcaccccggttgatcaatcaatgatgaaaatttcc

SEQ ID NO: 85619 - DNA, 457 bp, Heterodera glycines
tttttttttttttttttttttttttttgggtttaataacaaaagtttaacaaaaaaacaacaaatgaagtgcattaaagaaaaagcatcagtttttcccaaaaaatcttaaatgacaggggattcttgtcgaaacattcttttccacatgctttacaagaacaaatctggagtttaaacaatttgtcgatagatcggatcgggcctcgagccaaaaagggtcaattcgggaatcactgctcttaacgatttcatgctcattggattctgcagattcatcaacaaatagacgtattttgctctcttctatgctcaaaagtctcaaccgcgctttgtttgttgttgcaacgacagtccccctcatattcacatgcaaataagcgacccattcatttgaaaccaaatccaactcggcattgccaatagtaaacaaaatcgaatttgaatttaaatcatag

SEQ ID NO: 85620 - DNA, 673 bp, Heterodera glycines
  unsure (1)..(673): unsure at all n locations
ggggtcacaattatgtcagtcatgcggtggcatctttctccttgtcgttttcctattgatgccaagcccaccgggtggtagcgagcaggaaacatccatttctgtgcaaactgtccgcttcatctacggcacattcaccgctctcactgttctcggcactgccattttggcattgttaccagtgccaacagccacaacaccggcacgacaaacaaatacagtcgacggcacttcctctgctgccgctgttcgtgacccctcaacagtgtcaacggaattggcacattcgatcgatgaaggggcggaagggagcggtgaagcagtggcagttgctgaacagccttcccatctggccatcttgagttcaactgttaaactgatgggcacccgtcggatggtcttcttttcgttgccttttatgtacacgggcatcagccaaagcttttggagttccatttatccaacaacagtggcaaacacggaaatgttccagctgaaccagggagtcaatcccaaactgttgttggcattgaccgccattgtccaaggcgtgggccaagcaacatctggtttctttttcggcattttggacagtcggacacggcgttttggacgcaccaaaattgttggctntggtgccgctttgcaactgtgctcctttttgctggcctac

SEQ ID NO: 85621 - DNA, 181 bp, Heterodera glycines
ggggcacaaagcggaaggcgtctgttcaagccagtccgctcctctcgttagcatttctttcactcactccagcggacagaatcgcaactgtatcgaaatagcggagcataatttgacatcgaaacagacaattggcacgggaaaaatgaaaagaaatgcatcgattcgtttaaatgcgaat

SEQ ID NO: 85622 - DNA, 508 bp, Heterodera glycines
tttttttttttttttttttttttttttttgaaaagcaatatttatcaaaaaacacccaaaattttcagaataaaagtctcattgtcaataaatatgaagatgtctggagtaaaataagtaacaataatgaaaacctagaaatgaaacaaagaaaaaaaatcaaaaaatgcttggcacttgcaactcgtccaatttaatcacttttgtctctgggaagtgctctttcaactcatccacacccgacggattcagtgcaatggaacaaaacgactgttccggttcgaaaagtcgtcggattggcgggccaccaatcgccaacacatcctccgctttggcattccaaatttttaagcacaaatcacgtgtgaagttgttgtccacagaacgaatggttgcaaggatcgccgaattgactctcagctccaccgtgctttcctttgagatcaggttgaagatcaaactacgcttggcagactccagcaattttgcgtcaagttggcccgatctg

SEQ ID NO: 85623 - DNA, 546 bp, Heterodera glycines
gggatatctttcgattttatttgttctgctgtttgtcatttcgtttgcaactgggccaggctcgattccatggctttttgttaatgaaatctttccatcgaatgctcgtggcaatgccaattcaattgcggtcctttccaattggggctcaaatgccattgttggctactcctttccaatgcttaataccgctcttggtgagtatgtgttcttcgtgttcaccacagtgtccgttctgtgcattgtatttgcggtgaaattcatgccggaaacaaagaacaaaagcctggaggacattcaagcggaaattgatcgacgccgaggcatcaccaattagccaaagcaatgccaaacggaacggtgacttagaatgttgcacccaataaaacgtgaaatagggatttaattatttatgtgtataccaataagacgtactgcgatttaattatttaagtgtacaccaacaaaacgtgaaattgtgatttaattatttatgtgtacaccaataaacggtgaaactgcggaaaaaaaaaaaaaaaaaaaaaa

SEQ ID NO: 85624 - DNA, 614 bp, Heterodera glycines
ccacgcgttgggagctctccatatggtcgacctgcaggcggccgcgaattactagtgatttggtaacaacgcagagtacgcgggctgcaaagctggagcgtctcgaattgtttcacttgacttataccgcaaggaaattcaaggcttttttagcattcctgtggataatcttcgcgcgtctccttttttttgcttcaatacatgaaatacaatattcccgactacaaaaatgcggtaattgttgctaaaacgcccggagtcatgaacaaagcgacgtcatacagcgagagactgagaattggcattgctgtaattcacggtgaggagaagggagtccaggaggatggacggcaaagtccgccgccatcgccgacggacaaacgaaaaggcgtttcatacgaactttttccatcacaagttgcaaaggagaagcccccactgactgttgttggggatgttggcggcaaaattgccatccttgtcgacgatattattgacgatgcacaatcctttgtggcagcagctgaagttttaaaagcgcgtggtgcctacaaaatttacgtggttgcgactcacgggttaatgtcactcgacgccccttccttactcgagcc

SEQ ID NO: 85625 - DNA, 467 bp, Heterodera glycines
ggacttaagaatattatctgttcacattgggaggtggacgatgaaaagaaaagatggacactgagcgagcaggacaaagtgtctgtcaaacagcagaccattccggcaatcattcgctctcctgagccgattaggatccatctatgcacctcaattcaaaacattatgcgtaacgactttcctgctcgatgggcaaatttcaccgatgaaattttgccacttctccgcgtgtcagagcctgaaacacttatgggcactttgctaatacttcacagactttgcaaaatttacgagttggtctttgattatatataagagcacttctccttataatatatagaattcagatctaattaacattgaaaacccggtggtctgatcggtccattttgggcattgtcccacgggcacttgccctttcccagtcggaaaggtataaacggcaaaaaaaaaaaaaaaaaaaaaaa

SEQ ID NO: 85626 - DNA, 223 bp, Heterodera glycines
ttttttctttttttttttttttttttggcattatttcccgtgtaccaatggtaatttgttgttgcttgggaaaaaaaactgaccgaagcggatgcagcaacagaagacgggtgttgtggcgaattggcccaccaattctgctgattgtgaaacccaacagcgggaatttgtaatttgagaaacggggcgggcccgggagacatgttactgaccccacatgaaa

SEQ ID NO: 85627 - DNA, 247 bp, Heterodera glycines
ttttttttttttttttttttttttttacggaatgacagtgtttaacgggaaattcagtagcaatttatcgttttcggcatcactcatcttgcatgtcttctccattttcggcattattctttgtcgtctctttgtcctcctccccattttcggcattattctttgtcgtctctttgtcctcctccccattttcggcattggtttttgtcgcccctttgtcctcctccccattttcggcattattctt

SEQ ID NO: 85628 - DNA, 562 bp, Heterodera glycines
tttttttttttttttttttttttttttaaatgttacactaatgagatctctaccaaaaaaacaactttacttttcatcttcgattatattatgccccttttaatgcttttgctcatattgggccgtcaattgaatgtgaaccaatgggccactaaaaccattctttgtccgataccccttcaaaatgacggcgttaaattgttcggaaagcatcgaattcagtgcttctttccaactattccaattgttcgtactttccgactcattttctgaagcgatttgctcgtccaattcgatgccaaccaaccaaattttgaagaaaacattttttttgggattctttttattagcggggcttccatccaaattctctcccaaaatttgttccttttcaacaatttgcttcgcatgggccaatcgaatgcgatcaaatcgttcgacatcgatcagcaattggagacgaattcgcgtctccacgtagccgcaaaagtcgtaaaagtcggccaaagcgaaggctttgcaattaatgcgaatgaaatgggaaaacttttccttgaatttt

SEQ ID NO: 85629 - DNA, 600 bp, Heterodera glycines
ggggacaattaattgtccaattaagatgaaattaaacgacactgtgaaaactgattttgagaccatttttgccaaattctattcccatatatgtgacgacacagaagaaacaattcaacgaaaacagctcaaaaaactattcagtttcattgataccaataaacataatccgaattttcgcgatcggattggcccacgctgcgatctccgtttcctcgccggcctcctcaggcgttaccaatgctcagtgagtggcgaggacagactgctcttctccatcttggaactgctggagaagcatatggcgttggatttcagaattatttctcctcttgtgtttggcccttcctccaaaacttattacgaagagctgatccaatatgggcgtgctttgcacaaatacctaacacctgagcaggttcttgcctatttcgattcaaaacgaatgtggaaatccttgctgaaattggcccattttgaccgtcatttcagtgccgcactgtctaaaggatccaccgtcaatgcggcgatggaaattgcaacgggagagattgatccgagctgttacgaccctcgttttgtgcttcgtttgctcgtcca

SEQ ID NO: 85630 - DNA, 491 bp, Heterodera glycines
ttttttttttttttttttttttttttgatcttaataaatctgattgctcaatgcataaaaagaaagacaaaaattttaaggcaaccatcggaagatggttttttgacaaaaaaaattgcttctgacggggaatgtgtttaaaaaaaccgggattattccacttgtgatgaaccgtcccttctggcccaattgctccttttcatcgttgtccctcctgctccaaatttacataattgtagcagcgagtcggcaatgaatctctgatttgacccaaattctccaactcttttgccaatgtatcgatttccctcttctgcttcaccgctttggtctccgcttgtatgatccgttctcgcattttcacttcgtcgccgctcgaatcgaaacgattttccgcttctttcaacagtttctccacggggtccaattgcccatcgtccacattgtctaaggaacctaaaataaaaataaaatttcgacaaaacaaacgc

SEQ ID NO: 85631 - DNA, 505 bp, Heterodera glycines
ggggagttgaaaattttttttataacaaaatgatgaacaaaatttataccaccattcatttcttattgcttttgactgttattgctaacaaatcgactaattgtgctacaaatgttcaaggaactcaaactgttaaaacagcagatgcaacctatgatgaagctggaaaaatttcgcgtgattcatcatcaagttccgatgaagatgactcaacaactgcagcttcaaaaatgctactgaatgaagcaaatcacgctttctccaaagataatgatgagcccattaaccatcagcagaaaatgaggcctgaagctaattttagcgttaaatatcttcccccgagactgaacgctgcacaaattgacaacattgcacaacaagcatcatccatgatcacattacgcacattaaaacatgtgaaagaagttttttcaaaatttgcgccagattcatggctggaagcactggaagatattccactgccgactattcgctgcactgtcaa

SEQ ID NO: 85632 - DNA, 175 bp, Heterodera glycines
aaaatggcaggccgggtcaggtgggacacctcgctgtggacaggtgtgcccaaccatcaaatacggttcttcgtcgccaatttcgctctcacctccgcgcacttcaaagcgcccgtcgggcgccgaccgttcttcgcccaacaaatcatccggatcaagcgtgtcagcctccatc

SEQ ID NO: 85633 - DNA, 230 bp, Heterodera glycines
gggacagatggcccgtgacgccggcccgccgcgccgcctctacgtccgtcggctggtctccgatcatcagggacttggacgggtcgatcccatgttcttcaatcgcgcgcagcagcatgcccggattgggcttgcggtcgggatgatccgggtgacgatagcgttcgatcacggcatcggcgtgatagggcgcggcatagacggcgtcgatcactccgccgttctgggcc

SEQ ID NO: 85634 - DNA, 495 bp, Heterodera glycines
ggggcttaagcgtggcgtttctggggttcgacggtccggcattgaactgaacaaacctctgaacacaatttcgactcagtccaaagtcatcggtcggaaggcaatcacgcttcaagacaccgacatcacttcctcgacggcatttgtccctttggggtcaatgcgaagcgattcgatctccacgaaaacgaccgttgtggccgacaacactggcaactcgagacctgtgagtgtggcaaatcggtttgcctctctctccggtgctgcgccaaacattcgctttcaattggggaaaagtcgtcattccctccgcacaactcatcccatcaaatggccccctcgtacgatacagcagtgacattgacgacttctccacaaccgccgagccattcagcgaacttacaacagaaatggtcataaaagtgcgcaagaataacagcgtaacatttcaaccgccggcgttccgtgctccaatcgccgaacgtattcaaattg

SEQ ID NO: 85635 - DNA, 559 bp, Heterodera glycines
gggagcaagaatattgctatcttgcctaggcgggattctgacttagaggcgttcagtcataatccctcagatggtagcttcgcaccattggtctatcgaccaagcacatgaaccaaatgtctgaacctgcggttcctctcgcactaagcaggattactatcatagcaacaggtctttagtagggtaaaactaacctgtctcacgacggtctaaacccagctcacgttccctattggtgggtgaacaatccaacgcttggcgaattctgcttcgcaatgataggaagagccgacatcgaaggatcaaaaagctacgtcgctatggacgcttggccgccacaagccagttatccctgtggtaacttttctgacacctcttgctggaaactttacacattcaaaaggatcgataagccacgctttcgcggtccgtattcgtactgaaaatcaggatcaagtaagcatttgcctttttgctctacgagaggtttccgtcctctctgagctcgccttaggacacctgcgttacgctttgacagatgtaccgccccagtcaaact

SEQ ID NO: 85636 - DNA, 296 bp, Heterodera glycines
ttttttttttttttttttttttttggtcttttaacatttattactttaaataccgataaaaaattgcaagtaaatatatgaaatgtaaatgtgtaaaacacctattaattgctcattttccaatattgcccagttgcgtcttccactgtcagcacgacgtgactttttgccgatttgctccatttttctgtttctcctttcctccgtccaccgtgggacgacagttgtgaaaacgtcgatggatgcgcaaattggcggattgtgcgaattgtttatgacagaatggacactgaaaa

SEQ ID NO: 85637 - DNA, 200 bp, Heterodera glycines
acctgcggcggccgcaattactattgattagtccagtgacaaattgccggctttgatcaactgattgcttcagcttggatgcatttgcaataagaatttctcggaccaataattggtaaaaatggacatgcttttggtggcctttgtcagcaaaaaacaaaagccaaacaatcaggcgttcgatgtaaatcagctcaatc

SEQ ID NO: 85638 - DNA, 297 bp, Heterodera glycines
ttttttttttttttttttttttttttttggttttttttttttttttttttttttttttttttttttttttgggcccttttacctttattaaaaaaagggcccttcaaaagggccaaggggaaaacaattgaataatttgaaaggggggaaaaaaaaaaacaccgggggggggggaaaaaaaaaatttccccccttacaaagaaaaaaaaaaaaacctttgggtggtaaaaaaaaaaaaaccaaggggtccggggccaaaaaaaaaaaaccggcaaaagaaaagggaaggggaaaaga

SEQ ID NO: 85639 - DNA, 355 bp, Heterodera glycines
ttttttttttttttttttttttttttttgctctttgtaagggtttcatccattttctccaacgccttttctgagctgcacaccaccgaaccggacatgtctcgcagttgggccgttttcttttcattggtcggactgttcaccatttccacactcatccccttaatcgccttacaaccaaattctttgatttgctgggcattaacgtcgcaattatgtgttatcgggtccatttcttccttgggcggactgactatttccacactcattccctcgatttccttaaattgttgctcgaaaatgtcgcgatgccgtttccggttcttctttaacttcttctttttggtctttgggag

SEQ ID NO: 85640 - DNA, 533 bp, Heterodera glycines
gggcgaaaaatgaagcgacgacgttcaagaaaatctggatttgcaacgacattttggatggacattctcccctttttgaccgtcttcaaattggactcaatttgggatgtttttgtccgtcaaatttggcccatttttacgacgccgaactctcacaatttgtcgccttcttatgccgatcatttggacaatttgttgcgcctcacaacgccaacaattctctccgatctcaacattaattcaatccattcaagcagttttttgtccgtgcccgcacttctgtcaattacaacatgcagtttcatttgcccgtgtcaacgccaattgtgccatttgaattggagaatgagcggacgaaagaaaagctgacattggagaaagtgccaccttatgatgattgttgaagcgatgtccaattgaggagaagaaagatgaaaattcggcagaaatttgaacatttcttttacttttgaccacctatattttgatcaaattgtgaatatggtaaaataaatcaaataaatgtttatgtc

SEQ ID NO: 85641 - DNA, 643 bp, Heterodera glycines
gggtcgtttgaccacgctcaacttggcctcaaaatggcattgctttcgccacgttttaatgcgctggtggacaaacattttgacggcaaaacgcaatttacgatttggaaagcaattaaaattcgcaaggacaaagatgaaatgccaaaactttttgttgaaggaaaatcggagggatttccattgccggaccgtccgctgcccaacaaaatcatctttaagaagcttcggattgagtacattgatcacttcgtcatcgaatttctccgttccaatcagcagatttgggacaaaggcaccacattgtatatcactgtttgggaaaaaaacgaagataacaaaccgatttgggatgtttttgtcgctgaaatatggccactttttgcgacaaacatttgccaattgtgctttgccggtgccgaatttttggactatttgcgtcgactcatttcgccaacaattctatccgatctcaatcgattggattcaatcatttcttgtcatctgttccccgatgtgcttgctgatgatgatgattttgatggaccaaatacgacttctgccggccaagcgttggccaaatggttgcacaatccgagaaaagatggccaaccaaagtcattgcattgctgggaattgaatg

SEQ ID NO: 85642 - DNA, 544 bp, Heterodera glycines
tttttttttttttttttttttttttcgttttttaatttatttttccaacaaacaaaacgattttacgatgatactctgaccactaaagggaaaatgccataaaaagaacaaagtaaatgataataatgttttggaaataatgtgcaggtttcgatgaaaaatttgtggggaaatgcgtgtccttacagtactcatctggcgagggcacaggcttaaagatttccgaacgctcgacaaagcgattcaaagttgagtttgtctcacaaccggtgatgtttcccgtcatttcctcgaagctgggcgaattgggaggccaataaaacgcctttatatagtgctcgagattagtagcgttttgccacagctcaaacgtcacacaggcggaataatggggataaccgtcaacgtcaaaattcgttttgttgaagccaagggctgaaaacagtgcggcaattgttgtgtcatgcgcggaatatgcgaaatatttcctggtacgaatccaatcgcaaagtggcgacccaattggcgatttcagacccgaaaa

SEQ ID NO: 85643 - DNA, 565 bp, Heterodera glycines
ttttttttttttttttttttttttttagatgttacactaatgagatctctaccaaaaaaacaactttacttttcatcttcgattatattatgccccttttaatgcttttgctcatattgggccgtcaattgaatgtgaaccaatgggccactaaaaccattctttgtccgatacgccttcaaaatgacggggttaaattgttcggaaagcatcgaattcagtgcttctttccaattattccaattgttcgtactttccgactcattttctgaagcgatttgctcgtccaattcgatgccaaccaaccaaattttgaagaaaacattttttttgtgattctttttattagcggggcttccatccaaattctctcccaaaatttgttccttttcaacaatttgcttcgcatgggccaatcgaatgcgatcaaatcgttcgacatcgatcagcaattggagacgaattcgcgtctccacgtagccgcaaaagtcgtaaaagtcggccaaagcgaaggctttgcaattaatgcgaatgaaatgggaaaacttttccttgaattttgtag

SEQ ID NO: 85644 - DNA, 458 bp, Heterodera glycines
gggatggccggtccattaatcagaattttgggtgaacggcacccggtccccgtgaaggtcgctgctgtcaacgcgttcctgagattgctggagaatgtctctctcctcctcaaagcgtttctcccccaaatgcaaagtgtcctcctcaaaattctacaagacccgtcttctcaaaatcttcggcagttggcttcccaagcagttgtccatctgatcgatttgcacccgaaacctgaaacgattttgaaagagttaaacaaattgcgtgaggctgataagtcgccagaaggattggatttgcataccgacaaactgatcaacgaactgatcgccaaaatcgacctgaaaaatggaaacacttcaaaataacagtgaatgaaaatggtctgcctatgacgcgaattatgttgtttttctgttgatttttattttgttgtttaaatggctgtttcgccaaa

SEQ ID NO: 85645 - DNA, 443 bp, Heterodera glycines
gggatctggttgatcctgcctgaactgatgtgttcatttcaaagattaagccatgcatgtgtaagtttaacctgccagacagggaaactgcgtacggctcattacaccagctataatttacttgaccttgacttcttacttggataactgtggtaattctagagctaatacatgcaccaaagctccaatctccccagagcggagcgcatttgttcgccacaaaaccaagcgccctccgggcgtccagtgttgactcagaacaactaagctgatcgcacggtcttgtaccggcgacgtgtctttcaagtgtctgccttatcaactttcgatggtagtgtatctgactaccatggtgatgacgggtaacggaggataagggttcgactccggagaaggggcctgagaaatggccactacgtctaaggatggcagcaggcgcgcaa

SEQ ID NO: 85646 - DNA, 423 bp, Heterodera glycines
ttttttttttttttttttttttttttcgggtgaaaaaatctttttcaacaaaattgtatttaccttgtgcttcagtccaaaaatttctcttgtcgattgcatattttggccttggatttttttgtgcgattttacagagttggcaaattggagaaagtagcgaattttcttctttttgctgtacttccgtgtccaattgaaaaattgcatgtatcggtcagtgtcatgtcggagtgtcaacaaatgttgtgccaattcttgcgcactgcaaaagtcgtcggctgcgatgtaagcgtcgtccggcacgcccattccgcggagcaccgcccggcgcagcaccaccggcacagtcagtgcgcggaaagcgttccaaaacttctcagtcacatattgagggcacaccgaattttcaaatgccaaata

SEQ ID NO: 85647 - DNA, 584 bp, Heterodera glycines
gggatcgccaatcagttgcgttacccgaattcgcacacacattacttcagttgtgcgctgctctatctgtttttgggtgccaattctaagcacattcaggagcagataactcgtattctctttgaacgtttggttgctctccgtcctcacccgtggggcctgttgatcacattcatcgagctgatccgcaaccagcgctacggcttttggaagcacgaatttgtttattgtgccaccgaaattgaacgtttgttcctcagtgttgcaaattcctgcagtgtaagcggaccggaaagccatcactcgaacggaatttaagtttgattgcgtttaatattaaatatatgtattagtgacgaattgtgtttattctcgatcctattttcctcatcccctcccccaagtcgtcatatatactccccatgtttatttgtttttgtttttttacctttatagcaatttgtataattcagcccatgaccagaaccactgttgtgccccccgggtaattgtaaaataaacagcattattggtccttttacttattttttttcactaaataaaaaacccttcaaaaaaaaaaa

SEQ ID NO: 85648 - DNA, 367 bp, Heterodera glycines
ttttttttttttttttttttttttggttaataaaatttatcaaatcaacaaagcaatggaaaaatgtgaaagggaatgagttcttctgtgctcaattggtaaacagtgcgatttgtccgtctgcgcccgaagtgagcagccaccgctgggtggggtggaaaacggcacagagaatggccaaccgatcgttgctcattgtcagtgccatgcccgccccttcgtccgctccttcatcgtcttccccctcgacatgtggcttttccccgtcggcactcttttcctctccgccctcgtctaattttgttgtccttcgcaatttgtccaattcgcgtttggcgaaaaatttgtggccaaaaagtcgtttcac

SEQ ID NO: 85649 - DNA, 303 bp, Heterodera glycines
ttttttttttttttttttttttgtaatctcgaacatttattttctgtcaacataagcacaataatacatacatatcaatcaggaggaaattgggagtgtgttcagtaaacaataagtgccggaaggaatgcctggaggggaaaggacaaatggtgtgacaaatattatatacaatatacgagcaaatagatcagcgtcctcgcggcacgtcattcggttcattaacgccgttcaattatcggtcatccccttcgggttgccaatcgcgcgcattttatccaatgccttctttgtcttctcttc

SEQ ID NO: 85650 - DNA, 601 bp, Heterodera glycines
gggggcaattaattgtccaaataagcaaaaaatgtactcaaaatatttttttgaaaattttatgaaatttttgacaatttttgttttcattggcattcactcgccaaccgttgctgaagttattcatcagcttcctgaagacaatatttgtgccaagttcacagttcaatttttggaggaattttatcaacaaaattcgtcttctccaatattcggatggattacagctgaaggcgatgtgacacttggccaacagaatggcacccattttggcattaaatgtttggcattggcactgtccgattgggacttcgtcgtcgaccgtgcatgcttaatgacattggcaccaccaaattcccatcggcgttttattgcaagcccatggcatcaacaaaatgatcaattgaacaatggcacaaatcaaacagctgatcaaaatgtcagctacattgtaccattgaaaagtgctgaagtgcgcagtccgcaactgatcagttttgtccaaaaatgggcgaataagcgtccaactgctcgaccatgcattttcccaattgacgacaaaatcgggtccaaattgagttggaatggcaccatttgtggc

SEQ ID NO: 85651 - DNA, 501 bp, Heterodera glycines
ggaaaatctcttgttttttcactttaaagtttgtatacttctgtgctctgttcccatattttctgatccttgttttgctcatccgtggcttaactttggagggtgctgggaaaggcattatattttatctgaaaccaaatatcacgaaattgaccgacacgacagtgtggaaagatgctggcactcaagtgttttacagttatggcgtcgggtttggcactttgatcgctctcggctcacacaacaaattccaccacaactgctaccacgatgcgatggtcgtgtgtgttatcaatggaatgacttcaattttggccggttttgccatcttttccgttcttggccatttgtccgagtctgcaaaaaaccaatcgctgaaattgtgaagcccggtgttggacttgcctttttggcatatcctgaggttgccagtaacttgccgttcaagcagatttgggcatttctgttttttctgatgatcacaattctcgggctggacag

SEQ ID NO: 85652 - DNA, 489 bp, Heterodera glycines
gggattgagaatgtagttgatccggtgttaagccggacgattggatgaaagcgaccattgacaccatcataatgaccattcgttgaaattgccaggtatagcaccgcctctttcaacaacaaataatcaatattgctcattccaaaacaaaatgtgacggaagatcccatcgccttatgtgacttactcggggctattggtgaaacatcgaccgcaacaacccaagacttacaggatttgacggagaaaacggatgtagtggaacgactacggaaagctttggaattgctggagaaagagaagaccattttaagaatgcggaaccaaataaaggaggacgttgagcgaaaagtgaacgaacagcacagaaaagcagtgctttacgaacatctgaaagcaataaaacgggaacttggtatcgaaaaagaggacaaacgagctgttcttgagaagatggaagaacgattagccaacctcaaagttcccgag

SEQ ID NO: 85653 - DNA, 248 bp, Heterodera glycines
tttttttttttttttttttttttcttttttttttttttttttttttttttttttttttttttttttttttttgggggaaagggattttttgggttttaaaggaccaaaccaaaacccctttgaaaaggaaatttaataaataaaaaaccaatttaaaaaatccaaaaacccttggggaaaccggggaaaaaaagtttttttaaccggccttttttctgggggtttttttttttttttgggggccaaaa

SEQ ID NO: 85654 - DNA, 515 bp, Heterodera glycines
gggcgtcattcgtcgtccatctcgtccaattccgatcggtgccattgttcgctcaaaagccgtctgggccattctgatcgggcactttgccggcgattggggcgcatacatgatggcattggggttaccatcttttttgaacgacgtgctcggaatgcagatgacttcaatgggttttgcctcagcgataccatatgtcgtctattttgcggtgatcaatctcggcggtcatctgtccgattcattgctacaacgtcagctgctctcaacgctgaactgtcgacggttggcaatggcattggcactcggtggccaagcatttttcctgctgctgatcagcttttgcccttgcggctatgataaattggtgatcgcgctgctcacattatccattggcatttccggatttcagtattctggctttgtaatcaattacctggacattgcacctgagttggccggcctactgcttggacttggcaacactctttcttgcttggccggctttcttggac

SEQ ID NO: 85655 - DNA, 576 bp, Heterodera glycines
gggggcagaggcgccttttttaccctttaaaactgagggccaacatttcggatgccaaaaaaacctaaaaatgcgctatccaatcttccaaatctttctgattatgtcttttatttgtcgctttaaatcggcggtaatcttccgatcggacacaatgaatcagacggattatggcccaatggttcttgctcataatggcacatctccgagtgatcaggataaaattcaagatgaagagactgatcactggctaacattaacgcaaactgatcaaacaacaactgatcagaattcaacattgagcatcgattggatgagcaacacaataatgaaagccgatcatgacgcaactttgagcttgggagaagaccatggacagactttggaagccaaaaacgatgatgaacccaatttggaaaatggtcattatggcacaactccgaccgattacgagccaaatgaggagaaaaatgcagtggataatgctgatcataatgatatggcagtggacggcgcgcatgatttatcctcagcagaagattatgacgggaatgattcaattagcgctaaaaatca

SEQ ID NO: 85656 - DNA, 511 bp, Heterodera glycines
ttttttttttttttttttttttttcgcatttaaaatttatttttaataaaaaaaatatttacaaaaacaattgacaaataaccgaaacaaaatgaataagcgaaaagtgcaacattggcctgaaataaatgacatataaacgaccgacggaggacgccgaccttttttaatagcaaatggggaaccgttcccgggagaatttccatttttgggggtcgtccatcggactttgtgggttgaccaaacgtctttcatgaaaaacggccgtcccttcaatgtctaccaaaagcactgaagtggacgttgttccgtaatttattccttcggagcttccatcgacgaaaatcgaacaaagaaatttgtacgcatcgctattctgaggacagccggtctgttggcgaatctgatcgtcgggaaaaagtattgtcctgtcggaggcaatgccaaagagagtttggaccaattcccactcagcgcgacgggcgaaatcgaattcgtttagcactttctc

SEQ ID NO: 85657 - DNA, 623 bp, Heterodera glycines
  unsure (1)..(623): unsure at all n locations
ggggactagtgatagtccaattaagagtaataaaataaatttggttcgtcataaatcttaaaatgcttcacggatggcgagtttttgcctcatgtagcaaatcggttttgaaatcgccttccttacaatcgggtggctatggtttgtcgcgaagactcaagagcgatgaagttcgtggtccagttatcggaattgacctgggtacaacgaattcgtgtgttgctgttatggaggggaaacaggctaaggttatcgaaaatgcagagggctctcgtaccactccatcaattgttgcgtttaccaaagacaatgaacgactcgttggtgcaccagcgcgaagacaggcagttacaaacagtgagaacactttatacgcgacgaaacgactcattggccgccgctttgatgaccctgaagtgcagaaggacataaaagttgtgccgtacaaaattgtgaaggcgtctaatggcgatgcttggcttgaagctcaaggaaagttgtattcgccttctcagatcggcgcttttgttttgatgaagatgaaggagacggctgaanagtttttgggcacttccgttgcgaattctgtcgtcacagtcccggcgtatttcaatgactcacaa

SEQ ID NO: 85658 - DNA, 593 bp, Heterodera glycines
gggcaaaaatgagcaaacggcgccggagggcagaggcaccgtattccgaatggaagacagactcagactaccgtacacccacgcggttgaaagccttcgcttgtccaaccttcttccgctgaacctccacaaagtgcttcaaacggacgtcgaaatcggtggccataagctcaaaaagggcaccgccgttgtcaatcaaatcgcaacagtgcttttcgacgacaaaattttccctgaccatgagaagttcatgccgagccgttttttggaggaagacggaaaaatgcgaagagtggacgaattaattccgtttggaatcggcaaaaggtcgtgccctggcgaaaccctcggcagaatggaattggtccttttcacggcgaatttcttccacaaattccatgtttatccttgtgatcctttaaatccgccgaaatttgaaaagcgacaaacattcgctgtcaaattggcggattacaaatgcaaagtgacgaaaagaaagtgagaaaagagcaaatggaagtgccaatttggacattattaagcacatccatttaactttttgctgttgaaattgccaaacattcgcttaatta

SEQ ID NO: 85659 - DNA, 607 bp, Heterodera glycines
gggcctcagaaaacattcgctaccaatgagaaatatgacccggaaaaggcgggcgaggaaaagtttcaaaaagtgaacgaaccttggcacagtgtgccgtacagccctccgaccaaagcattgcttttcaatgccatttccgccgccattggcggcacgcctttggtcaaattgcagaggctgccgagggaagacggcattgaggcggaaattctggtcaaatgtgagtttttaaatgccggtgggtcggtgaaggatcgaattgctcgtaaaatggtcgaattggccgaagcgaagggcattctccgtgccggccaaagtacgatcattgagcccacctcgggcaacacgggcattggcctggcactgatggccgccattcgcggctaccgctgtatcattgtgatgccggagaaaatgagctgggagaaggagtgcgttctgcgcgcgttgggcgcccaaattgtgcggacgccgtcagagaagggatacaccgatgcggacagtcacattggggtggcattgcggctgcagcgggaaatcctcggggccgtcattttggaccaggcaaaagaagcgggtggatggggaaacacgccacggggga

SEQ ID NO: 85660 - DNA, 527 bp, Heterodera glycines
gggaagaaatatttctgtttttcaaataatccaacgaaaatccgcgtaaaatgtctaataaacaacaaaagaacgcaaactttggacagagatggcaacttgaatcgaatacgtccggaagtgattcgaagacctttctttgggggcagccacctgattttggatttactgccaagactcggaatgatttggtcgggcctcttccgccctcacaaggcgtcagtccgtcgaaaaaaaaaaagccgagttcaaagagtcgtgtagacgcattccgtcccccgtgggaggacagttcggaggaagaaaaggagggcaccgcgacagagggaaagggcacggaggaaaagcgctgggacatggaggagagtgggtgggggcagcgcacgacggaacaggtcggaagttcgtccgttccgaatgctgaagtcacaaatgtcgcaagtacttccgtcgatgttgaccaaaacaaagacaaaaaccgagtggcccagcagcctttcttcggtcggcggcgacgtgtcgtcagc

SEQ ID NO: 85661 - DNA, 442 bp, Heterodera glycines
ttttttttttttttttttttttttcgggagttgtttatttcgatattttgtacgcatatttacgaagacaaatgatgattggcaatagtctcacaatcatttgtaaaagcgctaatatataatttattgagtaacaattaataaatgtataaaagtggaagtgaccttaagttataactccaattggtaaacaattaaatttaaaggcagaaactcgggaagttgtcgaatccatcataagtcatacgttccatcattttgtcttctttgagtcggctttttttacatttggcgatttcttttcgtccgataaaacttccttttggccatttgctttctcagcgctttcttttgcatttttcttggcactttgttgctccttccttcgctcggcttccttcttcttaagcgccccagttgggaacacatagtcaataatgca

SEQ ID NO: 85662 - DNA, 292 bp, Heterodera glycines
gggcaattcactcaagtcctctccaagctctacgatgactttcaggagctcagagccgtagaggaagtgaacgtgaacaatgtgcttaagaaggagccgccgaaggaagcgatcaccgattccaacgaagagtcacccaaaaaagagaccaagtccactgattgatattgagacaaattaatactcattcttattggaagacgattaatgtttagaccaaattattttggagttgattgatattgggacagtttttcattgttgaataaaaaaaaaaaaaaaaaaaaaaaaa

SEQ ID NO: 85663 - DNA, 626 bp, Heterodera glycines
gggaagtttgaggttaattattttgtccgtcctttttgtcccactcaaaaatgctcagtcgaatgttgtcctcggctgttgccgtccctcggatgtgtgaatcaaacaaaaaaattgttgaggaaaggcgcgactttcgttggtcttctccgtgggcgaatggccaactcaactttcactgccacagttacccctcctcatcggctcttacgtccgttgcatatcaacgaaaaaaaattgttcggacctggtcccagtaacatgccaccactcgtccaggagggactcgttcaaccgttgctcggacatatgcatcccgagttcttcgaaattatggatgatgtgaaagccggcatcaaatacattttccaaactgagaatgcgctgaccttcgctgtttcgggcactggccatgccgggatggaatgtgccattttgaatctgctggagcctggccaggccattttggtggtgcaaaacggagtgtggggctcgcgggcagcgaatttggcggagagacttggcattaaagtgcatcgattggtcgtaccggagggagaagtgattaatttggacgattttgccgaggctgtggataactaccgtccccaagtggcattcgtttg

SEQ ID NO: 85664 - DNA, 220 bp, Heterodera glycines
ttttttttttttttttttttttttttttgccatttatttttattttaatgttattaattttgataaccatgcgggaaataaatgtacaattttattgtttgttgtgtcccaattgtgttgcgtttgctgtctttttcactcttttttgctgttaaacgatgcttcgcatttgctccgattttcccaaataatgcgccttcaaaaaaaaaacgaactcgtc

SEQ ID NO: 85665 - DNA, 630 bp, Heterodera glycines
gggatttggcgccaattttgggcccatttccgccccgtccacctctgacgggccccatttcccggacaatgtttggttcctttgtgaaaattacgtcctgcaatccgacgcggcattggaaacggtacacgaggagtttgacatcatttttgcgctggcctgctcaaaatgggtgcatttgaattggggcgacgcgggcataaagcggctttttctgcgcgcatttcgccaactacggacgggcggtcgctttgtgctcgaaacagcgccgttcaaagattaccgaaagcattgcaaaaaggcggccgccgaccgaccgccggacgaagtgttgcgaaactttggtgccattcgactccacccggacgaattcaccgcctttctgctgaacgttgtcggcttcagtcaccacgaggagttagacagtgctcactccaaggcattgggcatttctggacgtctccaagtgttctacaagggccaatttatgctgacggacgcgccggagggcgctcgggacgaaacgccgggggcgacgccgcaacaacaacaatgaggactgaatggtgatgatgatggttgacctttgatcgatggtcgctttcatgttttttcttcatgggggaagca

SEQ ID NO: 85666 - DNA, 440 bp, Heterodera glycines
tttttttttttttttttttttttttttgctggtgtatgttgtttatccacattctttaacaaaaaaaacacattttcatgaaaaccctaactgggtcgctccaccataattttctacatcgtcgtggggggggaagcgcctaaattagccgacaaatgaaaaaaatcgtgtgcgtgccgggccattcatttcatcatccatcgggcagtgggcgccgctcaatgctttttcccctcgccgccggtgtcccccttctttttgtgcgcattgccgggccacgggggttcgtagccaacgccaggcacccaattagtggccgggttgtgcaataaaaaatgggtgccgtcgccccaagggaaagggtttcgacgcgtggccaaatattcgtatgcgacgtactcagggcgtggagaatggggcacattctgatgggccttcca

SEQ ID NO: 85667 - DNA, 520 bp, Heterodera glycines
gggaatgtcaaggcgggcttcatgatggccaagctgttcgcgccagaaattgaacagagcggtggagggtccatcgttttcaactcgtccatcggcgcctatcggtccccccagggaattgctgcttacggcatcacaaaaacggcactgctaggtcttaccagagctctggcagaatcacttgcacccaaagggattcgcgtgaatgcaattgcgccagggattatcaaaacaaaaatgagcaaagcgctttgggaaggcattgacgaacggagcagtgccgaagccattggcacacttatgggacggctgggaatgccggaagaatgtgctgcactcgtcgcttttctctgctcttccgacgccagttacataacgggcgaaactgtgccggtcgccggaggcgcctactcacgattataaaagggacagacaaagaagaaagaaaaacaaacatctattaaaaaataaaatacaaattgttgcaaagtagaatattcagaagaattttaaaattttt

SEQ ID NO: 85668 - DNA, 417 bp, Heterodera glycines
tttttttttttttttttttttttttgcatagttgtccttttatgtcgggcttcatcttttcgctcccaattggggtaaaaactttgtaattggaatttatcactacatttgctaaggacttggggtacgttttgaactcaaaatgggtattggcagcgcaataaacattcactcgataaacaatttccgaattttcatccaatttcggccatatatccagcttgaaatagctgccaaattcaattcttttcgttgcgtcaacattgccatcaataaacacaattggggggtccagcataattggttttagccaagggctccagatagtgtccttcttgatcaaagcaatgccaatttcgaaccctttttcgcaatcattattgccaagtcccaaagtgacaaagtcgctttcgtttc

SEQ ID NO: 85669 - DNA, 406 bp, Heterodera glycines
ttttttttttttttttttttttttttagtacattcaaatttattcaaatagaaaatccaaaaattacccgaagtacaagaataaacgtctagcaatctacaaatttactccaatttcgaagtcgaactggtgaaaagttgagccctcccttcttgggaggacacggaacggggaatgaacatttgcttctgagacgaagtgccgggaacgatgtctccgactgtccgtttgccgctgagtcgtcgcagaagtgcagaacctttgcgactctggtggttgtttttctgttgggcgggtggcggccgtcgcggcttcttgcgcaagggtttgccaatgtttcgacgcgggtcgccctcttttatggaggggctggacaatggaacgacatggacagtgagttcattgc

SEQ ID NO: 85670 - DNA, 535 bp, Heterodera glycines
ggggaatctcctcgagagtctcgaacctccgcctcgaccaaaaatcagttggtccaattacctcagggcttccgacgaacaaagccatttggggagaccgattcagaccaaagtcaccactaaggacgtgagtggaatgcttgccatgagcaccgattttccgatcagcctcaatttggcacttgacattctcagcgtcatggagccggtgaatccgacggtggccaaattacgcgaattttgcaccgctaaactgcctgaggggttcccggtacgcgtggaaatgccaatttttgcgacgattcaggctcgggtcatttttcaacaatttcgctggtgcggtgaaggcgcctctccagcatttccggatgcaatgttcagaacaccggacgattatcgcgaggacccgaagagattcaaacggatgtagacagataaataaatactcattagtcttactaagtcattatcgttcattttgtctttcttcattcaacttttctcggtgccatcacactgaatactcattgtaatt

SEQ ID NO: 85671 - DNA, 393 bp, Heterodera glycines
ttttttttttttttttttttttttttttacaaaaagcgtttttgggaattaaaaatttgtcgcatttaaaaggataaaattttaattaaataaggaaaaaataaaataatgccttcaaaaaaaaaaagcttaattcaaagaaaaagaaagaaataattgaaaatgagttttgaattcaattcattttggggcagcaaaagaataaattaccccatcgaaagaatgggaaatgtttttttaatcatcgaatgccttggctaataccccgccgggtaagtcgcggttttcccaccaaaatcactgttcccgtggataaagccgtcctccatgacaatcagtgcttgaacaacgcttggctgcttttcaattgccgtcatgctctgattgcgttcc

SEQ ID NO: 85672 - DNA, 437 bp, Heterodera glycines
tttttttttttttttttttttttttttttttccattaaattttatacagaaataaaaatgggattacaaataattttgataaatcaaaaccaagtgcctcccgcgtttcccacttgtgaagtactgaaagctgcgtaatcgttccggggaaaatagggagccggacgattggtcgtccactccattgcaaattgggatttctttaaagcactgttcttgagtgcttccgggtggaaatttgatgcggaattagctggaatgttacgaggataacgatttaagccaaacggttgaaaagtgccatagcaaaacggagatcgcatcctcgcttgagtcattggccggggaaactggttagcatatggatgggaacccactgacctcccatacattaagtgcggtcttggccgtgaaggatcatgatgaaatggccaatg

SEQ ID NO: 85673 - DNA, 353 bp, Heterodera glycines
tgttacgacttttgcccggttcaagccactgcgattaaatcggttccagtctgcataccgaccgaagccggaacactaaccgtccccgaatttctcgaaatggctcagtcccgggcagcgacgggcggtgtgtacaaagggcagggacgtattcagagcgagttgatgactcgcccctacaaggaattcctcgttcacggacaataattgcaatgtccgatcccaatcacggcaaattttcaccggtttaccaacccctttcggggaaggacaagcacgctgattttgccagtgtagcgcgcgtgcagccccggacatctaagggcatcacagacctgttattgctcaatttc

SEQ ID NO: 85674 - DNA, 492 bp, Heterodera glycines
ggggggcccgggaacagttcaccaaacagttggcacgcttccgtggatttgagaaggccgagcaacaaaacgtgaaacttttcgacgccaaattgcgccagcgtctgtgtgtggctgacattgaccgtgagcgcgtgctgtcgctggaggacgagttgggaaaagttaaaacggaactcactgtgcaggcccgggagaatcgccagctgaagcgcaagtacgccgcactggagacgcgtacgcgagaatacgagacggaactcgaaaacgggcgggagcagatggaacgtgccaagcgctacattgaccaggagaagagaccggagaatgacgcacgtcgcacactgctcaaattggctgaaatgttcgagtcgcccattcccacaacatcgaatgtggcccgtttacgcaaacagtttgacgacgacgacaacgatgctgatgacaattagagaccggacactgcttcaatcgattaaccgaggaaagatc

SEQ ID NO: 85675 - DNA, 474 bp, Heterodera glycines
tttttttttttttttttttttttttaattcaaatttatcatttcttgacgaaaatgaataataatatggacaaaggcaaaaaataatttttttggttcatttacaacggatgttttggttggaataggcactcactcagtaaggacaaatgggatgcaattatacaatgacctaggagaaattaattgaaagttcatggtctgggaccgggatgatttggagggatcagtgaaaaatgggaacattttgaataaaatggacagaaagagacatcgcagtgaaatctaaacttctttatcattcccaaagtgggtaataaaagtttcgcgtgctaatccggcatggaaaggggaattcgtggcagcgtttcaagcaaaaggacatattctgtcaggcgattggacggctcaacgggcagcctggccaacttccaatgcaagccgagcttgtcgtacaattgttggttctcatggt

SEQ ID NO: 85676 - DNA, 565 bp, Heterodera glycines
ggggactcttttgtagtccttaagttttaattgttaatttttaccgaattcctgaaaaatggctgatccgaaaaaggctgtctgcgtgctcgtcggtgatgcggacccatccgtgaaagggatgattactttcactcaagacaaggaaggttcacccgtgtcagttcagggcgaaatcagtggtcttgagcctggtcttcacggcttccatgtccatgcctacggcgatttgtccaacgggtgcacttccgccggcccgcatttcaatccaacaaacaaaacgcacggcggaccgcaggatcaaatccgacatgtcggtgatttgggcaatgtccatgctgggtcggacggaattgccaagctgacattttctgaccatttgatttcgctgtgcggtgccaacaacattgtcggtcgtgcgcttgtcgtgcacaaatccgaagacgatttgggccgtggtctgggtgaaaaggaagatgagagtaagaaaaccggaaacgcaggggctcggctggcgtgtggaatcattggacttgcaaaaccatgactcgccagcgacggagac

SEQ ID NO: 85677 - DNA, 108 bp, Heterodera glycines
tttttttttttttttttttttttttctttttttttttttttttttttttttggtgactttgtactggtttttggcgagggcaaaaaaaataaaaaaacatttgggggg

SEQ ID NO: 85678 - DNA, 296 bp, Heterodera glycines
tttttttttttttttttttttttttttttttttgaaaccataatttccctcgctgtgttttatttgaaatataacaaaatgaaaaacattgcgaaaggggatcaatcctcttccatttctacctcactttcgaatcttttcacattgcctccccttttcagggctttcacttttctcgtttgaattgcgtccctactttgtcttcccgtgtgcacttgggccactttgtttcccaatgcctcaaatttcaccttctttttggcacttttctgaacttcctgggggtttctgagtgc

SEQ ID NO: 85679 - DNA, 336 bp, Heterodera glycines
ttttttttttttttttttttttttttttttgctcatccacagcactaattttttgctgctgtttgttaatcagtaccatgggaatggcgaacaaacttcacatttttgaaaaacacctaaaattccaagttgttgtcctggtcaattttgtagttgaactcctccggggtgccggtgccgtccactttgacgtgccgttccctcagccgacttttttttgggtcgtacctgaaaatgatttcgtgtttggagccctcccaataattgccaatgaaccggtcgttagggttgaactgccaatcggggttctttttggaccccttcacccatttgctg

SEQ ID NO: 85680 - DNA, 550 bp, Heterodera glycines
  unsure (1)..(550): unsure at all n locations
ggcgggcccgggaacagttcaccaaacagttggcacgcttccgtggatttgagaaggccgagcaacaaaacgtgaaacttttcgacgccaaattgcgccagcgtctgtgtgtggctgacattgaccgtgagcgcgtgctgtcgctggaggacgagttgggaaaagttaaaacggaactcactgtgcaggcccgggagaatcgccagctgaagcgcaagtacgccgcactggagacgcgtacgcgagaatacgagacggaactcgaaaacgggcgggagcagatggaacgtgccaagcgctacattgaccaggagaagagaccggagaaggacgcacgtcgcacactgctcaaattggctgaaatgttcgagtcgcccattcccacaacatcgaatgtggcccgtttacgcaaacagtttgacgacgacgacaacgatgctgatgacaattagagaccggacactgcttcaatcgattaaccgaggaaagatcgtcgatttttctgtatttttcataagactaatttacaataaaatgtatttttaagtna

SEQ ID NO: 85681 - DNA, 388 bp, Heterodera glycines
tttttttttttttttttttttttttgttgaattttatttaataaaaaattaataatttttggacaacctttttttaaattaataaatctttgtccaaataatcaatcagtatagctttttatcgctgattgtaccctcctcctcctcccattagaatggcagcacactggacaaattgaacaccaatgaagggccaaagttggcacggatggcgtccttgttgtcaaccaaagtgacggcggcaaaaaggcggaccggatcagcagcaagaatccccatgtccaatttctcgccattaagcgtaaagaaaacatgacggttgaatgcgttcagtccacatccaattacatcgcccgtcgtgaactgcggaaaaccgtcaaggggtgcg

SEQ ID NO: 85682 - DNA, 324 bp, Heterodera glycines
tttttttttttttttttttttttgccaaaatgatgatatttgatacctgaatttctgataacagttccgcgaataacgaaaatggagtaacaaaacaatgattgaatggacacaaagcaataatctcgaatcacgtttattgggtcgctttcccttttttcgcaacgggttgactgggcaaaactttaccaggaaatgactttttcccgcaggggcaactgagtcttggccaaattggccagcagagagaccattagataatctcggagcgaatgctccaccaaacactttatttttttggggggcaattgcgtgttcgccagt

SEQ ID NO: 85683 - DNA, 425 bp, Heterodera glycines
tttttttttttttttttttttttttttggttattggacataaaagtcacatgtaaaaagggtataaattaaatgtttgggctcattatcgacagtgatttaaatatttcaaatgaacaaacacttctttctcaccaattacgggaattatttttcgaccattgacagttccaacgctttacgtggcatttcctcctcctctttgaattcctccaggcgtcttttttcttcagcctctgaaagctccaatgctttgagtaaatcgccatcaatcactgcgccttggcgttcatttgcgagttcaaaattggggggcaaactttcttcgatggcttggtgcaattgttgtgcataaattgaccaaatctgttgcgtgtcgggacccacaaaacgggccaacaaataaacatattcgtcctccacgtc

SEQ ID NO: 85684 - DNA, 185 bp, Heterodera glycines
ttttttcgtcaatgtgcacgtttggcatgcccgaaaacgtgcaaaggttttgttatatgaaaaaaaaacattttgccaaaaatttaatttttgattcttaacagtatgccatgatgatgaattaccgcaacatggacaagaagattacggtaatagcatcaacagtacaacaacaccaataagca

SEQ ID NO: 85685 - DNA, 360 bp, Heterodera glycines
tttttttttttttttttttttttttttggggatttatccccctaaatttccatttctccacaaaacaacaaaaagattttatggcaaatttggtcaaagtccccttcttccccaattcaccctttaaaattcgtcagtgtccaaaaccacccgccaccccaaattctcgctgtccaacaactgttcgttgagcataatcaccgaattgtcaaagcgataattgtcttgaggggaacaacgcaatttgaaaatgggcgggaaacgattgcacaggtcgaccaaagcgttggagttgggcatgggggcgcccatgggcaccaattgggaagagatttcaagcaaatgctggacccggatggc

SEQ ID NO: 85686 - DNA, 525 bp, Heterodera glycines
tttttttttttttttttttttttttttcgcaaattggttgaaatgataacacagagatacaacacattgataatggggatcaaccaacaacagacacttatgggcgcttaaacagtaaccaggcgacataatactgtacatacagtgagatacaataatacaatctttacagttgggatcatatgtgggaatagggtcagttgaatgtatcctcctcctcctcccttttcggggggtgtcttttgcatcctttcccatccatcggtcgtttgtcgtctcatttcatcgcgtgcttctgcgtccattcacgggcatttcggttgtactgctcgcggtcgttgcggtaaataatcgcgatgtccatttccagcgcactatccggattcgggtcgcaaagaagcgaaaagatggagagcagcactttcgaaatggtcaacgacggcgcccaatgcgtcgtcttcaggacgtccaaacaaatgccaccctgcttgttgacgttcggatggtaaacgggcgtttcgaatt

SEQ ID NO: 85687 - DNA, 139 bp, Heterodera glycines
tttttttttttttttttttttttttttttcttttttttttttttttttagggggttaaatttatttaaaaaaattcaaaacaaccaatagtttaaaaagttggggaaaaaatttgttttgaaaaactaataaataaaaa

SEQ ID NO: 85688 - DNA, 373 bp, Heterodera glycines
tttttttttttttttttttttttttttttaagggggttagatttatctaaaaagattcaaaacaacaaatagtttaaaaagttgtggaaaaaatttgttttgaaaaactaataaataaaagaggatagaataaaatctgaaaactaagcatccattctttcttcctccgttagatccatccatggccctaatgatgatgtgggtcgggtccactcggtgacagacgcttcgattcattgaccggcattttctcagcaagttcgcgtaggtgtgccctcattttttctaatcgatttgcccccatttcaaattgcacaggaggagggggtggagccattgagcgattggtcacatgcgatggcaccaatccggc

SEQ ID NO: 85689 - DNA, 555 bp, Heterodera glycines
  unsure (1)..(555): unsure at all n locations
tttttttttttttttttttttttttttgcaattntaattttatatttgcttatgcaatttgtttgtcttttagttcccctttttcgtttgataatgatgacttgttaatgtttttttttgcatttttcattttgcaccattattgcttgggctgtgcggaaattgcgcttttcgcgactccgaaaacttttagcttttgacaaaaaacaaattaagaattccgccaattttctgcgttcaactatttttttttcaaattttcccggggaagactttttttcatttcataaaaaaattatttagacaatgttaaaagttttcttcgtattttataacatttatttattctttgatttaatccaatttttttgatccattcataaatattattgcgatttatgcctaattttttcgctatttttccttcaattttactccattctctattcgaatatttttttcctttttggtttattttttcttttattttatagaattttccacttatttctcttttttttctgggcttcggttcttttttcttcccatttttct

SEQ ID NO: 85690 - DNA, 238 bp, Heterodera glycines
tttttttttttttttttttttttttttttagcaataatataaatattattgagaacatttgattcaaaaaaaacattttaacatattgacaaccaaatccgagccaaaacatccaaaattctgggccaatcacttccatcattttccgttgctttacttgtaagtgccggcacacactttgatttcggcccatttgccaattatttggaattgggcgtggaatttcactccgttggcg

SEQ ID NO: 85691 - DNA, 197 bp, Heterodera glycines
tttttttttttttttttttttttttttctcttttttttttttttttttttttttttttttttttttttttttttttttttttttttttttttttttttttttttaaaaaggggaaatgggttttttttttaaaaattttttaaaaccattttttttttttttggggggggggggccctttttttaatttaaaaaagg

SEQ ID NO: 85692 - DNA, 314 bp, Heterodera glycines
tttttttttttttttttttttttttttataaataaattctatttattttcaatgatatgccaaaaatgataaataatattttgtgtcatttgtcccgttttgttccgtttgtaatttgtccagttggccattatagtgccatttggctgtccatttccgtctcttcccccatgccctccaattcgtccgcctcgccgtccatggcgtcgtactcgagcagttcgccctttgccaattggtcaaagtccgacttttccgcccccaagttgtcgaccgcctcagtgcccaagttgttttccttcgccaccacttcc

SEQ ID NO: 85693 - DNA, 416 bp, Heterodera glycines
ttttttttttttttttttttttttttttttaaaaatttgatgggtttaataaagtaagtttaattacaaagcatgacacaaagtttattacataccctttgaaaacatatcataaaatcaattcccaaatattttacaggcctttttttttgcaaaattgtcgtgaaaaaattcacaacaatttttcgtatctaccctaattcgtgctagggccggcgaaattgggctgaaagccgatgggcagcacaccgtaaaccaaccgtgccgccttttgcgccacccgctccacgttgtaatcgcccgggggtttgggcgtgttctttgccttctccgccgcgtcataaatcgccttagggtggttgttttccggaagccacccgtacacacgggccgccgcgcgttccgccacgcggttc

SEQ ID NO: 85694 - DNA, 256 bp, Heterodera glycines
tttttttttttttttttttttttttttaaagttgcctttattctttacttggcaaaaaccaaaaataaataaaacagcgaaaaatgtttaaattaatgaaaattaaattaagaccaaaatgtccaaaagagaacataaataaatgggtgtatatatgcatatgtaagtttaagtgaaagttagcgtagtaatggccgcgtagttttctcttatttcctgctccttttgttcgattttggttcgctgcctggggaaa

SEQ ID NO: 85695 - DNA, 298 bp, Heterodera glycines
ttttacgttttttttttttttctttttttttgaaactttccaatttatcaaaacagtccacgaatgccaaaaaaaacattggcacattttttcaaaaattaattgcatcatagaataattcatcaaaaaatgggcgattttacagtagtaactcacatttctcacattttacagtatccaatcaacagaaagagggccggcccatcataataaataaaaatattaaattgcaataattaattattgcgcatttttggctgcttttcctccatcattttttggcttccaaattgccgtc

SEQ ID NO: 85696 - DNA, 528 bp, Heterodera glycines
ttttttttttttttttttttttagcgaaacagccatttaaacaacaaaataaaaatcaacagaaaaacaacataattccgcgtcataggcagaccattttcattcactgttattttgaagtgtttccatttttcaggtcgattttggcgatcagttcgttaatcagtttgtcggtatgcaaatccaatccttctggcgacttatcagcctcacgcaatttgtttaactctttcaaaatcgtttcaggtttcgggtgcaaatcgatcagatggacaactgcttgggaagccaactgccgaagattttgaaaagacgggtcttgtaaaattttgaggaggacactttgcatttgggggagaaacgctttgaggaggagagagacattctccagcaatctcagcaacgcgttgacagcagcgaccttcacggggaccgggtgccgttcacccaaaattctgattaatggaccggccatgttcacaacgtggggtctaagtcccgcctcactgctcaaagggatgagttgcg

SEQ ID NO: 85697 - DNA, 447 bp, Heterodera glycines
ttttttttttttttttttttttttttttctttcattattttataataaaattataatttatttaggggcttaaatttatctaaaaagattcaaaacaacaaatagtttaaaaagttgtggaaaaaatttgttttgaaaaactaataaataaaagaggatagaataaaatctgaaaactaagcatccattctttcttcctccgttaaatccatccatggccctaatgatgatgagggtcgggtccactcggtgacaaacccttcgattcattgaccggcattttctcaacaagttcgcgtaggtgtgccctcattttttctaatcgatttgcccccatttcaaattgcacaggaggaggtggtggagccattgagcgattggtcacatgcgatggcaccaatccggcggcatttcctccctgaacattgcttcgcccaatcgcttccg

SEQ ID NO: 85698 - DNA, 530 bp, Heterodera glycines
ggggaagagtccaccgtaaatcaccagtcgccaaagaaaaaggcgccaccaaataacgctcgggtggccaggagaccgcgcgatttgcgtggactgttccctcgggcacaccgaccaatttcctcggcaagcgaacagccgaccacccaactgaagtcgaaccgattgttcgcgcgcattgacgagtcctttcggagccgttggcttaaactacgctcaaaatcgacttcgatggtcaacattacaggcattgcctcctcgaaggctcctcctttttcccatgggactccgtgggccaatcggcatcacatccatcagccattccagtcccgtccgatgacctgctgcttcggaatggtgccaaccccccaagtcacaatgggcgcttgttttgtctccctattgcacaacattccaattcatgtcaattgttgtgcccaatatttccacccggccaaccgtaaacagtttatgatcatcggtgccgagcagggcatttttgcaatggatctcacacacctcaccacgga

SEQ ID NO: 85699 - DNA, 461 bp, Heterodera glycines
tttttttttttttttttttttttttttcgttgttttacttcagcaaaattataaatgagataattggaagagttatatttattaataaaaaactttttttacaaataaaaatttacaaaaattagcaactataaattttggtctatattacgaaaaaatgattttccggggatctctgattgatttcattgatgctcttcagtcgagcatcaccgactatgggggcacgtccaccggttgatgaccgtactcatcctgtccactgccaataccgtagtcgtccgtttgcccactcattgccccgacctcctcctcatataggtcatcctcctcctccgccgatgcatcaaattccctgctgctggcttccgttccgtagtaataattctgataatcatcattatcatcggccatgtccaaattggtggcagtcgaagtgtacgatggcaatgagttacggt

SEQ ID NO: 85700 - DNA, 395 bp, Heterodera glycines
ttttttttttttttttttttttttttttgcaagacaatcattttattgtttacattaggcataaatattgaaaaaaaggcgaaatgttaaaatattcataaataaaatgtaatgggagatacacaccacttcgagcagtacacccgcaacagcacaacagaagagtcagttccataccttcaacagactgtcccatgagccagtgcacagcgcagttccatcgttgggcacccccaaacaccaaattcggttgtcgtggccggaaattattcccgtcctttcaacgcgcattgagtcccacaaattgcaattaaagtcgtcgcaccccacgaacagcaaacggcccgacttggaaaaggcaacacttgtaaccccccaaatgatgttgtcgtgcg

SEQ ID NO: 85701 - DNA, 467 bp, Heterodera glycines
ggggctgtgtccacgccattcattatacctatattctccttaacgaaacacctcaacaacttttggaaacccaaacattcgttcattcattcatcgcaaaatgcaagctgccaacaggcgccccatttgtctgatctgcttgaagaaaatgacccaagtccgtcaggtgcgcaccatctgtgaccacgtgttccactacgtctgcttccaccgttggctcaaatatcgtctgttttgccccgtctgtctgctcaactttcgcacggaattgtatcattcgggaaacgccgtgtttgagggcgcgtacgacgatggacacgttgtgctcatacctgatggtgaacaaagcaacagtggataagtgatcggcactcatctccaattgtgatcggacaaaagcgatatctaattttgtattgtacataaataggttattcggacaataaaactgtaatgtgaaaaaaaaa

SEQ ID NO: 85702 - DNA, 524 bp, Heterodera glycines
gggccgctcaatttggcatcgatcacttcgtcactcaatgcttcgccaactccaccgagctttgtcagtccggtgccacagccgagcagcagccaaatgataccatcagtcggtcaaccgcaacctcaacagcacggactgctgctgacagtgtccccaaaaaagtcgactgcagtggtgacagatgcggagaatgccagtgccattgtgccgaatggagacgatgagcaggcgatgaccaattctgcaaacaaaaagcggacggactatttgagttgggacgaatttttcatgggagtcgcattgatggcagcacaacgcagcaaagacccaatcacacaggtcggcgcatgcattgtgaaggagaacagcatcattggcattgggtacaacggaatgccaattggctgcaacgacgacgaaatgccgtggggaaagggcgacgctaacccgctgaacaacaaatatctttacgtgtgccacgccgaaatgaatgccattttgaacaaaaatagcgcttccgt

SEQ ID NO: 85703 - DNA, 592 bp, Heterodera glycines
ggggctcactttggtcatttactcgttggacaccgttttgcttatgctctttccccgcccatcggctggcgtcggaatggattttggcccatatctgaaattgaccgccattttcatcgtcctctctacttttgggctcggcttatcattggcccacatgaaaaaaatgctgcaaatcggcaaagaattggccaaacaaaacgaaacgacaaaaacagcgtcggccacttttgttggacaggacaatttgcgaacacttcgggcattcaccgggtgtcaggccggcctttccgtactttccatttatgtggccgcctcattagcatttatgaaattttggtatgtgcgtactcatctcgtccaggagttctcctgctctttgatggccattactttggccgttgtccaattttttgtgcttcgaatggccaatggcggcggattacttctgatcaaaggaattgttttggccaatgcgtgccaaattgtccaggaattgaacatgtctctgtccgccttttacacctttttttacgcgggtcggatttacgacgcggttgaggagcgcacttcgttcttcactggtccggag

SEQ ID NO: 85704 - DNA, 431 bp, Heterodera glycines
ttttttttttttttttttttttttgcatttattaatagtaagattcgttatgaaaataagggtcagtgggcttttttcgattcaacatcatttgattcagtgccagtccacgagtctctaaagcctagtaagtccctgtccaaaaagggggcctttgcatatttgcgaaacaaattcagaaattgtaatgctgccgaatgtaagtcccaagtcacttcaatgccgggcactttgtatgagtcggacatacagtttctcagtttaaaaacagcgatgagcacttgtttgatgtcgtcggatggctctctgattcttaaaaagtcgacgtaggaaaagtcgcgatatttattcataaaatagagtaaataatcggccacgaaattgggccgtgtggtcgtatccaacaccaaattgcaaatggccaatttcat

SEQ ID NO: 85705 - DNA, 415 bp, Heterodera glycines
tttttttttttttttttttttttttttttcataaaataatttattcaaaagcggaaaagtcgcaaagctttcacatggactaaagaggagtgggagagtttaaacagaaaaaggaacgggcgaatggaaccgtcacaaagcgattttcaaaaagacctaatgatgaccaacaattaacacaataaagaatgggtaataagttaggaatatttggtcaataatttgactgctgtttaaaaaaataaaattctgtgagtgattatgatgacaatgtgaaggaatccccgcaaaactgagtttatcagccgatcaggtgaggaaaatcccaaagaacacaaagaatgccttcagaacgccgaacactttgataatcagccaacggttgcgggaaatgttgttgaaatacttgagcaac

SEQ ID NO: 85706 - DNA, 544 bp, Heterodera glycines
gggtcaatcgaaattcgttgccaattccacaaaaagcgctgccaaagaaagtcgtcggatttaagagcatttcaatcaaatacatcgaccaaaatgtcatcgcttttctccgccattttcgacaacttttcgcctcgtgtacaattaatttggacatctacactgacgatgaccgcactttggatttgatgttgcgcaacatttggccaatgatcgcgaaaaacatttgcagcatggaattgtccggacatgctttcagcggtttgcgacaattcgtgccgtcaattctcaacgattgtccatcgcttcgtgttgtcgatacctattttggtggctttttcgccgaatttccggccgatgacaatgccaatgcttcgaatggacaagcgtgggccaaatggctgttcactcctcgtcctgacaatgtgccaaaggtgttcaaatgctggttggatgggaatttgtcctcgaggattggagccttgaaagcggcatttgccaatgcttcatctcccgtcaatttcattgttgtcatttggcaatt

SEQ ID NO: 85707 - DNA, 613 bp, Heterodera glycines
gggatcaacacccgttttgcaaacaacaactgcacccaaacaaatcacggacaaagcgaagtgcaacgacaaagaagaaatccgccgagtttgtgagagctgcgaagagtacgcatgcgtgcccaaagacggatttgttgcaaacagtgcgtgctgtactgacaactttcagttccagtgctgcccgaacaaccaacagcagcggcatcctgggcattgcgcaaatgaaaccaaaaaaatcatggacttatgcggctgtggcacatactggtgccggccaaataagggctatcgtggattcggctgttgcccgagtgactacgaattcgtctgttgccatgttggcaatcaaacaattcaaatgtcaacagtgacgacagtgacgccggaattgaccaccacaacgactttgccaacgacgccaaatcttggcaaaattgagaacgatcctccgcttttttgcgcgttgaaaaaaacctgcaatccgtccaataatatgacgggctcggagaaatttggccggcgtttcaacacacataaaaaaaaatgtgccgcattgatcaaacggcagcagtcggcaccatcgacggagcttaaatcggaattgcgtcag

SEQ ID NO: 85708 - DNA, 213 bp, Heterodera glycines
  unsure (1)..(213): unsure at all n locations
ggggacaatctaattgtccaaataaggaatgtctttgtccgacgatttgaatgtccaaatttattctgcgaaatcgacggttgtgcagccacctgagcacgaaaagaagttgaagatgttctacggggtttgtagggacgactatctgactagttatgnngcggacaaaaaacgcatgaaattggagaagagcaaagactggaagaaaaagga

SEQ ID NO: 85709 - DNA, 383 bp, Heterodera glycines
ttttttttttttttttttttttttttggcagaaacaatttatacacatttatcgatgatctgccaattttcctcgtttatgtgattcaattccgtcgcaattttagccggggactggttttcctcctttcctttttcctctttcttctcattctttacaagccaatcaacaatggttttccagcaaaaacgcaattgttgcgggggttggattaagcccatccgatgccgcctgatgaacacgaccaatgcctccaaagagtccattttttcgtccaccgttcgatcagctcgttccctttcatcattttccgttccattcttttcgccctcttccacttgttggcctttccatttcctttcgaacatactcaaaatgctgtc

SEQ ID NO: 85710 - DNA, 578 bp, Heterodera glycines
gggccaactaattttctcccaatctaaaaaagtctctctaattaatactaattagtacaaactgctgttgatttgatcacagaatgttggttcaactcgtcctccttgccatcattggcatttcctttgtcggtgctgccgcgccgccgtacggcgcaattgtccgtctccggcaccaaattggttggctcaaacggcaaaccggtgcagctgatcggcaattcgttgttctggcaccagtggtacccacaattttggaatactgaaacagtgaaggcactcaaatgcaattggaattccaatgtcgtgcgcaccgcaatgggcgtggaacagggcggctatctgagtgacgcgaacaccgcctaccgactgacggcagctgtgattgaggcggccattgcacagggcatttacgtgatcgtcgattggcacgcgcatgaggcgaacgcggacaaagcgattgaattcttcaccaaagttgcgaaagcgtacggctccaaccctcacttgctttacgaaacgtttaacgagccgttggacgtgtcttggaacgatgtgcttgtcccgtaccataaaaa

SEQ ID NO: 85711 - DNA, 476 bp, Heterodera glycines
ggggaaaatcatccaaatcaacgcggcacagtaataaaatattaaaagatccgaaaaaatgccaaacattttcaaaatccttctgattgtgcttttggccgtcgtctcattccgtctctcggcttctactggtgacaaaaaaactgctaatgatgggagtggaaacaactcatcagctgggattggtacgaagatcaaaagaattgtcaccgctggactgctcttcacttccctggcgacgggtggggcggaagcgattgggcgaagcaatgctcagggaggaaatgccgccggattggtgccatcgcatgtgaccaatcgctcaatggctccaccacctcctcctgtgcaatttgaaatgggggcaaatcgattagaaaaaatgagggcacacctacgcgaacttgctgagaaaatgccggtcaatgaatcgaagcgtctgtcaccgagtggacccgacccacatcatcattagg

SEQ ID NO: 85712 - DNA, 115 bp, Heterodera glycines
gggactttcccagggacggaattttctctgtgtaccataattagcattttttgataatttggctactttatctcttgacaaatcacacaaatattcgtcgatgggcggcctaacc

SEQ ID NO: 85713 - DNA, 421 bp, Heterodera glycines
gggatgccgaagtgatggctcttcggggggcaagcaaagtgttggacagcttcgacctgagcgggtgcatactgtacacgagctgttacccatgtcccatgtgtttgggcgctgttttgtggtcacggattagcaatgctttctatgctgctgcgcctaccgatgccgcttcggtcggtttcgatgatcagaatttccacgaatttgtctctaatccgaagaaatacgaaaaactgatggcattggaacatttgccagtcgaagggcatatgaaagtgttcaaaatgtgggaacagagggacgagaagagaatgtactgacaaagggccaaccaatttattcaatttacatttctcatttgttaatacatgtgaatagtaaataaattggaaattcaaaaaaaaaaaaaaaaaaaaaaaaa

SEQ ID NO: 85714 - DNA, 161 bp, Heterodera glycines
tttttttttttttttttttttttttggaagcataaaaattttatttaaattacaaattattctatgggcatataaagtctgaaaagctcaagtttttttcatcaaatcaggcctcccacaatttctcaatttccttctcaatggtcttcgggtctttgggc

SEQ ID NO: 85715 - DNA, 403 bp, Heterodera glycines
tttttttttttttttttttttttttttctgggccattctttcaatgtctttgcgtataatttccctgagctcggaaaaatctttcggaggacgcaaaagacgttttttaatttcactgtaatcatccgaagcattccatgggtgccaaaatccatttgttccatcaccttttcctgcggttctttccgaatgcttttgtcgcacatcacttccgatgctaacagcgggaactcgacggacaggtccagtaggcttaggcgtaaaacgtttttgtaataaaaggaaagacgttgaaagaaaccgttcggagaataattccgtcgtctgacagacacagcgaggagacaatcggacaattcgattgaaaattctcaataaatgaagatgccggaaatttgctgac

SEQ ID NO: 85716 - DNA, 537 bp, Heterodera glycines
  unsure (1)..(537): unsure at all n locations
ggggacacattttttcatttgtcccatcattttaaaatattccccaaaatgcgtgttctcccccttctcttttctgccctcctcctcctctctgttggcctttgctttgcccagtttgatcagtctccgtccgctgctctgaatcatgtgcgggccaaaagaggctacaagccgtggaagaagcaatccttctcctcttcttcaagcgaaatgtacagaaggagaagacccagtggtaacggtcattacagggattacaacagctacggtagcaatggatactatcgacgaaaacccggcattttagaacgggcgctgggaaaaattacgcggagctattaacggacgagcagaagaagagaagcaaaaagccaaacaatgggcgtaacacttttaattgatcaaacgatattacagtatccaacaccaaaattacagtaaccaaacatccaatggaacgaatgactcatttaattcagcaaatttgctggaattgccgataaagaaacttaccannnnaaaaaaaaaaaaaaaaaa

SEQ ID NO: 85717 - DNA, 275 bp, Heterodera glycines
ttttttttttttttttttttttttggcacaaataaaatgaacaattaacaaataattgactaataaaatatggaaaatgtctgtaattgtacgcaacatcatttcccattccatccgtttgtcctcttttcaagggtatctcctcaatatttttttgcgtttgttgcgccaccacagtttcaacgcggacatcggatggcgttggtgcaaccgcacgtccaacaaattgaaattgttgctgcgcaacacggacagcacgtggtcggcgcgaaaac

SEQ ID NO: 85718 - DNA, 397 bp, Heterodera glycines
gggattcattgcatttcctcctatcacttcattcccaaaatgtccttccttcgtctgatcacttttgttcttctgatcactctgtgctctttgccttctctggtcgaaagcggcctcattggcattgtcggcactcccgttgaagccgcttggtgcggtgttttgggcaaagaatccagccattgccctactgctggaggcggtcaacatggcggaggaggaggaggaggaggaggaggaaattacggtggtggagccccgggtggaaattacggcggttccagcggctcatacaatggccatcgcgcacgccgattcccttgataaatgacaaataaagaaagtggatgatgatgaagtgctgctataaataaaaagtaaacaaaacaatctatct

SEQ ID NO: 85719 - DNA, 466 bp, Heterodera glycines
cggggaaaggggtcaaaagttggctaaacgcttcctccaggcgctctcggttttcttgattggatggtaagttgagcaaatgagtaacgaaggctttgaatgaatccgggccgagaaggatgagggaaaaaagtgcgcttgaagcatcactcagcaaatccaactcgaagctgtactccatggccaattgaaacattttcggaaccaaggccagaagacgttcagtcattgtcgcatatttccccgttttcttcacggagtcttcgacacaatttgctgccaatccgttgacaatttcgagcgcagaacggactctgtccccgccgaaagagtagtcgagagcggctttcacacaacgcaaaatatcgtcgagcatttggggcggactttgggcaattccctcggcggcgatgtccgaaacaaaaatgagcagccgaaagaaagaggcgcacaaatgcggcacatt

SEQ ID NO: 85720 - DNA, 579 bp, Heterodera glycines
ggggacgcagcggaaaagttccctttgtcggcattcactcggccgcccccaacaaaaattgttaaagccgacggggacaacgacggaacgccagcgccgccgctcattcaaacggcgaccattgcgctccaatcgttgctccgacttttgcaacaacaaaagaaggtgcgcgtaaatgctctgttggtcacccaaatcggtgtcaacgggccagaatacggcgagttcgcgtgtgtcaatgtgcggctcgaacatggttatggcctacggatcgaaggccgattcgcgcgcatgaccaggaaccggcgaaatcggcaaattcaaccgctgtgcgaaaaggtgtgcaatgcggtggtccaactgttgaagtgcgacagcgccgcctcagcgacggcgcgaattcgacgggccaattgttgggctcgtacggcgtgctgctgggcgagtggccgactggaagacactgaatgtgccggaccgtgccattctgaagcgcacagtgatgaacatggcggcggtcgcgaattgactgaaaattgaaaatggacaaaatgaaaaactgcgtgtttttttgaccaa

SEQ ID NO: 85721 - DNA, 184 bp, Heterodera glycines
ttttttttttttttttttttttttttttctttttttttttttttttttttttttttttttttttttttttttttttttttttaaaaacctgctttttttttcgggttttttttaaacaaaaggggttccatggggttaatttccccccaattggggttttcaaattccaccctttgacccccct

SEQ ID NO: 85722 - DNA, 302 bp, Heterodera glycines
ttttttttttttttttttttttttttttcggcaccatccagttcggcttgatgccggactttttgaaggcttccatgaccttcaggcgcttggagttcttcttgaccttgagctcggagccggtcatgtcgttgcgcaggcgatcgatctcgatgtcgagatccatttcctccagcagcttcttgatgccctcggggcccatcagcgcgatgaactcgtcgccgtactcgacgcgcttggcgtcgtagtcgtcctcgctcatgatcgaaaacttcttcagcggcgtcatgcccgagtcgacg

SEQ ID NO: 85723 - DNA, 428 bp, Heterodera glycines
tttttttttttttttttttttttttttctttaaaatagctattaataataacaattcaagacgacccaatttttaaaggatagaataaaaatttccatttcattaatctatgatataaaaagatagaaagtgtgtgttaaaaagggggaaattcgtaaaatggtaatatttgaaaaagtgtccctatttgtcgtcagcaaatgatacttctcaaattcatctgttcaaatccaactggttctggggcctatgaatcaggcatgaagtttttgttcttctttttcccagtcggaaaatgaatgatgatgagggggggattgcttcacttccgcttcatcctcaaaaaaatgatgtttgggtgatgaaggcaaaaaaaaatgtttgggggatgatggcatcactggtgatgatgaggaggaatgatgcgg

SEQ ID NO: 85724 - DNA, 645 bp, Heterodera glycines
gggagtttgagcacattcatacaaatataatacatacttatatttaattatttctgtttttccaaattggcttaatcaacaaatgtcgtctcccagtgccggaaaacgaagaatggacacggatgtgctgaaattgattgaatcgaaccatgaggtggtcatcaccggtggactgaatgaattcccggtaaaattttatggcccaaaaggaactgcttacgaaggcggagtttggcgagtaagggtcgatttgccggagaaatatcccttcaagtcaccttccattggcttcatgaacagaatttatcatccgaacattgatgaagcatccggcacagtttgtctggacgtgatcaatcaaagttggacagcactttatgatctttccaacattttcgagtcgttccttccccaactgttgacctatccgaacccagcggatccgctgaacggcgaagctgcttccctgtacatgcacaagccggacgaattcaaggcaaaatgcatggaatatgtgcgcaaatatgccaacaaagaagccttggaggcgttggacaagaagacaatgaaaggaacggagaatgagggcgacgcgggcgaagagtcggacgattcgaccatttctgatttttatgaagatgaaac

SEQ ID NO: 85725 - DNA, 352 bp, Heterodera glycines
ttttttttttttttttttttttttttgcatgatgggtttatttattggataataaatgtgattgtgacaagagtaagtaacgacaaagagctggaaaggaaatgattattcacatacagacgccgaaaaaagcccattatacaaaatgtatgcaattacaaatggactaattaaaatgaatgagtaaatgaggagcgaaggaataagggacaaatatttagatgattttatagtttaattccaaagcattgcttaattaattagctcattaaaattaaagaccaaagccgaaaaagcatcgttttcttttatccacctcatcataaatttcctcatttcgttttccattgcc

SEQ ID NO: 85726 - DNA, 363 bp, Heterodera glycines
tttcaactggactgaacacaacagtgtggcaaattcctgccccctctttctctctgctcctcagtttcttttttctctctgtggcagcagcagagggcacccggccggccacatgaactatttctccacctcattttctctgtccacccaaacgactttggatttaacgacgtataacgcaccgcacttttactctcttccgtactgatcaacctccacatttactccactgtttctcaacttcacatttctctgtcacgacagacagcaaaacgcggcacactgtgggaatggtggggaatgccagacactgtccacgccgggcgggtgggaaacggcgtcagtgaacaacgagcgcgaccg

SEQ ID NO: 85727 - DNA, 377 bp, Heterodera glycines
ttttttttttttttttttttttttttttttttctgttctcttcgttaactgcgcgaaaagtgccgtcgtaaaaattgacggaagaaaaatgaatgattttcggatggccccggtaactgtccctcagctggcaaaaagtccgtccctccgtgtaaacccttttttgtccattaattctaaaaaaattttcttctgctctcattggggccattaatcgttccatcaatgacaaatggcaccatttgtaagccttgaaaaaatgcgcctttacaacggggcccaattgctggtggtctccccacaaaaccacccgagtgtttcttgttgcgaaacgtgtgatcggaatcaaagtttcgggctcaattgactgacccgct

SEQ ID NO: 85728 - DNA, 353 bp, Heterodera glycines
tgttacgacttttgcccggttcaagccactgcgattaaatcggttccagtctgcataccgaccgaagccggaacactaaccgtccccgaatttctcgaaatggctcagtcccgggcagcgacgggcggtgtgtacaaagggcagggacgtattcagagcgagttgatgactcgcccctacaaggaattcctcgttcacggacaataattgcaatgtccgatcccaatcacggcaaattttcaccggtttaccaacccctttcggggaaggacaagcacgctgattttgccagtgtagcgcgcgtgcagccccggacatctaagggcatcacagacctgttattgctcaacttc

SEQ ID NO: 85729 - DNA, 250 bp, Heterodera glycines
tttttttttttttttttttttttttttatgaaataatttattttcgaagaattaaattccaaaattcggcgtcgtatttttatcactccattttttgcatttgttgcttcacttttttaatggccggctttgtgggggcgatgaaattgggggacggagtgaaataagtcgaagccttcccagacgcctcctccttttgcattggcgtcacaatttccaacccatggacaggggtaaaccaaatgctcga

SEQ ID NO: 85730 - DNA, 349 bp, Heterodera glycines
ttttttttttttttttttttttttttttatttttttttttttttttttttttttttaggaaaaaggttaattccgaataaaaatgaaaccaaatccctttgaaaattgggaagggggcaagggatttgggaaaaattaaagtgaaaaatgggtaatcccccttatagaggcaggcgatggccttaaaccttaatttttgagaaaatggcaatggggcccctttaacttgaggggttaataatttccgggaaatatttgggcaaaataggaaaaatgttaactggcccttaatcacataaaggggaatttttaagctggccatgggaaaaaataaataaatttgaaaatg

SEQ ID NO: 85731 - DNA, 272 bp, Heterodera glycines
tttttttttttttttttttttttgggcgaaattggggatttaatgtaatcaaaatcattcacaaaatgtcaatatgtctcaataaccaaattcccattgggcgggattgggactctttttgccgttcatccccccttcgcctttttcttccctttgggggccactgggtccacttccataatgcccctgtgaagggggaacaaaaatgagatgggaattgaactgatggggaaaaacaaaatggggggcatggagttgcgctcctttttttc

SEQ ID NO: 85732 - DNA, 501 bp, Heterodera glycines
gggcgaaatgttcaattggttatccaaaaggagagtgccaacaaaatgaatttgcctgccatgggtgctctcctccatacgattttggaaatgccaagaaatgtggtgaaggttttcattacaaatgccgcgttagaagaatgtgccgaaagtggaggagagccgacgacgcaacttttcgattcggtggacattgtaccgtatttaaagccaaaaagtgtggttgaattgcagaagaatccgccgagtgaaaagaatgaattggagaatgagataaggaagcaacaatttctgttggaacatttgcatggacaggtccaacaaatgcgcgaggagcgattggcagagagaacggcgaaggaagagacaatgtgggaagtgcaggcggcgataacaatgctaaagcggcggttgaagacgttaaacgaaaaggggcagcggcacgacggaagagagggcgaagaaggtgacggaaatgtgaccggtgggacggcggacgga

SEQ ID NO: 85733 - DNA, 299 bp, Heterodera glycines
tttttttttttttttttttttttgtaaattctttttacccgaaatggaacaaataaataaattatatgttcgtttttaaaacgattcatttaaaaatgacgagcgaatcgtaaaaagcgaagggaatggagggacagatacaacggaaagtccaaaggcagccttggttacagagaaacaaaataggaaagactgcgacaagacggagaaagacagcggaagcagacaatccaacaaattaatagccgtttcatccgttgttcacactgtccttctcgagcccaaccaatgaatacacg

SEQ ID NO: 85734 - DNA, 499 bp, Heterodera glycines
aggcaccaccgactgatcaactgcgggtacgacaaaagtgtgctgaagcgggtggatgtgaagcagttgcagctgtttctgcagggggccgtcatgccgacggttaacgccggtcttttggcctacgcggagacattcaccgcaccggcgcagcagaaacggtacggcaacaaaggactgctccgcctttggaatgcactgaagactttgctggacgaattggacgaggcgatgcgcgtcaacgaagcgacgatgggcaacgagcggcgcgagtatcagcaaatgctgcgcaacgcgtacgaaaacactgtggagaaactgaacagggcattcgcacgcggcagagagtcgccggcgatggacaaacggcggagtatgagcatcgacagggcgaagcggagcagcaagcagggcatgctgatcagaccgatttttgctttgtgataagcggggcgcgacccaaaaattttaatataatgacgtgcggatttaattcgct

SEQ ID NO: 85735 - DNA, 565 bp, Heterodera glycines
gggcgtggcccagtccagcattgacccggctatgttcgacgcctctttacgcgatcatttgaacgttactgcaccgagaacaatggcagttctcgagccgcttagacttcgcattaccaattatcgagagttgggttttataccagcgaaaagcaccttacgggtcaaacaattcccatcctcaattaatgaaagtacggacgaatgggaaatttcatttgacgagtttgtctacattgagcaggctgattttagagaggttgccgaaaaaagttatcgtcgactgacattggaacagccggtgggactgcgtcatgtcaatttggcagtcaaaattgacaaactggagcgggatgagcacggaaatcccatcgaattggtggtaactgcgaatccggtgagtagtgagtgtaagccgaaagcattcattcattgggtggcgagaccggtgctttgtgaggtgcgtctctacgacaaactatttgtacacaaaaatcctgaggaccctgccgaagtccctgggggttttttgactgacataaacccgaactcgctccatgttctt

SEQ ID NO: 85736 - DNA, 580 bp, Heterodera glycines
ggggcgcactctccgcggcaaaaaatacttggcccctctgacgacggtgggcaatttgcccttccgccgtttgtgcgttgaattgggcgcggaagtcacttgtggtgaaatggcaattgccacgcatttgttgcagggtcttccttcagaactttctctgatgaaaagacatccgtcggaaaaaatctttggcgttcaattggcaggaggctaccccgattcacttggtaaagcagtccaactgatcaccgacaatttcaatgttgatttcatcgatttaaatttgggttgtccgctggacagtgtcaatgaaaagggtgcaggctgttcgttggcgaataaatccaacaaattggtttccgttttgcagtgcatgcaaaagagtgccacgggagtgcctgtgtccgtcaaaatgcgttacggagtgaaggaaggagaacggactgcgcattacaccatggggacaattgccgaacggagcccccctcagctgctgaccctccaccctcggtcacgggaacagcgctacacaaaggcggccgagtgggattacgtcttggagtgtgagcagcgaatcaac

SEQ ID NO: 85737 - DNA, 219 bp, Heterodera glycines
ttttttttttttttttttttttttttttttcctttttatgggcctgcttaaccgtaaattggaagaaaagaacaaaccaaaattttttattggaaatgaaaaattggaaatattttccccaaaaataaaatctttaataaatattgtttagccttgctttcattcatccatgccggtttttccacttatttcctcccctccttttccatgaaaaattca

SEQ ID NO: 85738 - DNA, 373 bp, Heterodera glycines
tttttttttttttttttttttttggagattcaccatttactcttttacgaaatcgtacaattccaatacaaattcaaacattacacatcaattaatagcgacaaatggggacatttctttcgacaagagccctaacgaatatcaaaaaataaataaacgcgcactgacagaagaatgaccagtgaaaacagaacaaaaattaattgcgtataattggggggacaaagctcatgatgatggcaattacgggacaatgaaactgcttgatttgatgttcgagatcaaattgaagcgaaatagcctccgggaattaacaacccaatcatttcccctcataaagctgtcggatttcctccgcaaattttctctcgat

SEQ ID NO: 85739 - DNA, 456 bp, Heterodera glycines
tttttttttttttttttttttttttttttaaaatggcattttttatcaaagtataataaagatttagcaaacaaaagaaaaatgcaaaaaaacgaatgaatggcaagacacttttttgacttcaaaagaattatcacaaagaaacttttaaattacaaaaaccatttaaattccttcgaaattaatcactcaaatttgactccttgcgccaatggcaattccttgccgaaattaattgtgcacgtcgagcgacccatgtaattcttccacgagtccgacccgctttcgcgacccccgccggtttccttttcaccgccgaatgcgccgccaatttccgccccggaagtgccaatgttcacattcacaatgccacagtcacttcccttaggcccaatccattcggacagaagcgacacattttgggtgaacaaactgctggacaagccctggctggcc

SEQ ID NO: 85740 - DNA, 181 bp, Heterodera glycines
ggggaactgatgagaataaccggcacatacgcactgaacgaccaaaaccgattgttagctgtcgtcccttttcttgtccgtacaaattttaatggcgctcgtgttgtgcagcgggcattgatcagtctcgtgcagtgctgcattgtccgtcaggtggacagtcagccgagcatggtcacct

SEQ ID NO: 85741 - DNA, 248 bp, Heterodera glycines
ttttttttttttttttttttttttttacaaagacgaacacttttatcagtggaacaacaaaaaaagcgagaattaatatcactcaatttaactccatccaaagtcacagaattaaactaaaaattgttggggatcggaacacgcacattcaaaagtataggcgggttttgtcccttcatttggaacttttgtttagggacataaataaacatccgtcgcctatttgtaattatcgggagcaggaaaat

SEQ ID NO: 85742 - DNA, 301 bp, Heterodera glycines
ttttttttttttttttttttttttttgagcataagaattttatttaaattacaaattattctatgggcatataagtctgaaaagctcaagtttttttcatcaaatcaggcctccaacaatttctcaatttccttctcaatggtcttcggttctttggtcggcgcataacgctccaccactttgccgtttttatcgatcaaaaacttggtaaagttccatttgatcgcatcaaagccgaggatgccgccttggaccctcttcagataggcgtaaatcggatgctcattgggcccgttgacgt

SEQ ID NO: 85743 - DNA, 546 bp, Heterodera glycines
ggggccggcttcatccccaattggcaacaccttcaacgcgtgttggcactcttcgcattgccttgcatgggtctcattcttttcctcagcgaatcgccccgttttttgatcagtgcacgtaaaatgaaagaggcgaaagaggccatcattcgaatgcataaattcgacgggcgtccgtatgacgaaaaggcgttggacgcactgcttgaaaaggagctacaacaaatgttggaactttccgtcactaaaaagaagtacaattatctgcacctcttctacaacaccaaattcaccatgtacactttgtcagtgtcattcagtcttttcgtggtcactctgatcacttatgcccttgtctacaacatcgagaagatgtcgggcaacattttcctgaatatgatttggatgggcatgttcaaatacacgatgaacttggccattgcctttgccgacctcaaattcaaatggttgggccgtaaattgccccatttgctctccgaagtgctcgtcctcgctgcgcttggtctctttgttacgctgcgtttg

SEQ ID NO: 85744 - DNA, 385 bp, Heterodera glycines
ttttttttttttttttttttttgcgaaccttttattgaatcaaacataaaattatttattgcaaaacgatattaatagcaatctttgctcattgcctcttctccgtttgaaatgctcactgggcagctgttattcacaattgggataagtgttcccacccttgcactcaaatcctccctctgttggtccttccgccgccactgtttttgccgtgccaattcttcttgtctgcattgaaatgccattttgcgctggtctccacccactctttgaccttcgtccgccgaaggagtgcatttggacaattcagtacacaaaatagctcctttctgtaggcattgttcaaattcctcctcctccaacatttgctctattatgtcatgca

SEQ ID NO: 85745 - DNA, 113 bp, Heterodera glycines
ttttttttttttttttttttttttttgcatgcaccttttctaactttttgtgtaaaaaatctttggatggcaaaacaaaaaaaatggggcaaaaaaagaagcaaagttcgggc

SEQ ID NO: 85746 - DNA, 531 bp, Heterodera glycines
ggggaccaccggggccgatggaatggcgcgattcgcatttgaacctgccttcgagttggccgtccatttccacgcccaattatccattgcatcgtcagcaaatagaccaacagtaacagcaacaacaccaaccagtagcagcagcacccatgcatttggtcaacgagtcggtcaagcagtacattgctcaacagcttgaacaaacacagctgatgacgacaagcaagaagaaacaacaagttgtacaacaacaaaaacaaatggtggagaaaaacaatgatgagggtcccttcctaattcaccagcagaattggatgaccgaacgccgtccggtttcgccttcctcctcctcctccgcattgtctgttcatcagccgctgttcacttttcggcattccgtcggcagttcccaggccgtacgacgagacatacgcattggcacacttttctcagcttttgatcaaaaataaatgatgctatttactatatactactcttgttaacacttccatatgaaaattttatacgaaa

SEQ ID NO: 85747 - DNA, 487 bp, Heterodera glycines
tttttttttttttttttttttttttggatattttcaatgttaaaaaaattaatgtaaaaataaaaatattgattataaaaaagacttcaatttgaattcagtgaataatacaaatcgttctaatccatcaatgtttgttttgacaaaacggacgggcttcgccttaccaaaccttaggaatgggtcgctttttcgcgcttcggtaagaatcttctcgaactgagacaaacagccaagcttcgaaagaatttgaacaagttcaagagtgagtaccggttgcaaaacaggggcaaaatgtgagaccaattcctgttgagtgagaccagaacgatggaaaacgacggaaagcactccctcaagcatccatcttaacactttccagtttactcgcccggatgggaacaaccaagggttaggcacaaagccctgaccctcccgggtccgaatgagccacggcctgcaatggccgatgcttacaaatcgcact

SEQ ID NO: 85748 - DNA, 470 bp, Heterodera glycines
ggggattatgacgcccgacatgccgggcttccaactgggcaaggacgagaacaagttgggctggtgcacgcagccaacgcggatccttacttttgaggacgtcaaagtgccggtgaccaaccaagtgggcgcggacgacgaaggctttaccatcgccatggagggactgaacggaggccgtgtgaacatcgccgcgtgttccctgggcgctgctcagatgagcatggacttggccatcgaacacacaaaagtccgtcaagcgtttggcaagtccatctcccaattccaatggacacagttcaaattggccgaaatggccacaaagctggtcacctcgcgacttttgctgcgcgaggcgtgccaccatttgcaggaggacactccgaacgcatcggcgatgagcgccatggccaaaatgtacataactgacgaggcattcacggtggttaaccaagcgctgcaaatgttcg

SEQ ID NO: 85749 - DNA, 282 bp, Heterodera glycines
ggggttttttttttgttttttttttttgcaaaatgcataatttaataaattgcagagaaaaaatcacaaaacaagaagaaaaacagctcatgccaacacacattaattggggggggcaaaatgaagtcaaatgcagctgaaaagaaaattgggatatcggaacaatcaaagggatttgtgatgctcggaaaaaatcaaatcttcaaaaaatggaaaataagttaaatttttaaagggaaaaaatgcctaaaaaatgattgggacaaaaaacgcgggttaagc

SEQ ID NO: 85750 - DNA, 248 bp, Heterodera glycines
tttttttttttttttttttttttttttttttggcaaaataaatttatcctcgtttttggataggaatgggactgttaaaatctcttacagttcattaaaaattccggaaaaatttaattatctgacaacagtggatgcgaaaatttgttgcctaatctcagggatttgagcaacgtccgttgcgataaaaactttcccggggggaaaatgcctttgaaaatttttcgcctgttctcccaaccatccca

SEQ ID NO: 85751 - DNA, 118 bp, Heterodera glycines
ttttttttttttttttttttttttttttttggggggttagatttatctaaaaagattcaaaacaacaaatagtttaaaaagttgtggaaaaaatttgttttgaaaaacttattaatta

SEQ ID NO: 85752 - DNA, 225 bp, Heterodera glycines
ttttttttttttttttttttttttttgagtccctatttatcatacaaacaatgttatttatgtacacaatcagagcagacaaacacgacaagtgaattcaaatatgaacaaatacactgcaataatacataagtgcatgagaatatcctccgaatgggacatccgtccaattcttttgaaccgagattccctctcatccgctgttagtggtcgttctgatgccca

SEQ ID NO: 85753 - DNA, 474 bp, Heterodera glycines
ggggccaaatttcgcacactttttgcctattttgaggatgctcggaagttgtacgaaacacgtatgaaaaatgcctcaaatggcaacaatgaggccgattgtcgtataaagaatttggaaaaagagctgaaggtgctgaagcgacagctgagtgcgttgggcgaccttctcgaccagtttttggacacttcgttggccatgcgcgaacggacgctgcgaatggagggcgaattggggccacgattggaacgattggaagcgcaaaatgtgcagctgagggcaaatttggcggcgatggggcaacagacgcacaaaagcggggacaacgaacagaggaatgaagcggagcaaactattgaaacgatacatttcgacgaactttcgatttccgacggagttccgcttcaacaaaatgtccaacagcagccgcaaccaccgaatgtcagcaattgccctgtaaatgatgaggggggc

SEQ ID NO: 85754 - DNA, 352 bp, Heterodera glycines
ttttttttttttttttttcttttttttagcattttaacgtgtttaatacccacttaaataaattaggaatggaatgcggcattttcgttcacaatgacaacagatcaccgatcactttcggtccgtccgatcagtccggtcgccccctttcctccctttctcttcctccgttcagatgccgccttggatgccctggtgcaggacgggcgtcagtccgttgtacaggtgcaccagctgcttcagctcgcgcaagtcgcgcacgcgcagctctccgcgcacattctccggcaaagtgttggcccactcctccaatttgcgcactttgtcctccgagttgagcttcttgtccttc

SEQ ID NO: 85755 - DNA, 225 bp, Heterodera glycines
gggagtattcccgactacaaaaatgcggtaattgttgctaaaacgcccggagtcatgaacaaagcgacgtcatacacacgagagactgagaatgggccttgctgttattcacggtgaggagaagggagtccaggaggatggacggcaaagtgcgccgccatcgccgacggacaaacgaaaaggcgtttcataccaactttttccatcacaagtcgcaaaggagaa

SEQ ID NO: 85756 - DNA, 368 bp, Heterodera glycines
tttttttttttttttttttttttttttgcaaaaataggcattttaatagccgagtcatagcgcaatttccggcaaataaaaaacacggtatgtgaataaactgatgaatacaattatgtccatactgaattctttcccctcatttgtcagtggactctgtccatactgaattgggtgatcgcttcttcccccgtttccgcgtcattgtaaatgtataaaacgacccgaaatttgatgttttctttgtgcaaattgtcaatttgccattctcccaatcgccaatcgttcgtttctcttctgatcagtcgcacttttttcgacgccgtcaaacttttggttggaattggcaattctttttggcggggaaa

SEQ ID NO: 85757 - DNA, 595 bp, Heterodera glycines
gggagtccatccgacggaaaaagctgagcaaacgcgaccgacaggtcaaccgccaaaacctcccgcaaatacgaaaagtaattcagtttcaattgacaattcggtcactgaaagtcgtattcgtcagccgactgaaagtggtaagcagcaaaatcgcattccatcgccaccaaagtgtcgcccaccgccgcctcccgcacaatcagcagcgaaaaaaggcgaagaaatcacttttggtttggccggctcttctcccaaccgtcttccgtctgggcaattcgtttgcgatgcgtcaaccgctgggacgagttctcagccctctctccccgcaatcgaagcggtcgaagaagatgattacgctgaaattgtcgaaccggaagagcaaaagtcaccgcaaaagaaggagtacatctcgagacttcgcatgccaacaatcttcactcgccgcaacacgcgaaaggacacccaaaagaaatgaacttcttccacagacaacgcactcatcgcatttttgtacgaagaagcgatgaagaattctaacatttaactcatcttacacaaacatatatatatacacacacacacacaatttatc

SEQ ID NO: 85758 - DNA, 280 bp, Heterodera glycines
ggggacaaccaaaaacaataaaaatatttttttaaaataaaaaaatgtacaaatttttatttttccctcatttttgtatcttaattaaggcaatttcggggctccattgttggaattcgaacatgattttgctgagtgaaatgccggaaaagggcagtgtcactgtacaccaatgtccgtccgggcatcaatgcgtgacggcaaattgttggcttggagtcggcaattacattgtccaaaaatgcgtgccggaccagccaggggccagaaactattgcaa

SEQ ID NO: 85759 - DNA, 379 bp, Heterodera glycines
ttttttttttttttttttttttttttgacaattatagggcttttactccacatacaatacataacacataatataggaatcacaacaaagaatcatcctagacattacacagtgatacattatctgctcgatcaaaacatcttcttcattttgtccaatacgttcgtcacgggaagcactttgcggatatgcttcacgtacaagttgtgagcgccataagtttgcggaagggccaagtagaacaaaaagacgggcttcaaaggcacgtacagcagcagaaggcccttgatagagccaaagagatagtcgaactggcaaaactcggcgaacacgcaccaataaacgagccactgggggtattccgatgtgttttgagtgt

SEQ ID NO: 85760 - DNA, 470 bp, Heterodera glycines
tttttttttttttttttttttcatttcgggcggactgtccgcacttcgcccctctccgctggcatttccgtttttcaacagttcgaacatttgcgactttcgcttcgcactttccaacttgcgcttctgctcctcctgtttgcgctgcaactccaacaattccttggggatcaaatttgtttcgagagttgcctgaatgcatcggttgtgaattttgtcgctgaataatgtgcaaaggtcgagcgctaaagcgacgccggaaagacggcgggcagcgaattcttcgctgactgcgtttcccccgttcagataaatgtgcttcagtctctccaatgtcgtgctcagcgtgttcagtaaatcgtccagcagacccattgaacgcatttgggaccagaaaaggacggaattctcttccatgactttccgcacatttgcgcctcctcccccgccgtttccctcatgtttcgtcg

SEQ ID NO: 85761 - DNA, 611 bp, Heterodera glycines
  unsure (1)..(611): unsure at all n locations
ggggagaaaaataaataatttagagaaaaaaatgcttattaaaccattgtttactttctcaattttgttggcgttttttggccaaatattttgcgacattttgggccgtgaacaaagtgccggtgccaaaggtttactgacatgtgagggaaaaccggcaaaaaaatgtgaaggtgaaactgtacgatgatgaccgagggattgatgcggacgatttaatgggagagacgaaaaccaacgacaaaggatattttgaagtcactggttacactagcgaatattcaacaattgacccaaaaattaatatttatcataattgtgctgatggctataagccatgcgaccgcaaattcaccattaaaatcaaggacggttatgtgtcaagtggcaaaaacccgtccaaattgtacgacattgggcgcattgaactcgagggcggattttcgggcgaatcacgcgattgcctgaactgaaagcatcaaattcatgctttaacatcggataaaaaaggctctggcccaacgatttttaaaatttgaaaacattcttttggttattaatataantttatatgttgttttacaattaaaatcaatgatgggctcaaaaaa

SEQ ID NO: 85762 - DNA, 508 bp, Heterodera glycines
gggggacgtaacgccactgtcacttggaattgaaacgcttggtggtgtgttcaccaaactgattacgcgtaatacgaccattcctacgaagaagagccaagtcttctcaacggctgctgacgggcagactcaagtggagatcaaagttttccaaggcgaacgcgacatggcattggacaacaaaatgctgggccagttttctctcgttggtattccgcctgcccctcgaggtgttccacaaattgaggtcgcttttgacattgatgccaacggaattgtgaatgtgtcggcacgagaccgtggaactggcaaagaacagcaaattattatccaatcgtccgggggactcaataaagaccaaatcgaaaacatggtacgtgaagcggaaagacacgcagcagccgacgcagaaaagaaagagacgatcgaggcaattaaccatgcggagtcggtgctgcacgacacggagtcaaagatcacggaatacgcggaacatctcaacgcagac

SEQ ID NO: 85763 - DNA, 481 bp, Heterodera glycines
ggatttctggttccgtcgacaatggcaccgcggatgctgctgctattcagcatcggtttagtgatggcatttccgtctcgtcaatgccccgtgctctgatcaatcgtcaaccgccggtgatcagtgcttcgacgaaaaaaacgggccgcaaacgcatgtcagcttcgtcgagtgcctttgttcccgaagacgaggaagacgcaccggccgcctatcgcttgccatcgaatgcgatgggtgacgcacggggacagaagcggaaaaggtccgtctcttcatccagcagttcttcctccgtctcctcctccgattcttcttcttcctccggctcttccagctcgtcatccgcttcatcacatactccactgaaaaacgcaaaaccaaatgcatcagaacatccatcaaaaaggacgccgaatgagagggagaaaagcaacgacatgagcggaagtggtggcacgaccattagctgctcaactgt

SEQ ID NO: 85764 - DNA, 376 bp, Heterodera glycines
tttttttttttttttttttttttttttgaaagcgattaccttttattatacaaatgggggcaatccgaaaaatgagtccgcttccctttttcagtggggggggggcttcccctccttccgctttctgctggtctcccgactcgacgacctgcgatgtttgtgttttttggccgccttgagcttttcctccttcttttgcttccttcgctgttttttggccttctcgatatcggagccatcgctcacttcagtcttcatgatttttttcattaattttcttccttttttctcatccagccctttcaaaaaagcctcaaaagttttttcctctcctcctccaaccattgctgacattttttttatgtgttcgtccgct

SEQ ID NO: 85765 - DNA, 208 bp, Heterodera glycines
gggtatttcgtgttggaacttgtgcacatcgtttgggatttcggcggaagattgttcgtccttcgctttctcctcccctttctgctcgccttcggctcccttctcttccttttcttccttcccggtgcgcacagttcgtatgtgaggcattcccagaagaaacttctttggtgtttctattggctcggcttgggcgttctctcctcaa

SEQ ID NO: 85766 - DNA, 379 bp, Heterodera glycines
ttttttttttttttttttttttttttggtcttgtacaattttattacaacaaaaatatgaatttgggataagcccgttcatccaatataactcaatcaatttgctgttcctctatagctttaacatcattcaaattatttggcaactgctgtacattctcttcatcttctgcttcctccgttagccctcttgaacttttgttgactgtcaaccgaagcgaattgcgcaccctccccttgaaactgttgtttaatcctctgacgacgtaaatggaaatattttcttccctcgttaaacacaaacaccgaagaagtcaaaagtgttagaaaagccaaatcttttatagtgagtgcctcggtttgggatattcgctgaagtg

SEQ ID NO: 85767 - DNA, 282 bp, Heterodera glycines
tttttttttttttttttttttttttgggccgctcgggtttgacggcataaagttgttggcgttgtttttgttgcatgtttgtacttccaatttcatcactcttaatggcaattcatcatcatcatcacgctccggtattgatgtggggggggtggtgaacaacaacaactcgtcgtacaattgacccgaatcccactcagcggccgatgaaacctccgtttggtaggcgttcacgtaattcatacccttgcgcaccacatttttgttacacacaacagcagc

SEQ ID NO: 85768 - DNA, 285 bp, Heterodera glycines
tttttttttttttttttttttttttttgcatcttcatcatttataccgtatataatttaagcatccattttggcttataacagcagcatcaattatgaaagtgtttaaaagcatcccgtgagtgcagttttatggacatttaaaagggtccgggcagtcagtgatcattctctcctccgatcagtccgtgtcttcgctgtccctccctccgtcctcctcattctccgaactgctctcgctcaactgcaaatcttccgccaaaatgcttttccgtacgaatgacga

SEQ ID NO: 85769 - DNA, 366 bp, Heterodera glycines
tttttttttttttttttttttttttataaatttatttatttttttgttttttaaacagttcaacccataaataatggtccgcaaatgtcggctaaccgatcaaacagtcaaatcactgcgtgcggtcgattattctcttgccactgacccctgggcttttcctcgggtttttctcctcgctgtgccgctttttgttctggtggctcggtttgcgtttccatcgttcgcctccccccaaaagtgccgtccttgtcttgcgggtgttccggcaccgtctgttttggtcgaaccttctcatagtccacccattgcatgttccacccgcccttgctgatgtccaaatcgatcgaaatgccgcgcaattct

SEQ ID NO: 85770 - DNA, 224 bp, Heterodera glycines
ttttttttttttttttttttttttttttagggggctcagctttaatcctttaaaattaaaaaaaaaagaaagggaaaagtgaaaagtgatcacaagacaaacagtcaaatttgaaaattaagccaattttaacatttgttcaaatttatttgcccgctcccgaaaatgtgggcgttttttgacactgtgaataatcgacgggagaaattaaattgaacgctttt

SEQ ID NO: 85771 - DNA, 610 bp, Heterodera glycines
ggggccgtgtttccgcactttggtcaagcaacggcaccggcccattatcagtaattctccgaaaaaaagtattgccagctcggccaccgtttttggctccgatgcggtggtttcacgtgaaggacgaagcactcgtaataactctgctcgcttcgtgttgtccgcaaaattcgaccaggaaatgctgcgggcgtacagagcgtctggcatcagcgaacgaatgctgttccagatgccctacttgcgcagcaacgacatggcccagctggtggtccagtatcgggagatgaagcgcgagtgcaagagcaacgtgtacttggcacggtccaaaatccaaggcatgggactgtacgcgaagagggacctggacatgaaccaaatgatcatcgagtacattggcgaactgatccgcaatgaaatatgcgaaattcgacagagtcgctacattgagcagaatcggggcgagtacatgttccgcatcgattgcgattgggtggttgacgcgacaatggccggtggattggcacggtacataaaccacagctgtgacccgaattgtggcaccaaaatactgccggtgaacgacgaaaaaaaagctcacttacgacta

SEQ ID NO: 85772 - DNA, 610 bp, Heterodera glycines
gggagccgcagcatcgttctgcttcatcggtaatcgtcacgcaccatgaggaagttcgcctacttcaaactgtgccaagccgtgctcacttctgtttttctgtggcaaattctctcaacgcaccaattctgtggcgagtttggcgagcctacggccttcttcaactctgcagtctcctccagccattgcgaacagttcacgctcatcggaatggactccaccactggcgaatacggggccatgcccgacaagcagaagtggcacatgcaactcatggcgagcagcggcagtggccaaccaattgatgaacagcaacagaatcacatggacgagttttcgtcaaaattgccgactgttggccgtcactgtattccgattgcgttttctctcgtcaagccctgggttcgcgacaacaaaagtcatctgcagaaggtcgctgatttgtttgccattcaattgctctgcggattgctgtctctgtttgtcattgccatgcacgttttggaccaaccgcgctcttggggatatgagagcatcgactacgaacggaccactttttgtgctgtgctctggtgctgtcctgccctggtttcatctgttttgctgctcc

SEQ ID NO: 85773 - DNA, 364 bp, Heterodera glycines
tttttttttttttttttttttttttgctggggttcatttattaaattaattggttaataaatatttgcacttttctttttcttttcgcctttccttcctctgcgtcttttgcccttccgtctcgtttcttttcccctctcatcctctctggtctggcgttggaccccctgtttcttaatcctccttttgctgcctctcttcccttcgtgccgttgtccgatacttcaacagtccgctgcctttccccaccaaacagtccaatttgacgttcatccacagaaattggagcaaaaagtcgtagtttgacttgcgcttgtacgcccccgggtatttttccataattttgcgaatgcttttggttgcc

SEQ ID NO: 85774 - DNA, 265 bp, Heterodera glycines
ttttttttttttttttttttttttttttaaaccaattcttttccaaaaaataaataaattgaaaacaaacaaaataaaaaacaacaaaacataggcaatgagtttgttgttgatactacagatcgtttggttgaaaaataaattaaaaaaggaaaactttttttttggtaaattaataatcgaaagaatgatagtgtagggattccgttaggtcatttgtgtgcttccttccgtcctcattaattcaaaattgctgctgctactg

SEQ ID NO: 85775 - DNA, 391 bp, Heterodera glycines
gggcaagtttgagactttattaattaaccaatcactgatttttgtgaaaatgttgcccatttttcggagtggaaacaccgacggcttctctctcatttcagcgccattccttcttggcctcctctcagctgcgcttctgctggtggcacaaacagctgctctccaaacggacccctccgcgtcggacattgattacgaaatcgttttgccggttgcgtcgttgccgtcgctggactcgccccgggggacgacgttaaattggcaggacgaatgggtgcgacgcttttcgccacggcttgttgttgtgcaaaacggcggatggaagcacaggacattgccccgaaatgacgacgacgcccaccaacggattgtgctgcacaaaaagtggtcc

SEQ ID NO: 85776 - DNA, 153 bp, Heterodera glycines
ttttttttttttttttttttttttttttgggtattattgtttttttttgtctcccagtaattatgtttaaaccaaaaaaaaaatacaatgtgaaaattaatggggtgattgatgggggggttaaaatcatgatcatgatcaaaagttgggtgg

SEQ ID NO: 85777 - DNA, 497 bp, Heterodera glycines
gggtacgccgccgagagtcgtcagccggagattgttgaagatctgatgcagtacttcctatcacaaggcttgaaggattgcttctccactctgctgtacaaatgctatgaatttctgcggcccgacgttgtgcttgagctcgcctggcggaacaatcttgttgattacgccatgccgttcatgatacagaccgtacgcgactatggttctcggcttgatcgtctggaaagggctgagatggaacgcaaggaggaggtcaaagagcagcaacagcgaagcggaagtctgattgaaccccaactgatgctgaccgcgtactccaccgccgcgacgactccaaatgcgaccgcgtatcccacgggaggcattggcacgattccgccggcacaaggctttccgtcatatcccttctacaaataatgttgtttcgttgtgatggtgtgacttatgatatgaccatctttgatggattcatttcttacttttaatatgtaata

SEQ ID NO: 85778 - DNA, 402 bp, Heterodera glycines
tttttttttttttttgtttttttttgcaaatgcatttttatacgcatttatcaaaaatttggcatcaattttgattgcaaattcgggcactcaatctctctctcgctgcttcattcatcaaacaacgtcgccctattcgtacttcttcaacgcctcaattcgctcaagaattggcggatgcgaatggttacaccacgagtagagcacgtcgtcaatgggcagtgacagattgtctttacacatttttttcagtccgctgcacagttgcgatgcatggcccagctgtgcggagaagcggtcggccgaaaactcgcactttcgcgtgatcacattcatcaaaacggacaaaagttcggtgtagggggccatgacaaatcggccgatgatcaacagtccgatcag

SEQ ID NO: 85779 - DNA, 416 bp, Heterodera glycines
tttttttctttttttttttttttttttctaacagataagcatttactcagacaaagaagccaaataacatatcaatttttttgatttttccttactcatcaatttattcatccaatccatccacttcatttatcctactgcgcctccttctgacccgtggcctggtaaagcactgttgctgcttcgtccacgcgcaaacgcaacatttcctcgtctccaagcaacaacacaatctcggcattttccatctcgagaagcattcccgtgattttgccgattttctcgacatcaccatcccggaagcaacgcgcaaccatcgcgtacagacgctcaccaagcatttgcttttgtgcggttatgttagcctcggtaagcagctgtgtgttcaacggctcctggtgtgttgaagaagtgat

SEQ ID NO: 85780 - DNA, 410 bp, Heterodera glycines
tttttttttttttttttttttttttccgtaagaatcatttatgaactcaataggtaagtgcatttataaaataacgaataagtgtttgtcatgtgatcaatagccgggcagagcaggtccgaggatatttctctcacttttcggatcggggaaataagccttcgggtttgcccagctgacaatctttcccgttgtgtacatcactctgccggggtggtaagggtcgaccagctgagtcaaaagatcagccttttctcgggacatgcacggggtccctggacttatgaaatcatcgggtgccaaattcaatttgtcacagtgacggtacatcaaatgcacgcgcatatcgctgcagaaaaaagcgccggcgtcacaaagagagcagcgcattcgcatcactcgaatgtgag

SEQ ID NO: 85781 - DNA, 291 bp, Heterodera glycines
ttttttttttttttttttttttttttgctttaaaagtttaaaccctaattataagaaagcaaacaaaaaacgaaaattaaccctgaagacaaaaaaaagacctaatggcattaaaatggacaaaagttaaatacaataaaaagggaaattttcaaatataaaaattcacatgatcaaaaaaggggcttcaaatggacttacgatctcacagtcggtttggaggaggcaaaccgagggcatcatcattaaagcgattcaaatgggcgtgctgagccaaccattcgtcgactg

SEQ ID NO: 85782 - DNA, 377 bp, Heterodera glycines
tttttcttttttttttttttttttttgacatcacatgactaatgaaatgcattaatcatttgttgtgtcatatttcctgcttttcctcattttccttcatccatttttccttcaacaattggcatttttcgcccgatcccaacatcatatgggcagaacaaaaccgcactggcacacggtcgttgcacatgaattggcagtagatgatcccgtcatctcgggaacagttgcccggctcaagcggacagtcgcaaattgcgcaaacgaagcaacgcttgtgcatcatcaacttttccacttgaattttatcctcaaataagtcaatccaactccgacagatctcgcagaatttcttcgttggccccgttgcaaaatcc

SEQ ID NO: 85783 - DNA, 463 bp, Heterodera glycines
gggagcgcgactcgggcggcggaggaacaacggcttcatcagctgggggaggagcagcgaatgcaaaggcaaccggcgccgagcagcaacaactgccccatgcccaacaccctttggacgcagtggccaccgacgacgtgttaaggtacgtgttggagtcgtacaatgcgttgagttggctttcacttgacccggtgaccggcgcgcgtcgttcctgtctgcccgttcacatgcaggccatccaacggctgaacttggcggtgaacacattctgggggagcgctgaacaaaatcaacaacaccaacagcagcagcaacagccgaaatgatcgaataattaattatcaaatcatcgaagaaaagacgcagcattcgcatcgaaaattggcattatcacatcttttacacatttctccatttttgttgttcacgtgtccctcggttcataaacataaaaccttct

SEQ ID NO: 85784 - DNA, 268 bp, Heterodera glycines
  unsure (1)..(268): unsure at all n locations
tcggaaatcggcatgacaaaagttcttcgaaaaagacaaaaattctattcagcgatttcattgtgtgttttaagagcggaatgagctccggaacgacaaagttataccctccgggccttnctggctgcacgtgaatttgaaaatcaccgattgcgaaaccgatattagcagcagaagttggcacgagcagctgataacaaagcgtcttcaatgaatcatcgtcggagtttggaattgtctcataaaatctaagtttaagtgaagaaag

SEQ ID NO: 85785 - DNA, 269 bp, Heterodera glycines
ttttttttttttttttttttttttttttgagcataaaaattttatttaaattacaaattattctatgggcatataaatctgaaaagctcaagtttttttcatcaaatcaggcctccaacaatttctcaatttccttctcaatgttcttcggttctttgggcggcgcataacgctccaccactttgccgtttttatcgatcaaaaacctggtaaagttccatttgatcgcatcaaagcccaggatgcccccttggaccctcttcaaatag

SEQ ID NO: 85786 - DNA, 538 bp, Heterodera glycines
ggggacacgtagttgtccaataagaaattgaaaacggaaaagtaattttttctaattaaaatggacaccggcgacaactttttgacgactcttaaaattctaaccatcggcgaaagtggggtcgggaaatccagcctaatcgcgcgatttgtagatgataaatttgacccggacatggcagccaccatcggagttgactttcgcgttcgttcgatttcaattgatgatcgaattgtgaagttggccatttggatcacggcgggccaagaacgctttcggacgcttacaccgagttattaccgcggaggccaaggagtgattttggtgtacgatgtgtccaatcggccgtctttcgagaatctcgaccattggctgttggaggtggacacttactgcaccaaaagtgacaccgtcaaaatgttggtcggcaacaaaatcgacgcggagcgaagaatggtctcgcgggaggagggccttcaatctgcgaagaaacaccgaatgcttttcatcgaggcgagcgcaaagacgcgcgaaggag

SEQ ID NO: 85787 - DNA, 375 bp, Heterodera glycines
gggcacctgccgccaagcaacactcagtgcctccactaccgccaaatccgccaaaacgcaacactccgccgtccaagtcgagcactccggtcaaagagatgggccgcgccagtgcaaatccgttcgacatggaggacatgctgatcgccccattggaggacggtggtgagacggacttgctctaccccgacatggcctcggcagcggggtccgaccatctgcacgtggttgcaccaccggccgacctgaacgatttgggcgagtacccaccgcttgcttgacacgatcttttcatttgataacacttttatcacgctgctttctttgtgtgtttatttcgcatgcaaaacgtagtttattaataattgcttccac

SEQ ID NO: 85788 - DNA, 520 bp, Heterodera glycines
  unsure (1)..(520): unsure at all n locations
gggatctcgcctttggtgacaatgcgctcactctgatcaattacattgcgattagttattggcttgccattggcttggccattgcctcgttgttttatttccgtatgaaaatgccaaacgcaccgaggccaatcaaagtcaatttgattttccccgctatctttctgctcggctgtgtcgctttggtggttattccactcgttggcaagccaaaagacacggcaattggaattgcgattatgctcacttcggtgcccgtttacctcgttttcatttgttggaaggaaaggccttcctttttcaacaaagcgtccgcgtccattaccatcttttgccagaagcttttcttagtttcgaatgaagcagaaaaatagacttacaaatgacagtttttatatttgtgattagtgactgaattttgcattttaattagagagtttttcaggtggggtcactaattacaatgttatttattactttaattgttgactttcgtattcttttcttttactttttnttt

SEQ ID NO: 85789 - DNA, 548 bp, Heterodera glycines
ggggggttgtcgggttcaggaaaaacgacactgttcaccaagttgataaactcgaagaattgttgggactcattcatttcgctgaaggaaaatcagttcgacagttacgcgacggacaatggccaaacgctcactttgctcgattttcccgggtccgattcattcaagaaaactttgtgtcgcaagcggctgaacgagaaacggaattctcttaagggcgtcgttttcgtcttggacagtgcgacgttcagcaaaaaagatgccgccgaattgctgtacgatgtgctgtttgagtcgggcaatgccgtcccggttctgatcgcatgcaacaaacaggacattggacacgccaaatcgcactctctcatcaaaaaggcattggaaaatgagttcggcttgatcaatgtttcgcgtgaagctgccctcagttcgatcagcggagaatccgaaaagcgaattttgacaaaaagcgggagggaattcgcctggtccgaattgaagaacaagaaaattgatttttttggagtgcaccacgcgaaaagatgaga

SEQ ID NO: 85790 - DNA, 126 bp, Heterodera glycines
ttttttttttttttttttttttttgggcttacctaacccaaatcctgcaaaatttcctgcgcattgtaaattgggatgagtgaacttgcaccggcagggataattattattggaacccgtgacaca

SEQ ID NO: 85791 - DNA, 335 bp, Heterodera glycines
gggggaggtcgacaagttccaatcgtcgcaaagtttgaccgggaaaaggacgcacaaattcacactttgggtcgacaaatacgcgccgagcacctttctggatttgttgaccaaagatgagacaaatcgaatcgtgctgctatggctccgtctttgggatgaatgtgtttttgagaaaagaggaggcaaaaaatgggaggggaaccaccgacgcatttcccagcggaacaatgccaatgcgacgtctctgtgggacaatttggaggagagggaccgaacacttcgaaatgtaaccgtcaaagggcactgacaaccgaatgccaaaacaaaaaatt

SEQ ID NO: 85792 - DNA, 558 bp, Heterodera glycines
  unsure (1)..(558): unsure at all n locations
gggggtgtccacgccattcattatacctatattctccttaacgaaacacctcaacaacttttggaaacccaaacattcgttcattcattcatcgttcataatggccagacccaggggcagtggaagagacccattcaaagcacgcagtgccagggcaagacgtcgcgcgggcaacaaaagaaaggcggccgcagggactgctgcaaacgtgcaagctgccaacaggcgccccatttgtctgatctgcttgaagaaaatgacccaagttcgtcaggtgcgcaccatctgtgaccacgtgttccactacgtctgcttccaccgttggctcaaatatcgtctgttttgccccgtctgtctgctcaactttcgcacggaattgtatcattcgggaaacgccgtgtttgagggcgcgtacgacgatggacacgttgtgctcatacctgatggtgaacaaagcaacagtggataagtgatcggnactcatctccaattgtgatcggacaaaagcgatatctaatcttgtattgtacataaataggttattcggacaataaaact

SEQ ID NO: 85793 - DNA, 469 bp, Heterodera glycines
ggggactcaactttattatataggatttaagaaattttcttcaccttcaattaaattttctgttttgacaattcgttaaatggcgagccctggcgatgccttacttgccctacaagggaaacgaacaacggggcagtcaattaggacacagaatgtaatgactgcagttgcaattgccaatgttgttaaatcttctttggggcccgttggattggacaaaatgcttgtggatgatgtcggcgatgttacggtgactaatgatggcgcgactattttgaaattactggaagttgaacatcccgcaggaaaaatactcgttgatcttgctcaactccaagatgaagaggttggcgatggaacaaccacagtcgtcattattgccgctgaattgctaaaagcagctgatgaattggtccggaagaagatccacccaacgaacatcattaacggatatcgcttggcctgcaaa

SEQ ID NO: 85794 - DNA, 519 bp, Heterodera glycines
ggggatggggcaaattcattccttacgcgttttggctggtctattttggattatcaggcgaccgaactgttcgatttcgccctgcaattagccaacccaaacagtcccactttgttgtccaaatcccattattatgcaaaggttcgtcttcaatacgcgcaattgttggatgaattgggcggattcaaacatgcggttgagctctatcgactcgagaattccaactattcgaagacaccgtcgcctcctccactcgttccttctgttcacaaaaccaaattagctcatctcaaaaggcaggaccatgagccaacacctgccgttgctcctgctccacctacttttctaccagtgtagttgcagtcggcatccaaagaggaccatgagccaaccccttttgccgttgctcctgcttcacatactttccaaccagtgcagttgcagtcggcctccaaaccggaccatgagccaacccctttttccgttgctcctgcttcacatactttccaaccagcgcag

SEQ ID NO: 85795 - DNA, 506 bp, Heterodera glycines
ggggactagtgatagtccaattaagcgaacaaacgaccaacgtcctaatttctgaaaccaccattctccaaatggctgctccctccattcgtctcatcaccacgtccaaggcgcctcctgcgacggtcacagccaggcagtgctcctcaacaaccagacgctgtacatcagtggccagaccgggatcgcggcggggtcgacgaatgtggtgccgggtggagcgcgagccgaggcgaaacaagcgatgaccaacattggcgagattctgacgtacgccggctcgtccttcaagcacgtgatcaactgcaacatcatggtggccgacatgagcgacttccaggcggtcaacgagacgatcaagaacttcttcaccgaggacacgtaccctgcgcgcagcttcttccaagtggtcaagttaccgaagagcgcgtacgtcatgatcgacgtggtggcgatcgttcagggccagagctgagctgaagaacgggagaacgagcgcggcagac

SEQ ID NO: 85796 - DNA, 162 bp, Heterodera glycines
  unsure (1)..(162): unsure at all n locations
ttttttttttttttttttttntttttttattcttttttttttttttttttttttttttttttttttttttttttttttttttttttttttttaaacaaaatttttttaaatgggaaatttttccttgggcccaaaaaaaccccaaaagtttttaaaaaaaaa

SEQ ID NO: 85797 - DNA, 380 bp, Heterodera glycines
ttttttttttttttttttgggtggatttagccaatgcggcggcacaatcggatgcgggtcgggcaatcccaactcccgcgccttcagttgctcttgcattccttcaggccaaatgtccgggggcggaatgacttttgatcgctttggctcctcttttttcgtccgcaattgctcgggtttgtttttaaacaaatcaatcgtcgctttttgtccccaaatattattttgttgttgttgggctgtggaggaagaagcaccgctgagaattgggaactgttcacgggaatgaagcgacaattgggaagcgcccgttgaggccgaaagcaagcggaccttttgttgggatggaggcggcggggcccacccgggcggagccccgt

SEQ ID NO: 85798 - DNA, 372 bp, Heterodera glycines
ttttttttttttttttttttttttcgttaaccaattttatcattgaattcatcaaaaacaaaagaaattgaaaaagaaattgatgatccattaatcaaaagacacaacatatatgcacataaacactggttcatcggcgccggccaaaactgggcggtggcggcggcggacctcccattgggcccatcatcaaaatggcacgttgttcctgcggcaatgtcttgacatactcctgcagttccttttgcttgacggcccatgctttgttggtttggcgattgatctgcttcacacggttcttcacatcgtcggggagacgttcaaagccgggcggggccgggatttggtccaaaacctctcccggcaaggagc

SEQ ID NO: 85799 - DNA, 619 bp, Heterodera glycines
ggggtttggccaaaattgcgaaataccaaacgaagcgaaaggcattggacaaagcagtcggcacaaacttttttgttggcattcaagacgaactgttggcattcagacgggccaagcagaaacagcgaattgatctgaccgcgttggaaattgcgtccgaatttgttgcccgctgtccgccggaggaacaaaacgctgtccaatcgtcgtcatcgtccgccgttttccctttcgccgctgtccatcgcatttcgaccgatcgttgtgcggcgatggatgactatgaacaccaattgggcacctttgacgaccaccaaaatgatgagggaagcgatgatggcaaattgttttcaaccgctgtgtcacgcatttggcacaagacattggcacggtggcacgaagcgagggatgcgcgggcacaaatcgaattgggactgatgaaggaggacaatgaggacgaagcccagcagcagggaggagaagcacagggaaaagcggaggacgacgacgaagatgatgaagaggaggagaaggatgaggaggaagaaagtgatgaaaatgacaaagatgatgatgaggatggactgctcggggaatatggacgactttcgccctcctg

SEQ ID NO: 85800 - DNA, 175 bp, Heterodera glycines
aaaatggcaggccgggtcaggtgggacacctcgctgtggacaggtgtgcccaaccatcaaatacggttcttcgtcgccaatttcgctctcacctccgcgcacttcaaagcgcccgtcgggcgccgatcgttcttcgcccaacaaatcatccggatcaagcgtgtcagcctccatc

SEQ ID NO: 85801 - DNA, 363 bp, Heterodera glycines
tttttttttttttttttttttttttccacttttctgccatttatttttattttaatgttattaattttgataacgatgcgggaaataaatgtacaattttattgtttgttgtgtcccaattgtattgcatttgctgtctttttcactttcttctgctgttaagcgatgcttcgcatttgctccgattttcccaaataatgcgccttcagaagaaaagcgaactcgtccacttcagcttctttggtggcaaatgtggtcaccaaacggaacagtcccttctccgtgtgcagcttcaactcgcgttactctccgtccggaacattccactcataaaaatgcgaaatttccccacttttgcgcaat

SEQ ID NO: 85802 - DNA, 391 bp, Heterodera glycines
tttttttttttttttttttttttttctgttctgcttcgtctcctttccatttcccatttctctccatccttttttgttctctgcactgtactgcttcgtcttctcgtctccttttccattttccttgtgctgtttcatttcaaaaaattgtttaattttcttccaaacgtccatcccaaattgctcttcgccagtgaactgctccatcttctccttcggtttttctgttttgttaatcattttttcagtttgcttttccccctgttgctccttcgtctccttttgcgccgtttttacctcccctttctctctctctctggctacttctcttccgtactttttccattggctctcctccctctctctgtctgcttctctcccgtactttttc

SEQ ID NO: 85803 - DNA, 330 bp, Heterodera glycines
tttttttttttttttttttttttttgctgttgtatgttgtttatccacattctctaacaaaaaaaacacattttcatgaaaaccctaactgtgtcgctccaccataattttctacatcgtcgtggggggggaagcgcctaaattagccgacaaatgaaaaaaatcgtgtgcgtgccgtgccattcatttcattatccatcggtcagtgggcgccgctcaatgcttcttcccctcgccgccgctgtcccccttctttttgtgcgcatcgccgggccacggggcttcgtagccaacgccaggcacccaattagtggccgggttgtgcaataa

SEQ ID NO: 85804 - DNA, 402 bp, Heterodera glycines
cttttttttttttttttttttttttgagaaaaacaacatatttgtgccacaaaaccttaccaagtccaatgttgcattcaacaaacaaatacaattcgaaaacgaattaatgatcgcactattacaatacatctcggaattagaacaaaattatagcctacaatttgacaatctttcttcctattgctcgccttccccgggctttgccttcgcttcctccgcgtccaaacgcgcgttaatcgcttttctgttacggtagctgcccggaagtttccaagcggagtgtcccagcacatcagtggaatagccaacgtaacagcaaaacatgaaaaagacgaagctcatcgccaaatacgtgatgaatttctgcttcagttccttatagaccttcttataaggttg

SEQ ID NO: 85805 - DNA, 665 bp, Heterodera glycines
  unsure (1)..(665): unsure at all n locations
ccacgcgttgggagctctccatatggtcgacctgcaggcggccgcgaattcactagtgattactcctttcggcttcagcagttctttatgcaacacgccatttctcagctccacctgaggcaactccaaaaatcccatgccaagttggacttcgtagagacgtttcctttctggtttacgatcttccaaaatgtgctcaaagatgggctcatccggccttttagatgatccagtgagcgcaagccaaaattcttccggcgtttttagctggttacaagactcaatctcggcttttcccttcttatcccttttgttcattttcaccgcgaaaagtcgcactttattggcaatcgttaccttcgaccgagctccactccaaatccaaataactttgtcacaatcaagcaaaaagacgaagcgtgggtccaacgactcggcattcaacggaaccgcctccatttcgacggacggtccgttgacaaatgctcgatagagtttgtttgagaaagcgactttttccacagcataaaagcccgattgagtgcgggccccgtcatagtaaacgatttcctcactgaacatctccagaaactcgtccgtttcctcattcatttcttcacgaattgtccgacaagatgctcccaaatgatttcgcanattgactg

SEQ ID NO: 85806 - DNA, 492 bp, Heterodera glycines
ggggatccaaatcaacgcggcacagtaataaaatattaaaagatccgaaaaaatgccaaacattttcaaaatccttctgattgtgcttttggccgtcgtctcgttccgtctctcggcttctactggtgacaaaaaaactgctaatgatgggagtggaaacaactcatcagctgggattggtacgaagatcaaaagaattgtcaccgctggactgctcttcacttccctggcgacgggtggggcggaagcgattgggcgaagcaatgctcagggaggaaatgccgccggattggtgccatcgcatgtgaccaatcgctcaatggctccaccacctcctcctgtgcaatttgaaatgggggcaaatcgattagaaaaaatgagggcacacctacgcgaacttgctgagaaaatgccggtcaatgaatcgaagcgtctgtcaccgagtggacccgacccacatcatcattagggccatggatggatctaacggag

SEQ ID NO: 85807 - DNA, 618 bp, Heterodera glycines
ggggttccaatcgcagtcccaaagtgcgctcgccgccggagtgtccggcgaagctttacaaaacattcgaacggtcaaagtgttcgccatggaagaggcagaaacggaactctatcgtaaagaggtgcaaacggcgtgttccctcggcgaacggctcggcgttggcatcggtctcttccaggctttgagcaatttcttcctcaatggaattgtattgggtgttttatatggcgggggacaactcgtggctgatcagcaactctccgcgggcgatttgatgtcctttatggccactgctcagataatccaacgttcggtgtcccaattttcgttaattttcggaaatggaataaaggcttggacttcttgcgcccgaattctccaattcttgcgcattgatccgaattgccataatcacttgaacggtaatgaacaaatcccaaggcattcgctgatcggtgacattcatctgcacaacatttgtttttcttacccaactcgtcctgaaaaggccgtgctcaacggaatcgatttgcatttcgccggtggacagacaacggccatttgtggcccgtcgggtgcagggaaaagtacaattgccgcattggtcgagcgttt

SEQ ID NO: 85808 - DNA, 545 bp, Heterodera glycines
gggaagccaaccaagtcgttcaaaaatgctgaagtgactgatcgtattgggaagtttgcaaaaacatacggaacgacacctgtagaaaacatgttgtcacaccaagtggaacgtttcaaaacggtgggcgaaaagcaaatcatccaaaacccaagtgacgagcaaaagagcaaagtggagaaatgctccttcgagaactttgaagtttactccattgacattctcatttcgactggcgaaggaaaggtgaagacgcatgatgctcggacaacagttttcaaaaaggcggatgacatcgtttattcattgaagttgaaggcttctcgggctttcctttacgaagcgcagcgccgctttggcgttatgccattttcgctgaggcaatttgaagacgagaaaatggccaaagtgggcagcacggagtgctcgaagcacgacctcatgcaaccgtaccaggttttttatgagcgcgaaggcgaagtggtggcacagttcaaatgcacggccattataatgcccagtggcattttcaaaatcaccggact

SEQ ID NO: 85809 - DNA, 464 bp, Heterodera glycines
ccgtttgttcatcgtcaacatcacttcgctgctgtccgtaaaggcatttccctcgtttacccaatattctgttggcacaagccgctcgagaggcatattttcgggcatttgctgttgagcatccaaagtgccgcgttctgaactacgcgccgggcccggtggacactgaaatgcacgcggaagtgaaagaaaaaacatatgactcgtccgtgcgcgaagtgttcgcaaatcgacgccatgacgcaaatttgcacaggaaattgctgaagccggaggaaactgtgcggaggctgatccaaatgattgtggaggaccaatttgaaagtggagcacgcgtggactatttcgatttttaatcacgaaggactgcttatggttggaaagtctgctttttgacattattcggtgattgcttttctcttctcaggctttatttttggtacgaaattaactcttttaacaaa

SEQ ID NO: 85810 - DNA, 550 bp, Heterodera glycines
gggatcaacgcagaaacgcatgacgttgtcggcgcgggtcgtctcttcaagcgacaaatctgcaaagagttggagcaagcgccgggcattgtcacgcgggagggaatcgcaaaaggcgtgcgaatcattgacaacggcggacagcccaaagcggctttggtggcggacgtgaaaacatgtgccttttttgccaacaaaaatttggaggacattgtcaatgggatgctgcaacagaagcgcaccaaccgaaatgacccgggacaaatggaccgtttttgggtcgaattcagccgactcttccgcggcgtcagcggctatttgacctacgcgccgtcgcgagtgattgtgatcgactcgatcagtcagcgcaagatgaacgacattagcttcgaagtggacggacaagcaatgagtatggtggactttttccgcgtcaaaaaggacattcgaatcaatggccaattgcccgccgtccgtcagcagaaagaccgcgagacgctgttcccgctgtcctgcattgtgattctgcccagccaacggctcccactgg

SEQ ID NO: 85811 - DNA, 513 bp, Heterodera glycines
ggcgatttcgtcggttgtggcattaatttggccactcggcggatcattttcacaaaaaatggccaacctttgaatacttccgatttattcctttcgcctccttttggtcttccattgtttccatttatttctttgagtgattctggcgatttaattgagacaaattttgggccaaaattcgaatttgaccccgcaaaagtccagcagcaggcatcttcaaatttccggcaaaattattgggatgccaatttttgtcatgagaatctcgaaatcattggcaacaaaagtctcattgtccattataagaaaaattcttatgatgcatggcgttccgtcttcgctaaatatccgattttgctcaacaaggattcgtctaacattttttactacgaaattttagtcaaaaataaaaattattggttcattagctttggattcgccgtcaaacagaagacaaaattggatggaataattctatatgaaaagggcatttatgtatatgaaagtgatggt

SEQ ID NO: 85812 - DNA, 379 bp, Heterodera glycines
ttttttttttttttttttttttttttttgcgggtatagggatgtattattcaacaaaaacacaaataaatagatgaacacaacaaatgaaatttaaaaaattaataattacacatacacattataataatataagttcaaatcatgcaacatttttccatgagggaataatttcagaaaaaataaaataaattttgctttttaaattttattttggaacgcctaattcttttaatcataattcctcgtgcttttcatcgtcatcaaatgctgtttcgtcgtcttgcgggtttccaacagcacttctattgttgctgctgcttgtcaaaagccgctttatttcgttgtccaactcggtccattcggacacaatgcgaaca

SEQ ID NO: 85813 - DNA, 367 bp, Heterodera glycines
ttttttttttttttttttttttttttttgaatttttcatttttatcaagtgtaagtcttgaaattgtaatttttgaacataatgtacccaacggaaagggacatggaaaacaggctgatcagcagtggaagacaataaaagtgatcaatgcgggacaagaaaatctttcgtccatcgattgacaaatcagctgggaaggaggacattgtgataatttcgccattttttaccgattggaaataattaaatgtttgaacaggattattgcgatgtgatcaatcacttccccgcccccttctgtttgctcgctttctttcttcgggtttcctcttattcgagtttgtaagtgatctgctcgaattgttcc

SEQ ID NO: 85814 - DNA, 301 bp, Heterodera glycines
tttttttttttttttttttttttttttttttgatgttacatatgtttatcggaaacaaaatattaatattttgaaaaccagtggatttgtcattttaaaattgattaaaattcgaattttattcaacaaacgaaaatagtaattataattcttattggaaaaaaagttcaatttgcgtttgattgtccaatcggaaatgaaaattgaagtgaagtatttactggatttcttctgctggcgattaaattgcatttggtttttcaatttcaaaaaaagtaaatggggatgaaaaggaagctta

SEQ ID NO: 85815 - DNA, 213 bp, Heterodera glycines
tttttttttttttttttttttttttttgtttttttttttttttttttttttttttttttttttcttttttttttttttactttttcctccatccttctcttccccttctttttctctctaaaaaaaaaaaaaaaacttttttccccccccccccaaaaaaaaaaaaaaaaaaaaaccccccccccccaaaaaaacaaaaaaattccccctttt

SEQ ID NO: 85816 - DNA, 419 bp, Heterodera glycines
ttttttttttttttttttttttttggcagtcgaaccattcatcgaaaaataaaaataattggaacattgagcggtattcaaaagtggtgcggggtaaaaggcataatggaattattttacacccaaagtgatcaaagacaaacgaatgaatggattagaattctttctctctcttcgatcagctgaagctgaatgttgtcggcaccgacgcattggcgtcaaaagaatagccgccggcctgcgccaagcgctttgacctctccaaattttcctctctcgtgcaaatttccatcaaatggttaagctttgcaactcgtgcctcgccaattcgttgctgatcagaaatgctgaccaaaagaggcgaattgcgggtattcatttcttccaatgtgtgtttgaacaaaacaaacacattcaga

SEQ ID NO: 85817 - DNA, 228 bp, Heterodera glycines
gggcgttcggtggacatttctgatgcggtcagcggcgtcgactttgcctcactttcgtgtctgtcgaccattactcaatcgacctctgacgaattgggcaaaaagtcgaaaggctctcccacaattgaattgctccgtgccgagtcggactgtcttcctcccgaatggcttttgcccaactcttccgacatcattttgaagccgctgattccaatggccgagcacagc

SEQ ID NO: 85818 - DNA, 364 bp, Heterodera glycines
ttttttttttttttttttttttttttgaaattttaatgccaaccaatcaacacgtacagacacccattggaatacggaataggagagaaatatatataaaatatgtgtgataatcatcaaatgaattatttgataggggttataaaaaacaaagaattcaattaaaagtcaaagggcatttcacattctgctggggaacttttctacgacgcctccggaagcagcagcacctgaaacagtctttcacttcgctgtgctcttcctcctgttgacgatttgggggtgggggccttgcgctttcctccatctctcctgcgtttgagtttaccacctgcgtggaaccgaagccaggcccgtggggtcc

SEQ ID NO: 85819 - DNA, 175 bp, Heterodera glycines
ggggatggaggctgacacgcttgatccggatgatttgttgggcgaagaacgatcggcgcccgacgggcgctttgaagtgcgcggaggtgagagcgaaattggcgacgaagaaccgtatttgatggttgggcacacctgtccacagcgaggtgtcccacctgacccggcctgccat

SEQ ID NO: 85820 - DNA, 533 bp, Heterodera glycines
gggacaacgcgagccgatcccgggagtgaaccctttgccatcttctgccaattcgagtggttcccttccctcgtctttatacccccgactgcctgaagtatctttgagtcggccaacacacacatattccgctgtgacttcgtcgccaaatatgagcattaataaatcgattgcgatgagtccgggaagagcggtggcagtgcaaataaaagagagcaaaaatgaggacgtctcccgcttccatcgtctccggcgaattcttggacttttggaccgggaaaagcccgtaccggacacagtcgtggacctggacgagctgcgcaaagagtgttggctgggcattccgcaccgtattcgcccgctcgcctggcgattgctttcggaatatattccaactagcctcgacagatgtgaaatgactttgaacaggaaaagggacgaatattggcactacgtcgagcagtatttccacacgcgatacgacgaacagcaccaaatcactttcagacagattcacatcgatatccctcgga

SEQ ID NO: 85821 - DNA, 517 bp, Heterodera glycines
ctgttgttccgatgttggtggtggtgcagcggcggcagttgcggccaccggctgagacaaagacggcggcggggcggtatcaaccgttttcggaacatcgacaatggaggaaagaggagcaacggcggaaatcgccataacttcatccttcttattcggtgtagacgtcggagagggcaatgagtcaacaacggttggagcagcatcagatggcgcatccggctttttctccggttccttttgaggtgagtgatccacgacaacggacgcctttttaggttccgactcaacaacgatttgatggagtttgccacttccaccattaaccattggaggaggagcaacctggccaccaccattttcgaggggctgttgctgttcagcgacagtagtcggcggacttggcacagtagcaccggcgttgttggccgcgttgtatttttcactaacggtaaccagaaaggcggtatccaaccactgaaaacacatcgctcttcacgtacaaaacggtgggcgt

SEQ ID NO: 85822 - DNA, 542 bp, Heterodera glycines
ggggatcagccacaactcggttcatccctaacaaaaccgaacaaatttgatatctaaaattattatgacgaagtcgaagtccagtagcggaacgactcgtaccaagaagcgtaccgctgaccaagttgtaaagacggtgttccgtcgcaaaatctgtctgttctgctttatggcctcactgattgttttcgcgctggtccttggtttggccatcactttgacagttatcacagtgaacaattggaaggaaatcggcgtgcttcttagcaaacaatcggcgttgaagagccgctcggacattgaagcgttttatgaaattgattgcccaatttacagtgacaactccaaacttccggacaaatgggaccaatttgatttggcattctgcaatcgctattgtgatcgcaaccaaatgttcgagttcatgtaccgtcaactcgaccccaaccggaaatcttcagccaagagcaaagacaatcaagagcttatgtgtcccatatacattgaattcaaacaatgtcagatggaggaagggggtcact

SEQ ID NO: 85823 - DNA, 434 bp, Heterodera glycines
gggttggtgatcagcgaatgcgatattcgtatcgtaatggatgcgttaagcagtggaaaagcattgctttgtctgccgatgtttgccgaacagttttatgtgtcggaaaagctgcgacgcatgggcgctgcggttgtgcttgatccgcgcagtggcagtttcaccccggaggggattccaaaagtatcggcgaagcattgacaaagcgtcatgccgttacatttccttcaaacgaagaatccctgaagcaaacaattttgaatgcattcaagaaacttgaatgattgcggtgtgtccgctgctgctgatcgcggttgtgacatcatacaatgtgccgcactgatcaaagagagattttcttttagtttttccatatgctttttctattttctatttgggtattagatgagtgattctacccgtttttcaatagt

SEQ ID NO: 85824 - DNA, 531 bp, Heterodera glycines
gggatgatacgccgtcgcaatttgcgtacccgttcgattagaatgctcgttttggatgaagccgatgaaatgctcaccaaggggttcaaagaacagatatatgacatttaccgatatctgccaccgaatgctcaggttgtgcttttgagtgcgactttgcctcacgatgttcttgagatgaccagcaaatttatgacagatcccattcgtgtgcttgtcaaacgtgatgaattgacattggagggcatcaaacaattttttgttgcggttgaacgcgaagaatggaaatttgacacactctgcgacctttatgacacattgacaattactcaggcggtcattttttgcaacactcgtcgaaaggttgactggttggcggacaaaatgcgagaggcaaatttcactgtttcttcgatgcattcggacacggaacaaaaggatcgcgacgctattatgaaatcattccgtgcaggggaaagtcgtgtattgattagtaccgacgtgtgggcccgtgggttggatgtgccgcag

SEQ ID NO: 85825 - DNA, 490 bp, Heterodera glycines
ttttttttttttttttttttttcggtctcattttatacaatgttcaaattcaccaaataaaaaaaagcaaaaataatccaaacagtaaactaataaaaaaacattaaatttgtacatggcccggatttcgattattttttacaattgcttttcctccgcaaaactttctcatccacgtcaacaatgttaagcattattatccatactcatgtatccgtcgtgccaactgttcttttgctgctgtttttgaagtgttttttgacgctgtaacctcagcagtgccgtcagttcgctcatttgtccgtttggttgtgccgtcgtcgtcgccgcttccgccgacccttccgcaaacggcgattggccgtgcgaaattgacttcactcgttggcgaatttcgcgcacaatgtccgtcgctcgcttaccgcgtgtttcaggcaacaaacaataaacgaacacagcgccaccggcactgaccaaaatgaaagggacg

SEQ ID NO: 85826 - DNA, 449 bp, Heterodera glycines
ttttttttttttttttttttttttttggtcttcgtttacgcccaccgcattttgcagtgcattgacaaattgggaaattgtgaatcaaatgtacacacaacacaaatcatatcaacgaacacttcgtttctgctgctttttgtctgtccattgttctgtcgaaatcatcccttttctcttttgttccgtttcattgtgagaaggacggcgcattggcagtccgtacgcccaccggctgttgcattcggatgagttgcaaaaattcggctgcttgttctggtgtcagtggtccgttcttctcctccccccgttctttctcgcccatttctcttccaattcgcgcctccggcactttaacttcgatcggacgcaattggaagttcacaatgtgtggacgtcgttccttcacgtccttctgactgatgttcaacgttttgatgccaatttca

SEQ ID NO: 85827 - DNA, 447 bp, Heterodera glycines
tttttttttttttttttttttttttttccacgaattatccctttttatcaaatatttattactttaaataagtgttggacatgtcaacaaaatgattttctgtgctatgtattttcctcctaatttttctgcttttctatgccctcaaaaatcgaaatccgatgacaacggggtgttttcctttccatggccaaccgaactgtgttggccagggttggcaatcacatggcttggacttggcacattttggtgcgcggaaatccctttgcttgggtgtccaatgtgcacatccgtaacttcaatgttcatttcttggccaattgctttgattgcttggctttcctgtacaaatttgcttttcatgttttgccattctgtgtcgttgcccgcatggccagcagcagcagcggccaagtcgaacatggcacgggcaaagcccaaattgta

SEQ ID NO: 85828 - DNA, 369 bp, Heterodera glycines
ttttttttttttttttttttttttttttactctatcatcaatttatattggcaaaaagaacatagataataatcgccggtttgccgtgtcaacatcgttcgatgggttcttttgtcccgtctcttcgctctctcagatcactgctgctgacactgcacgtgctgtgccccgcccggccccgtcggcacttcgtcgccgctgctgtcgtcatgggacgcctcacgacctccaccgccgcccgaactgcggtcatagcggcgcgggtcgaattcggtcagcgtcacttcctccacttccgaattcggagcaatcccaggctgatccggacgaggaggcaccaaaaaaagcaatttattgtatttgctctcg

SEQ ID NO: 85829 - DNA, 396 bp, Heterodera glycines
tttttttttttttttttttttttttttttgctctaaatttgcttcatttttttacaattttctgtatttgaaacatttgaatctttttgttctttggggggttttctctaaaaaactcaatcaatcccaaaatcagaacagtccgtcttcttctccttctctgccgcctcaagggctcttcccaccaattatcatttgaatctcagcagccagccacttccaatcgtccatgtcgattggtcgctgggatttgaaccaatcgttcacgtcgtcaatgtatcgggccactttggggatcgcttcctccatgcattgcttcactaacgtgttgccctgcgggtctttcgggcatccccccaggctgttaattgccttcccaatttgccaatggggggc

SEQ ID NO: 85830 - DNA, 463 bp, Heterodera glycines
gggattcattgcatttcctcctatcacttcattcccaaaatgtccttccttcgtctgatcacttttgttcttctgatcactctgtgctctttgccttctctggtcgaaagcggcctcattggcattgtcggcactcccgttgaagccgcttggtgcggtgttttgggcaaagaatccagccattgccctactgctggaggcggtcaacatggcggaggaggaggaggaggaggaggaggaaattacggtggtggagccccgggtggaaattacggcggttccagcggctcatacaatggccatcgcgcacgccgattcgcttgataaatgacaaataaagaaagtggatgatgatgaagtgttataaataaaaagtaaacaaaacaatctatttttaattactttattttaaattgtttttttaattctttagctattttagtgaatgttcgatgtttatttt

SEQ ID NO: 85831 - DNA, 398 bp, Heterodera glycines
ttttttttttttttttttttttttttccatttgatcactgtcccttttcttccatttgatcactttcccttttcttccatttgatactttcccttttcttccatttgatccctttcccttttcttccatttgatcactggccctcttcttccatttgatcactttcccttttcttccatttgatcactgtcccttttcttccatttgatcactttcccttttcttccatttgatcactgtccctgccgctgatcactttgttgttcgattgggctcctttgttcttgtccatttgtcctctgctcattcctttgctgctgttctgcgttttgtccgatcacttgtgcgtatgtcggcggcagttccgttatgggcaattgattaggattggttgtctc

SEQ ID NO: 85832 - DNA, 444 bp, Heterodera glycines
gggaagggagtgactgtggacaccgtggagcgttaccagggttcccagcgtcgggtgatcattgtcagcactgttcggaacaacgaaaaggaggcgatcggatttctgatgtcggacaagcgtttcaacacaataatcactcgtgcggaagagcttttgatcatcgtcggaaatgccaaagtgatgatgagggattcgtcttggaaggagatgatcgactattgccgcaaaaacggtgccacagttgacatgccgtctgaagcggagcttttcccatcgggccaatttcaaaatgatgtgctgacggacagtgacaagagcagcagcagtagcaacagcgaagttgatgagaaggagcgaactgaccaacttgtgaagaagggcacgtcgagtgccgccgctgctgaacaacagaatctcagggccaaggcatcttccgccgag

SEQ ID NO: 85833 - DNA, 542 bp, Heterodera glycines
ggggacaagtaattgtccaattaagcatcatatacaataggatggtattgatcgcggcatccattttcaccaaatcgggcaaagcacttgtgacacgccaatatgtggcagacatgaccagagcacggttggaaggacttttgaacgcttttcccaagcttatcacttcggataaagctcagcgccaacatactttcgttgagacaaattctgtacgatatgtctatcagccgatggacaacatttacatggttttgatcaccacgaaagcatctaatattttggaggacctggagacgcttcgtctgttttcccgagtgatacccgagtattgccgttccaatgatgagtccgaaatcactgacaaggcattcgatttgattttcgcttttgacgaaattgtcgtgcttggttatcgcgaaagtgtcaacttggcacaaatacgaactttcactgagatggactcgcatgaggagcgtgtgttcaatcaaattcaaattgctcaacaacgcgcagcccatacactgatgaaagagaaggag

SEQ ID NO: 85834 - DNA, 280 bp, Heterodera glycines
tttttttttttttttttttttttttttttgttttaagtaccgattttttatcggcgaataaaataagtaaatgtggagaacagaaatatgtgtaatggaaagaaacgggtgaagtaaaatatttaacagcaacggaagatttatgtcgtaaaaaacagttcactccattccgtgatcactttggtcactttcttccgatggggtttctctagacgttcctccgcattacggaaacgttcgtgctcattgccttgcgggtcgtccttaaagtacgggtcct

SEQ ID NO: 85835 - DNA, 372 bp, Heterodera glycines
tttttttttttttttttttttttggtttgaaattccatcagctgttcttttttttgtttacaattgacaaaatgtcattcaaatttgaacattttaaaccatttgaatagggcaagcttttcagctggtgattacttatgctgttcttcgacttcgttcttcgtccttttgttcagtcctcgtcgctatcgctcgacttgaaaaagcggggcactttcacataattcttcggcgttgtggtcattcgatgtgcgatgcccttaaggatgatgagtaagtcgccatactcacaaaagatgcgtatccaaactccgtctttggcttcgacgtcgtaatatgccgacccttccaaaaccatccgtgcttgatcct

SEQ ID NO: 85836 - DNA, 340 bp, Heterodera glycines
ggggtgcgcgacttgcagcagcaagtcaacgaattggaagagaaggccaagaaaattgaacaccaaagaacgaagaacttaagtgccatcagtgccatcaaccagcggaatagggaccatatgaaacaaacattccttggtgccggaatggtgcgggaagagcaggagaaggacgacgacccattcacacggaagtcggcgcggatgaaagtggtctcgggatccgtgaagtccaaaaccgccggcgaaggaaatggcgccaatgccgagttatccgttatggacacgatggtttcttcgttgggttcgttgtcgtcttcgtcggagtcctctccaaaca

SEQ ID NO: 85837 - DNA, 253 bp, Heterodera glycines
gggaattgtcaccatcgtcggcgctccgatggacgttgaaaaggtttccgcccctagcgatgagctcgtcaacaaactgcatgccgaatactgcgcacgacttcgcgagctgttcaacgcacacaaagtgaagcatggcggacttggccacgacgtgcagttggaaattgtgtgaaattggcaaatgaaaggccacaaaaattagaagctcaattttcgaatctaaaggacaaagtgcactcaaatacaatat

SEQ ID NO: 85838 - DNA, 255 bp, Heterodera glycines
ggatgataggtccgggctgggttggccagggccgcgctgccattcaagaaaccgccgtcggcgctggcaggcccccaacgaaccgagctgaaaccttcttccagactgtcacgctcactgtaggccagcgaaaacagggcgcccagttgaccgtcagcccaggtgttggacaccaatccggcgaatcggggactccaatcctgcgaaaggtcattgtagccgtactggcccgacactgcgggttggaagcccggc

SEQ ID NO: 85839 - DNA, 398 bp, Heterodera glycines
tttttttacttttttttttttttttttggagcacacagaatttattatttttcaattgaagttttttaacaaatagaaaatgcagaatttttaaaacttttttaccgtacatttattactgggctttgggttccgggatttatgggtgcaatgcttataaatatggcaataattaaactttttgcaaaaccgggaatgtttcccatgcgccgggggggcgaattcggcacttttcgatcggataaaattttcaattcccgttcgccccctcggattgaccgagggttaagaatttgaagaaaattgatcaaatcgcatttcgcttcacatccggggattgccattggctccaaaatttgatttcgtcgataaaataatttgacaaaaaagtttttgtt

SEQ ID NO: 85840 - DNA, 272 bp, Heterodera glycines
ttttttttttttttttttttttttttttccacttgttctgccgtttatttttattttaatggggttaattttgataacgatgcgggaaataaatgtacaatttttttgtttgtcgagtcccaattgtattgcctttggtggctttttcactctcttctgctgttaagcgatgcttcacatttgctccgattttcccaaataatgcgccttcaaaaaagaagcaaactcgtccacttgagattctttgggggcaaatgtggtcaccaaacgga

SEQ ID NO: 85841 - DNA, 393 bp, Heterodera glycines
tttttttttttttttttttttttttttccggaatgtttgtttaattaattaagcgaatgtttggcaatttcaacagcaaaaagttaaatggatgtgcttaataatgtccaaattggcacttccatttgctcttttctcactttcttttcgtcactttgcatttgtaatccgccaatttgacagcgaatgtttgtcgcttttcaaatttcggcggatttaaaggatcacaaggataaacatggaatttgtggaaaaaattcgccgtgaaaaggaccaattccattctgccgagggtttcgccagggcacgaccttttgccgattccaaacggaattaattcgtccactcttcgcatttttccgtcttcctccaaaaaacggctcggcatgaact

SEQ ID NO: 85842 - DNA, 480 bp, Heterodera glycines
gggcaatttctccttaacttgtcctcttcctactctcaatggatttctaaggcttttgcttctactggaaagggaagatggtatgcacagccattagatgaaatgagtcgacatcggagtcgtccgccctgttacggcatggcgaggaggtcgaaggtgctctgcgtggacaattcagagattgccaaggaagcaaatatgagtgggaagctggcctatgtcatttgggtgtacaaagacgggtaccgcaaaaggcacatgccgaaggcagaactcggcgacagggtgttgctctcaattagaggggagatgaaacgtgctgtcgtcgtcgggtgcaagcagcacctcgccatccgaaagcacgggttgccctccaccgacaccaacaacgtcgtcctgctgaacaacgacgggaaccctcttggcaatcgcattttggcacctgtccctgcctattttatgcggtatcgcaaatggcta

SEQ ID NO: 85843 - DNA, 359 bp, Heterodera glycines
tttttttttttttttttttttttgggcccaagtaggtttatcgacaaataagacaaagacaatagaaaatgaaatattcaatgagaagaaatatttaggggaatgtagaaatacttgaatgttgggggctgggagtatttgtcaatcaggcgagtaattctggtgggttttcaaacatttagacaccattattaatgggataaaactaaaatatcattaataaaatccgaccttcacaattaacacttcgtttagctccttcttccttcttctgtcgcttccggcgaattctcttctgtctttggctgctggtcctcctctcgaattgggcacgtttcttcctcatttctctgggaatt

SEQ ID NO: 85844 - DNA, 395 bp, Heterodera glycines
tttttttttttttttttttcgaaaaaaaaggtttacccgttcgggaaaatggagacaaagcacaacaaacaacgaattaaattaacgaaaacaaagaatacagaaagctaatgaaatacacttgatgggaaagcataaaaagacaaggtactagaaaattaataaaagtatttatcgagtattaattataatcggcacctgacaaaacaaacagtactcgtacttaatggacgtgaacaagaactagggcataagccattaataaacaaagtggatgagtgtgtcgacgcccgtgtgagttttgtactcagtgaacattattatcaagacaaggcggtgtcatgaaatcctccaccaccactggagcccgctttctggtcgctgtcatcgtcgtc

SEQ ID NO: 85845 - DNA, 256 bp, Heterodera glycines
tttttttttttttttttttttttttttttcgattgcattttattattaaataattaaaacttttccatttttttgttcaaatgaatttaaatcactttggcttttccaattgcttctgcttcggggccctttcaattgttcaacactgagtcccaagtgagtaaacccaaaagcaatttggccaaaatatggcccaaaaggacggacaaaatcagccatcccttcaacgtcatgacaatgatcatcaaaatgtacc

SEQ ID NO: 85846 - DNA, 446 bp, Heterodera glycines
gggcggccgtcgtccgcagactttgctagccccgtgccacacgtaagaaacggcgcgagtctcgtcgatttttacattggtctcgggttggccatcagctcgagccttttcatcggctcctcatttatcatcaaaaagaaagcactgataaaacttgcggggtcggcagaatacaaccaaagagcgtcggaagggggtgatggctatttgaaggaatggctatggtggatgggtgtgataacaatgggagttggcgaggcttgcaatttcgccgcttacgccttcgcccccgcgagtttagtcactccgatgggcgctttgagtgttctcgtcaccgccgttctctcttccaaacttttgaaggagcggctcaatttgctcggcaaaatcggatgtgccatttgtctgctcggctcaacttccattgtcattcactcgcccaaaga

SEQ ID NO: 85847 - DNA, 337 bp, Heterodera glycines
ttttttttttttttttttttttttttttcgatgcaaaagaatttatttcgcgcgaacgttcgttggcatttcttgcgttgtaagattaaattgggcttttctcgtcattcatccgcctttcgttcattcctttcttttcgtccttccgatttgttcgtccgtccgtccgtctttcaccaccaataccccgaatagtccgggtaagcgtggccgtagtacgacgaggcgtaagggtaagcgccgccccatccgccgtatgcgccgtagtaatacggactccaacgtttggcacgccccgcctcggcttgatgttgcccgccttcgaacattggccctt

SEQ ID NO: 85848 - DNA, 376 bp, Heterodera glycines
ttttttttttttttttttttttttttttgcggaaaaatattttgttaatctacaaaaaatattacacattctgagggacaaagcacacaatgattaagcaagtttaaggaaaaagtaaatatgttagttttttgtttattaaaacccaatacttatttttattccgtgtttgacttcgtttgatataaccattatctcatttattcttcgatgcattgggctcgccccggcacagtgtttttaattgcacgtgaaaacggggccaaccaaccgttttcacccgagccatggattttctcgagaatactcttgaacaaacaagtgtagtttaatttcatatctcgtcaatcaccttccaaccaagcaccgattccca

SEQ ID NO: 85849 - DNA, 440 bp, Heterodera glycines
tttttttttttttttttgtgtctgtttttgcattctctccgttccttcgtttcaatttttgtccaaaaacaaacggacaattcgttctctcacttccattcgttcacacccttccgctgaacatttgtaacccatcggacaacacttttggctttccttgcagcaaattcctttgctcaatggacaacagccgaaggtcgtcgtttgttcgccttcatttgtcgggagggagtgggcacagcaaatgtccgtcggtgaaccacagaaagtgccgtcggggcattccgttggcatttttgtgccgtggaaacgtctttttgttgcatggtgcgtcgggaacatttgggtggaaagggaaatgccattctgttcactcacacaccgttcctcctcccgcgcacatgcaaatcccgcggggcaacaatgggccgagtgggcgc

SEQ ID NO: 85850 - DNA, 435 bp, Heterodera glycines
  unsure (1)..(435): unsure at all n locations
gggcaatccgttgcccgaccacatccaggtcaaagagccaccgattgacgtcgcgccgaccacgccgtactcggagcaccgcgaaccgatgaccactggcatgccgccccagacacaaatgccgcccgcccatcagcagcagcagctgccgatggttggccaagtgccgcccccggcacagttttaattgtgaggaagaaccgctgatgatggtcatgatggatgagtgggagatgttcaattaaaatttgttatttgtgtgtcatcggcacagaccacccatttttgttccgttaaaaattctttgttgttgtttttgttttcaatgatttttgttattgctnaaaaaaaaaaaaaaaaaaaaaaaaaaaaaaaaaaaaaaaaaaaaaaaaaaaaaaaaaaaaaaccccggaaaaaaaaaaaaaaaaaaaaaaa

SEQ ID NO: 85851 - DNA, 432 bp, Heterodera glycines
ggggtcattggcggaagagatgtttatcacagttgctccatcggacaatgcgcggcaaatgatttattcctccatggaacaaatgcagcaatttttgaattttgacgaacagattgaagcggcggagaagcaaacggaaagagaaaaagacgaccaaaattcggaggaatcggagaaaatggcactgaaaaaattatttgagcaaaaaagtgccgaatttgaaattaacaaagcaaaagcaaccgaaaaactttccgagatgttggcagtacgatttgagccaattttgcagaaggaggaggaacgaatgatggaagtgcaaaggaaacacttttgggaatgggccgaacgcagaaagcgactcattcacagtcaggcgcaacgcgcggaacatttggcacgactgaacgaaattcaaaaaaggagggccga

SEQ ID NO: 85852 - DNA, 315 bp, Heterodera glycines
ttttttttttttttttttttttttttgcatttcgctgcgttttctgaagccaacaaaatcatttccgtcaagaacatccaatgctcttttgcccaaatcagtgaagtcgtccccgtccgctgtagtcaaagccttctttttcttcagccccatgaaatcgtcgccttcgagtgaatccaacgctcttttttgaaatgaaccgaacccattggcgtccatcacattcaatggtcttttccgaaatccgccaaaaccatccgattccaaaatgtccaaggggcgccttggacgaaaggggatgactttgaagggtcc

SEQ ID NO: 85853 - DNA, 553 bp, Heterodera glycines
ctgttgttccgatgttggtggtggtgcagcggcggcagttgcggccaccggctgagacaaagacggcggcggggcggtatcaaccgttttcggaacatcgacaatggaggaaagaggagcaacggcggaaatcgccataacttcatccttcttattcggtgtagacgtcggagagggcaatgagtcaacaacggttggagcagcatcagatggcgcatccggctttttctccggttccttttgaggtgagtgatccacgacaacggacgcctttttaggttccgactcaacaacgatttgatggagtttgccacttccaccattaaccattggaggaggagcaacctggccaccaccattttcgaggggctgttgctgttcagcgacagtagtcggcggacttggcacagtagcaccggcgttgttggccgcgttgtatttttcactaacggtaaccagaaaggcggtatccaaccactgaaacacatcgctcttcacgtacaaaacggtgggcgtttggtgggccaaaatgatggtttggacaaagcgtcgt

SEQ ID NO: 85854 - DNA, 413 bp, Heterodera glycines
tttttttttttttttttttttttttttttggtttttttaaaaccactaacatttatcacaagcttccatccaatacgttcatataatatttaatagcaattaaaattttagggataattcacagattaaattcattagaaaattattgaaacatctctccattctggcgggtcttgaaagcccattacgggccgttaattacagaagatttgctcttttcacatcgtttgcctgagcatttgatcgcacctttcttgtcgagttgattgacgttgacactttcagcgggtggagatccgcatcatattccagtcggaaaccatgaagcacttggccattaaagggtttccattttttttgggcttggttacaatcgttggcaatttcattggctttctcgaaattttcaagaa

SEQ ID NO: 85855 - DNA, 584 bp, Heterodera glycines
ggggaaatggcattttgtttctttttaacaattaccttttgtttttcatttaccctttccgtgaataacttgatgaaaaaatgacttccccagcggaatcgctcaatttggacgcagcggaagtccccgaattgcttaggaaggaactcgatacgcttcacaaagcattgggtgagaatatgcaacggtacacggaatgcaaagagataaaagtggacgaaggactgcgaactttggaggcgaaggtcggcagattggcactgtccataaattcgcacaaaggcattttgaagcgggagcgaatgcgattggcagaaactgcgaaaagattggggctggaccaacgcattgcgcacaatgttcagcggacccgggataatttggcaaagagcccacaatttgggcgcgcccattccgtggattttttacacgaagtggcgactcagaatgaccaatccctggcggaacaatgcgaaaccgtcgaaaaattgcgaaaattgttggaccgactgagcaattcagacgaagagccgtcattgtcgcgaaatgacctggtcgatcatcttactcgatttgaccgcatt

SEQ ID NO: 85856 - DNA, 204 bp, Heterodera glycines
tttttttttttttttttttttttttttcggaaactaatttaaattaccaacaaattacaataattaatatttgttcttctcttcctttttgcactttttccttctttttctccccttagcttctctccgctctttccgtcttcagttctctctcaagcctcttaacttctctctccgctctctccggcttcagttctctctcat

SEQ ID NO: 85857 - DNA, 560 bp, Heterodera glycines
ggggattttgtctggctcggcacatccctggtacatactaaataaagtacatttttgaccattgaaagtagtgctttatattgccattcttcaaattaaacttttgctaaaattccatggacgaatcggcgaaaaagacgctaaaacaaattccactgctgaaaacaaatgcagggccacgagacggacccctttggcttgaacggttgaaggaggagtacaacagtttgatcgcgttcattgagcacaacaagcagggcgatgccgactggtttcgacttgagtcgagcgcggatggcactcgatggttcggcaaatgttggacctaccacaacaaaatcaaatacgaattcgatgtggagttcgacgtgccgattacatacccaaaaactgctccagaaattgcccttcccgaattggacggaaaaacggcgaaaatgtacaggggaggcaaaatttgtttaagtgatcacttcaagccattgtgggcgagaaatgtgccgaagtttggcattgcccatgccttctcacttggccttggcccatggatggctgtcgag

SEQ ID NO: 85858 - DNA, 291 bp, Heterodera glycines
tttttttttttttttttttttttttttttgctctaaaatttttttatccaattttgacattcattaaaatttgaagtttggggccataccaatgttttgtgaatggaacgcttgaaaaattattaatttttacataattagagctagataaaaaaaattagcttttaagcgaatataaaatgcaaatgttcaaaaatctgagaaatatgtttttacaaaaatcctggtgttcttcaatcgagcattaccgactttggtggcacttccaccgattgatgaccgtactcctgt

SEQ ID NO: 85859 - DNA, 467 bp, Heterodera glycines
gggagaatttaaaaatcataaaaattcaaactcatcaaattcactcaacatcatcaccaaccgtgaacattatgctgaggattgctctactcatctccattttggcactgtttggtgattgcatggacatgggaaaaagaaaattaggaggaatcagtattaatgagccaagtgaatatggaaccaaagaaaaagaagccatcgcaacaaaagaaaatgcacaaacatcaaaggacccgccgacatcggcgggtggtcaaaatgaagcaatcccttcaccaaaaaagccaagccccaaggggaagttgaaaagcgattttggcctaaacttagccaaggcttttccacggccggttccgaaaggcagaaggggcaaagaaaaagtcggcgaaaaaataagcgttatgaacacagctgaacgcattgaaaaaatggacattgcccaagacaaagctaaaatggaaata

SEQ ID NO: 85860 - DNA, 244 bp, Heterodera glycines
ttttttttttttttttttttttttccttttttttttttttttttttttttttttttttatcgcaaaatttatttttaaccctgcccaaaatagtcaacaaaaccggacattttcccccaacaactcgatcaaaaaatgggatggggtaaatcccaaaaaaaacaaaaaccgaatccagatctggaaaattcccattacctaaataaatgaaaaacccaaaaaattgggggggaaggaaggggga

SEQ ID NO: 85861 - DNA, 268 bp, Heterodera glycines
ttttttttttttttttttttttttttttgcaaataaaaaattttattttataatttctacaggatgtttattgggttttcatgtttatctcttttacctctatcctaatctcttgcaaaatcccttctgccgctgctccatcactgctccctgttgcccttgaccaatgccaaaagtgcgtctcggtaagctcccctggtgtcccctttgatcccctcctccaagctcttcttgtgcaacgtgtgaaaagcgtgtttgatgtcagcca

SEQ ID NO: 85862 - DNA, 354 bp, Heterodera glycines
ttttttttttttttttttttttttttggccagttaagtctttatgtataggagcaaaaaaaattggataaaaaacacatctcaattttccatcaaatttgtcctttttgcttccatcatttgacccgttccacttttctatttcggtttccccttgccgcctttctttttcgttccaaacaactgagggcgagagaagcgagaagtactgctttcggcgctgacggaagatttcttcgaaacagtgtgagtgcgggtgggatcgccgggagaaaaaccacctgcgggggggccggcagatgtcttcgatacaatgtgagtgcggttggtttccctgcccccctttgtttgaatg

SEQ ID NO: 85863 - DNA, 474 bp, Heterodera glycines
gggaccaaacagtgcccgggactatgcaaactgctgtttcacaagcagcacagctccattcaacccaaatgcagcagcaacaaatccatcaacagcagcaagcgaccattgctcagcctcagcaagctgtttccgccggaatgggcgcagtttcttcttctggcggacctgcgattaatccgcaaactggacaaccggactacagtgcccagtgggccgaatactaccgcaccatgggaatgcatgaacaggccgcactcatcgaagctcagatgaagcaaacccacgccgccgctcaggcacaacgtcctcagcaacaactttacatgcaatgaaggcttgcagaactcgtcgaagaaagacaataatgtggctgaatttctggttatttggattgctttttctaatattatcagtttccgttcgatttcttttatatttaatcatcattacgaaccgttctttgactgattt

SEQ ID NO: 85864 - DNA, 419 bp, Heterodera glycines
ttttttttttttttttttttttttaaaacttgctttttatttcggatattttttaatcaaaatggattcgataggattaatatcagtcaaattgcgtttttcaaattcgatcatatgacaccgctaagttcgacttcggcacactgttcaatcagtgccattttgatacgttcggcgtccaactcgggtcgctcgcataaattggccaaaacataggcatatttaagcgcgtacggattttcgctaaatttgaagcagaaattgctgaacgtgtgcaccacctcatggtgacagtccaagtcgcgaatttgttgcggatacgtcgtcaaaatctgtcgccggttgttcatgtcgtgcacaagttggtgcacaatttgtttaatcgtttgctcgagaaagcttctttttttccacgccac

SEQ ID NO: 85865 - DNA, 427 bp, Heterodera glycines
gggggcagcgatcggagtcggcgtcaacttgatgtgtgttttttgggtcgaaatgagaaaaatactcgacacgaatgtttcctatttgagcatgggcctcttactgtaccttggcggacattcgcacagccattcccaccatgggcatggcacacattcgcaacggcaaaccgaccgtacgaactttgcagagaacgagtggggtacggtagacggacggccgggccaaaacggtggcaatcgccagacgcacggcacgcggagacagacgaacatcaacgtcagggcagcatttgtccatgtgctcggtgatctgatccaaagtgtcggggttttgttcgccggattgctaatttattggaaaccgaattggcacattctcgacccaatttgcacgttgcttttctccgcaattgttctcagcacc

SEQ ID NO: 85866 - DNA, 165 bp, Heterodera glycines
tttttttttttttttttttttttttttttccagaaaaattccattgttttttgcctattccttcttctctttttcgacttcatcatcatcatcaccagccgcagcagcagaaggtttctccgagtcgtcgacattgctcttgtcagtgctagggccggcgaagct

SEQ ID NO: 85867 - DNA, 437 bp, Heterodera glycines
ttttttttttttttttttttttttttttttttttacacaattacaacttcactttcgttattaaactgttttttcctctagggagagactcaaaagtcccttctctttctctggtgtggcgtctgacaggggactctcttcgtccccccttttttttcccttcccttcactctgtgtttcttcattgccaacacttcctttttcctggggtttcttttcccccagtcttttctcttccgccctctttttttcagtgtcttccacaagtgtttccatggcgaccaaatgcggattccgcccctcttcttttgtcgcgagagtctgcccctttttctcaagccttgccccgtgtatggacattccggtgtccgccgcccattttgcaaaattccaggcgagtgccatattcccaaacaccaacccattttccagcttca

SEQ ID NO: 85868 - DNA, 466 bp, Heterodera glycines
tttttttttttttttttttttttttttggttttttttttttttttttaaacatttttttattattattattcctattaacaagggggggtttgtacaaacaaagactaaagatacgcctacgaaatgaagaaaagcttaggcttggatttaatcctatcaaatgtatcttctgtccattgggcatcacatggcctatcatcgcccacgcacttgacccatcactccaacaccgggacgacgaccaccgcaacacaaagaggcggaatcttgagcaaaccattccaacttggcacattcggaaatgttcggacgaaaagccggttggtaagtcagcaaggcatcgatggcagtgcggcattgcttcgtaatgttaggccatgacgggtatttgtaacggcgcttccgctgcgagtcaacgatttgctggttgggcaagtcttcatggaaaggcattgtgtttgtgat

SEQ ID NO: 85869 - DNA, 339 bp, Heterodera glycines
ttttttttttttttttttttttttttggatcataatttacgcacaaaagaagagaaagaaagggacgaaaccattatagaaataaaacaaaaggtgtccaaattcggcgccaaaaatcagtcaaattcccctcattgttcacacattgtgcgcccacacattgctctcttcccctactcttccttcctccgcatcatcatcctttgctcttttcattcgtcatcagccttgtcccgtcggttgcgctgcggcgcctgaaaccttcgaccaccgcctccaccagcacgatgtttctgcccaccgcccccgcctttgccgcccccattgtacggcacgggc

SEQ ID NO: 85870 - DNA, 313 bp, Heterodera glycines
ttttttttttttttttttttttttttttgcgctttttgtctttggggttcaaccaccagcagtctctctctcgtccacttttgttgccaactttctgagttttttcggggacatcgcaactcttttgttgtttgtaagtcgcgccactgacattgagttggttgatggcagaatcacttggttttctgctgcttgtcgaaggcgtgttctgagatgtgatactcgacgactttcgtgatgcaggaggagtcatcacctgcggcggcgacgcttgctgaataagtttttgaagaaaaggtctcagttttgatgc

SEQ ID NO: 85871 - DNA, 354 bp, Heterodera glycines
tttttttttttttttttttttttttttttggccttttttttttttttttttttttttttttttttttttttttttttttttttttttttttttttttttttttttttttttttttttggggaaaaaatttttaggggaaaaaaaagggccccaaaaaaattttttttttaaaaaaaaaaaaaggggccatttggggggggttttttttccccccggggggttttttttttggggggcccccccaatttgggggggaaaaaaaaaggggggggggggggaaaccccccccgggggggggaaaaacgggtttataaaccccccccaaaaaaacccccccccccccggggtttttcg

SEQ ID NO: 85872 - DNA, 411 bp, Heterodera glycines
  unsure (1)..(411): unsure at all n locations
ggggatgaggcggacactgagcccggtgttcagtgccgaggattggcttgagtttgtgctgcccgaaagtgtcggaatggacggggatggggtgccacgaccattgtccttcaacgtcgtgctgttcaaccacgacggggtaaagcgcaatgagccgatcggacatttcaccgtggacgccgagtcggcacttttcaacgcgacgttcaaaagggcggaggaaggcggagaaaaggcggaatggcacgcaataatgccattctgagcagcaggggaaaggcggaaacagaaaggacggaagagccccgnggaatagactgatcggacggaacggaacccccgnnggacggattgatcggacggaacggaaggaaagaccctcggtgggacaaactgatcggacggaacgga

SEQ ID NO: 85873 - DNA, 379 bp, Heterodera glycines
  unsure (1)..(379): unsure at all n locations
ggaattggacgaacaattggacaggcgaaaggcggaggaggagcagcagcagcgggcgaagggacgcgagtatttttgcgacatttgcggacggacactttggtttgcggacaatgtgcaggcgatcaaacacaaaaagggacaccagcaaaaggaggaggagaagccgaagcaggacgaagacggagaaagaacagatggatgaccaatagacacaccgtttcaaaaaacgagagatgaaccaataaatagggagtgcacagaaaaaaacattcttattttggcgtactatttctttgtctctgataatagagaaaaatcgaattaacaccgatagagaaaaaaattctgcatcgacnnnnaanaaaaannnaaaaaa

SEQ ID NO: 85874 - DNA, 273 bp, Heterodera glycines
ggggagttcaacctgctctaccacctggacactgtctatgtgattgacctcgcccaagccatggacatttcgcatccgtcctcgctgcgcttcctccaccgggacatcacgaatgttttgaacttttttggtcgcattggctgtgagccgttgcccacgccgcacgcattctttcacgaagtgaccgacattgagttcgacccgaacaaaaatttgtatgttcaggtggagtctttcgagcgcgagaatcggaacatggacttgaagggggcg

SEQ ID NO: 85875 - DNA, 562 bp, Heterodera glycines
gggacttacagttggatccgtcaattttcaaggagagccaaccacaaatcatcatgcctgaaggttatgagtctggtcggggaaaatttgagttcgctctcggttacatcggttgttcggttatcggaggattcggagttggaagtgttcgtggaatgttcggcgagttaggaaatccacagaacagaactttggcttggaatccgtggtacactcggatgctgaatgccgccactaagcatggcagcggatacgcacaaactgctgggactgccatgtttctctattcggtcactgagttggggctgaagctgtcacgagccgatgacttgcttaattcttttatcgccggaccaatcgctggcggacttttccacggattgcctcatgggctgcgtgctggcggtgttggtgcattggccggactgggtttggtcaccgtctggaatttgtgtgatcgagacagcagaagagagttgcgcgaaatcctccgattgtcttaaatacgttgttgctcaaccttctttattatagtcgttattgaataaatttgtttgaaact

SEQ ID NO: 85876 - DNA, 264 bp, Heterodera glycines
ttttttttttttttttttttttttttggttttttttttttttttttttttttttttttttttttttttttttttttttttttttttttttttttttgggggggtttttcccccctttccccaaagggaaaaaaaaaaccaaaaaaaccgggggggggggaaaaggggggccaaaaaaaaaaaaaaggggcttttttccccccccccggggggaaacccccccgaaaaaaaaaagggccccccttggggggggggggggggggtt

SEQ ID NO: 85877 - DNA, 360 bp, Heterodera glycines
  unsure (1)..(360): unsure at all n locations
gggaaaaattatgtgtgtgtttgcctcgtaaattagaagagtaccaactccccccccccccccttcttgacgatgcatagtcacaatcactgtttagcctgccttccaatatctgatgaatatccaatctccgccgatgttcgtttggcttttcgcccccgtcgtcggcctttaccttctcattttcaacgaaagccgtaaatatttcattcgcaaccacccaaacaacagaattgtgcgattactaaagttttaattggatacttttgtattgatatttttcaagaaatattcaaattaaaatttaanaaaaaaaaaaaaaaaaaaaaaaaaaaaaaaaaaaaaaaaaaaaaaaaaaaa

SEQ ID NO: 85878 - DNA, 151 bp, Heterodera glycines
cgaaaggggcgggggagggaaacggagggagggcatttgccagtttaagggagtgatcagcaaattcctcctcttgcgatcactttctccttctttaagttgaagaaaggtcgcgctctcatatcacttcattgtgaagagtcccatcagt

SEQ ID NO: 85879 - DNA, 525 bp, Heterodera glycines
gatctgatcattgaccctcagcataatattctcactcccagatcacttttgttgcaatttcactcttcaacattctccgttttccgattgccatcttcgcaatgatcggctctcaagccattcaaacagccgttagcaatcgacgcctcaaacattttttggccgccgaggaaatggagcctttgttgagagggagaccaacttctgaaatttcgataaccattaaaaatgctgactttgcctgggaaaaagatcgatctttggttctcaaggacatcaatttgtctgttcggaagggaactctgttcgcaattgtcggaaggaccgggtccggaaagagcagccttttgtctgcaatgcttggcgaattataccgcaaatcgggggaaaattctctaaacggaagtgttgcgtatgtgccgcaacaggcttggattcagaatatgacgctggagaacaatgttttgtttggccatgagtttgactccgaccgttaccaaagtgtgctcgacgtgtgcgctttga

SEQ ID NO: 85880 - DNA, 596 bp, Heterodera glycines
gggctgctcacttctcggcctcaatgtttacttaaacgcgctgatgatgttcaaagtgggaccgaattcccagcgcaatgttttgccgtcggtggtgaagcgcgactttcacttctgccacctttgccaatcgaattcgcctccgcgttcatttcactgtccggtttgcaacttttgcgtcttccgccgtgaccaccactgttccttcaccggttcttgcgtgggtcacttcaatcagcgttattttgttgccgctgtatttaacctgtggccagtcgtgttttcatgctgcgtttggaattggcatgcgcttttgctcgccttctctccgatcagtctgtccgactttctcaaatgggtcttcccgcacatggctttgctgttccgcttcgtctctttccaccaattcttcgtgattttggcctttgccttctctttcatcactttgctcttcactacttatctcatctttgcccagattttctgtttttggcatggccaaacgcgtgtcgaatatttgatggatgtccacgcttataatttgtcctttcgagaaaatcttagcgcctgtcttggctcgcgatggcccttcattt

SEQ ID NO: 85881 - DNA, 288 bp, Heterodera glycines
ttttttttttttttttttttttttttgccttttattagtaaattatcaaagacataaatagtattaagagcaatcaatcattttgtcaaagtgaatgtgaaaaatcacaaaaaaacaacctaagaaaataatttatttcaaattcttattttttggtccgcctattcgttcgtccgacagccaattcaattgtcagtcagtcgaggcaattcagtttgttcacggagcatcgctcaaagcggcgacgccgggcagaaccttgccttcgagcagttcaagactggcacc

SEQ ID NO: 85882 - DNA, 229 bp, Heterodera glycines
ttttttttttttttttttttttttttttcgaaactttttctttaacacgaaacggatcaacaaattaaaaataacaattgtcggttggttttctgtgctcgtgcattcgtttgcccccataatgcctcaagcgacaatttcgaatttgacgggagccagccgctcaactttggtgctcttcactttgaccaagtgcgccccccggggctccttcggcttccgcttcagc

SEQ ID NO: 85883 - DNA, 389 bp, Heterodera glycines
  unsure (1)..(389): unsure at all n locations
cgggggaaatctaaacgaagaaacgttcagaaatttagttacctttgncctttgctcagctctttcaagtgttttaaaaccaaaatgcaaaatgctttacgtgccaaattggccgagttacagaacagcagacgaacaaaagaagaagaaaaggagcagcagaaagaggaaccaccacaaaaattagatttttccctcttcgacgactccgaattcgcgaatcgttcgtgggtcgaactcattgaagaggaggaggcggcggcgcgnaagacgcaaaaaacaaaagcggcgaccgctgaaacgaccgccgcgtccgctgcccctccaattgcttctgttgctgcggtcgcttcgtcttccgcttcccccagcaataagcgacgcaacag

SEQ ID NO: 85884 - DNA, 349 bp, Heterodera glycines
ttttttttttttttttttttttttttgaaaattcaaagttttcctattgaaatattgggaaaattattaatgcacagaaatttggtaatcttttacaatccacagcttgcacttggtaatgtcatttcggctttgggcggtgcaaaaggtcgaattggtagtgtccatgttccgtatcgcgactcgaagctcactcgtctcctccaggactcacttggcggaaacaggtcggaattgcaatttcttttgtgtgtcagtcctaatgaagtggatgccaatgagacgctcagctcgttgaattatgccaaccgagccaaaaatataaagaacaaggtcaaaagtatttcac

SEQ ID NO: 85885 - DNA, 437 bp, Heterodera glycines
  unsure (1)..(437): unsure at all n locations
ggcagacaaattcctggcgatgattgtggattcttcgaagatcaatcggttagatgttttactgcttttggtgcaaaattgggccgtttatattgcgaccttgagcatagggaccttcaggaatgtgtttcgcgcacaaaaaagaataaacggttctggaagatcagagatgttcgcttcaaaaaatggctcagaggtgaaacgccacacattttcgaaccattggctgactatttgaaatcggttcatggtgctccgacttcctatccgactggtcatcgtgtgaagaaatgattagattagatacatcgtgagattctggtttttaataggagtcacatatgcatatgtatatttctgcgcgataaaatgcttttgttcaaaaaaaaaaaaaaaaaaaaaaaanaaagggggaaaaaaaaaaaaaaaaaaaaaaa

SEQ ID NO: 85886 - DNA, 510 bp, Heterodera glycines
tttttttttttttttttttttttttttttaattagcccttttatcaacgattaatttactcacaatgaatttcatatacatatatacataaaatacaatggaaatggacgcatttgcgagcaagcaaacgtcaaatacatacatatagacaatatttaatgacaaagtgccaacataatttcggtcacataattacaccaattaattaattaattgattcatttctgctgctgatcattcggcccgggagaagcgtcgtcgagaagaccgtcgtcgaatccgccatctttgatccgaatgacaattgggttcgttcgatttttcagtttatccttcacattgtcccattttcgctcatcccatccaatttggaaacggatgagccaaaaatcatttgctgatgattgtataagtgccaattcctccccagtcacttcgttgatcagatcaaatggcacaatgaagtcaagcggagaagacatcagaaagtaaatgcaaaaaggaaccgga

SEQ ID NO: 85887 - DNA, 275 bp, Heterodera glycines
tttttttttttttttttttttttttttggcctccaaccctttatgtcccaaaagactaaggccgtaaaggccaaaaacagtatggaaagggtcagattcatctccaggccgatcggcgatccctcccttttcatcatcttgactggcgattatgaagtgggtgagagattcgccatcaatccaatgtaatcgttttatgatggccaatgatgcaagtacccaccaagaataacacacatcaggcagtttctcgggccgtccgcaaagtccgccgg

SEQ ID NO: 85888 - DNA, 510 bp, Heterodera glycines
ttttttttttttttttttttttttttggaactttaaaaaatttatcaatcatttaaaaaatgaaatcttgatgcgttttttaaataatttttggttcgaaatatcattttaatctgatttcacggttcctcattttccacttggtcttcttgagaataatccgaaggctttccttaagttagcgggcccctcccaatagccattgagcaaaaacatccaataaagagaaggcatcaaatagcgcttcatcagataggcaaatattgtcggccggctttggtcatacggagaagtttccaacgcaccgtctggggaaaattcagcaagaataacgtggcgacggtcgaccaccaatggacacgaggcgtaaccatcgtactgtaaatttttgttgatctaccaatgtaaaacatttcgttcctgaatatttcaatgctttgaatagtaggaaaacactttctttttttgtagttgcgaacaaaaggctgggaatttatttacatattttcg

SEQ ID NO: 85889 - DNA, 266 bp, Heterodera glycines
tttttttttttttttttttttttttttgcttttttttttttttttttttttttttttaattttacaaaggttatgaacaaacgcaacacaacatggctttacaaaattaggcgttaaaattggaattgaatatgccccacggataccaaatacaatacaggacatttaccatatacccgggcgtactccaaccgcggaaccctaatagaccgaatataccataccttcccctcaatgtcgccctcaaaaatcgttatcaaaattca

SEQ ID NO: 85890 - DNA, 364 bp, Heterodera glycines
ttttttttttttttttttttttttgctggccactttttatacagagaaaattaattttctgggaataaatatagaaaaatagtgacaagaaatttatgtcaatcaaaattatgcactcaaaaaacgaaagaagaaatgggacaggcagagttggtcatcatcataatcaatcagtacgggcagggcagtccttggttgcgaattcggttggccagccacgaagtttgcaggtcgccgatgttccgccgtcggagaaaggtcactgggcccaacaaaccgccgtcggggaagaaaacactgacagcggaaccatccgaagttgaggcagcaaaggtggaggacgtggaggaagacggacactgaa

SEQ ID NO: 85891 - DNA, 381 bp, Heterodera glycines
tttttttttttttttttttttttttttttcaaaattttataaatttttaaatttcatttttggacatcagaattgaatggttcattggcatatcgcgtggcaatcccatccattccttgcttcagttcgcatgggcattgtcgttctgtcacgccatcagcagaaatgcaaaagttgttgccactattgtcctcgagtccatgccaagaacgcattgcgaaatgatcacctgcggtatattccatcacttgtttggtgttagaagtgccacccgttgttggtccaatgccattgtttttttcctcatcggcattcgtaggaccgtagcaacggcgaatgttgcccgatgttaaactcattaatccgacatcttcatcggtg

SEQ ID NO: 85892 - DNA, 370 bp, Heterodera glycines
tttttttttttttttttttttttttgcaaagcataatatatttgccgaataatcaaaacacaaaaagtacgtatgaattcaaaacaaaacaacaaaaggctgatgaaagatgaagtacacgtcaaaaccctgttttggaacaaaaacattgagagatctgagaatgtttggaccgtaagcgtatttaacaacaaaatgataaagatcaattgattatgtttcattcatccgccagcaaactgcgcaccaaatcattgatgaactgagtgcaaatgtgaagcgcaacgcaaaatgcaacgaggcgttcctcaggcggcaatttcattttgtcaccattcgccactccgatgacatcagaaagagcattttt

SEQ ID NO: 85893 - DNA, 269 bp, Heterodera glycines
ggggatccaaatcaacgcggcacagtaataaaatattaaaagatccgaaaaaatgccaacattttcaaatccttctgattgtgcttttggccgtcgtctcattccgtctctcggcttctactggtgacaaaaaaactgctaatgatgggagtggaaacaactcatcagctgggattggtacgaagatcaaaagaactgtcaccgctggactgctcttcacttccctggcgacgggtggggcggaagcgattgggcgaagaatgctcagg

SEQ ID NO: 85894 - DNA, 520 bp, Heterodera glycines
ttttttttttttttttttttttttttgcataacattatttattgttttaatgtattagaaatctatgtgtttgtgaaagacaatttttgagcaaggaatcacttatgtgcataaccggaattctgtgatatttaaaagttccggggaatcactcacacacaaagacgtgcttgaacttcgtcatcggttccatggcattctcggccgcttctttgtattcctcaattttccattttcgaaagggcggcgtcgaaagcttcccacttttataccaatcgtcaaagactttgtacatattcgcacgttcctccgaatgtccacaattgtaccatcgcgacatccaaaagccgtacaaagtgatatcattgaaaatcaacgaggaagtgggcacttggaccgggtttttggacattcctccgtaagtgaccatgcacccgccgttggccaacgctctgataaggtaaattgtgcttttcccaccgacgcaattcaacgccaattttgctccaatttttgactt

SEQ ID NO: 85895 - DNA, 527 bp, Heterodera glycines
ggggactagaaattgtccatttaaggccaccataatctgtctgtctgaatatttgtttgcttccccaccgtcgaatttatgcaacttttggcaaccgatgattattattttattaaatctgttaaaacgattctgagatgctgccggaccacagcgaccattgcagcttttcgccattgtgaccttgccgcacttgaagatattgagctattgggagatgtttttgcatttatcgggaaaatcactgtcgatgacatttctcatcttcttctcgtctccgaatgttcggagatagccgaaattgacacggtgaatgcaacattaacacgagttgagagagtatgcgcattacctgtgttaactgatggtatgatccataagaaattgttcgacattccgtcacttgacagatttgaacgtctgaaaaatcgtccgaggaatttgcttaagcttatgtcacacaaagtgccgatcaaaaacctgccaacttcgcctaaactcatcgacgaaattatcgcctttttcaa

SEQ ID NO: 85896 - DNA, 237 bp, Heterodera glycines
ggttcgttagcgttggtcaccgtcgctccatccgcgttcgtcgttgtcgttggagtagtcgcagcgggcgcctcagtgtcggtcgccgtagtcgcaccgggttcgttggcgttggtcaccgtcgctccgtccgtctgttgttggttgaggcgccctgctgtcgtcgacgagctctctgaacaacggcggggagggcgtaaaatgagacacggaattagttgcagcaaaaaagagggc

SEQ ID NO: 85897 - DNA, 288 bp, Heterodera glycines
tttttttttttttttttttttttttttttgagcacctttctttttgcaccttcaacaaataaaataacaaaacaattcaattgaaactttccaaaaatttcaacagttcttcttgttccgtctgttcgtcgccgtctattcattttcttcggtgcgcagtcgggcatttccgttggtgagcacaatgcgcaactgttgggcacgctccacaatttgcttgcgctttttgctggacaccgcgtggccaatctcaccgcaatagcgtttgttctgcatcaacaacacgtc

SEQ ID NO: 85898 - DNA, 514 bp, Heterodera glycines
tatggtcgacctgcaggcggccgcgaattcactagtgattggtaacaacgcagagtacgcgggcaattaatttgcttataagcaaagtttcctaaaatctgataactgaattgtcgttgctccgaatttgacaaaaaagaaaatgactctccagtggaccgtggttgcgttcatcctttacgcagaaatagccacaattattgtgcttcttttgccatgggttcggccgacaatgtggaaaaaagtgtttaacagtcgcgttgtgcacaaactcaaacagttttccaatgtttacgcctacgctttcatttttgtgctcattcttttgttcgttgatgccacccgtgaggtgcgtaagtacagccacgtggacacgactagagagatggtgggacgagtggccgaggcggacgccgtcgttcacatgcgtctcttcagagctcagcgaaacctttatttgagtggtttttctctgcttatggcactgattatcagtcgcatcgtcactttgctc

SEQ ID NO: 85899 - DNA, 462 bp, Heterodera glycines
tttttttttttttttttttttttttttcaaaacggcgttaatttttaaaaatttcatttgtttacaataaataaaagttgaaggcaaaaaggaagctaacacaaaacgtatggcaaagtgaaaagggataaaccaatcacagaagtgaaaagggagaagagcaaataagtacaaaatgggaaaagtacgccttcagcgcagttcggctaacatcgtctcgggctgttccaagaactctttgaggcaattgctgaagcgcgccaaagttgcaccatcaaccacccggtggtccgccgaccaagaaaaagtcaccacatgcgtggccaccaaattgccgtttccgtcaaaacgtggaatcttacgaattgacccaattgcaccaatgaccaactgtgggggcaataacaaaggactcatgtaagtaccaccgatcgatccaacattggacagggcaaatgttcc

SEQ ID NO: 85900 - DNA, 366 bp, Heterodera glycines
tttttttttttttttttttttttttttgcccttagcatatttacttaagcataaaactaattaatctggataataattgcaaaaaccttgaaatgtccgtcttttttttatcaccttttgcaaagtcttcgtttctccaattcacaaacatttcacctcaccgtcagtgttcttctcaatccaaccacagtaacgcgatactcgcgtgtacagtattgcaagacgattatcctttttgagcgttgaaatgcttgacactccaatctgtgtccaaacggtaccattttgtgtcagttgcataagcggtccgccgctgtcccccggttccgaattttggtgcccaatttccatgcaaactcttccgtc

SEQ ID NO: 85901 - DNA, 664 bp, Heterodera glycines
  unsure (1)..(664): unsure at all n locations
ggggactagtgatagtccaattaaggttagttaatctcattgtcaaccatcacgtaacgatatgtctattaactgtcattctttgaacaacattgaagtgtcggatgacgaggatgacgttcaacccaacaacaaacgacggccagagagcgtgcgcaacaaaattcacgaaattgagaagagactcaatgactccaagcttgaggagaaggatcgctttaaatcaccgattacaaattcgcttaattcttcgatcgccaaaatgacccctattcgtgtaattgctatggatgacgtacaggagattttaaatcggaaggataaacgagatgcggagttcaacaaaattattgccgccatcaaaagtccggctctcgaacagcgcacgacgccgggttttaaggttacttccgctgccaaaaatccgaatcgcgaacaacacacatcaccgattcctattacgccaaccagtaccaaaaaccaaggcatgaaaagaagtgccggatacaacgaaacaattgcagcggagagccgctttcgcaaacaatacgctccaccaccgccaccgattactgaaacgtcgacttccattagcaccaaaaacgacaaagtgtttagaccagtcactcanaccgatcaaattattggatcacttttggatgac

SEQ ID NO: 85902 - DNA, 285 bp, Heterodera glycines
ttttttttttttttttttttttttttttggattactgaaagggtatttacgtattgaaattaacaaaaatgaagcagcaacaatactttcttaaagcaaaaactcggcaatgagttctgtgactgtgctgattaagccatcccagtgtcatcgtcgtcgtcgtcctgccctttggcgcctttggttttatgccgcccaccggtttggccatgattatctgatcaatcttcagcacagaaatggccgcgttcgtcgctaatttcaatgccaacgatttcccggagt

SEQ ID NO: 85903 - DNA, 366 bp, Heterodera glycines
tttttttttttttttttttttttttttttttttttttttttttttttttttttttttttttttttttttttttttttttttttttttttttttttttttttttaagggggggggggttttccccaaaaaaaccccaacccccaaagttttcaaaaggggggggaaaaattttttttaccacccctaaaaacaaacaggggccaaaaaaaaacgggaaacgggccccccccctttccccccccccgaaaaccccccccggcccccaaaaaaaagggggggggggcccccccccggaaaaacccctccattttccccccccccttttccccccagagggggggggggggccccccctttttttaaaac

SEQ ID NO: 85904 - DNA, 412 bp, Heterodera glycines
tttttttttttttttttttttttttttttttggaaattgggcaaatttaattccatgggatgtaattatgtaatattgcggcaaattattctgtttttcatcattggggcttcttttgccgacttctcttcatcgccgcttcttccctgtacaattcgtccatttttttcctcctctgcttgaacatatgtttaatgagggtgaaaccaatgaaagggaagcaaatgaagctgaaaagggccaacacaacgccaaaattgtaactgaaattgagcgcatttggaagttgcagtgaataaacgccggaagagtaaaaaaacggaacggaaatgagcaaaacgagggcctcaaggaaaaggccgagcggataaagcagcagccaaacgttgtaacgaagccaagtgacaaatcg

SEQ ID NO: 85905 - DNA, 432 bp, Heterodera glycines
ttttttttttttttttttttttttttttggattgcttttatgcgcaaattatactgtacacaataaatacatacacatacatacatcgaacagccatatgaaatgtgggaattatacaatagctttgcccacatatatgaacattataatcaatcagaaatggcatgtcgtcgcgtttcatctgtgccgccctccgtcgattaggtccttttgattcgcacttgaattgacgtgcccctcgtgttctttttgttgttgcagctggtacagtcatgagccgaaatgccaaaatgctgcctcaaaatggacgacgcctgttccgaaagtgcattcataagtgacggcgccgaattgtttgttgttgctcctctggcgacgcacagcagttgcccgacaatgccgacgtgatgaaacaaagccatggtgaagtgc

SEQ ID NO: 85906 - DNA, 349 bp, Heterodera glycines
  unsure (1)..(349): unsure at all n locations
gggtcgcactgaaccactcaacgctgatggaagagaaaatcattccaaaatgtggaaattgttatgattaagccgcagacggacaaggaaggcaaaacgttgggcaaaattgtgtggttagaggaatcggagttgcaagaaatcatttcgcgattgtagtcgaaggggacggattagagaaggaaaatgggctttgcactgccccttttatgattggatgaccttttgttattctctgcctttttgtgacttttcagtgtataaggcaaatgaaagcaattaattgagaaattggctaatatccaataaatgtttcaattctgaaaaaaaannnnnnnannnaannaaa

SEQ ID NO: 85907 - DNA, 477 bp, Heterodera glycines
  unsure (1)..(477): unsure at all n locations
gggggctgctcgaatggcggcgatcgaactcttttggccgacatcgaagcatcccttgccactcattctgctgatgagtgtgccctcagcctcggcttcgtccgtgccatgttcgccattgccgcctccgcttcttcccatgccagcaacaacagcgaatggcagacattgagtgggcagtttggtcagaaagtcactgagattgactcgaaatgtgctgagtttggcattagcattggcaaagtgcccatcaacggtcccaagggtgcccatgttcaaaatgtgcccaactcggaaagtgtgatttctatgcctggattggccggctcacacacccaatgaatgctgaaccgaaataacattgcttgaaattagatgatgaattgagaagattattattatttttgatatttatttgtagttggacatgaagtagttagtgaacactctttttataaataaattanagcaattttt

SEQ ID NO: 85908 - DNA, 342 bp, Heterodera glycines
ttttttttttttttttttactttttttttttttttttttttttttttttttttttttttttttttttttttttttttttttttttaaaaaaagggcccttttttacccccaaaaaggggggccccccaaattggggggttttaaaaagggaaaagttcccaccccgaaaaagttttggcccccccttaaattttttttccaaaaacttaaaaaatttttttaattaatttttttgcccccccaattgggaaaaaaacccccttttcccccccctctttttgccccccccccccaaaattcccctcccccccccctttttaaaaccccccccccccaaaaccg

SEQ ID NO: 85909 - DNA, 388 bp, Heterodera glycines
ttttttttttttttttttttttttttttgtgcaaaagaaaagagtaaaaataaaatcatacgaaaatacaagaaaaaaagagttagtcatcaaaggtcagtgttaagtgagtttaaagtctgagtctttttggaggaggtgtagaagcagtcggggaaatatgaacaatttcgggcaacaaatttcacaaaatccatgccgtaggagaggcaaacttgcaacagagcctcacagtccgattgtgcccgatgaaattgcggggcaatggagaaaaacctcttgaacatgttctccagtttgaaattgccacgtccgcacaacaaccgcctggcatggttaccattgaaattccattcaccgcgattgttgctctcaaaaaatttggcgt

SEQ ID NO: 85910 - DNA, 526 bp, Heterodera glycines
ggggatttccagtcagttgacaatgagtttgatgccctcatgatgaagcacatgtatgccaccgttcgtttcttattgctgttgactgcgattgctgccaaatcgactaactgtgctacgaatgttcaaggaactcaaactgttacaacatcagatgcaacccatgatgaagctggaaaaatttcgcgtgattcatcatcaagttccgatgaagatgactcaacaactgcagcctcacaaatgctactgaatgaagcaaataacgctttctccaaagataatgatgagccgattaaccagcagcagaaaatgaggcctgaagctaattttagcgttaaatatcttcccccgagactgaacgctgctcaaattgacatcattgcacaacgagcatcatcagtgatcacattacgcacattaaaacatgtgaaagaagttttttcaaaatttgcgccagattcatggctggaagcactggaagatattccactgccgactactcgctgcactgtcaaagtgagcgcca

SEQ ID NO: 85911 - DNA, 359 bp, Heterodera glycines
ttttttttttttttttttttttttttttttttttgcaaccaaattttaattgaagaagaaaaacataaaaatgaataaaaagagcaaattggtcgaaaacattagggaataattaattcttccttcagagagtcgccaaatcgaatttgaaattgggcccaaaattcgcctcaattttgtcaccagagtcaagcaaagaaacgaatggataaagagaatcatcagcaaaagatggatcaacgaaaaaatcagaagtatccaaacgaagcccatttttggtgaaaatgatctgtcgagtggccgaattgacgccaattcctacggtatcaccagcaccgtataaatattcggcatttggg

SEQ ID NO: 85912 - DNA, 459 bp, Heterodera glycines
ttttttttttttttttttttttttttttttgattttttttaggggtttagatttatctaaaaagattcaaaacaacaaatagtttaaaaagttgtggaagaaatttgttttgaaaaactaataaataaaagaggatagaataaaatctgaaaactaagcatccattctttcttcctccgttagatccatccatggccctaatgatgatgagggccgggtccactcggtgacagacgcttcgattcattgaccggcattttctcagcaagttcgcgtaggtgtgccctcattttttctaatcgatttgcccccatttcaaattgcacaggaggaggtggtggagccattgagcgattggtcacatgcgatggcaccaatccggcggcatttcctccctgagcattgcttcgcccaatcgcttccgccccacccgtcgccagggaagtgaagagcagtcca

SEQ ID NO: 85913 - DNA, 507 bp, Heterodera glycines
tttttttttttttttttttttttttgcttattcattttaagccattgacaaaaaaggaaatgaaaataaacaatatacagtagggagtcgaggaggtaattaattgtgaggagctatcatattgacaagggatggggaggagtgatgagattatctgcatattatcatcgtttgcctgaaaacccttccgattgtgttcatgtcattctctgttcaactgttagcaattgtttcatttcgagcaaagtcttcttcaaatcctcccgaaaacgaattgaactcgtgttagtagcgcttttctttgacgaaatgtggaaagaaatttggtcttcgcccgcaacgatgtacgaaactccgtaacccgcgtcagtgaccgggccaaaaccgccgccagcactcaccagcttcaatttctgtgccatggaaatgccttcctgctcggaatcgaattggttgagtggggtttgtgaagttgacagcaaatattgaggcgggaaaatcttgtcg

SEQ ID NO: 85914 - DNA, 426 bp, Heterodera glycines
  unsure (1)..(426): unsure at all n locations
gggactcatggggaacgganggcgcacttctcggcatcaaattccatccgtttcaatggaaaaatcgaatctccccagcaacaaaaacacgtggcgcactccgtccagattgatctgcaatttcgaggaaagcattctcaacggacgcatcccagcaaatagtgttgtcagcggtttccgtctccaacttacggtcatcggtaacggagtgtctacggacaatcgcctttcattcccggcaagcaaacgcctgacattgccagtgcttacttacttcttcaacgatttgatgtctcaacattcgggacggtttccagtggcggttccgccttcgccattgcatttggctcgctgcgagttggcggcggagaacgtccccattccgaaacggtgcacactgcaaatagtgctcttacgtccgtgcgg

SEQ ID NO: 85915 - DNA, 464 bp, Heterodera glycines
ttttttttttttttttttttttttttttgggtttggttatttattcttccaaaaaataccaatgagagaaaatctggtataaagcggagaagaaagggaataccttctttaaaattaaaagaaaacagaacaactcaatattgggggagcaataataagcaaacgaagaaggggggaaaacaaaacggaggaaatgcactcaaataaaggataaagctcagacgaaacatacaaaaaaccaaatcaccataaaaagcgctaattgtccatatccacgcccgtcggtgggcccccttcagtcagtgctgctcctcctcctcgtctgtgtccgtcaaaaattcgtccccatctccagaggaagaggattcgtcaaagtcgtcctcatcctcgtcgtcttcctcctcgtcatcgtcttccgtcgttgtctccccagcaacactcgaatcgtcttcatcctcttcctc

SEQ ID NO: 85916 - DNA, 261 bp, Heterodera glycines
gggaaaatcatccaaatcaacgcggcacagtaataaaatattaaaagatccgaaaaaatgccaacattttcaaatccttctgattgtgcttttggccgtcgtctcattccgtctctcggcttctattggtgacaaaaaaactgctaatgatgggagtggaaacaactcatcagctgggattggtacgaagatcaaaagaattgtcaccgctggactgctcttcacttccctggcgacgggtggggcggaagcgattgggcg

SEQ ID NO: 85917 - DNA, 209 bp, Heterodera glycines
ggtccatcgccgccgcctgcgccgtctccttcgtctgtttcgccctgaccggttcgctgagccgcctgctgggcgaggtcggcatggcgatcatcgtcaaggttctgggtctgatcctgtgcgctctggccatccagttcatcctgctggggctgggcgaggccattcccggcatgatctcgggcgcggtgaccacgccctatccggcg

SEQ ID NO: 85918 - DNA, 410 bp, Heterodera glycines
ttttttttttttttttttttttttgctttttttttttttttttttttttttttttttttttttttttttacctgggattgggggttaagccaaacgcctcccgaaaaataaaaataaaacccaccggggggaaatgcccatcatattctggtactatccctcttcggcaaaaaaaacctttttttttcccccccggattttttcttcaagggcggctgccagttcggcggaaaaaacatcttccccggcctggaattccgaaggggcggggggcggggcttcctcgccctaaacagggaattctctgccaaattccccggcttgggggaccctttcattttcttcgaaaaaaatttggcgccccggttcggtacttggactttgccccgggtttgggggaaaaattccgg

SEQ ID NO: 85919 - DNA, 297 bp, Heterodera glycines
tttttttttttttttttttttttttttggaaccaattttatcattgaattcatcaaaaacaaaagaaattgaaaaagaaattgatgatccattaatcaaaagacacaacatatatgcacataaacactgcttcatcggcgccggccaaagctgggcggtggcggcggcggacctcccattgggcccatcatcagaatggcacgttgttcctgcggcaatgtcttgacatactcctgcagttccttttgcttgtcggcccatgctttgttggtttggcgattgatctgcttcagacgg

SEQ ID NO: 85920 - DNA, 286 bp, Heterodera glycines
ggggaacaatgctgaacatctcgtcaccaaatccaatcgcggacaaagaagtgctcaacggatttgaggatttgtacgaggcgtttgtgcacttttttacgcgtggtgcgcctgccgagcgatgtatggtcaatgacgcggcctttgaccggatgatccacaccgttgaagacaaacatctccgtgcacagcattatattggtggcaatgccgcattaatggctcagaaaatcgcctcttcgttccccgctgcaacggcttatttggttggtccgattggcccgcg

SEQ ID NO: 85921 - DNA, 425 bp, Heterodera glycines
aggctccactcctggtggtgcccttccgtcaattcctttagtttagctttgcaccatacttcccccggaaccggaagactttcgtttccgggaagctccccaccagggcgaataaatccgccggcggatcgctagttggcatcgtttacggtcagaactagggcggtatctgatcgccttcgaacctctgactttcgttcttgattaatgaagacattcttgccaaatgctttcgctgtagtccgtcttgctacggtccaagaatttcacctctcacgtagcaatacgaatggccccgtttgtctctgttaaccattatctcggtcagcaaaaccaataaaatcggaccgaaatcctcttctattattccatgcacgaacattcaagcgaaacgcctgtttgaagcactctgatttgttcaaagt

SEQ ID NO: 85922 - DNA, 698 bp, Heterodera glycines
  unsure (1)..(698): unsure at all n locations
gggagtggggcatcgttctgaagagaagaaaaaatgacaatggtaaaggtgcgaactttttacacatttatttataaatcactgataaaaataataacactgaaattttcgcatggaaaataaatctcattattagtaaaatttataatttgccaaatgggcgcgacttcgtctcggagtgtgtccagcagttccttcaatccgctgtcccctcctcccactaattttgcgcatcgactcgcgtcatccctcgcccgtcctttcagtcccattctgttcaatgccaaggctcgcctgaacaatgctttgctgttgttcgcttctcgcttcaacgctccacaggcgtccatgtacgctttttcaggaatttcctacttcaactttcccaatgtatcattaccaatatcgcatcatagtaattggtgattcgactgtcggaaaaagcagcttacttcgttatttcactgaaggcaaaaatgctgaaataagtgatccgacagttggagttgatttttacgctcgaatgattgagaccaaaccaaattatcgcatcaaattgcaactatgggacacagccgggcaggnaaagtttcgttcgataacaggtcgtattgtcgaattccgtcggagtattgtcgtctacgatatcacgaacagacgcacttttgagcatgttgttgattggatgactgaagcag

SEQ ID NO: 85923 - DNA, 310 bp, Heterodera glycines
  unsure (1)..(310): unsure at all n locations
gggcgtcgagcagtacgccttccgtgccttcgccgatgctttagagagtattccggcgnctttggccgagaactcgggtcttccgccgatcgatacgctcactgaactgaaagcgaaacaaatcgaagcgcaaaacccgtggttgggcgttgattgtctgcagacgggcaccaacgacatgaaggagcagggcataatcgaaacacttctctcgaagagggagcaaatctctctggccacccaagtggtgcgaatggttctcaaaattgacgacgtgcgagtgccggacgacgacgagcgcagcttcgca

SEQ ID NO: 85924 - DNA, 434 bp, Heterodera glycines
ttttttttttttttttttttttttttggcagagattttatacataaatggaacgcaaatacatacaacatatacagaaagatacaaatgaaacacttaggcgtttatgtacaaacaaaggcaagtgttaagtcaagacagagcatcagaatttgcatcattaaccgcagaagcaaaccacggcaaattacgaacatcgaagatactcggacgatcatccggctcaaacgtcaacatattgtcaatggtgcagcgacaatgctcagtgacgctcatttgagaagggaatcggtagcgccgacttcgctgtgccctctacaagatgtgccgtgctcacatctccacggaagggcattctgttggtgagcatgacgtagccaacgatgccaagggaccaaacatcggccttaaaagggtcgtagtcagtgctttgca

SEQ ID NO: 85925 - DNA, 267 bp, Heterodera glycines
tggtcgacctgcaggcggccgcgaattcactagtgattctgttgacttttttttgaatgagttcgtaatgtctgatggaaatacatttgtcacatattcggctaacccactgagaatttactgggcaatgttacagcatcggtctcaacttttgtggtttcgatatttatatttggcaatatctcgatatatttatgtaaacaattttgtcgttataatttaataaagcctggtttcttttccaaaaaaaaaaaaaaaaaaaaaaaa

SEQ ID NO: 85926 - DNA, 335 bp, Heterodera glycines
  unsure (1)..(335): unsure at all n locations
agacggcgagggaagaggaggaggaggacgtaacggtggaacacgtgtgcccaaagtgcgagtggaccacggcgacttacaccacacaacagacgcggtcagcagacgagggacagacagtgttctaccaatgtgtgcgatgcaaacaccggagcatcgaatattcatagagagagggcgaagatcagagaagagagacaaagaaagggcagacggacggacggacaaattgccacgcttttgagtctgtcgtctacgacaatcgcacaattttctttgactttttattggcaaaaaagttgttgagttgcgaaannnnnnnnnnnnnnnaaaaa

SEQ ID NO: 85927 - DNA, 461 bp, Heterodera glycines
ttttttttttttttttttttttttttttgaatggttaacaaatttatataacaggaagaacaattgcatataatgtcacctcacgaaaaggtaaatgtaatatttaccaagcctcatatttaatatttcttaatgtttgcctggccacataattaatatcccacgttctgcaaatatttgtccaaatcgggcacgttattcttcagcaaactctctttgactttaatggattcgacggcttgacgaagaggccgctccaatgttttcagagaatgttcgtccaattcttttttaaaaaactccataatgtcctcggccatggcattcgaacagaaacccgaagtcacgcagtcaaagcaatgcaagaacacgttgctgttgacgctgccgtacttctcgatcaaaagtgcgaaattgtttttgaaaaagtcccatgcgaaatgtccacagcacgccatcgg

SEQ ID NO: 85928 - DNA, 515 bp, Heterodera glycines
ggggaatgcaatgtgcctacaggttcaatgtggcaacgttaaattgctggcttttaccacacccttggccaatcggaagcaaacacaaacaattccgtttgcaaaaattaatcgacgaactgaaaaattcgcgctttgacgtcattgctttgaaagaagtatggagcgaaaagatttttcttcaaatcgcccatgaactcaatggattttttccccattcacattatttccacagcggatttacgggtagcggcacgtgcgttatcagcaagcatcccatagtttcaactttactccataggtattccctgaatggctttcctcatcacgtccaccgggtgactggtttggcggcaaaattgttggaatggttgaaataatggtggagcagtatcgcgttgcattttatacgacacaccttcatgccgaatacaatcgagagaacgatctcttccttccgcaccgcatctcacagtgttttgagatgtcccaattcatccgccatacctcccgag

SEQ ID NO: 85929 - DNA, 290 bp, Heterodera glycines
tttttttttttttttttttttttttttggtgcattgtggcagccaatttgtgccgtttgccccacggattttgcacaaaacgacggcgccggcgcgaatcgtcttcccacacatcgagtttccagaagattttctttttgtcgtccggtgatgaccatgggccgtgcgggtgggtgagaacggcaccaatcttgtccaatgtacgcgacgccaacacaaactcgcgatgttttgaagcgaccaacagctgctcggacaactgatcgtcgcccttcctgttcgtcagctgt

SEQ ID NO: 85930 - DNA, 289 bp, Heterodera glycines
  unsure (1)..(289): unsure at all n locations
ggggatgactgattgtgagcatcactccgtgcccccgtccgcccctcccgtcgacttttgtccgtcttcgccccctccgagttatgcttcctctcccacggcaccgccgcaacaatgccaacgacggacagcagcaaaacactgcaaaaggctgctttttaccctcgtgtaaaaatgccaaaagagcgacaaaagagaatgacgcgggcggcactgaaccatcccagccgacttcggccgctgtggtcgtntcaacggccaaagacaaagtgaccattctatgccttgg

SEQ ID NO: 85931 - DNA, 372 bp, Heterodera glycines
tttttttttttttttttttttttttggcaattttgttttatttaatttaaggcacaacatttaccggcgattagaattaaatagaaagtcatatgaaaattaatggtcgatgggcaaaataaacaaataaaattagtgtccatatacgaagctattcagagaagtgcgaatgaaacggtcaaaatgggataatgctaggcacatttaaggggaaggcggggggaggagggaaacaccgtcacgacagcgagcagtccatcaatttttagtctaacgaaggtagtcgccaaagtcccggagaagggccaattgctcgttggtgatgataaagtggagccggtacttctcgcgcagggcacacagcttctcggt

SEQ ID NO: 85932 - DNA, 460 bp, Heterodera glycines
  unsure (1)..(460): unsure at all n locations
gggattcaaagaatttttcattttccaaccaataaaagatggcaataattgcgaaagtgtttccccttctccttctgtttctcatgtcaatggcttctctttcattttgcgcgaattggccaaaaaataccgtccctttgnagacttatgtggacgaatcgctccatctccattgcaaattgtgcaacaaaatcgccaattcagcttcggacggagccaaatggctacagaaatcggaggagggctatgtgtctctgctgaagttttgcatcgacgaactgcgcaacagcgacgaacgcagccaaacattgccggctgaggagggccatcaccaatttctgttcgcgtgccacggattcaccgcagacaaacgaaaattgagcgaaacgattggggcgatagcgaaaaaagaagccgacttctgcaaggagcagaaatattgccaaatgttttgatgtgt

SEQ ID NO: 85933 - DNA, 377 bp, Heterodera glycines
  unsure (1)..(377): unsure at all n locations
ggggccgcacttcgttgggccgacaaaaaatgccgtcaaaatggcaccgaacgttccgctgagaatcgtcgtgccgtgcttggcccggcactgttcaaaattcgttttccactcttcacaaaagagcaattttcagagaaaattgttttgtccggcgtgttgactcatcgcgaagtgatcagtgtgttcctttaccattctctccccaccaaacgctctgcccaaatgtttccgttgcaatttgccgccaaacatcgcgctggccatcacgcttattcggcttattacgatgatggatattactagcatttcttttcagaagtttattgtgttgaaataaaaccaagtctagcataggnnaaaagaannnncaagan

SEQ ID NO: 85934 - DNA, 613 bp, Heterodera glycines
ggtcggtccagtcaaatcagtgccgatgagcttcaacaggcgctgtccaatggcacatggaagccgttcaacccggagacgtgccgaatgatgatttcaatgttcgactcaaacaacgatgggggcatcaattttcaggaattcggcgcactttgggagtacatcaacgattggacgcgcacttttcgcactttcgaccgcgacaacagcggaaacatcgaccgcgacgaattggtcaatgcgttgacccaattcggttatcgtctgtccggcactttttacgatatgttaatgcgcaaatttgaccgaactcaaagcggtcgcataaacttcgacgacttcatccaactttgcgttgtgctccaaacactgactaccgcttttcgagaaaaggacaccgaccgggacggatggattcgaatttattatgaggaattcctcgccatggttttctcgctgaagatgtcaatgatggctaaacaatgagcaaaagaagggggaattattgactgatgaggatttgctaatacagtaacccacttatttttgtatgttttctattaaacattatttacatatcactttcaattttacgacatttttgtttgaataa

SEQ ID NO: 85935 - DNA, 308 bp, Heterodera glycines
ttttttttttttttttttttttttttgcgaaaggctttaacctatagatttttttcaaaaacaatcctaacaataattggacacgcaataggacaataaggcaaacagaaagcaaaatttgtggggcaagagaaataattaacggactgaagaaaacaattggcgggggggggggggcatccgtcggtgaaatgtttgttgaggcataaatggaaaagggaaggaatcgcatggccaatcgcatcacaatcagtaggggcaccagacattcttctcacgaatcgccttcttttcctcctccgtcaacg

SEQ ID NO: 85936 - DNA, 512 bp, Heterodera glycines
  unsure (1)..(512): unsure at all n locations
ggggattccttcgtcgccttcgttttggacactttcgacggactttccctctcaccactcttttcactcacattttgcaactcggcactgatttcttggccactttggtgcatattccgctcgaacaacaacatcaaagtgaggaggaggacgaagagaccgacgaaagtcggcgattgccattgaaacacttccgccgctttttgcacttcgtcctcagcttttggcacagtgtctcgccgtcgttcgccccctcccctccactctctcatcactctctcaatcttcccctttcgactcaatttgactttgtccgtctgcttgtccgttgtctccaatatttgtgcatcatttggccaactgtccatcgcactttccttccctctgccgccgatcagtcgccgctgattgaagacgaagagattgtgcagcaattgatggagcagcaacagaaccaactgcaacttgacgaagacnaggccgagcaaagccaattcaatgtcacactttta

SEQ ID NO: 85937 - DNA, 508 bp, Heterodera glycines
gggggtcaaattttcaccatttctctggacttggccgacggaaacggagtccgggttcgcttctcatttgggagtgtgagtccgactccgtggtacagtgtgcgttatcctccgtataaatcagacttttctctcgtcatcgaagtggacaaaaaggcggtgttgaggcggtcgtacgaagaaacgcgtcttctcaaaagtggatggactgcggaagaaagagaggcgcaatgggacagtggggagcaaagggcggaagtgaacatcggactgaacacggagctggttaagggcgagtgtgtgatgtgccttgagccaaacagcgacacacttttctacccatgctgccatttaaatgttcacagaaagtgtctgagagacgaaaatgtggaggaatgctacgcctgcagggaaaaatgcgaggaactgatatccatccgacaacgagacatcgactgccagttctgccatccaaacgaatgccgtgaattcaactcttttttctacc

SEQ ID NO: 85938 - DNA, 393 bp, Heterodera glycines
gggctgcccaccgtttgctgctcattgtcggtgctccaattggcgtcagtgttgcgcatggacaaataaacgacacggaaaacaacgaaatcagtgccgggaaagaattcgtggattaccaacgcatttacacggaaccaattggcgatttggacagtgctcatgcaattcttggtgaattgccatcgatggtctctttgctgttggaaacatctgatgccgttgaatctgaggagttgcgctggaacgacttggaagtgttcaactgtttggagatgcttacaacatttcccgagccttgggtgcttcgcaattttgccgctttgctcataatggcccctggcctcgcccgtgtggcggtgcaaacgcgcgcaatgcatggaaatcctggcg

SEQ ID NO: 85939 - DNA, 297 bp, Heterodera glycines
ttttttttttttttttttttttttttttgagggggttagatttatctaaaaagattcaaaacaacaaatagtttaaaaagttgtggaagaaatttgttttgaaaaactaataaataaaagaggatagaataaaatctgaaaactaagcatccattctttcttcctccgttagatccatccatggccctaatgatgatgagggtcgggtccactcggtgacagacgcttcgattcattgaccggcattttctcagcaagttcgcgtaggtgtgccctcattttttctaatcgatttgc

SEQ ID NO: 85940 - DNA, 248 bp, Heterodera glycines
gggattcattcactcattttgaaacaaagccacccatttaccaattacacctttcaccttctacccccaccaagtccaaaaaccaaaaacaagtcatggaacgcactttcgtctgcattaaacccgaatccgtccgaaggtgcctcgtaggaaagatcattgaacgctttgaagccaacgtctttcggctaattgccataaaaatgatcgttgcaactcgcaaacaagcgatggaccattacgtcgct

SEQ ID NO: 85941 - DNA, 471 bp, Heterodera glycines
gggcagatggacaacattcggaaggagatggtggaggaggaaaaacgggagaaggcgaagcaaaaacgtcccaccaccggcaacactccgaatgcgaacaaaaagaaattggctgacgaaaagaagaaagcggtgcaccgttggttgaaaaatcgaaacacataaattaagaaacgtaaacaaacaaaaacgatatatgttgttacttttggacaaaatcccctgtaaaccttacacagaacgatcttccatcttcgtcctttgcctttttggctaatctttcgcctcctttcatctttgttatttttgttgtttaatttttgctattttctaaggcatttcagttttgtatgtaataccgaataaataaacttagttaaaaaaaaaaaaaaaaaaaaaaaaaaaaaaaaaaaaaaaaaaaaaaaaaaaaaaaaaaaagggaaaaaaaaaaaaaaaaaaaaaaaaaagggc

SEQ ID NO: 85942 - DNA, 598 bp, Heterodera glycines
gggggagaaagggagagagtgagaaagaaaagcaggaaaagggtgaggtgaggagaaagggagagaaagagagagtgaggagagcagagagaaaaggaggaaaagagatggagtaaggcccgttatattgcggcatgcattgacgagatcaaagtggagctacgccaggactccatttttgtgaaggcaaatgccatcgaaaagttggcatatttgcatatgctcggctacgacatttcatgggcagcatttaacatcattgaagtgatgtcgagcacgcgttacagcgaaaaacgcattggttatttggccgcggtgcaagcattcaatgacgaaaccgattgtcaacaatgtcaccgccgttttggacgcaatgttacgcatcaaattatccgttgtgcccggcccgttgctcagcgtgttcgtgcaaaacattgccaagctgtacaccttccaactgtgcaaattggaggcggacgacgattgggacagaattgaaacaacaaaaaacccaacccgtcatgcagaatttgtagcaattgacgaagccgatgaatggtgcaaattgcacaacaaaaatttcactcaaatcatgagg

SEQ ID NO: 85943 - DNA, 426 bp, Heterodera glycines
ttttttttttttttttttttttttttacttgaacgctttatatttttcatgataaaatcacattaaagacgagccatttgcaaaaatatcgacacagaaaggttatgcacgattcgatgcttgatcaatcatcgattgtaaggtctctgaaaagagggcccatcgattcgttgttataaatgcggcgaatcgcttcactgagcagcaaggaaatgtcaacggtttttatcttatggcaacgcagcttttgcatttcgtgtggcacagtattcgtaacaattatttcgtcaattggggatgactcgagtaaggaaggggcgtcgagtgacattaacccgtgagtcgcaaccacgtaaattttgtaggcaccacgcgcttttaaaacttcagctgctgccacaaaggattgtgcatcgtcaataatat

SEQ ID NO: 85944 - DNA, 644 bp, Heterodera glycines
ggggaatattttacgcagtttttgcaacaaattgtggacggttcgcgccctttgcctccttcgcttttcgcccattgccgcgtccttccattgtctttttgtgcccagaaaaacagaaagccaaaaatggaggaccgccaccttttgctgccatcattggacatcgtcgagccggaaatttcgcaaaagctttccaaaaaggtcgacccatcggcggcacttttcgccgttttcgacgggcacaatggcgccgaatgcgccacttttgcgagtgcccatttgacggagtgttttttggacgcttttgcccaatcggacgatatcgaaaaaatattgaatgacgcatttgaacgactcgacaaacgcataacagaaaaatgcacgagtgagaacatcaaaagcggcaccacggttagctgtgtttatttggagggcacaacatctgcttatttggcgtggtgtggggacagtgcaattgggcttctcactgacacggcggtggacactttgtcgacgccgcataaaccagaggacaaaggtgaaatgcgacggattgagcaggcgggcggaatggtcgtgtccatccacggggtgccgcggctgaacggcgttttgaatctttcgcgttcccttggcgatgtgat

SEQ ID NO: 85945 - DNA, 354 bp, Heterodera glycines
gggatttgtctcaaattgttctactgttttgaccctcagaaaatattttaacaaaaactatccacagagtaagtaatattttattttattttaaatttttattatatatttccatcgcaattcgatgtttcttttttaaaatttgactccatttgcctacttaatttatacacttatacatcatcacatgttgtttttgcagacgctcgatcactctcccgattgtccactttcgaactctgatcgctcttggtttctaatccgagtactttgtttggattttgtgttgtgttgtgatttctgtttcatgatgaagaccattttgtcatcattttccccctttttttatttttg

SEQ ID NO: 85946 - DNA, 516 bp, Heterodera glycines
ggggagaatttaaaaatcataaaaattcaaactcatcaaattcactcaacatcatcaccaaccgtgaacattatgctgaggattgctctactcatctccattttggcactgtttggtgattgcatggacaagggaaaaagaaaattaggaggaatcagtattaatgagccaagtgaatatggaaccaaagaaaaagaagccatcgcaacaaaagaaaatgctctaacatcaaaggacccgccgacatcggcgggtggtcaaaatgaagcaatcccttcaccaaaaaagccaagccccaaggggaagttgaaaagcgattttggcctaaacttagccaaggcttttccacggccggttccgaaaggaaaaaaagttgaaaatacactatcatcaaaggactcggcatctgaagctcacaaagaattggccaaagagaaaaatgaagaaaatgcacagacctcaaaggtcccgacatcgatggaaaggcaaaatgaaccaatcccttcaccaaaaaac

SEQ ID NO: 85947 - DNA, 568 bp, Heterodera glycines
gggatatctatcatattttcatttaaattatcctcccaaaatgcgcaccattctcttcatagccatggtttgcttggtgatggctgtcctaatggaaatggcaaattcaaaggctgtcaaaaaagacaacaaaaaaggagcagtggcggcatcaccagcaaaaggaaaagcatcgccaaaaggaggcaaaagcccagcaaaaggaaaagcggcaaaaaaattgaaacctaaaaaggatgctaaaggcattaaagctaaaaaagcaaagccagcaaagaaaggcaaagcggcaaaagcagtaaagggagcgcctaagacagtcaaaaaactcgcaattgccaaaacagcacaagcaaaagacaaaaagtcaccagccaagccaatggttctaaaagcagtgccgccccaccaaatgcatttaatgaatgagaaagttcaaacagctgtgtctccacccgcccatgctcgttcacttgcgaccgttccttacagtacaccggtggcagccgaccgtaactcactgccatcgtacacttcggatggcaccaatttggacatggcccatgag

SEQ ID NO: 85948 - DNA, 152 bp, Heterodera glycines
tttttttttttttttttttttttttttttttttttttttttttttttttttttttttttttttttttttttttttttttttttttttttttaaaaaaaaaaaaattttttccaaaaaaaaccccccctttttttaaaaaaaaagggccaaaa

SEQ ID NO: 85949 - DNA, 312 bp, Heterodera glycines
ggggtggtcaccaatgttcgcattgtgtacgaccgcgagaccaatcgcccaaagggctttggcttctgtgaattccaggaccaacaaggagctcagaatgcggttacaaatctgaacggagccgagctcaatgggcgtgcgctgcgtgtcaattggaccaacaaataagaaggttgtgcttgaactggacggatgatgatggatggattgtcatttttgaggatcgttttgacaattttcatttttctttgttgattggttttttgaaataaaggaatggttcgccggacgaaaaaaagaaaaaaaaacaaa

SEQ ID NO: 85950 - DNA, 228 bp, Heterodera glycines
tttttttttttttttttttttttccaacctttggtattggtccgtgccaaaacctttaaggcttatgggaacaaaccaaacctttcccgggggaaatttaacccccttaattcccaccaccggggaaaaccatggactggtggcccaaaggccaaaccgggcccccaaacccctccttatttccatttcgcctccgccggggggttcctttccaatttggcccttttt

SEQ ID NO: 85951 - DNA, 357 bp, Heterodera glycines
tttttttttttttttttttttttttttgtttggaatacgggattttatcgaaaataatttaacaatgaaaatgccgacgaattccaattcaatttttttccccaattttttttcttttttttcggtcactttttatttgcatttttttgataaatattttgtttcttattattctcattggttttcaattagcgctggctttctttcttttctttcatccgatttcattcgctttttttcgcttcgattttttcccctcccaccgccacgtctttgtagaacaaattgccacgttcgttctgttccgcctcgatgctttcaaataacgctttgaagttgccggcgccaaagccctgg

SEQ ID NO: 85952 - DNA, 546 bp, Heterodera glycines
ggggactagtgatagtccaattaaggtttttacctgtattaatggatgtccatgacgaggaagttgaaattattgggactaggtcaaatgagaggcaaatggaccgggcccatcgacaagaacaacagcagtgtaaaaattttactcccaacaacaaatgtctgaggaaagtgaagaagcattgttttgcatttctaagcatgacgttaaagaaataagccaagtggtcaaagcaatggcattccgaggccattgcacattaaatgtaagcaatgagggcattcgcttggcagttgacgaccaacacaatcagcaaggcagtgcctacttcagatccgagcacttccaagacttcaactttcgtacccaaacatgcagcattaaaataccgatgaggcctcttatggaagcactgaatatgttttccggtacgatgacaatggtgcaaatttcgtggaatggcaaaggctttccattgctcgtcattttggaagacgaaggagttgttgtccacaccgaaattcgaactttgatagcgcccgagat

SEQ ID NO: 85953 - DNA, 480 bp, Heterodera glycines
gggaagcgaattttcgtcccgcgggcacaaattggtgtcccccgttgctgaaacgccggtcggtcgccttggcctgtcaatttgttacgatttgcgctttcccgaactgtcgttgtaccagcggaacagaggggcccaggtgctgtcctttccctcctcattcacgctgaacactgggctagcacactgggagccccttctccgcgcgcgtgccatcgaatgccaatgttacgtggtggcagcggcacagaccggcaaacacaatgacaagcgaatttcgtacggacactcaatggtggtggacccgtggggcactgtggttgcacaatgcacggacagagaggacctttgtttcgcggagttggacttggattatgtggaggaagtgcgtacgaatatgcctgttttttctcaccggcgctccgacctctattcgctgcactttaatgagtgggatgagccaaaagactctgacacttt

SEQ ID NO: 85954 - DNA, 478 bp, Heterodera glycines
ggggacaagaaattgtccatttaagatgtacataatatattaaaatcgtccgtggtttttacggttggcttctccgttccttggattggattaaccggcaaattttacaccgactctctctctctgctcataatcgcgaggacatgataatcgaaaagtttccagcagatcgtcaccctggactgctccagcgtttgaacgaattgaaacggagcgaaaccgtttacaacggcggagtgttcatcttgttcacaattccttatcgatattatgaggactacgcgtccatcactgtcaaccaagcagttaacgacatcaacgccatggacaagacgggcgttttgcagaatctgaagattgcgtacatcgaatgcaatgtcggatattggcacgagtgggacacgacgaagaaagagccgaaatccatcttcaaaactgacgagacgttgggcctgcgacaattgccgacgctgctcga

SEQ ID NO: 85955 - DNA, 470 bp, Heterodera glycines
ttttttttttttttttttttttttttcaccgcctcattgtttatcataacactcgcaaagttaatataaacagcaatggttatacatacttataaaaacatcaaattacaataatccacaattaaggaatggaataattatcacatctgtttgggggatgaacaaaaagaggggacacatttatacaacaatgaaattaatttgatatgatcgcactccgtctgcgcctgttcttttacacgaagccgaatttggacgatggggctcccttcttggtaatgttgcccgcgtatgcgcttggtggtcgtcccatgcccgtggacattccgcctcctcttcgtaccctgtgcaactttcaccacagggaggcgtcttcggaaaatcattatggccaacaaaagtgccttttttcttgcatcctttgctgtcctctttgattttgaattgctccttgcactccttgctgttaa

SEQ ID NO: 85956 - DNA, 526 bp, Heterodera glycines
ttttttttttttttttttttttttgtaaaaaacaaatacattttttccaatggcataattagaccaaacaatttttaataactaaagaaaatatttaccaaaaaaaacccaaaaagaaaaaaagactaaaaatccaaaacagaatgaattatgggaactcgcttctcattctctcccgttctcttctctcatcaatgtttgggcttcttcccgcaacatgcccacacgtaatttttgtcgcaacaattgctggccgcgtagccttccgactttacacatttggcccaacttttgccatccttgcacttgcaatttgccgatgttttgcacagttgtttgccggcccaatcccaagggcatccgccgggcttcactcgccctccctcttccgacgaagtgacaaagagcagcgcaaaggacagggaaagagcgggcacaagaagcagcgattgaggacggagaagggacattttgcggattgacagatgaagcgaatgatcggatggatggctttgcttttgaggga

SEQ ID NO: 85957 - DNA, 485 bp, Heterodera glycines
tttttattttttttttttttttttttttttaatttttatttttctattattgtacgacataacaacgactcaaaaaataaacaaaaacaaatcaaatcatcaaaatgtctcatcatctggtcaattcaaccatcatcgccaaaattcgttttctaattgcctcactcgcattaacgcaaaattgcgccttgcttggagagcgggtaaatgctttccaagttcaccgaacaaatacgtggagagcgcgtcccgtcggggaaaagtgcaccgccggtgtagtgaagacagccagtcaaataaacacgagtgccccgttccacgtttttctccacgtatttggccatggagccgaatgcgacaacactgtgcacttccgtgttggtcgttgtggtgccatcgccaagtcgacgctccacatttgtgtacaagttgaaagaggcaaaagcggggccttgcgcggtctgttttaccaatggctgactgcc

SEQ ID NO: 85958 - DNA, 557 bp, Heterodera glycines
gggactccgtcatcacgtttcttcgttacaacaagcaaatttttgacaaaggcatcaatttgcgtttggatgttcatttcttgtataagaatgccaaggatgcgcagccaatttgggatgtttttgctcgtaaaatctggcccattgttgtgccaaacattcgccatttggccttttccgaagctgatcacctggacaatatgcgtcgtcgcatttcgccaacaattctcaccgatctcgatcaattggattcaatcgattacgaatatttgttgcccgatgcaataattagtgatgatgggccaaatgcaactgcgggccaagcattggccaaatggttgaacactccgacaacaaatgggcagccaaagcaattccattgtgattttatgtcagcaaccattaaatgggtcaacgctttcaaagaggcatttctccatgccaccacttcttcggccaattatataattcgacttgcactaattgatgaagaaacgccaattgagtcatttgaattggtgaatggacggaccaacgaaaaagctgacaatggagaa

SEQ ID NO: 85959 - DNA, 570 bp, Heterodera glycines
gggcgagtacttttggaacgaaatgaaatttggcgggatgtgagaacggatggccaaagaagcgccattttggagaaagcgaacaaaacccaacgcattgggccagcatttgctgcactcattgcgaaaatttgttttgccgcttcaattgacccctccgacgatggcttttccttcaaagaccgccatggcttctctctaatgttggctaaattggctgagctgctcgctgaggacactggagaaagttgcaatttgagtcggaaaacaatttttgagttgttgggcagcagttcggaatggaatttgggcttaattggtccattgcttcccaaatattcgttttttatgacaaagcgggcttctcggagcttctccgttcgctctttccatcgctcattcgacgtgatcatcagccgtgtgccgactcggccatttcctcctttgtcgaagcattgttcggcactgactcattctcggagaccatttcccgggcgtttgaccagttcattccacaccttttggattcccgtctttcggcacgaaatttcttctgtaccttctgcaaaa

SEQ ID NO: 85960 - DNA, 535 bp, Heterodera glycines
ggggtttttttgcggtgttgttttaaaaaaaaaactttttcggcgccgataggcgccgcaattcgactgaattcaattaaacgtaaatacaatggaaatatttgacgaatttattgttgttgacgaagaagctatcggtcaattccgtggtgcgtttactggaaaatcttcacattggaaaatgatcagatttgttaaactggaattcacgattgtgacaaccgactttaacaaagtattgaaaatcgcggacattggcaatgcttcttcttccaatccgttgaatgaggagccattggcacaaattatccattggaattgggacaaaaatgggacgcaacaaatcagtgaaacaaaaacattggacaagggcagtgaagttaattttgccatttttgacgatacttcatcatttgtaattcgaattctcaaaaagcgggagaaaaagtcggaggagaaacgaaatactttaaccaactttccggcgccttccgacagctcacccgacgacgatttgaccgtgaaaattggtgaa

SEQ ID NO: 85961 - DNA, 368 bp, Heterodera glycines
tttttttttttttttttttttttttttttaagaataaatcttttgtttgtgtgtacgcgcattaacagaatgtgtgtgataaagataagtgtcaacaaaacaacttttaaatagagaacatcatcagcgtcactaaacaattgtcattaacagcgtccaatggtccttcagtgcatggcattgtcctcctcttccgactgttcgtcccccatttcctcctcgtcatcgaactcgtcatattcgtcttcctctgccgcctcaccagtgaagaaaagcaccgcacggggaatcagctgttcacgaatgatctgtccaacctcgaagtcatcattggttttctgttcctcgatgtcgtccatttcctctgt

SEQ ID NO: 85962 - DNA, 293 bp, Heterodera glycines
tttttttttttttttttttttttttttgccaatggattacacatatacatacatacaatatatattaagcaaatgcgattaagatgattaaatcggtgtggtgtacgattgcgttgtcgccgtgacatttccgctagtcgtagcatttgcagcgcacttccaatcttcctctttgttagccatcgtaatgacattcaccaccaatccgccaataagaatgacaaatccgaaaccgataataccaatgtttatgccaagccgaacatttgcttcacgaaggcgattctgactgc

SEQ ID NO: 85963 - DNA, 397 bp, Heterodera glycines
tttttttttttttttttttttttatgggataatttttatttaatttccaaaattgaaacaaatatttgaccaactgacgaataaaaaagacatagcagcactttgatcaaagtgaataaagaaaaaaaagaagacaaaaaagaaatttttaaaattccataagagagagaaacagcagatcatcaacagacagttaacgaatttgaagcataggtaaatttaagaaatttttgttgtcgacggcacattcaattgttcgccgagagaagagaccatctcacggagtttggaacattcgcgaccactaaaaattaattaaaaaagagtgaaaaataaaattttaacaaaaaaaaatgctgcctgcttttacatcgaagcaactaattttttttttatt

SEQ ID NO: 85964 - DNA, 302 bp, Heterodera glycines
tttttttttttttttttttttttttgatggaaaaaaaaattaccaggatacataaataggtcagaagatgctacagtcaaatacaaataaacatccgaaccaaacgaaacgcatcaatcggacaggccaaacgtttgctacaaatttagaagaagcttctgttgacactcgcacatcggtcgctctgttcgttcagcacttgcttcttttcctcctccttcttttgctgataaatcgcaaattcgcggtttgacatcttcggtgtgtccacgtatttgaaggagcctctgtaaggagtgtac

SEQ ID NO: 85965 - DNA, 456 bp, Heterodera glycines
tttttttttttttttttttttttttatagtttctttctttttaatcaacaccagaaatcaccaaataaaaacaacaaaacaattgcgaatacttccacatgaatacactgtctcaattaacaatctttgccttcttcgtctcttttccttcctttttcgtctcttttccctctggccccttttgcgctgcgtttttcgtctctctgtcgtccggaatttcgatgagtgtcattgagttggctgtcttcgcgtcgcaaatgtaaaagcttttgcgctgaatttgcaaaatgtctccacagttcactttttgaagtgccggctcggccaacaaagtgccaaaatgctcactgtcgcgattgacgaactccttccagtcctcctccttgccaatgatcggagtgctgatcaaatgatcaaaacggaccgttttcaccgcgaagttttcggcacgtttgg

SEQ ID NO: 85966 - DNA, 351 bp, Heterodera glycines
ggggaaatttccattggctttcttttctctgtgtttatttgcatttgctgaagtggcagccgaccgggtcctccttcttatagacaatcccacaattcgggaatcgcactccgtcttcatcaaatccctcgaagagcgtggccactccgttattattgccatggctgatgacccaaacctttcgcttatcaaatttggcgaatttctctacgaccatttgatcattttcgcaccttcggtggatgactttggtgggaatataaacgttgacgagatcaccaaattcattgacggtggtgggaatgttctcgtcgctgcagaccaaaatttgggcgatgcgattcacgacct

SEQ ID NO: 85967 - DNA, 526 bp, Heterodera glycines
gggggaataataattaatcaaatgcttttttttctgttgctcctctctctgtccctttttctgctgctcgtgccaaatgtctgctgtcataatgccgaattggtgctgctcgacccctctcagatcggcttctttctgcccaattattttgttaaaaaatttgagaaaaaacttttcgtgaaatttgccagagaatttcggcctgtttttgtcgcatttgcaatgctcgaaccgccttatttatacgtggaccaatcggaaaacattcgatcggtggaccgagcggaggttgagaaattaatgaagttcaaattggtgtcacgactgaggaaggagaagaagctgatggagacggcacagtttaatctgacgctagcacatgacatccaaggcgcactgttctcagttccggttccgtcggatgaacgatcgcttaaattcgacagaaacagcgtcatttttgagcattgcaatgcgaatttgatagacaatgacaacaacccgcgctgcatttacttttaccttt

SEQ ID NO: 85968 - DNA, 542 bp, Heterodera glycines
tttttttttttttttttttttttttttcaaatacccttttaatttacattttggggaagaaatgaaatattacaaaagaataaaattcctaatatgctaataataatggatcggtatggaatacaaattattagtacaaatacataggcatttccatgaactgaggaataatcaagcggggctaaggttcctaatgcaaaataatccatcaaaatgccccattttcggcgtcccactcggcccattcgtcgccttttgaattgttcttcttccgtttctttttgagcagcgtcgccaaaaaagtgtccggaggactgaattcgttcgcctcgtttttcacctggacaattttcgtgcaattctctccgtcaaccgttttcgaattcaatcgcaaaaattgggccaccgcgtgcaaatgaaagcgtttcacgcgcgaaattatttcctccgcgaaaacatcggccggcgattcgccaaagaattctctcaaagcgaattccattctgtagaggcaatcaaattggacgttccgtcgtttgagc

SEQ ID NO: 85969 - DNA, 450 bp, Heterodera glycines
gggaattacccaagtttgagatagttgtcaaagtttcagcggagtagaaaatgagtgcaaagcctttgctcgagttgtatgtgaaggcctcagggattgacagccgacgcatcggtgcatgcttattttgccaagaattttggatggaactctacgctctttacgaagtgggctgtgttcgtgttgaggtaaaaactgtgaatgtcgattcggaaggatacaaaaagcacttttcgggagcacagccgccaataatggtggaacaagacaaaggcacggcaaatgcggacaacactgacatcgagcgacgcattttccaactttgcaaccaattccatgtgccattgttcgagaaggatccggaagtggcaaagaccatccaggatttgtacaggaacttcaaaatatttctccaagccaaaacgaattttggacaaaggcaagcagcaa

SEQ ID NO: 85970 - DNA, 447 bp, Heterodera glycines
  unsure (1)..(447): unsure at all n locations
gggaaattcaacaaatccatgacgatgggtcgttgagcgcggagcaaaaaatggagcgaattgactcgatcatttgcactctgccggagaatgtcattgaccaaattccggacccgccagaagttgcgcaactcccggctgatgtgcgccagcgcgtcaaacaaattgaacgccagcagggaaagtcattcagcactaaatttgaagagatcatgaaatatgtggacactttgcctgaaggcacaaaatcggctgccaaaaacattttccattgaatttttcatggaaaaggaggagaggaaagaagtggaaaaagcagcatggattaatgaaagcaaggctaaacaatatttattaaatattttattttttggtaaaatatttccaatttttcatttccaataaatatttttgctttgttgaaaaaaaanananaaaanaaaaaaa

SEQ ID NO: 85971 - DNA, 397 bp, Heterodera glycines
tttttttttttttttttttttttttttgccagagaacatttattaatcgcgagcatcggaatggacaattacaatacaataacataggccaacaataaatacaataatttcgcaatgagtgcacacacttacaaacaaatcacaacagaattggcatatcaatatatttgggtggcatatcgaaattcttctggcaccgtccgtctttgcgttgtgtttggtcatccatcgtccagtccctcacagtttcgccgtcgttttcccagttgttgttgcgcctccgacgaacttggatttgccggccctcgtcgtggtgcccaacttgctcatgccgacgtttgcagctgtcactcccatggcggtgcggctttgttgcatctccttcgtcgtctttgcg

SEQ ID NO: 85972 - DNA, 358 bp, Heterodera glycines
tttttttttttttttttttttttttttgccagagaacatttattaatcgcgagcatcggaatggacaattacaatacaataacataggccaacaataaatacaataatttcgcaatgagtgcacacacttacaaacaaatcacaacagaattggcatatcaatatatttgtgtggcatatcgaaattcttctggcaccgtccgtctttgcgttgtgtttggtcatccatcgtccagtccctcacagtttcgccgtcgttttcccagttgttgttgcgcctccgacgaacttggatttgccggccctcgtcgtggtgcccaacttgctcatgccgacgtttgcagctgtcactcccatg

SEQ ID NO: 85973 - DNA, 616 bp, Heterodera glycines
ggggcaattccgcgctgaatcttttacgtgtgattggccgtttccttcaaatggccaccgttttgcggtcgtccgctgaactctccgtcgagtcgattgtcgctttgttcaattgttacgtccattcgattttcacatttttttgctcggattttgatgcacaacaacaacagcaaaggttcggcaccaatttcgtcacttttcgcctccgccaatttgtgcaatcaatcgaaaagaaaatgaatggcccggggacgacagagggtgggcaagacagtgtggaaaatgcggagctttcgttgttttgccgtcggtcgtcgctttgccacgcgttggacagaaacgactcggacaaattgtttttgctcgtcgaaagaattgttggcgttgagtcagttgttttcctcgccaaacaaatggaattgcttcggcctttcctcgaggcgcttttgccaaaaagcggcggaggcggcgacagcaatttgtccttggactccttctatcgttcccttgcggcggtgttcgatttgggcgacgcttcgtttggctgtgtggcggccaaaattatactcgttcagtcaattctgaagcaaatttcggcgaccgattggacacc

SEQ ID NO: 85974 - DNA, 440 bp, Heterodera glycines
tttttttttttttttttttttttttttttggggagttttggccatcatgcacataagtgtcaacttgagtatgttggtcttctctttgattgtcataaggataagtttccgggcgattaagataatattgactttcattttcatcgagtggattggcataaatctgttctttggctctttgatcgtcataattaccactttccgctcgattttgatgctgttcacgattttgttcgaagttattgtaaaatttgtcttggggcatgcttggaacttcttgttgatacaatccattaatttcagtttcttcataaaattcatcattggatttgttttcggcatttttggaatgatattctttgttgtccttgcgggaattgagttctgcctctttattattcatacgctcttcttcttctttggtttggtttgctctttca

SEQ ID NO: 85975 - DNA, 490 bp, Heterodera glycines
ggggcatgacatccaaagcgtttggagttgctttcgtctggcgccaaccaaacggtggtcagatggtcctactcagattcggactccatttggcttccaatttctcgctttggcgacattgttggcgacgaggtcaattgctatgacatcacttattcgccttgtggacggtacgcactgtgccattcattcctcggcggattccatttttggcaaattgactcgaaaggtgcggtgttgcccaagtgtttccccattagcggacactttgccgaagtgaccgacctctgctggtcaccggatgggtcttttttgctcagttgctctgccgacatgacgacacgaatttttgccaagcacaaacagttggactttttcttcgagattgccaggccccaaacgcatggtcatccaattaattgtctgacttcggttgaccgcaatttgttcgtttccgggggagaagagaaaattttccgcgtgtttcagg

SEQ ID NO: 85976 - DNA, 579 bp, Heterodera glycines
  unsure (1)..(579): unsure at all n locations
ggggacaatgataatgatgtatttgtaaagcgacgagaatatttgtgtgtaccatttcgactttagactttcgatcggcttaactatcaaatcacgccgtttctctttgtgctcctttctctcctcaacatttcccggctttacattggcagcgccataaattgttttgccaaagctgaattccgtgccggatgggttcaatatgcgcacgattattgccttgtcgaaagcacttattacctgcgtacggacgaatcaattccaattgaacacgaaatgaggggacagaaaagggtggcctattatcaggctctcaaatccacgcaattacttccgctgcgaaagatgccgtggaacaatcggcggacgaaggccaagagacggcggacaaaattgcgcggtcgcttttgcatgccacgcggcacagagagcgaacatttttttgcataaaatctcaatgctttgtcaccgtgctttatctaagcatganattcgcttatctgctgctgatctgctcccatctgctcattttccaccactttttgggcagtctcaacttcgccctcggattcgcccgtc

SEQ ID NO: 85977 - DNA, 366 bp, Heterodera glycines
ttttttttttttttttttttttttctaaaaaaaatcaaaaattcattggataataataataattctgtcaaaagcaaataaaccgtacttttgagagcatgaaaaattaacaaataataatgttaaaaatgagggtcaacaagttgaacaaagggaattcattcattcagtgcataatgtacgtgttgtcctcgtccaagtcgcacaaatcgccatggaaactgatctgaatgcgaaagtccaagtcgcgtgggttgcggacgttcgggacaacgctaaaaacgccatggatttcctcgtttttcttcactgtcagcgattcgtaaaggtaaaagactgtctgtttccaatgcgtgtatttgcagt

SEQ ID NO: 85978 - DNA, 467 bp, Heterodera glycines
gggaattcaaagcggcatttgccaatgcttcttcccccgtcaatttcatcgttttcatttgcactccgttgccttttgctgactccgttttggcctttgattttaccaacgaattgacccgggaacaattgacactgaaaagaactgactacatcgactgttttctgttggtccgttgtccaattgcgcgagacgaaagcaaatggacaaaatgggaggaggaagcgattggatgggaagattctgatcagtggaacgaaatttacattgaagtttttggcgataaggtcggcgacgggcttctcgacacaactcccgacccgagtgatcagcagaagtgaatgaaatgaattgttgagaagagaccgatcaatttgaatgatttaattgttgacgtgctcatgaaaattgttccttttttgttgttgaaatgatcaatcaaccttttttgtctgtgtaaatcatta

SEQ ID NO: 85979 - DNA, 282 bp, Heterodera glycines
tttttttttttttttttttttttttgcactttttgttttatgcatgaaaaacacaaataaatgaaagatagtataaaagttaagttgaatacgtaaaaacaaaaaacaatcctaatgaaatgctaaaatattgaaaaaatagtgaggcagagaacgaaagggttaaaataaataggtaattttggtgctttcatcgaatgatatttccagcggcgccctgaaactgtttcctcgcatttgccgttacactttcctgcgtctgttttcgcatcgattcgtcca

SEQ ID NO: 85980 - DNA, 509 bp, Heterodera glycines
  unsure (1)..(509): unsure at all n locations
ggggagccttggatggtcactgatcagctgttgcccgctttaccgaaaataaccagcaaagacccgagtgttttgatggcagtgctgggcatttacaaaattgttcacgaaaacaccaaattcgggatcaacaaagagcaatgtgctcggagtgtgctaccttatcttatttccaccgcagtcgagcccactctgaacctccaacagttcggccagtacatggaactggtccatcaactgatccgacgggtcgaaaccgagcaaaggcattgtttggagcagctgagtgccagtcaggaggaacaaaggaaaatcactgactttgcggactttctgaatgcccaatcgaatgaaatgaacaaaaccaatcagagcgaagtcgatttgggcgacttggcacgagcattgagcggcacatcggcaaatgatggcatctgcaacagaacaacggacaaaagggacagtgngacgacagaaaacagtggcgaaacaatggcaaagggagcact

SEQ ID NO: 85981 - DNA, 430 bp, Heterodera glycines
tgtttttttttatttattttatttttttattttgatcattgttcgcatttgtcagaactgaaaaattaagatcgattcgatcgacaaaggcaaaaaagaaaaatgcaatgtgtaaaagtttcgtccgcttaaatgtttagcgattgcaagtcattcccccacagcatttgccttcactcaactccatgtccaacattacctcctcctcctctcttttcttctgccgctccgcctctctttgtgccaattctaattccgctccaattcgatgctgagaatgccaaagatcggcgtatttaccacctggcaaccccaccagttgggagtgcgtgccatactcgacgaccatcccccgatccaacacgtaaatgatgtccgcgtcgacaatggtggccaaccggtgggcaatgaacaacgacgttcgaccaga

SEQ ID NO: 85982 - DNA, 590 bp, Heterodera glycines
gggatcttaaaggcgttctgttccgtcccgaccgtgtggtgatcgctgcgcgaaatttggccaacaatgctgcggagagcaagcgggacgggaacacagtgtgccatttcctcaacgcgtgttcgacctattcaccggaagctaccacgcatttctacagttacttgggcctggagaagttccacaaaggcgtggcaaaagcgatggaaagtggccgtagcgacgaagtgctggcccggcttgaggctgttcggcgccgtgtgctcgccgcaccgatgaacgtccacttcggcggagatccgagtcaaattcggctcggcacatgttcatcttccgcttcgtcgccgccaatcacggacattgcctcacaatgggccttcctcgaacagccgatccaccaacttctgcagtgtcccgctgactacggggcctccgaagcacaatttggacaaagccgtgccattgtcgtgggcggtgccgacagtgcgtttttgctgcagaaaactcggtttgacgacgactggaatggacccagcaccatgtccactttgctgctttgctcatacttgcaacagtctgagggaccgctg

SEQ ID NO: 85983 - DNA, 105 bp, Heterodera glycines
ttttggttttttttttttttttttttttggaacacacctatcttctttatcattacccaaatgaccgaatatgacgcaacacaaacaaatatactaagaagatca

SEQ ID NO: 85984 - DNA, 519 bp, Heterodera glycines
gggaacgaacccaaaacaattccaatggacacagaaacactcactgccgcggattctctccgctcgcatttcggctcactgaccaaaggaattccaaaccgaatgcatcgttcgtctcttctcagtgcctgggaaccgccgacttcgtccgcatctattctcaaaaatcccgaacaacagcagcctccccttttgtcggacattacagaagtgttcagtgcacaacaaaatgtactcggaccatcgacttcaattgggaaaattacggaaatgactcacaatgttccgtcccaattcaacgacaaagataccgttaaagagctcatctcccaatcatttggagagacaaaaggcgaagaattgggcagaattgtacaagccaaagggagaccagtaacaatgggaaaagacagaagtaccgaacagctcaataaaagtggcgaaactcacaggaaggacaatttgagacggaaatcaggggtggacaacgctcttctgccttccccatttacggatgga

SEQ ID NO: 85985 - DNA, 410 bp, Heterodera glycines
  unsure (1)..(410): unsure at all n locations
ggggctcattttcatgacgttcaatgtttggctgtgtttcgccgttgtttttggcgaagtgtgcgctcgactgatgctcgccttctttttcccccaattagaccttgtgaatgccattttaaacaatgccactggcgaaccatgctgcggatgagcgaacggactgcctttttgaactccttcatttaagtggaatccatttcctatctctttttgccagttaaacctttccctctttttggaggtttaggtaattaacacaaacctatgagtgaggaattaacttttggaaccgatgaattctcattttattttcactttgcctttaagttcttttttacaaatattacaattaaattaaatgaattgtggttaaaatttaagcnnnnnanaaaaaaaaaaaaaaaaaa

SEQ ID NO: 85986 - DNA, 483 bp, Heterodera glycines
gggggataaataaatcaatgctaaacggacaaaatgttttggtgagcgatgtccattatccattccctaatgggaatgatgtgatgtatgttgatcaggaagaagaggcggaacatttcgcagaaggcacaagcacgcagcaccaaccaaatttgagaagcgatcaacaacgacgactctcatttattcaaacgactgcactaatcaaagatgaacttcgcaaggcggagcaaggccaggcttccgggaacgccatcgaaatactgttcgaacaagtgcatcggagtaatgttgagattgacaatgtggacaatttgcggacgttgtgcaggggaggtgagacgttggatcagctcatccaactttcggtcactcaggtggaggggatgaaggatgagacggcgcactgtctcgaccctgggaagcttgttgcgcgattgaaatcttttgcaatttctcatcggaagacgggcgatagcgatc

SEQ ID NO: 85987 - DNA, 351 bp, Heterodera glycines
tatttttttttattttttattttttatgctttatgcccatcttctccactatttccgcttcatcctcatctttccgctccgactcttccgccggcccttcccccgccgggggcactgactttttccgtttcgtcaaagtcccaaatttgctcaaaatgctgccctcctcctctcactgctgttgctgtactgccaacattttcttttctccgattaattgcccacctttttactggtgctgcccaaagtgcccattttcatattcccctgcagggatttttaattgaaccacaaaaaagcgaatttaatggaaggaatggaaaataatggaagatcggaagggcataaagc

SEQ ID NO: 85988 - DNA, 228 bp, Heterodera glycines
tttttttttttttttttttttttttttcccggtttttattttttttttccttcacccctcctttattcctatggaccttccttccaatggattttccccttccttccttttccaccaccatttttccccttttttccaccaagggtttccccccctttccttcccattgggaaccaattgattttccgcgttggaaaaacccaaggattgcttttcccgggtcccctt

SEQ ID NO: 85989 - DNA, 524 bp, Heterodera glycines
ggggatgatgtacaacgacaacaacagccaagcaccatcgcaacagccgccccttccgtacgcgacgaatgaccaccaaaggcaacaccaccacttccaacaaccagcacagcagcaggacccgcgcatttacccacagcaaatgttttacaatccgccgcagcctatgccgcatcaataccaccaccaaactctgctgaaccgtctgcccaatgttccgcagccgtccgttgccgatgcgcaagtgacggtgccaccgccagcgatgaccgatattgcgcttgccggtgccgaacaggccattcagatgttctacaacaatgccgggattcacaatcaacagacgcaccagcagaatggtcggccccaatagggagggaatgaacggcacggcaaggaccgacgaaagcgttcaaattttgcaatttgtttcgccccttctcttcccattgactccacattttccttcaatttacccattcattttattggtcactaaaacacaaaactttttgacggccttt

SEQ ID NO: 85990 - DNA, 408 bp, Heterodera glycines
ttttttttttttttttttttttttttttgaaattgcttatgtatttattgtcattaaaaaagatgccccctaaattaaaaaataaatgaataaatattatttcggctctcttctaaatcaaattttcgttctgtctttctccgtccgctacaaaaaagcctctcttccgaagttctttgtagccgaaaacggccaacataacgcaggcgactaaccctccaaaaaaaaacaccaagtcccaaaaaacgttggcgcccccgcccaaattgccctgctgctgttgcgaaaaaacgtacgttttttcacttgcggaattcgacggaccaaccacaatttgcctcacatcataaagattgaccggcggcagaagcggcggcacactttcattggccattttttgcccctttt

SEQ ID NO: 85991 - DNA, 539 bp, Heterodera glycines
tttttttttttttttttttttttttttccaattttcaatttattaaagctcagaatataataaacaacaaaaggattggtacaataaaacggagaaggaaaaaatcattcaaaaaaagaaaagagaatgcacgaagaaagaccaaaagaaacgaaaacaaatgcacgaattgaagaggcaaaggtgaggggagttaaacaatcaaattgagcaaaatattagaagagaaaagtatcaatgctaagcaaaccgaagaaaaaaaacgaaaactaaacaaaaagaaaaacaatcaaatggaaaacaaaaacaatcaatcaaaatccatccatcactaacttatcaggcgttgatgcgcagctccctcaggtaggtggtgttgaggaaagaaaggactttggtcatgtccgcataagtgcgcagcggccattccacccctttgttctttgcgaagagctgcaaatttttgctgttgtcaataccgttcttggcgtagtgtgagtagatgtttcgaccgcgtttcgcatattcatcggcgatgt

SEQ ID NO: 85992 - DNA, 493 bp, Heterodera glycines
ggggatccaaatcaacgcggcacagtaataaaatattaaaagatccgaaaaaatgccaaacattttcaaaatccttctgattgtgcttttggccgtcgtctcattccgtctctcggcttctactggtgacaaaaaaactgctaatgatgggagtggaaacaactcatcagctgggattggtacgaagatcaaaagaattgtcaccgctggactgctcttcacttccctggcgacgggtggggcggaagcgattgggcgaagcaatgctcagggaggaaatgccgccggattggtgccatcgcatgtgaccaatcgctcaatggctccaccacctcctcctgtgcaatttgaaatgggggcaaatcgattagaaaaaatgagggcacacctacgcgaacttgctgagaaaatgccgggcaatgaatcgaagcgtctgtcaccgagtggacccgacccacatcatcattagggccatggatggatctaacggagg

SEQ ID NO: 85993 - DNA, 493 bp, Heterodera glycines
ggggactagtgatagtccaattaagatattaatcatacctaacaagtaagagttgaaactttaaaagcttttttattgcacaaaaatcatggttgcttcttcattctctaataatggcaaaaatattttggaatcgccgttcaaactaacaggagaatgcaaattgctctattattgtacaaacgaattgggtcattttttgaaccaaacatcaaatgctttaatcggcaatcctctgagaatagttccgtttgatgggcttagctctccacaaaagcaagtctgtacaaatacatcaaattctttggaatttaattgtactgagcgatacatttcattgactaatggcactgctctttggatttacgatttacagaaagggagcacactacgagaactgcatgaccatgatgggaacatcagtggggtcgcctggcacagacaaagtccttggctcttggcaagtgtgggcgacgattgcacgttgcgcttg

SEQ ID NO: 85994 - DNA, 315 bp, Heterodera glycines
cagtccgtttcctcctaaagaaataccttctggcagcagacttcctctgaaactgctctatcggctataacactttgtaacgggctcctctaatttctctgttgcgtccaatttgtctcagcaaacaccaatcgctaatgtgaacaatgcattttcgttgaaaatgcgacctcccaaatcactcagtgaaattgttattaattactttagaaatgaacatttcatgtgtcgtgttcctgtcgctaactgtcctcccttttcccttttttatcctcatcgttgtcctgaaccaaaaaaaaaaaaaaaaaaaaaaaa

SEQ ID NO: 85995 - DNA, 341 bp, Heterodera glycines
acgcttaaagagttcgaaggattactcagaacgaatacaaagttagaaaaagaaaaggaaaaaagaaaggaaaaagttacagacttacgaaagtgtcgaagcgaaattcgacctgcaaaaaatcgaaaaaatgagcactttgacgaatcgactgaacaaattggcggatcatttgggggaaattggccatttgcattttgaaaagggtgagcttaatgcaatggatttggaggagaagctaatgttcgaaattgttcggcttgcggaacaaaaacagcacgaaattgaagaaggacgaaggaatggcaaatcgaaaaaaaaaaaaaaaaaaaaaaaaaaaa

SEQ ID NO: 85996 - DNA, 749 bp, Heterodera glycines
cacagttttttttgccctttgtgacacacaaataaattgaaaaaattggtgagacctgtgctgattgaaccacaaaatgaaccgacgttggctttgcagcgacgtgtggatggacattctcccatcatttgaccatgcccaactcggactcaaaatggcattgctttccgactgtttcgatgttttggtggacaaacatttcgatcgaaaaagcgaattgacaatttggagagaaataataattcgcggggacaaaggacaaaaaccgttattgtctgtagaggtcgatggcaaatttgtggattttcctctgccggacgattcgctgcccaacaaaatcagctttaataaccttcatattcagtacattgaccattccgtgatcaaatttctccgctccaagaagcgattctttgacaaaagtggcaccaaattggaagtgtttgtggatgcaattgatacggatgtccaaccgatttgggatgtttttatccgtgaaatttggcctatttttgagaaaagcattcgccatttgggctttcataatggcgatcatttggacaatttccgtcgtcgcacttcaccaacgattctcactgatcttgatcaattggtttcaatcgattgcggttatctgcgccccgatggaattgctgatgatgggccaaacgcaactgctggccaagcgttgaccaaatgggtgcgcactccgagcaaaaatgggcaaccgaagcgattgcatcgtaatg

SEQ ID NO: 85997 - DNA, 658 bp, Heterodera glycines
  unsure (1)..(658): unsure at all n locations
catagttgaggcaattaacacaaccttagccagtgctcgatttggccngacaagaacagaaacgccttgcgctggaattccaattaaaaaccaaagaattcgcaagttgtcgtgacaatttcaaatttttcgagcggacttatttcaccgaacaacagaaattacgttctgaagtgcatttgaaggtttcggctgactttttagacgaaattggacgcttagaagcgatcattgaccgtttcaaacacccatttgttgatgaccccgaactgatcagcgattacaaacgccaattggccatccatgtgaatggaatgttgtcggaagggctgcaaaatcagtgcacgggcggactaatggcccaaatttggagtttggagcagtctatgcacgcctttgtcaaaaaaattcttaacgaacggcacgctgcgcagctggacaaaatttggcagtataaacagcccttcaaattcgcaattgtggtgaactgtcctgaattgatgtccgatttttacgaggacttggaattccgcttttcacttggagttgagaatgtcgcacgttggattttgtccataacacgaggccaaccgatcaccgccattgaccgaaacgttttgcggatgaacgtattgtcacgacagggacacaatgacgg

SEQ ID NO: 85998 - DNA, 680 bp, Heterodera glycines
tattaaggctccaaaaaaaatccattccacattccagcaaccaataccattaatttcataaatccgaagaaatccctacaaaaatgtcttcttccccgtccgtctctgtgctcgccatcgtcgcaattgtctgtttgatgtgccaatgttgcttttcggcaccgcatccgtgctgtcccggcagtcaaaaagtggtttcacttatgtccaattacgttggcacttttgccaattccatttccaagtcatcgctttgttcggatgcccaaaatgttgcggacgcgttgaaaggccaactgatcggctgctcgaatggcggcgatcgaactcttttggccgacatcgaagcatctcttgccagtcattctgctgatgagtgtgcccacagcctcggcttcgtccgtgccatgttcgccattgccgcctctgcttcttctcatgccagcaacaacagcgaatggcaggcattgagtacacagtttgttcagaaagtcactgaaattgactcgaaatgtgcagagtttggcattagcattggaaaagtgcccatcgatggccccaagggagaccactcccaacgaaatgtgcctagtacggacagtgtgatttccatgcccggattgaccggctcacacaaacattgaactgaatgatgagtgacggaatggataaactaattg

SEQ ID NO: 85999 - DNA, 669 bp, Heterodera glycines
ggaagaaatggaagaaatggcggaaaagacaaagagtcagaggaaaggggagaagagtttaaagaggaggaggaaaagcgacgagagatggaagaagaggcggaagagaaggaagaaaaagtggaagataaagaggaaactgacggagaggaaggaagaagaggtggaagagaaagaaaaagaacctgaaaggatggaagaggagaagaaaatgttggaaaggatggaagaagaagcggaagagaaggaagaaaaacgtgaatgggcagcagatgagatggtagaaaaagaggaaaagcgggaatggactgaaaaagatttggaagaaatggaagaaaatgatgaaaacccagtggaagaagatccagaagaggagaacatggaaaagacggaatcgaatgaaaaagagttggacgatacggaagaaaagcaggaagagaaggaggaaaaggaagaaatggcagaagaaatgaaagaggaggaggaagagatggaacaagtggctgaagaggaagaaaaactggaatttaaagcgaatgagatgcaacaaaatatggaagaaaagcaggaagagaaggaggaaaaacgagaattgactgaagaccaaatggaagaaaagcaggaagagaaggagcaaaaaacgaaaagcgacgagagatggaagaagat

SEQ ID NO: 86000 - DNA, 442 bp, Heterodera glycines
catggctttgctgttccgcttcgtctctttccccaattcttcgtgattttggcctttgccttctctttcatactttgctcttcactacttatctcatctttgcccagattttctgtttttggcatggccaaacgcgtgtcgaatatttgatggatgtccacgcttataatttgtcctttcgagaaaatcttagcgcctgtcttggctcgcgatggcccttcatttttatttctcctttcattccatcgcagttggaaaccgatggaacgtttttcaggacacgcgaaagggaagaaatcggaaaatcgacaaagtatttttaggaagatgaaaattctactgctacttaataatgcgctttaatatctcattgtgtctctccctctgtgtgcgtaaatcacgattaatcaaaaagcagaataatcaacaatattccccaaac

SEQ ID NO: 86001 - DNA, 744 bp, Heterodera glycines
aaaagagtgctcgggttttgcgactttcgcttggacccgacaatttccaagggatttgaattcgatgttgaaggccccaactttccggtcgaagggttccgttttgtcggtttgatttcaatgattgacccgcctcgtgctgctgttccggacgccgttgcgaagtgccgtagtgcaggcatcaaagtggtgatggtcaccggggatcatccgatcacggccaaagcaattgccaaatcggtgggcatcatttcggagggcatggaaactgtcgaagatatcgccgttcggaaagaaatttctgtggaccaagtcgacccgagagaagccaaggcgattgtaatccatgggagtgatttgcgcgagatgaatgaggaccaattggccgaagtcatcaataaccacgatgaaattgtgttcgccaggacttcgccacagcaaaaactgatgatcgtcgagggatttcagcgtcagggacaaattgtggcagtcaccggcgacggagtgaacgattcgccggcactgaaaaaggctgacatcggagtggcaatgggaattgccgggtcggacgtgtcaaaacaagcggcggatatgattcttctggacgacaactttgcttcaattgtgaccggcgtggaggaaggccgtctcattttcgacaatttgaaaaaatccattgcttatacgttaacttctaacattccggagatctcaccgttcctgatgtacattctgttcgggatt

SEQ ID NO: 86002 - DNA, 204 bp, Heterodera glycines
ccgtcgcctgccctgcgcatcctcggcaaatatcccgacaccctggagggccggaagatcggcatactggtcgcggacggctcggacggcgccggcgtatcgtgagtgccgaaggcggttgaaggcgacggcggatctgtcttcatcgtcgcgcccaagatcgggggggccaagctggcggacgggtcgaccctggcgggcgat

SEQ ID NO: 86003 - DNA, 225 bp, Heterodera glycines
ctggggttgagggaattgaattggtgagaaggaaagtgccagcgaatggaaaggagcaaacggaaaactcaatggacgacgcggccatcaaaagaaaactcgtcgatctgttcgacgacgaagcgtctctgtcgggcgacgacgtcggctccgattcggacggggagacgcaagacgagccggacgaatacgaggcggaggagggcgacttggaccagttgcctt

SEQ ID NO: 86004 - DNA, 696 bp, Heterodera glycines
gtgtccgaattgctggaaaagtcacccgccgtggacatcgccacaaaacctctcgctgtgccaaatgcaatgaatgtccgttgtgcaaaaatgtgctcagcggacgttctcaggcggacgtgtattatttgcagtgtaacagttgccaatggacgagccgaacttcggaaggggccgagcggaacatggccaaagagtcgtggacagagccgaccaatcccatggagggcgaactgggcaaagtgatggctatcatgaagagactgagcaacttcgaacggttcgagcgcgaaatgaacagacggtctggcatgtcaaaactcgacaaatttggcactttcgaacgcgaaacgccaacgaaaagaatgtcgggccgaggaatccttcgaaatgatcgcttttctcttcaaaatgcatacaactcacgcagaaaagcgttacaaaaacaagacgacgtggacgaagtgttggagttgttggctccctctgccgatgttcccgaattggaccccgacattttctctgtgcctccaaaattcgctttgtccattgagcaaacaattgcccatcctttgtgtgtttctgctgctcatttgcaacccacaaaggtcaaaatgatgacacgaagggcattccgatgttcggagtgtgccacgatgctttacaggggccaattgtcgcccaatgatgtgaagc

SEQ ID NO: 86005 - DNA, 493 bp, Heterodera glycines
gacttgggactcggccgccaccgttatgttgcagggccgtgacttcatcatgcctggagagactgtggagctcgagtttctgtttaatactcctcaatttgttcgtccccaacagcgtttcactctccgccatgacaaaaccacaatcgcctgcggcgtctttttggaggctcttcccgagtcggagggcgaaattcgcgacaaaaagtggaggaaaatgcaaatgcgaggagtgatggaaagggttggtttcaatccgttcggcaaccgatcgtttgagcgagcgtgcaaacctgactataccaattcgccgaaggacaacccggccgaggcattgttcaaagccgaggcaaaagcctagaaagaactttagatgaaggatttgttttttcgttaattaaatcattcatttgcgttgcgcttcatttatttggcgttctgtttttattccatgataaattcctctttacaaaaaaaaaaaaaaaaaaaaaaa

SEQ ID NO: 86006 - DNA, 602 bp, Heterodera glycines
tggtccaagttgacttcattttggccatttaatgcttttcgtgaacgtcagcgtcatttgcttctcgccgacccgaatttgcgtctcggcgatgtcacgagcgtaaatctgacaaaaatcgagggcggagtgcagaccaatgtgatccctgcccaattcgtggcatattttgacatgcgcgtgacgccgaccgacgactttcagcaaatggaagcaatgatcgccaattggtgcaaagaggcgggcccggacgtcacttttgagttcgtccaaaagggaatgtgcaaatcgctgacccccaccgacgcctcatccccgtggtggcacgcgttttcgtcggcgcttagcgaagagagattttcatcggtggaacggacgcgcgttttctgagagagaagggcatcccggcaattggcttctcaccgatgaataacacgcccattctgttgcacgaccacaacgaatttctcaacgaaggcgtttttctgcgcggagtgaaaatttacaccaaaatgatcccacggctcgccaatttgccgtcattttgagcgaagtgccggcagaacaaagaaaagaaggaatcaaaatgatttctcctctag

SEQ ID NO: 86007 - DNA, 713 bp, Heterodera glycines
catgtccggactgttaccggtctactgaagctgtgctcgtttgtcccttcgaagtggtcaaagtgcgactccaatcggagctgaacacgcccttctttaactaccgtcgcccgtgaaattgttcattcgaatggttggggcactgagggcctttaccgtggcattggtgctaacctttggaggcacggcgtgtggaactcgtgttacttcggaatttaccataatttgaggcttttcctttgctccatcccttcaaaaaattctcagtcctccgccgatcgtttagaaacggccagcttgaccatgcgtcttacgatcgcctcactctccgcaattgtggccaatttggccaacattccattcgacgtggccaaaagtcgaattcaggggcctcagccaaccaccggccgactttacttcagcacttggcaatccatcggactgctacagcgacagcacgggttctgctccatttacagaatgctgtttcccttcgcgttcatttttggccctggcggtggaatgatgctggtcatttacgagggcatttacgaatggctgatcaggcgatccatggctttagaataaacatttctcccccttcaattcttcgaattctcatgccaattctaaaacgtgcacatttatttactcatccttgtgatacttacatttattgttcccgtcactcccttttcttttttccctcggat

SEQ ID NO: 86008 - DNA, 736 bp, Heterodera glycines
atgtctcgtacgtcggttagcgatctgcttttgattgttcgtgcggcggcgtcttctgctgaacatgtggagctgaagtaccgaatgttgagcaatggcagagacgtggcactgaacgtgaagcatttgctcgcctctcttctcttcttgctaactcgtcccgatgatccaacaacaaaaagcgcagttttaacaacggccaacgaaattgccaagatggtggccgaattggcccagtgcagtgatcagttgcgctcaaacggcgcttccactgcaatgtcagtggaggagtcggtgatggctgtcggcaacgaacttctcgtggccgcaaattccgtggaggccgtttcttacaaattggcacaaatgcgtccaagggaaattcataaacctgatgagaacctaacgtacgatgagcaaattctttcgtccgctaagtcaatcactcaggccgtccaaacactcgtcaaagccgcttcgtctgcgcagcaggaattggtggcccaggggcgagtggccgacccgggcccagcaaatggcagcgaagagcagcaatggactgcaggtttggtctccgccgctaaactcgtcgccgctgcgactaaccaactttgtgaagctgccaacggattggttcagggccattcgacggaggaaaagctaatcgcagcggcgaaacaggttgcttcttccaccgcccatctgttggtagcgtgcaaagtcaaatgcgacttga

SEQ ID NO: 86009 - DNA, 710 bp, Heterodera glycines
ccaagtttgagagtttcccaaaaacacttctgcccaatatggtcaccttcttcgccagacattcagcttatttttcagtcagttgaccgcgatcggtccggtcaaatcagtgccgatgagcttaacaggcgctgtccaatggcacatggaagccgttcaacccggagacgtgccgaatgatgatttcaatgttcgactcaaacaacgatggggcatcaattttcaggaattcggcgcactttgggagtacatcaacgattggacgcgcacttttcgcactttcgaccgcgacaacagcggaaacatcgaccgcgacgaattggtcaatgcgttgacacaattcggttatcgtctgtccggcactttttacgatatgttaatgcgcaaatttgaccgaactcaaagcggtcgcataaacttcgacgacttcatccaactttgcgttgtgctccaaacactgactaccgcttttcgagaaaaggacaccgaccgggacggatggattcgaatttattatgaggaattcctcgccatggttttctcgctgaagatgtcaatgatggctaaacaatgagcaaaagaagggggaattattgactgatgaggatttgctaatacagtaacccacttatttttgtatgttttctgttaaacattatttacatatcactttcaattttacgacatttttgtttgaataaaaatttgga

SEQ ID NO: 86010 - DNA, 686 bp, Heterodera glycines
  unsure (1)..(686): unsure at all n locations
tataaaatgctccaaacggccttaccattctgcttctgatcagtgttgtgatcggccattccttggccaaccttggcccaaccatcaaacataatcctcattttaaagccgtacaaactgcgcatcatttgcatgatgccattgcgaagaagcacgaggccgaagttacgcaagtcatttgctctattagcaacgaacagcgtcaagcattggctttggagttcaaaaaacaattcggcactgatctgattgccatgctgaaaaaggagttcaaaagcgactttgaagaactgatcatttctttgatgcaaacgcccgccgtttacgatgccaaccaaatgcgtgccgcattgtccggctccaatgaggcggtgctaatcgaaattttggcgacgcgcacaaaccgacaaattacggcgctgaagcaggcgtatgagcagttggacagaaggcatcagcacaatcagctggaggaggacatcaaagcgaagacgaagggacccttccaaaatctgttggtgtctttgctcagctgctctcgcgaagaaagtgcgcccgcaagcattgtattggcacacgacgaggccatgaaactgttcagagagggcgagggccgacggngcgttaacgccgtggtgttcaaccaggtgttggccactcgcagcttcgcccagcttcgggaaact

SEQ ID NO: 86011 - DNA, 747 bp, Heterodera glycines
gggaaacccgaatctaaggatttgtacgtgcgaccgaacatcatcgcaaaacgcatcagtggcacgcttgaggcacatgtcaacggtttccgttcacgtcgttgcgcggcgacaaaattgaggtgatgtacaacaacatcaagcacgccttcttccagccgtgtgacaacgaaatgatcattctgttgcacttccatttgaagaatccagtgctgtggggcaaaaagaaatattcggatgtgcaattcttcactgaagttggcgagatcaccaccgacttgggcaagtaccatcacatgcaagacagggacgacattcagagcgagcagatggaacgcgaaatgcgcaagaagctgaacatggccttccagaacttctgtgacaaagtgtttcggatgaccaatgagcaggtggactttgacacgccgttcaatgacttgtcgttcatcggtgccccccatcggtccaccgtttctctgaaaccgacctcgtcatgtttggtgcacctcacagaatggcctccatttgttgtcacacttgacgaagtggagttggtgcattttgagcgtgtgtccagcaacaccagcacattcgacacggtcatcgtcttcaaagattacaccaagaagccgcacatcattggccaaattccatctaacaacctggacagtatcaaggactggctaaattcttgcgacattcgctacagtgaaggcccaatgtcgctgaactgggccaacatcatga

SEQ ID NO: 86012 - DNA, 637 bp, Heterodera glycines
ggactttccctaggaacagtttgcttcgttctccagaattcgaccaaatttgctcaatttttccgcgtgtttctcctcaccctctgatggcagtgctccccgattggaaggttcttcaccaccaccgttggcatcttcaattcgcttcccccactttgtttctcgtcagaaatttactctctcttccacatatgaaaagcaagactggttcccaaaacacatgggcgttcaactgaaagtaatggagggaaaacttcgaaccgtcgatttggtcattgaagtgcatgacgcccgggttgccctgaccggaaggaatccttcgttcggtgccaaattatattcagtgcgaccgcacattctcgtctttaacaagatggatttaatcaacatgaaacgctacaaggaacccatcgaagagtactaccggaatgagcagaacattaccaatatttgctggacaaattgcaagaatttgacaaacaaaacgcagtttcaaaatttgatggacaaaatgttggatttgttgcgaaatgaacatcgcttcaacagaacagtgaagacggaataccaagtgatggttgttggtattccgaatacaggcaaatcctcgttgataaacgcattacgcaatgtgaat

SEQ ID NO: 86013 - DNA, 587 bp, Heterodera glycines
gattttcctcttacaacccaataacagcaccggtctgattgttttttatcagcgactaattagcgcactaattagttaattaataattattacgccttctccccatacgtcggtcccaaaaacagttgtgcgcgttcacattccttccaaattcattgattgtgcacaatttttgcttctttataaaacgccaccgtccgtccgtcaaccgctcgaaggaaaccaatgacagaaaaaaggacatcgctgcttctctccaaacggttcagcttggcactgatctgttttgcgggctgcgcactttgctatgcgctgcgctcaaatttgtcatttgccatcgtttgtatggtcaaggagggatcgcctacggtggacgacaatggcacaacaaaaaagggatgcggtgccgcgcatgcgacaacggagcaacaacgacaactgcccattaatgaaagtgatatggccattagcaggttcaggaggcagactaatcgatcggctcttattggtcatcatgatgctgatgttgaacaatctcttccggtcccacttgggcctggtgaatttgattggtccaagcaagttcg

SEQ ID NO: 86014 - DNA, 408 bp, Heterodera glycines
acatttttcgttgcttattactttaaatatcttaggaattttaaaacaaaataaaaagcgaaaataatggccccaccagcggagaaggagcgtgccaagaatgcccgtgtagtgcttaccgcgaggatggcattgcggacgaaaatgaccgatgctggtactgttggtgtggccatctgttgcaagtccacggcgaagccggataaacactttccctgacattttgccaaacagcacatgaacacctgtggagaaaagggccacaaattaatatttatttgttattaattagcatttattttattgggacattccattgattattgaatatttttttgtttcttgaattttattttttgcattttatttaatgaaagcgttggtttttaaataaattatttttcatta

SEQ ID NO: 86015 - DNA, 552 bp, Heterodera glycines
ccgtctgctggcacggctccgcgttctcgtattggcgaagactgaacgggcgttggtcggaatgcaggtggattcgttgaatgaggcgcaggcacttccgctgatggccaagttgaactctttgccgacagaacgtcgcattttccaatttatccgcgacgaccaattttatttggttgtcacttttgcgcctgacgaccaaacgggagtccgtataaattttcaccttttctccgccaacgaaaaccgactgactttgctcgatttggatgcggaacatattattcgaaccgcgcccgccccttctctgcgtcctcaaaagtccgaatcgtttcaaaatttctataagcgaaataagaagcaaagggagggatgattgaccactgaacagaatgaaagtgaatgatctcaatagtcgactgatcagatcaaacggcaccgaatgaaaatggcctattttttcaaagagtaaactatgcgtatgacaccacatgatatttattgttacttttaattactgttgtttagccgccacagataaacatttaagcc

SEQ ID NO: 86016 - DNA, 628 bp, Heterodera glycines
  unsure (1)..(628): unsure at all n locations
gggcntctttctgccgcaattgcacttttgggtgccttttgttacatcgaattgggcacaagcattcgtcggtcgggtggcgattttgcctatctgtgccacgtcaaatggcgttccatcgccttctcttttatggcctgcggctgtgttttgacttttcctttaactttggccatccaagcggagacattcgcgcagtattttttgcaaggctttggaattgaatttgtggacgaatggaccgctgttatgggacggaaatgcattggttacgccctcacttggcttctcctctttttgaatttcttctctttgggctctgccgtttcgcgcttccaaattttctgttctgctgccaaattgctttccattggcattgtcattgccaccggcttttatttgctcattttccacggccaaactcacaatttgcgcgatcccttcgccaactccgtttgggagccgggccatctcgtcgaggcctttttcgccggccttttcagttacgacggatgggacattttgaactttggcgcggaggaagtcgccaacccgcgaagcacaatgcgttttgccattttggttggcattctcttcgtcgcttttctttatttcgctgttaatttgt

SEQ ID NO: 86017 - DNA, 478 bp, Heterodera glycines
gactttctgttaaaaaaatgtcgcttcttgttttctctcgtctccgtactcttcctcgtcttgcgccgcttctgacgaacagtccttgtgcactcagcaccagtgccgttcgcaaagacattgacagtgctgcgaaatacgtcggagccggggctgcaactgtcggagtggccggttccggtgccggcattggcaacgtgttcggctcgttggtcatcggttatgcgcgcaatccgtccttgaagcagcagttgttccagtacgcgattctcggctttgcactgtctgaagccatgggactgttctgcctcaccatgggcttcttgatccttttcgctttctgaacattacgaagacgagcacagaggaatggataggaaatctttttttgttttttctcgcttccaataatagtacgtttttctatttttgtgttgtcagataaagttggactgaaaaaaaaaaaaaaaaaaaaaaa

SEQ ID NO: 86018 - DNA, 634 bp, Heterodera glycines
caggaggaagcgcacatggtggaagagcataagttggtcgaacgtactctcgaatcctgttcaaaatgtatcaacagcaaactgtttgagaaacacgtattgttgcctatggcctaaagacatatctctccgtggtcaattgggacggtctttcccctgagcattgttacattgcgccaatggcacattgtgcgagtcttgtgcagatggatgaggatgtgtatgaagagatgaaattgtggatgaagggattggtggcgatgtggcgggacgaaaaaggggaggacggcatggactgtgtatttgttgagaccgccataaatattcgagaacaacaacacatgtcaattgagtgtattccgcttccaaaagaacttggcgaattagcccccatttattttaagaaagcaataatggaatcggaaaaagaatggagtaacaatcaaaagcttatagaccttgccaaaacttcaaaagctaatgtcagaggcacaattccaaagggcttcccttatttcacggtcaattttggtctacagcccgggtttgctcatgtggtcgaagatgaaagaaaatttccgttcaatttcgcgcaggaaatcattggaggaatgctcgacttgcctcacagcca

SEQ ID NO: 86019 - DNA, 659 bp, Heterodera glycines
  unsure (1)..(659): unsure at all n locations
tcgcagaaatgcctccattgcaacacaacacagctgcgtccgaataacagcttggtggaggctgaactgcttgtccaccatcaaacccagccgcagcaacaccagcaaatgacccccgcttcccttggcaatacgcagccgctattcgctgtgcttaacaccgccgcactgaccactatttcaatgcaaaatggttaggaaacacactttttatcggaatgaattaacaattttataacttcccacagattcgatcactcaactccaacggtctctgtcgttacattcgcttgatattccgtgccaatgtaagtgcaaaaggccggattatgtgttggcactcgaaaatcgagttgctttactgcaggaacagaataagagtttaatggaccgactcagagaaatgaaagggcccaacggggaaaaaagcaaaaagacggatgattaatgttggcctccttcatttgcttataattttgctaatcccaagccatttattcacacgcgaattcttgttctgtacactgatattacagcacaactgttcaccaatatcatttcgcttgctcacttcccgacatattctttctgtatcgaattttgctttatgaacagaaataaaatattaattttttcaaaanaaaaaaaaaaaaaaaaaa

SEQ ID NO: 86020 - DNA, 613 bp, Heterodera glycines
tacgacgagaatttgaagcgattccaattaatttgtgcggtgctccatctgttggccctattcaattcggtggtgggatggacctttcgctgatatcaaataaatcatcggacgcgagcacaaacaatgggacgacgacggggggcagccgaagcgaagggaaggcaaaaaaacaaaaaggcagagacagcggcgacaacaaaaaggacagtcgtcgccaaacgcattttgaaacggaaagtgccaaatccatcggcaagaaaactgacggcggatgcgagccgacatttgggaggacaaagcgccaccgcaattcgagtgaagaaacgccggtcgaggagtttggacaccatgttgaggtgcaaatgggacacttcttcgtcttttctggacctcacttcttccaccgatttttcctctttttttgatgagccgaaaaagcctcgtccgttcgaaggacaaaagtgcgccaattcgcccaacaccaaactgaaccaagcaaaattttcctttttctcctcaactgaacgaatgatgtcggaatggatgaaaaataaaaacagtgggacggacggaagaaaatttgaggaggaaaaatattgccaaaacggcg

SEQ ID NO: 86021 - DNA, 612 bp, Heterodera glycines
ttttcccattctgtcatggcccattttatttctctattttttcatttaattattttttattttcggttttcaatgacaattgtgaaaggagcggatggagaggacgacgattcatttctcaaatttgtcgaagggttgccaagcaataaaaaagatttggaaatttttgaaaaaaagctgctcaaagaaaccccctccggccttttttatgttgcccattttggcgttctgtctttgatgagagaaaattgggactgtgccaaagtcagaaaagaattgaaggagcagtgcagaacatatgtgaaatatgtgcacattttgtacgaatattttttccggttattcattaaagcgccgctcgtcgtcccaaagtttcacttcgatgactctgtgctcaatgaacacattttggttaatgtgatcaacagtttgagcatgatctcctcgttttattttgaagaatgcaatggcaccgaatgtctttacgcgcttttttccaaaccgaaattgcaaaatgaggatgatctgccctataaaataatggaggacaaaaccttttgccaaaaggcatcagaaaaactcaaaaaagtcatcaagataaaatctgagaac

SEQ ID NO: 86022 - DNA, 668 bp, Heterodera glycines
tcctgtttgcggacaaacagctgcagaccatgaaacagttgttggaggagtgcggcggatggaccgagccaaatcgttacaagatttatttttcctaccgaaacatcgaacatgaacatatttcgcatgaaaatgttgccgagttggcttcaggctcaaccatcggcaattattttggttccatcgaagacgtagagaacattagtgccaccgttgtacgacccaaatttcacacggtccaaacgcagacggaggacactaacaacaacgaaatgttatcaaacagcagtttttgcgccgagccgggtgcggacaacgacatggacggctccaagacggaggggatgacggcgcaagaattgcgcatgattgactacgagagggacattgaacggctggaaatccaatgctcaaagcagcacgaacaactgatcattctgagcgaacgtgccaagcacgtggaactgttggaggaacaaaaggtcggcctgcaaacgcagacggacattttgcggagacaaaatgcgcaactcattcgtgaccatgaggagctgaagtgtttgtttggcggcggttccatctcacgcaacggtttggagggagttggtgcgcagtgccggccaattgcgcgaaaagacaaagagctggagaccaaactgaaactgttg

SEQ ID NO: 86023 - DNA, 576 bp, Heterodera glycines
  unsure (1)..(576): unsure at all n locations
acggtcgcttggtacttgtcttttgtcgtctcccgtgctatttgccattccacaaattgtcggcacttccttcagtttcgtccctttcattttggtcagtgccggtggcgctgtgttcgtttattgtttgttgcctgaaacacgcggtaagcaagcgacggacattgtgcgcgaaattcgccaacgagtgaagtcaatttcgcacggccaatcgccgtttgcggaagggtcggcggaagcggcgacgacgacggcacaaccaaacggacaaatgagcgaactgacggcactgctgagtttttaggttacagcgtcaaaaaacacttcaaaaacagcagcaaaagaacagttggcacgacggatacatgagtatggataataatgcttaacattgttgacgtggatgagaaagttttgcggaggaaaagcaattgtaaaaaataatcgaaatccgggccatgtacaaatttaatgtttttttattagtttactgtttggattatttttgctttttttatttggtgaatttgaacattgtataaaatgagacctgannaaaacaannnnancaaaaaa

SEQ ID NO: 86024 - DNA, 555 bp, Heterodera glycines
  unsure (1)..(555): unsure at all n locations
aggtgacttacaaaacttgaaattccagtttgggatttgggcggccaaacgtcgatccggccctattggcgctgttactactccaacaccgatgcaatcatttacgtggtggattctgcggacagagaccgagttgggatttcaaaacaagaattggtgtcaatgctggaggaggagctgaagaacgcgatcctcatggtgctggccaacaaacaggacatccacggctgtctgtccctggcggaagttcacaaggcgttgggcttggaggcgatacgaaacaggacattccaaatcttcaaaacctcagcgaccaaaggcgacggactggacgaagcaatggaatttcttgctgcttctcttcaatctgccaaatgatcagaccaatgcataattatttccaattattgtattacagatttttacgttctcaatttatttattttttgcttggtaaatacaatgtcnaaaaaaaaaaaaaaaaaaaaaaaaaaaaaaaaaaaaaaaaaaaaaaaaaaaaaaaagaaaaaaaaaaaaaaaaaaaaaaaaaaaagg

SEQ ID NO: 86025 - DNA, 556 bp, Heterodera glycines
acattccgtcttctccgactgttccattctcaaaagcgtcgtaccataacgtcacacacatcataaccctcatgaccactccagcaaacgcggcgagggcccggagtgccaaggcgaagctgcgcgatgccaagcggaggagggcggcagttggacgcgcaggatacacaagaaaagcgcagcggggcgagcgatgtgccatttgtatgaccaacgtgagcgccatcacgcggacgacgctcggctgcacccatccgttccatcgccgctgcttgtatcgctggatccgctaccacaccaattgccccgtgtgccgctacaacttcgcccgcaccattccgcgcggtgagcgtaaccaaccgctgtaagatgccatgtgttgtgatcgccgtacgatgtcatttgtgtgatcatatttgtaccccattgttcggttatgcgtatgtatttgtacaatggaatgtatgttcttatatgtactctgtatgtacagtatgtataatactcgtcagtaaaatactctccttgttctaaaaaaaaaaaaaaaaaaaaaaaa

SEQ ID NO: 86026 - DNA, 390 bp, Heterodera glycines
aaaatgcaagaaaatggacgggaaatggcacttgtgaagttcacgaaggacgactttggcatttaattactttgataagctcctccgaaactatagtaggtaatagccggttcattcttttgctgtatgtattacataatttatgtatgctattttatttatacaaattttgtacattttcaatatttattaatttattcattcggtctttgtaaaaaaatgaacaatgaatcatttgttgggatgtgctctattcagtgatgtggtgaaattacacaataaaacattgtcattaaaaaaaaaaaaaaaaaaaaaaaaaaaaaaaaaaaaaaaaaaaaaaaaaaaaaaaaaaaaaaaaaaaaaaaaaaaaaaaaaaaaaaaaaaaaaaaa

SEQ ID NO: 86027 - DNA, 734 bp, Heterodera glycines
tgagcgcatgatctcattcccaaagttggatgggaaccttgaagtcaataaaaattcttgaacatggtttgaccatcaccgagaagtggaagacggacaaccaactgacgaacgtgctcgaattgaaggacaaggttctgcgaggactcaaactgacggtggagacggcattcaagccgcacgtggaaggaagtcgccatgccattgccaaggcggactgggcaaatgatgcgttccatgtcaacggggatttgactttgtttggtggcccactgttcaccggatcgtttgttgctaaaatgagcaacgattggctggttggggctcagctcaaggccaacctggaacagggcactgttggcccgacagcaatttcgattgggcgtaagacggcggagtactcactgcactcgcataccaccgacgggacggactttggtgcaagtctgtaccatcgggtgcaccaaaatttggagtacggtgtgcagatgggttggaagatgggcgacgccatggcgagttgggcgattgccaccaagtacaacatgagcccagaattgacccttcgtgcaaagatggaccacgactctctcgtgtccgtttctgccgtgcacaatctgaacggcacgctcaagctcaccctttcctcacactttgcaatggcagcgttccctgacgcgcaaaacaaatttggctttgggctcgagtactgtcccggcggcacgtgctgcgcg

SEQ ID NO: 86028 - DNA, 581 bp, Heterodera glycines
caggaaattgagggcaaaggacatgaaattgaggatgaggagtttgacctgaacgatgaggcctgcttcgaggcttgcgttaaccggctgaacatgtgggaccaatgcctggacaacgcggttcgattggagcagcgactgctgccccacgtgatctatgacgacgcggagcacgaagcgcatcataatgacctaattgacgtcatccaacacgttgagcccgtccgaatcaccaacagcggactggagccattgaacggcaaactgaccgaattcatcaacaacccattgaacagctcggacaacgaagccccggtgctgcctcgtgcaatcaccggcattaatcacgtcacgccttccttcgaccaaatcaaacaaatgattgaggcaatcagaacccagggcgactgtccagcggtggacattttggcaccggccgacaatttgactgtttacgacgcctttgtgtgcaaagtgttggcggatgtgctcgacattctgaagcgtcaacgtttctacaccaatttggaactgattgagcgcgacgcgcgtgcccggggggaggcgaaatggcaaaatgc

SEQ ID NO: 86029 - DNA, 650 bp, Heterodera glycines
gcaatcggtgaacagtgatctgatcgtatggaatttctgttctcaggaaggacatcaaacagatttgggacctcaaagggtcactaaggaatcggctcgcctccacaaaaaatgacaacaacggcgcctcttccgtgctattggacgagaactacattcagaacatgtggcggaaccaaatttatattacaactcattcgaagacggcactgagtcaggcgatcatcaacgacagccacttcctggccgaccagggcatcatggactacagtctgttggccggaatatgtcggggggaggaggacgaagtgatcgtcggcatcgtggactatatgaggacattcacttttgacaaaaaagtcgaaagtgccatcaaaaatgccattcctctaaccaattcgtccactgtcatttcgcctgagcaatactgccgaagattttacgaagccatcgacgggtatttcgcggttgcgcccgaccaatggaccagcgaatcagtttttacttagaacagaatagaatgaatagaagagtattatagtaacatcactttccttcccattcctttttcccattttcgttaaattccaatggccttttcgaacttatttcccccactccattttagcgcaatcccaatttctctgatt

SEQ ID NO: 86030 - DNA, 286 bp, Heterodera glycines
agcataaaaaagaaaagtagaaatttcggaagtcattcagaaaactttaatttaaaaaaatgaggaaacttccaattcttgctcttattttctgcttgttgctacttacaacggaaggaagtatatttcgccgaaaaaacagaaagaaaaattcatcgagcagcgaacaaaaaacacaaagaagaaaccgagggtatggccgagttcgactttttcaaagtggcatgggcatgtatggccaatcgaatggattttcaaatggccgatttggcggctccagtgtcta

SEQ ID NO: 86031 - DNA, 580 bp, Heterodera glycines
cagctgcgttggtcttcgagcagttggctgccgggtgttgcagcaccgccgcttacatggcggtgcacaacatggtgccgtggatgatcgaccgttttgccaacaggagctgaagcaacggtacatccccgaattagccagcttcaccaagttggcctcctattgtttgactgagccgggcagcggctccgactcggccgcactgcgcaccaacgcacggagggaaggcgaccattacattgtaaatggctccaaggcgttcatcagcggcagcggcgtgtccagcgtttatttggtgatgatgcgtcacaaagacgcgccgccgggtcccaagggcattttcgcgttgattatgacgcccgacatgccgggcttccaactgggcaaggacgagaacaagttgggctggtgcacgcagccaacgcggatccttacttttgaggacgtcaaagtgccggtgaccaaccaagtgggcgcggacgacgaaggctttaccatcgccatggagggactgaacggaggccgtgtgaacatcgccgcgtgttccctgggcgctgctcagatgagcatggacttggcc

SEQ ID NO: 86032 - DNA, 583 bp, Heterodera glycines
caggacgaggctgcccgacgatgtccaactaaaattctaatccgcccgatgatttccaatccacccattcatggtgcgcgaattgcgtccaaaattttgtccgacccgaaattgcgccaacaatggctgggcgatgtgaagggcatggccgaccgaatcatacaatgcgctcccaactccgcgatttgttggccaaggctggctccaagcgcaattgggaccacattgtcaaccaaatcggcatgttctgtttcacgggaatcggtccggaacaagtcgaccgactcgccaaagaattcagtatttatttgacgagggacggacgaatttcagtggccgggatctcatccaaaaacattgactatttggcaaatgcgctgcacgaagtgacgaaataggcgagcagtttatcaaatatgtcccaaatggccctcggaagtgctttaaagttatgcgatcgaatgtagaatagaacactttctacaggtgataagaacaacccgtgactctgtccccctttcatttctctgtttttacgtttcattttgtaatatgacaggtttatagtaaagaatgcatttca

SEQ ID NO: 86033 - DNA, 270 bp, Heterodera glycines
cgataattccggacggcgggtactttatgattgctgatttcagtcatttggatgggcaatttaaattgagaaatgaatccgatgaaatggaaaatgccttggatttcggcttttgtcgttggctttgtcgagaaaagaaattggctgctattcctccctcggctttctattcgcctgaaaatcgaaagggcaacgattatttcattcggctgtgttttttcaagaaagatgaaactctgcaaaaaaaaaaaaaaaaaaaaaaaaaaaaaa

SEQ ID NO: 86034 - DNA, 492 bp, Heterodera glycines
  unsure (1)..(492): unsure at all n locations
gtgatgccctgcagctggaggaccggccctgctatgagatgatcgagctgctgctgcgtggatatcttgcccaaaacaacatcgaggagcatccatatgactgggagatcggaagacgcaactcggatcgagaaaagacgcaaattgagaaaccagcagggaaacagtgaggaggatgagcgaagaatcacccgcgagatgatgaacaaacggagacacatattcgcgagcctagcatctgtctaatcacatttgctcataattgtatattattgtgatcggtatcaagtcgtctttcattgtatacttggcattgacgacacacggaatgtatgatcacatttgctcattattgtacactgtgatcggtattatcattcattatatacttgccatatgtacatatatatgtataaaaaactgggcgctnaaaaaaaaaaaaaaaaaaaaaaaaaaaaaaaaaaaaaaaaaaaaaaaaaaaaaaaaaaaanc

SEQ ID NO: 86035 - DNA, 578 bp, Heterodera glycines
agccgcgagttcgactggaatttgaattacggtgccattgctttgatgtggcgcggcggttgcatcatccgttctcgattcttggaccgtattcaaaatgcttttgaaaagaatccgtcgctggtcaatcttttgctggacgactttttcatgaaagccattggagacgctcaggactcgtggcgtgaagtcatttcgaccgctgttcagcttggcatcccaatgccagcgtttagcagtgccttggcatttttcgatggctatcgtactgaagctctcccggccaatctcatccaggcccagcctgattatttcggtgctcacacttacgaactgctcgcccagcccggcgttgctgtgcacacgaattggacgggcagaggagggaaagtgacgtcaaatgcgtactccgcctgatgaattaacagaaagacctttcaattagtgaccgatcaaattgtgattttgccttatgttgtcatattttatcacttaattttgcaaggaaattctcattgtgaaaaaaaaaaaaaaaaaaaaaaaaaaaaaaaaaaaaaaaaaaaaaaaaaaaaaaaaaa

SEQ ID NO: 86036 - DNA, 397 bp, Heterodera glycines
gatttcgatttacttcgttttgggcaggtccctttttggaatgtacagtcaaaaaaacaagccacacaaattgatgatcaacaaattgatcaaataattagtcgcttcgccgcccatttgaaacataattaaactccgttttcactttcatttttccgttctatatttataaagtcagcaaaaaatgtcagctcaaaatgagtttatgcgggcggccgttgaggagggaattcggggcgtacaaagcggcgacggtaaaaccaaaaaaacaaaggaaaaaaaggaaaagcaataattactgactgatcagaggatttgagcgcaaaaaagtgcaaataatttgtgatacgatgagaaataaatgcaaatcccaaaataattagtcaccaaatgtata

SEQ ID NO: 86037 - DNA, 422 bp, Heterodera glycines
accctgcctgaactgatgtgttattcaagataagcctgctgtgtagttaacctgccgacagggaaactgcgtacggctcattacaccagctataatttacttgaccttgacttcttacttggataactgtggtaattctagagctaatacatgcaccaaagctccaatctccccagagcggagcgcatttgttcgccacaaaaccaagcgccctccgggcgtccagtgttgactcagaacaactaagctgatcgcacggtcttgtaccggcgacgtgtctttcaagtgtctgccttatcaactttcgatggtagtgtatctgactaccatggtgatgacgggtaacggaggataagggttcgactccggagaaggggcctgagaaatggccactacgtctaaggatggcagcaggcgcgcaa

SEQ ID NO: 86038 - DNA, 582 bp, Heterodera glycines
cagaggaagggaaatgtgacaagtccatgaaaaatgtgtaacactcctggttccttcgagtgccaatgcgtcgatgggtttaaacgattggactccggcgaatgttccatcgatgtcgaagctcatcccaatgttccatggcttcaaccgggcgagaaacttcggcttttttcctatttcggcctcttccttataactgtttttgtttttacaatgcatcgctcaacattagcggtttttctggccgtttctgccatttttgccgtccttctggttgaccttttcttcggcgatggctttctccttctgttcaggtaaaactgatgaaattgggagcactgagaaagatgatgatgctgataatggtggtgctgaggcaaaatcttcccaggaaacggagacggacgaaaagctcaaaactgacaaagagaacggtgaacacgatgagttgtgatatttgtttatgggtcgatagagttagggagagaatggcattctgatgtttgtattgttgcacattttttgaacgtttgttgttattatttttgactgggtatttatttgtgtaaatggttattcaca

SEQ ID NO: 86039 - DNA, 593 bp, Heterodera glycines
taaatgactgaaattggaaatgggtcgtctggcttcattccaaagggattcaggccgagtcccatctccgcctttttttctgccgaggccgtccgttacatgaccgaagctgagttccaccgatttcggctcaaatacatcacgccccaaccctttgccgatcgaatgcgcgagagttggcccaccgttgagcagccgatcagcgaatggttggcccagtgctgggacagtgcggccgcctacggcgagcagtgccgtcgcgtgtccaaggcgcgcctcttcaatctcatttgcatgcattgccgcgactgtccggatgccatcgccgaaatgttttgtttggtgctccgctgtaaagatgacgacccgcaggcgtgcaaagagttggtgttggtcgacctgaaaaactctgaattttatgcccgaatgttcgacctcagaggcaatccgatgaaaatggacgcaatttcgaagtgtttggagccccagtgcattttcccggaattgcgcaaacggaatgccaatgagtacgcgccgctgttggcacgggtcgaggcgctgtacaaacggtcgttgaaacatggcaacggcaa

SEQ ID NO: 86040 - DNA, 659 bp, Heterodera glycines
gtgatcggtacttttttttacaccgaattccccccccccccccttttttcacttaaaacgcgtctttccattgtccgatgattctgcaatttcccttcggggattttaatgttttgttgctgcttacaatcagcactgttcttttggccagatgtttaggcacaattgtacagtttgaagatgaattagaattgatggaaaacaccgggacggcggatgaatccgccgatggtccgttgggtgctttttgggaatggcatcggatggtcgctggggctgacaaattcggctccatctcgcagcgaatgcttcatctgcgtccttctttgaaagtgccttccgtctccaagcgaattgccttcccttcgaccgccttcccaaatccaaatccgaacaatgccatccctccgccgaatgtcgtccgtcgccgtgcccataacattccaagggacaaacccccgtgccttcgaccgatggacagaccattccgagaacatcggacgtacccgcgcagttgggaaatgcccggctttgaggcgaccattccccgccagtgggactggcgaaatgtgtccggaaccaacttttgttcgcccaaccgtaaccagcacatcccggtctactgtggaggctgttgggtgtttggcactttgggctct

SEQ ID NO: 86041 - DNA, 693 bp, Heterodera glycines
atgtctctttccgatcaatcagaataccctacatttacagaatttggactttggtatcgacttggaccacgggtggcacttgttggtccgaacggggctggcaaatcgacactcctcaagctgttcagcagagatgttgagccaactgatgggatgatccgacggcatttgcactgcaaaattggcaaatatcatcaacatctcgttgaagaacttccactcgaactctccgcgttggaatacatgcaaagagagtttccggacgtaagagagaaggaggaaatgcgaaaaatcatcggccgatacggtcctacgggtcgtgagcaggtgtgtccgatgaagcaactgtccgatggtcagcgctgtcgtgtggcgttcgcttggttggcatggcagcaaccgcatttgttgctcctcgacgagcccacgaatcatttggacatggagtcaatcgacgcgcttgctgaggccattaataacttcgccggtggaatgattctcgtttctcacgacttccgactggtccagcaagtcacggaagagatttgggtttgcgacaaacaaacaattactaaatgggacggcgatatattttcctacaaagagcatcttcggaaaaagattgaatcgaacgaccggaagggcacgatgacagaacgttgatcccttcttttatcacgttgttgctgagta

SEQ ID NO: 86042 - DNA, 535 bp, Heterodera glycines
agaggaggaggaacacaaacattgatgttcttccacgaaagtcgcaacacattgaaaaaaagcggaaacttttggaagaaattgatttcgcattgccgaaaaaggcgcaaaagtcaaaagcaaaaacagagaaacaaaaagcaaagagagaagaagcaactgaatcaaaagatgaagaagaaaaagcatcaaaaagaaaaattaaacagaaaaagacaaaagttgaaaagaaggcgaagaaaaggggccgagtggaggaggacggaacggttgacatcgccgagttgggcatggataggctgagggcgtacggagtgagcacgaagaagttgaaaagagctcacttcagcaagaaaaaggcagcagcagcggagagaaatcaaggggaaaagcagcagaagaaatcagaaagaacttaccaaaatgggacggattgacctaatttccaacagtctcatgttctgtttggccactgctatcattgaaacagttacaattttgataaaatattttggtgcttaaaaaaaaaaaaacc

SEQ ID NO: 86043 - DNA, 746 bp, Heterodera glycines
gttctaggcggaggaaaaggagcaacggtgatttatgacgaagttaatcagctgtcgaagaacggcaattgcgtgggaattctctccgattgtttttttgcccattggcggtgatctccgcacttttctttggtgtcggatgcaacgccaaccatctctattccgagggtggctctttccccgtcctttcctccgacaattcgccgcccattccaaatgatccgccgacttttggttccccagccgaccttcttgacaatgaattgcagcagcccaaccaacagtaccaaactgagtttgccccttccatggaacaaatggtcgacgaacaaaggcgcaatcggctggccaaaattattgaacaaatgagggataatggacagtttagccagcaggaaattgccgatgggcccggactctttttggaagaaggagaagcgaatgttcccattgaacgaccatcggaaacggagacttattgggacggactaaaagagggtgaactcgagtcttccgaaatgttcggtgaaaacgaagggaagaaaattgctgccgttaaaaagggccaaaacgaatttgtggagtttgtggagccacgtcaacaccaaaacaaccgccacaaagaatggatggacaaacgtgtgccaaccgattcgacgcacgccttttatttcctgaccaactccggcaacattctcttcatggcttatttggccgtttgctgttttggcattgtcgcgggcgct

SEQ ID NO: 86044 - DNA, 610 bp, Heterodera glycines
  unsure (1)..(610): unsure at all n locations
aaaaaatgaagcgacgaacgttaagaaaatctggatttgcacgacattttggatggacattctcccctttttgaccgtcttcaaattggactcaatttgggatgtttttgtccgtcaaatttggcccatttttacgacgccgaactctcacaatttgtcgccttcttatgccgatcacttggacaatttgttgcgcctcacaacgccaacaattctctccgatctcaacattaattcaatccattcaagcagttttttgtccgtgcccgcacttctgtcaattacaacatgcagtttcatttgcccgtgtcaacgccaattgtgccatttgaattggagaatgagcggacgaaagaaaagctgacattggagaaagtgccaccttatgatgattgttgaagcgatgtccaattgaggagaagaaagatgaaaattcggcagaaatttgaacatttcttttacttttgaccacctatattttgatcaaattgtgaatatggtaaaataaatcaaataaatgtttatgtcnnaaaaaaaaaaaaaaaaaaaaaaaaaaaaaaaaaaaaaaaaaaaaaaaaaaaaaaaaaaaaaaaaaaaaaaaaaaaaaaaa

SEQ ID NO: 86045 - DNA, 285 bp, Heterodera glycines
ccaagcggaggagaagccaaattgtggatgaaatcgatcgacagctgaagacattgcgaaaatggcgatcacttatgaggacgagtgcccgtacaatttgggctttgcccgtgccatgttcgacttggccgctgctgctgctggccatgcgggcaacggcacagaatggcaaaacatgaaaggacaatttgaacaggaaagccaagcaatcaaagcaattggccaagaattgaacattgaacctactgatgtgcattttggacatccaagcaaaggattttccgc

SEQ ID NO: 86046 - DNA, 650 bp, Heterodera glycines
gtaagatgaaagctccggcggtgtaagatgagcatgcgtccctattagctagttggtaggggtaaccggcctaccaaggcaaagatgggtaggggttcttagtggaaggtcccccacactggcactgagatacgggccagactcctacgggaggcagcagtagggaatattggtcaatgggcgtaagcctgaaccagccatgccgcgtgcaggacgaaggctttctgagttgtaaactgcttttgtacaggaacaaaaaagcctctgcggaggttcttgagggtactgtaagaataagcaccggctaattccgtgccagcagccgcggtaagacggaaggtgcaagcgttatccggttttattgggtttaaagggtgcgtaggcggtttattaagtcagttgtgaaatcttagtgcttaacgctaaaactgcaattgatactgatagacttgagttaagaagaggtaagtagaatttatggtgtagtagtgaaatgcttagatatcataaggaataccaatggcgtaggcagcttactggtctttaactgacgctgaggcacgaaagcgtggggagcaaacaggattagataccctggtagtccacgccgtaaacgatgatcactcgatatacgcgatacaatcgtgtgt

SEQ ID NO: 86047 - DNA, 661 bp, Heterodera glycines
ataagaaaaaagttatgagaagtttcaaatttttaccatattctaactcaagtcctaaactgctgttttcttccaaaatgcaaaaactaatcattttttaatgattctaaatgcccaaattgcctttgtgcccttataaccaaaactattagcatttgaattccatcatttttcatgtgttagagacatgaaaatagtacgccaaaaggagagaaaaagaaatatggaaaaaaattgaaattaaattgaattcaattaattctgtggcttcgccggattaacgcattaacgcccaattccaatgtcgtccatcctttggacgttgacgagctgttcctgcagcacaatcggtgtcgaaatgcacagcaaacaagattggctcttccttttcgttgttttcattcgcttcttttgtgttcatggccctcgtgactttggctgaacatcccgaattccttcggaggagaaggattcccttgcgtgcctatcttcaaattgttggcattttcttcgtggtcagtttgctgaacaaccgcgtgctcggcttcggcctgcccttccctctgatcatcgtttttcgatcgagcactcttctcgcaaatgttctgctcagttggctgttgcaaaatcgcaccttttcccccgcccgacttttctccgt

SEQ ID NO: 86048 - DNA, 574 bp, Heterodera glycines
gaatccgccatcggctccgtaatgctcaacattgtccatcccttcgcgttgtcactttcgatggccccattttcatcgaatttccacctgatgaaagtgccaatgcgtcggatggccaagcggtgaccaaatggctgttcttgcctcgtcctgacaatttaatgaaggagctgacaatctgcattgtgaattcatcggttgaacattggttggcaactgtggaacaaatcgaagcggctttttcctccgcttcttctcctgtcaatttcgtcattactgtttactttccgccgtcctcttcactctctgccgttatgccatttaaactgaccaacgaattcaccgtggagcaattggcactgttcaaagaagatggagaagaagatttaattagagacgacggagtcggcgatggtcttctcgacggttcgcccgggccgagtggtgatcagaaacagcagaaatgaattgattgatttgttaattgatgcgattatgtaacccaaatgttagactttgccatttaaatatagttgtatttgatttttgctcataaattcaaaaacggaaaaaa

SEQ ID NO: 86049 - DNA, 637 bp, Heterodera glycines
  unsure (1)..(637): unsure at all n locations
cctcttttgtagtccttaagcaaattattttttgatggcatcgtccgacagaaaaaaagaaaagttttcctccgacaatcgccgactcatttcttctgccgcaattggtgaacatgaacagcagcaaccgatgggttcacatggaaaacggcgaaatgttcgcgtggccaagaaaatgaacaaatcgttagggacgacgaagccaaaacgctgctgctcccttcacaacaatttttggatggacattttccccttttttgaccatgctcaactcggcctcaaattggcaatgctttcgccgcgtttcaatgttttggtggacaaacatttcgatggcaaaagcgaattgacaatttggaagctaatccaaattcgcaatccgagaacggcaccgaaactttctgtgctcgtcaacaatcgcaaattggtgccatttccgttgcctttccatccgttgcccagcaaaattcactttaagaaccttcgaattgattactttgatcactccgtcgtcgcttttctccgctcaaatcaacagattttcgaaagaggaggcctcaatttgtatttggtggttcgagcagcacataagcgtcttttgcagccgactttggatgttttcgtccgtgaaattntg

SEQ ID NO: 86050 - DNA, 616 bp, Heterodera glycines
tacgtgctgaagaagttttgggacaatttgttgttcgtctcctccacgctgacgacgaccaaccaattggaagctggaactttgtgctgtgccttcgtccgccacttttgtcttatatagcaacggtgcttcaacacagcaaaaacccttcattagtacagctcggtctccgttcgcttttccatctgttgacaaaatgtaattctgttgacgattgtccgcctctgtcagacacaattggctcagttgctggtcatttgaccagtgcggtgttcgtaatcattcgcagtgagctggtcactggcaatatcaacgttgtggcggacattttacacgcattggccagcaaatatccgaatgtggcgagatcgacagttttggctctgtccgggggtgattctcaacgattgattgcattgttcgcacgtcccaataaatttgattttcgtcaaatatgtgccactatgcatcagactgcacttttgcaaaaagatccagtgatttaatgtattattttataaagtgcaaatttttttttttcattcattcgtttgtttcttttttagtcataatcattatacgatttaatgattcttatatttattaaatatcaagc

SEQ ID NO: 86051 - DNA, 314 bp, Heterodera glycines
caattttttgaccagcgaatgccttttccgtcgacgatcactccatccgtccttcgatttgtcctccatcactttccctccctttttctgtcgctttgcctttcctttcgtttcgctgtctcccaaaaaggctgatgaatggcatttttcaactttgagctccgtctcaaaattggattgtttgtctttttgccggtgcttctccccccccccccctttctcccacatttctttctccgaatttcgtgcaaatgttttattccaaaaagaaaaaatgattcttcgatcaaaaaaaaaaaaaaaaaaaaaaaaaa

SEQ ID NO: 86052 - DNA, 697 bp, Heterodera glycines
aatttgggagttggaagaaaatccgattgtgatttggcacgatggttcagttcatttaacagtgttcgattggttaaaagtggcttgacccggagcaagagccagaaattcacccaacatgtttcgacacttctcgattgtttctcaccatttaatgtggattatcctcagcaagatgacactgatgattcagcagatgatgaaagtgacaaagagaaatatgactttttgtcatggcaaaaaaaattgcgtcaaccgcaacgatcatttaaattgccatcggagagcaaatacaatccgttccaaagatttgatccatttcaaagattgggtccgtttcaaagattaggagtttacggtagtcgaaaggaaatggaaaattatttggacatttttggcaatgaaccgtcctcttccgtgacggcaccgctaattggttccatcaaaaatgcggagattgatcaacagaacagtgaggacgagaaggggagcagcaccagcacaaagcgtgtaaatccattcctaaagccggatggaagcagctacaacaaagacaaggatgaataaacagaatgccaaacattcgaaggaattgatcaaattcaaaaaaaacgattgtatttatagagccctcacccaacaaatattggcacatgttatgaaatgaattagttaataaaatctgtatgttggtaaa

SEQ ID NO: 86053 - DNA, 777 bp, Heterodera glycines
gcaattccgcgctgaatcttttacgtgtgattggccgtttccttaaatggccaccgttttgcggtcgtccgctgaactctccgtcgagtcgattgtcgctttgttcaattgttacgtccattcgattttcacatttttttgctcggattttgatgcacaacaacaacagcaaatgttcggcaccaatttcgtcacttttcgcctccgccaatttgtgcaatcaatcgaaaagaaaatgaatggcccggggacgacagagggtgggcaagacagtgtggaaaatgcggagctttcgttgttttgccgtcggtcgtcgctttgccacgcgttggacagaaacgactcggacaaattgtttttgctcgtcgaaagaattgttggcgttgagtcagttgttttcctcgccaaacaaatggaattgcttcggcctttcctcgaggcgcttttgccaaaaagcggcggaggcagcgacagcaatttgtccttggactccttctatcgttcccttgcggcggtgttcgatttgggcgacgcttcgtttggctgtgtggcggccaaaattatactcgttcagtcaattctgaagcaaatttcggcgaccgattggacaaccggggaaatccattcgcaacattcgccttatgtggacacaattgtccaagaatgttcgcaattcaaacaaaagttcgtccgccttttcccctacgttcacatttccgacgaattgtacgccgccatttggtccatgcttttgctgtgcattttccgtattttggt

SEQ ID NO: 86054 - DNA, 618 bp, Heterodera glycines
catgtctgttctgcttttggcccactgattgttttcgcgctggtccttggtttggccatcactttgacagttatcacagtgaacaattggaaggaaatcggcgtgcttcttagcaaacaatcggcgttgaagagccgctcggacattgaagcgttttatgaaattgattgcccaatttacagtgacaactccaaacttccggacaaatgggaccaatttgatttggcattctgcaatcgctattgtgatcgcaaccaaatgttcgagtccatgcaccgtcaactcgaccccaaccggaaatcttcagccaagagcaaagacaatcaagagcttatgtgtcccatatacattgaattcaaacaatgtcagatgggggaagggggtcactgtgaggagaagttattcagcgaggaattcaccgaattcgttcaaccgggcggtgctggcacttcgtccaaaggggagaatgagacgattggcacgtgcgttccctgcccttcctaatccgaattaaaggaaaaagctgatgtttatctggccatgttaatctattgtttaaatatatttgttgtatttatgtaattgtttttgaaagttcaataaatatttggatatcca

SEQ ID NO: 86055 - DNA, 502 bp, Heterodera glycines
cactgacatgaacactaagaactatacgttgctggaaaccgagtgttggcgaggcgcctgacaaagccctgcataaaacaggcaaaatgattgaggatttggcttctctgcagcacaatcggctcagcaaacctatccaaccgacactctctgaagcaattaagccggatgaaagtgaaatacaattggctgaagaaatagtgcagggattgggccaacatgtcgtgcaattgggtgcaaagcccgcggatttaattcagtctcctcttttacatcaagctctcggtttggatgttgatgattacaatgtgctttctgaattcttagaagtataaatttataataacctaaaaaaaaaaaaaaaaaaaaaaaaaaaaaaaaaaaaaaaaaaaaaaaaaaaaaaaaaaaaaaaaaaaaaaaaaaaaaaacccaaaaaaaaaaaaaaaaaaaaaaaaaccccaaaaaaaacccgggaaaaaaaaaaaaaaaaaaaaaaaaaaaa

SEQ ID NO: 86056 - DNA, 693 bp, Heterodera glycines
gattttaaaaaatgttccgccattgtcgagattctcgaccacttccccgtggctgttcttgatgtacattgttgtgctgccgttcctgttacactgtgcttgttgaccatttttacagcaacaacgacaacaaaaatgacgaggacaatggcactggcggaagatttgaatatggcggaacatttgttactgcgatcagcgcgggacacaagtgccgatgaagatgatggtggcggtgattttgacggcagcagcaacgagactgagtcggacagcgctcagtttggaagccaattgaaaagggacggcgccgccggagggataagcattggcacttttcttggcaacatttcggcatcggcacgcgctcaactgcacaacattgtaaacaatgcgagcatgaccaagaaagagatgagcgaagcattggacacatgggcacaagcacagggccaactgttcaatactgtttaccttggcctgaaagcggcttatgagtcggcacggcaacaattggaccaacggcacgcggcacagatgcaaaaccaaacacaggcggtgcgcgaggcggacgccaaaattcaaacgattgccaacaaccaattcattacattagcggaggagaagcaacaaatggtggaacaaatggcaaaattcccagcggatgtgcagcaaacactgctccaatttgcg

SEQ ID NO: 86057 - DNA, 620 bp, Heterodera glycines
gcccgatcgttgatattttgaagaagtaatgccggatcggatgaacgtggagaagaaatcggcgccggatctgttgatcatctttttggaacggctttatcagttgatcatcagcactttgaagatcccgattccggatacaaaaacttgaccaatcttgggaacacaaatcatttgaagaggacaacgatgaagagcctaaaaaattgacaattccggatgaatatgaccagagcgattttttaatagaaaacaaaagtgttggagaacaagaaaaggaaattattcgagaagaaatcggatttaatggccaagcagagaacggcgaaaagccatcatttgaggaggaaaagtgtcccccggagggatgccgactttaccgagatgatttggtagagagcgaagaggttttgagaaatgagcatgatttgggaaggaaactgagcaagactgaagacctttcaaagaagatggaagtgaaagggaatgaaattacgaaagaagacgaacattctgcagaaacacacattgtgaaagaggacgaaaattggatggagcacaaagaggaagagaaaagggagaagaaagaagggaagagggaggaggaggaagaaaagagg

SEQ ID NO: 86058 - DNA, 641 bp, Heterodera glycines
  unsure (1)..(641): unsure at all n locations
ttttggaagtagtgcattttacacagattgctgccgtcctaaatctcctattatctccatgttcggtcgcttcgtttcatcccttttctcctcccggtttcttccgtttttcgccccgaacgattcctgcaaaaattttccccaaatttctgctgtcattcgaactttctccgacaattttcgtttacagcccaaaatcattatgatgacattttaatgcgggacattcgcagaggttctcctccaaagcatgcgcgaaaaccacacgacagaaagccaatcaaaggaaccgcttttaggaaaggcattgttataaaagttgtcgtgaaacacccaaaaaagcctaattctggcaatcgacaatgcgtgttggtgcgtttatccaccggaaggcaatgcatcgcttacattcctggggagggacacaatttacaggagcacagccaaatttacgtgcgcggtggtcgcagaagggatttgatcggagtcagagcaaatgtcatgaggggaaagctcgactgtgcggcggtcaaaaagaaataaatccgaaaacgatcaatgcttttataattcggtaaaatattttgatagagtggtcaaaggacattaaacattggcaannnaaaaaaaaaaaaaaaaaa

SEQ ID NO: 86059 - DNA, 534 bp, Heterodera glycines
cccggacaaagagtggaaatactgaaagagatagcgaagaaaagaccttcttaaacaggagacgcctcttcttgactacgcactcaaagtggagcaaatcacaacttcgaaaaagcccaacttaattttgaacgtcgatggggcaattgcgacaattttcgtggacattcttcgccattcgggaatgttcacaccgcaagaggcgcgggagaccattgagattgggtctctgaatggactgttcgtgctcggccgcagtttgggattcatcggccattatttggaccaacgtcgtctgaagcagccgttgtaccgccacccgtgggatgacatcagttacattatgcctgagcatgaatttgcgggacagcccagtctttgagtgacaatgatcaattactgtttatgtagggcaatgacttcactttttaagaaaatagtaaaattattgaattgtttatttgatcagattctattcttgtattgtagttgtgttaaagtttatacttcgcaaaaaaaaaaaaaaaaaaaaaa

SEQ ID NO: 86060 - DNA, 519 bp, Heterodera glycines
gcggaaggatttgaagtgattgcagatatctatcgtaacaaagctgttgggacgaactcgaagaagctaagagcaagactgaatttaatgttggcctaatggacgtgtgggatttcggggcattggcacttttccacaaaattggcaccaaaaatgttgtgcttacacacaattttttgatcatgtcacacatgtacaaatacatggaaaaagcaggatggcaaactgagaatagcgaattatttaactaccaaaaacaaatattggacaagggagtgccagaactgttctcagcagtcattaacgacaaaaatgttggaaaagctggtgcatacaaggaaaagcataacgaaagttcggatattttctcaaaagtttatgaaattgctgatcaaaaattcaaggaccttttcaagaacaatgcatttcctactctggaaaaattgttcggagatgcaaaagctttgttcgtcaacacaacgcctttattggattatgacattggcagtttgccaaaac

SEQ ID NO: 86061 - DNA, 404 bp, Heterodera glycines
gcgagttggccgcatggcgcagcccgagggcgtttgggactcgctcactgtgcgactgcaggccatcaaaacagccattgagacggccattatgattttgcgcatcgatgacattgtcagtgggacgaagaagcgcgacaaagacgggaacggaggcggaggcggcggcgcaatgccgggtcccggagggtttgaataatagcgaagaaaggcgaaggagaggaaaggaacttcccaattcaacatatttaaagaagtggccattttgttggattgaacaaatttcgaaactccaaaatgctgttgaccgtttcatgctttacttatccattcaatcacaaattgaatttgctttgttttgcctaataaaatttgtttttgtcgaaaaaaaaaaaaaaaaaaaa

SEQ ID NO: 86062 - DNA, 449 bp, Heterodera glycines
aacgatccgaaaaaatgccaaacattttcaaaatccttctgattgtgcttttggccgtcgtctcattccgtctctcggcttctactggtgacaaaaaaactgctaatgatgggagtggaaacaactcatcagctgggattggtacgaagatcaaaagaattgtcaccgctggactgctcttcacttccctggcgacgggtggggcggaagcgattgggcgaagcaatgctcacggaggaaatgccgccggattggtgccatcgcatgtgaccaatcgctcaatggctccaccacctcctcctgtgcaatttgaaatgggggcaaatcgattagaaaaaatgagggcacacctacgcgaacttgctgagaaaatgccggtcaatgaatcgaagcgtctgtcaccgagtggacccgaccctcatcatcattagggccatggatggatctaa

SEQ ID NO: 86063 - DNA, 617 bp, Heterodera glycines
ttcccttttcttactaccccccctctcttcctattgtctttctcctccattctccgctaaagaccgtttcaccaaatctcccacctccccggcatttctcatattgccgtttgagtgcgcttgtggagacgaggcgacgaaagtttgacaaaagaccctcaaattgacgccgtttgttgtgttgggatggagcgaagggggcagaacatcgatacacgtggcaggccaagggaagggcctggtcagccacatggtactgctttcgtccggctcccaagtggacatgcggggagacttggcattcaaaggcatgcgaaacacggaccaatggatgcccgcggcaaaggcaccctatttggagcattattccaacgaatttctcaaggaacaatgggccggactttgcgatgttgtagcaaaagtgtacaaggacctcggaggaagttttccatgcgaccgcgttctaaacacactgaagatccccgttttgatcgtcaacggtaacatggaccggttcgtccttgacccgagcttgatgagcaagaaattggaaaatgccaggattgaaatacatgcccagggagggcacgaccttcacatcaaatacccacgttggt

SEQ ID NO: 86064 - DNA, 646 bp, Heterodera glycines
aatttggaggaattgccagagaaaagggaggacgaagcaattggcaaagagagggcacagagtgagtgggacggaagagaaggccaaactcaggcgaacagtgccgagccgagccattatagaaacccgggagagttggcacagctccgggcaaagctcctttcgccgacgaagcgaagaagggccgaagacattgaccaatcatcggagaacaaattgcgcagagcggaagaattgcgagcattgctaaagcaggaaaaagcacaaaggcttcacctcctccaccgaagggttggggaagtgaggacggagcgggagcaaatccaacagaagaaaacagcacatttggagatggtgaaggagcgcattcagaaggcggaggagaaccggcagaagagtctcgaagagattgtgcagaaggcgcaagaggacgaaatgaagatcatcgagataaacctgttgaacagcttcgaagcagcgaaccaacggttgggcaagcgattcacccaaatccgagaaaggaatcgacatgcgaaagtggtccgaaaggccgaggaggagcggcaaaagcgcattgaggagaacaagcaacagagagaggaagcggagaagcggcggaaggacgcggaagagcaacgcacaaaac

SEQ ID NO: 86065 - DNA, 713 bp, Heterodera glycines
  unsure (1)..(713): unsure at all n locations
ggaatgcatgtgcctcaggttcatgtggcaacgttaaattgctggcttttacccacccttggccaatcggaagcaaacacaaacaattccgtttgcaaaaattaatcgacgaactgaaaaattcgcgctttgacgtcattgctttgcaagaagtatggagcgaaaagatttttcttcaaatcgcccatgaactcaatggattttttccccattcacattatttccacagcggatttacgggtagcggcacgtgcgttatcagcaagcatcccatagtttcaactttactccataggtattccctgaatggctttcctcatcacgtccaccggggtgactggtttggcggcaaaattgttggaatggttgaaataatggtggagcagtatcgcgttgcattttatacgacacaccttcatgccgaatacaatcgagagaacgatctcttccttccgcaccgcatctcacagtgttttgagatgtcccaattcatccgccatacctcccgaggttctgacttcgtggtcgtggtcggcgacttcaatttggagcccaacgacctcggccatcatctcatcaaaaacatagcgcagctntacgacgcatgggaaattcgatcgaatttagttgacatttcgcaagataacggaatgacctgtgagagaccccgacatntctacacttgcaaatacgtgcttcaacaatgtccgagt

SEQ ID NO: 86066 - DNA, 402 bp, Heterodera glycines
attgttgacgcgaaactgatcagtgcgcagcgactaaaactggtcgcatttggacagccgaggacgggcaatggcgaatgggcgacagcgatggaccaaaaagtcggccccttcaattaccgcgtcgtgaacaaccgcgacttggtgccgcatatgccgcccctttggttcgaagggtaccgccaccatatgactgaagttttctataacaacgcaaagaacaaaaccgaggaatttgtcatcactcgcggatgaagccgaatcggaggaatgtgcgggaaaatattggttctacaatgttcgggaccatttgaattattttgggaaatcggtgtccgaatggggagagaagggatgtgccaactgacagaaaaggacaaaaaaaaaaaaaaaaaaaaaaaa

SEQ ID NO: 86067 - DNA, 642 bp, Heterodera glycines
gcagaagaggcttctgaaatggaggggggacacctccgacacccaacagctggctgagcagaacgcaaaaacagatgctgaagaaactgcgcaaccggggccacgaggaccacgaaatacacgaacaaatccacgaattttacgaagtgtccccggaagaagtgaaagcaactgccagaggaattctccagagaggctgcgaatccatcttcaaacgtatctttggagaatacaatgcggaggaaataatccagatgcgcgacgaaggagcatccaatgttgaaattgaggagaaaatcacagaggcacttaaccaaattcgaagtccgcagaagcgacaggaggccggccgatttgcgatgtcatgtcgccgaatattcgcaatgattgaacgtcgtcgacgatcggcggataacgccgaacattcgctggatcaactgttcaaatcgcatttgatttggctgaatgagcagcaacgggaggagctgaagcaaatgaaagggtccggaaagggacggacggaaatgcagcagagagtgatggaatggtacggacagttggaggggcaagagaagcagaaagcgcgagaacacctgcgggacggatgccgggacatattggcacaagtgttgggcaaagaaa

SEQ ID NO: 86068 - DNA, 396 bp, Heterodera glycines
gtgattgcttttcctttgctcgttttggcaaagggatctcgaaggctacactttcagttgtttggacgggtgcgaatgtgacactgatgacgaggccatcattgtacaatcgtcccgatcggcactttgtccaattgcccccgtcgcgtctccgcggtttcactgtgctcgcgctcacccgcaataacatcgatgtgctgcccagcgaagaagtactgctcgagaaactgcccgacctgaacgccgttgacgtcgaaggaaatgaacatttccactgttccacgctcgaccattatcggacattgatggtgatgagcgattgcggaaagactcctgaacaattggaggccgaccgggccaaactgccgacggacacacagccaaatgaggattgcg

SEQ ID NO: 86069 - DNA, 444 bp, Heterodera glycines
cctccctctcaaaatgagttcttcgtccattttcctttcctttgcgtctttttctttgataattttggcattgtgccgagcccaaaatgaatcagctgcccaaggcgatgcgcagcccccgccattcttaacagaggccagccaagagaaaatcaacgaattctaccaatacgtcacgagcctggggcatttaaaagaaacggaaatagcggaaaaagtgaaggaatgggtggacaaacaatcggaggaaattcagaagaaatacgtcgagtttgagcaggaaagggaacgggcgaaggccgaggatgaagcggcgcacgaagaagcggcgagaaagttcaccgaagcggcgaaaaaggcggacaaggaactgaccgaaatcgcgaacaaccccaatttgtcggccaatgataaggcggaaatgatcaacagaaaagtgcactc

SEQ ID NO: 86070 - DNA, 465 bp, Heterodera glycines
tcctctcaaatggaccgacaaaatgacttgcgacagcaacaaaacgttccagaatttatttgtcaagaaagactggacacaaattctccaattgccttcaaagaacctttgccaggggcgtggaatttgcacagcgagtatttgtcgacgaaaacaaaagaggaaaaggaacgaaaagcttcacgtttcagaactgagttggatcccgaggatgtgaagctggtcaatgaattgggccatttatcggctgacaaattgatggaatatgttcggacattgcagaatacagcgctttcattgggggaagaggaagcagcacaattttctcgggcaaaattgctgaagattttggagaagtgatttcaataatatttaatattcgtatttattttccattcctttccttcgttatctttgaacttttttatctttttctatgacgtgatttttatcgacaagaaattt

SEQ ID NO: 86071 - DNA, 598 bp, Heterodera glycines
acgacctgatcgcgagaagcgccagacacccgagctgatgaggagaaccgccaggtagacagtgctgatcgggagaagcgccaagacaaccgagctgatcgcgagaagcgccaagacaaccgagctgatgaggagaaccgccaggtagacagtgctgatcgggagaagcgccaagacaaccgagctgatcgggagaagcgccaagacaaccgggctgatcgggagaagcgccaagacaaccgggctgatcgggagaagcgccaagacaaccgggctgatcgggagaagcgccaagacaaccgagctgatcgcgagaagcgccaagacaaccgagctgatcgcgagaagcgccaagacaaccgagctgatcgcgagaagcgccaagacaaccgagctgatcgcgagaagcgccaagacaaccgagctgatcgcgagaagcgccaagacaaccgagcaataatgtattaagccattacggatgacattagattttccgacaagaaacgtctactatgaaaatgtttcaataatacaccgaaccttattatgtaaaataatcaaataaaattttaagattaaaaaaaaaacaccaaaaaaa

SEQ ID NO: 86072 - DNA, 491 bp, Heterodera glycines
caacgtatgaaacgcatttgcccaacagcaaaattgccatatcagacaaacccagaacgaattggccacagtttttggagggggccaaagtcagtggccaaaagtgcgtcattcatcaatttgagagaggtgactgctcgtttccgattggcccccggccaatacgttgttgtcccttcgactttcgaacccgacgaggagggacactttctgttgaggcttttctgcagcggacagttaaaagcgaacgaactcaactgaccaaagtgccaacgcatttgaagggaagaaaaaacaatggcacaaaagggggaaactgatcagaggacggacaataaatcattcattccctttttcaatggcacatttacgttttcccatttcccactgactgagcttctacccaaatgctttatttggccaacttcacttttgtcagtcgtgtcttttgtctattttaattaatttatttatataaatatcgttttcat

SEQ ID NO: 86073 - DNA, 595 bp, Heterodera glycines
tttgaaaattggcgctagttttctctgctcaaacaatcgcgcccacccgaatttaacacattgcgttttgacttcaaaccagcttcaatttcctccgaggcctcggaagcgtacgtcgttcagtcgcagaatcaaaatgagaacaatttccaggtcgttgtgtttggagaggcgcagaaaaagaccattttcaaaggggcgaagaaggaaatcaaaggggacaaggagtgtttgttggtgtacaacagaaagagcaaggagttgtgcttggagagagtgtcggccaacataaatgtgaagaagacgagggacaccgatttggaccaaaaggcaatcagcgaaatcgaacggctgcaaaagcgtaggaggccaaagcaatctccgccatcgccaaaggctcccgtcgaaaatgccacggcagtcgaaccgccggcggagcagcgcaaagagcgcacattttccacttcttcggcaggggacgaaattgacgaggacgacgaagagaatgtgtcggcattggaacagctaatggcgtcaacgaaagtcgaacgatcggaggcggaggaggacatctttcacccagcacaacaacggc

SEQ ID NO: 86074 - DNA, 511 bp, Heterodera glycines
gagggccaaattgtggatgaattgggtgcacagaatgcggcggaattggaccgagtgcagaccgaggcaaacagcgcgcaaatgcggttgacagaaatgctgaaaaaggcggcggaaactcatcggaaattggaggatgagcgcaatcaactgtttgaaaagcacaaattgttggaggacaatttggaggcgtacaagcgacgctttgtggcccaactgcagcgagcgatggacacgcgctgttcacagatgggcaaagggttgcgcaacgcatttgcggacattgtcggacagatggatactgacaccgtcgtcgtcggccgctggcactagtgcaaaacaacaaaatatgaaattccccgcattccgtctgtaaaatgatgtgtctttacgctttctcctgctgattgttttttttttgctgatcatggaccactgccattcttttttttaattaatgaatgttttattcgaattaattggtaaaagcgcagcacacataaaaatgtct

SEQ ID NO: 86075 - DNA, 443 bp, Heterodera glycines
aagtgctgcggtgaatattttccgggagggaatatttgcccgcgatacaataaaaataaatacatatgcttatgcattttacaagacaaaattgtgtacttcctcaagtacattatattgcatatccatttgcatacttataagaaaaaaaaatgtatcattgaaaaacaaaaaaatttgcgtgccaatgccggtccgatgggaatcccagagccgggattccattcccgacaagggctacatatgctatcgccttcatgagagcttctcgccctaaagcctaaaagccggcacagacctacaaaaaacctgacaattgccgggcttttcatgcaaaattgtaaatccaatcctaatattttttgtaataacatgttttctcgaaaaatatcgattccatgaattgtcggaatttcgatttccgaaaaatttttttgggcgtc

SEQ ID NO: 86076 - DNA, 280 bp, Heterodera glycines
gcccaaagaaagcgtgcccaattgcactggggtatcatcggcttggggaaatcgccaatgattttgagcttgctatggcttattgtgaacacccgaacaaagtgaccgtcgtggccactttcaatttcgtggaaagggcgcagaaattcatccaataggttggcctgaacagcgaacaggtcaaggcttatggcaactacgagcagttgctgcaggacgccgacgtggacatcgtatacatggccacgattaacagcacccatttgccccttataattta

SEQ ID NO: 86077 - DNA, 424 bp, Heterodera glycines
ccatgagtgttttttcctctccgatggttcgccacaacttttcgcgttctctttgacgaacccgtcgaaatctcttcgaacaccacttacgtcgcctccgccaaactcactgggaatgagtcccactacggcaccaaagggctgcgaaagatcaaattggaacggaacggacggccggacataaattggcacttccaatacgcgcccgggaacaacaacggaacttctgtggaggacggacaaatcccggaaataatattctgcgcaaaacatccgtactaagtgaaaagacggcaaaatgggcggaaaactgacggaagattcacgaatataagtgttgtacatatctaactcggaaatcccaagtgtcgattgaagacaattcatttcccactgtcataataaaataaaaaatggcgaacaa

SEQ ID NO: 86078 - DNA, 231 bp, Heterodera glycines
caagctgaacatccatgttggcaaccagtctttggtggaccaattactagtgggacatgagcaacccgaacaacagtcctgaacagtttgcacagaagctatgtgcagagttgggcttgggcggcgaattcgtcggtgccattgcctactcaataagaggtcaactgtcgtgacgaccagcgtacctacgcgttcagcgagtccccgctggacaccgtggcgtgccctttt

SEQ ID NO: 86079 - DNA, 436 bp, Heterodera glycines
aattccgagcatttgcggctatcagacccaaaatactcaaacatttgcacaataaaatcgtgctcttttgctggcgatcagtatttggtcacaggaagtgacgattggaatatttacgtgtggaaagtgccgagcaattgggacgatttcgccaatggcactgtcaatgttcactccgtcttggatggccatcgctctattgtgaaccatgtgaagtacggaccacgcagcaatttgcttttgccttgcggtgtcgagaaaatcattaaatgttggagtgggctgcctttgcgtgactcgtaccaaaatccgaaaaaacgcgagcgcatttcgacgattcttcccgactttctcggtgatcccgaccacgggtcgatggattcggacacggaggaagacctcgacacattgcaacgattcgacttttattatgaga

SEQ ID NO: 86080 - DNA, 442 bp, Heterodera glycines
agttggtggcccgtcctgaacaatgtgacgtcatggtaatgcccagtttgtacagcagcattgtggacaatttggcggccgggttggtcggaggtgccggcgtggacaaccgtgagtccgagggctccgactacgtgatctttcaccctgtcgcacgggacacacttcaaagacgtgtttggaaaacaaattgccaacccaaccgcagtgatcctgtgctgcgccaacatgctcaaccatctccatttgaacagttaccgatcggcactgcgacactctgtggaaaaagcgctcaaagagggaaaactgcgcacccgtgacttgggaggctttgccaacaccagcgattgtgcacagtgaggtcattgccaatttccaaatgtgaaacgaatgattgttgcgcgacagaaatgtgaatgatggcacaacatgccgaaaaaca

SEQ ID NO: 86081 - DNA, 341 bp, Heterodera glycines
tgactaatgcaaggccatagtcagggaactgatgggacggctaagtgaggagagaagcgaacaagtggagaatcggatgggtttctgcgaacacgctttattaccgggaaagatggtacggggaaaggcgacggtatgatgcaggaacagcatggagacgaacaccaccaccaccattataaccacaccaaaagacgggctcacaggcaacgcagagaccaccaccaccaccaccatggtgaacatggacttgaggattatgtcaaaacgcatttggcatggttaacggatgagcaaaaagcggaaataagcacgatgaaggagtcagggaaaagccgaca

SEQ ID NO: 86082 - DNA, 570 bp, Heterodera glycines
tgaaacaggcttgaccggaaggacgagaagcaattttggatgtatatgaagctgaaaaacaacacgccaatcttacaagtgaacatcaataaaatggtcactgggttgacagtcggattccgtacaacaaaggaaactgtgcatgccttcgttttagaggcgccaaatggcgaaaaagcaattgatttcaccaaatattatgcctttgatttgactgagcagcaaatttttgtgttccccacattttctgctttacaagatgaattggagcgccgaaaaaaatatgccaacgcctgaacaaattttagcaacattacgccaggcattggccgatttggactcaagactgagcgaaaaattgaaaacggaaacagttaaattgttgaaaggaattgactcggtgctgcacgctaaggctgatcaacatgtacagaaaaatgaaaaagttttgtcatttgtggagcatgcacggaatgccatgttggacagggctaaactgatgaccagccaagttggcaagcaggtcaaggacggactgatgctggcatttggccgtgttgtgttcacatt

SEQ ID NO: 86083 - DNA, 514 bp, Heterodera glycines
aatcccggcttcttcttcttgttcgtcatcatcgatgtgctgctgcaatgcgttggccaaaatgcatgaaagttttgtggccaaatttcgtgtcatccgaccgcaggccaatctgatcactttggacggggacaacaacaacgacatcattctccatgaagaagcagacgaagatgaagcaatagctcagccctgtacttcttccgccggacaacagccgaggccgattggtggtggtactgctgacgaactgcaacaggaggcggaggacaacgaaagtgttttgctgaacggcgccgaatcgccgacccccggcgccggcactttgggctacgaaattttggcggaggactccaaaacgccggccccattctatgaaatgatgagcgaaagtgagctgaatgccgaacttgccaaatatggccatggtccgatgggaaaacgtgcggctatccgacttttgaaccgaatttatgaggcaacacacccagtgatttcaagcgacacgccaatc

SEQ ID NO: 86084 - DNA, 666 bp, Heterodera glycines
cctacgttggtatgggtgcacagctcgctgagacgctggtcgaaaatgtggacatccccgagagcgccgttgggctcgtgattggacgaggtggtgagcaaattcagctcatacaacagcagagcagctgtcgtgtacaaatgtccagcgaaagcaatgtcagtggatttcgtcagtgcactttacaaggcgcacgacataacatcgataaggcgaaacaacttattcaagaagtactcgaacgcagcaatagaagtgcccctgggccacaaaatggagccaatgcaataacaattgaactgagcattccaggaccaaaatgtggacttatcattgggaagaatggcgaaactatcaagggtttacaggaacaaattggtgtcaaaatgatgttagtgcaagaaagtcatcaaccgaccatgggaacgaagcccttacgagtttctggacctcctgacaaagtcgaaaatgccaaacgcatcattgagcaactgctcgctggcgatggtactcaaccaaatctttctcaaacgcttcgaggaacaaacgttggaggcggtggtggaaatgcctcacgttcaatcggtgaagtgatcgtcccaagaacttcagtcggaataattatcggaaaaggaggagaaacaatcaaacgtttggctgctgaga

SEQ ID NO: 86085 - DNA, 360 bp, Heterodera glycines
tgcgagtgttttggtggcggacgacttggcggcaccgaatgcctattttcaactgatgacagccgaagaggcgtaccaatatcaataatgaaggcaaatcggaaaaagggtcaccgatttgatttgtgtcttcgccatgccttttatgtatttgcttttgagtatttgttgatcatttttgcctttatttgcattttcatgtctctctttctttgcttcgctctgaatgcgttctcaccaatctctctcacaatcttacattttatatggtctcagccctaaattgttttttgttttcaaagtttacgcacaaaaggtttgtattctgaacttatatgataaataacaccgagctgctca

SEQ ID NO: 86086 - DNA, 458 bp, Heterodera glycines
cggttctgtccccgttgctcctcttcatctttcttctgttcactgttgcctttgccagccaaatgtcttttcgcctaatgatttcgcttgcgcgaagaaaaatgccatttttcacgatggactgttcactcttactgaagacaatcgactccgcattgacccgtcgaagcaaaaaacgaatgacactgggacacaactcgacgctcttctcttgaatcccatcaaagaaagactggtcttttcgctcattttcatcaagggaggcgaaaactgcaagcagtttttcatgaaacatgccgaaaggccgagttgttgtctgtttagcgatgaaatggaattgcataagcatccgtacgcaaaaggcgagtgtcaagctcaaaactgtacttatgtcgacatgacgtgcagtgttcttccgatggacccggttgagggccttaaggattcttaccatttca

SEQ ID NO: 86087 - DNA, 519 bp, Heterodera glycines
tcgctcttccgaaagcctctgacacattaccaaatcactcaaaatgccctcctaaaaatcgcttcttttacgaatttctgctcgcaaatgaccggcaagtggcgcgagaagtcaaagacgaatatgtggacaccaccagcaaaatgttcttttcttatttcaaggcgtacgtttcccggctgtttaaatttcaaatggtcgactctgcgacaaagtccgatttgctcggggccgaggacgtggtcaaacatcccacgacaatctccgcattgccgagtcttttcacttccggcaaaacccaccaaacgcgaagtcgagcgacggttttttcattgggtcatcgccaaaatttgctgctcgatgatttgttggctccgctcattgtgccccacgtggcgcaggaaaataacgaaacgttccaattcgaaagtctttttcggagtgttcagtacgctttggtcgaccattgcagtcatgagtttctgttcatttgtgattttttcatggtcaatggtcagt

SEQ ID NO: 86088 - DNA, 306 bp, Heterodera glycines
cataattttttaaataacttcctctcaaatggaccgagcaaatgacttgcgacagcaacaaaacgttccagaatttatttgtcaagaaagactggacacatattctccaattgccttcaaagaacctttgccaggggcgtggaatttgcacagcgagtatttgtcgacgaaaacaaaagaggaaaaggaacgaaaagcttcacgtttcaaaactgagttggatcccgaggatgtgaagctggtcaatgaattgggcatttatcggctgacaaattgatggaatatgttcggacattgcacaataca

SEQ ID NO: 86089 - DNA, 507 bp, Heterodera glycines
ttttaaaataaacaaatgtacaaatttttatttttccttcatttttgtatcttaattaaggcaatttcggggctccattgttggaattcgaacatgattttgctgagtgaaatgccggaaaagggcagtgtcactgtacgccaatgtccgtccgggcatcaatgcgtgacggcaaattgttggcttggagtcggcaattacattgtccaaaaatgcgtgccggaccagccaggggccagaaactattgcaaagacttcaacaacatttgccaaatgggctttttcggcatgccaattcattgctcatcttgtaagggtgatctgtgcaacgaagcgcgtaattaacaaatgatgagcaaattagtcaaattaataaactaattaattaattaaactggaataaagaaccgattttcaaattttatgtttgataaattattttatggctattgttgtattcaaattcaattcaattagaataaaaaaattgcccgcaaaaaaaaaaaa

SEQ ID NO: 86090 - DNA, 559 bp, Heterodera glycines
atgtggcggcgcactttccccttgctgatcaactaattagttactaattgggctaactctgattaacaaattgtctactgttctactttcgccagcaatggctcccaaatgccttccgctcgaacttttgttcgaaattgtgccttttgtccatgccgaagaagccgttccgaacgtgctcttgtcctgtcggctgcttcataaccttttgcttccatgcgttgtcaaatggaaaaagagaatggcggaagggaaaaaagaagaggacttgacaaaacaatttgctgcaatgtccaaacatttcgaggacaaaatgaaagcgatgtttaaagaatttgaggcaaaaattgatgcgaaaattgaagcattgacaaaacgaatggaagcggttgaggaagaattgaaaaaatccaccgaagaaacgaaaaaatcgaccaaacgtattgaagcggctgaggaagaattgaaaaaatcgaccgaagaaacgaaaaaatcgaccaaacgtattgaagcggctgaggaagaattgaaaaaatcgaccgaagaaatgaaaaaatcg

SEQ ID NO: 86091 - DNA, 560 bp, Heterodera glycines
  unsure (1)..(560): unsure at all n locations
cacgctgctccttntactaaattgccattttcattttctgttttcctttttgctttcctctaataatgctgctgttttggcctcttactgacgacgaagacgtggaggacaaggaggacgactgggaattctgttgtggcaccattcactcgttcatcggcacttccctcttcatggtcggcgaccttctcggacttccgtctctgctcgctgcttacgttatcgtgctccattatttggagggcgactttacttacgtccatttttgggtgcccattgtcgtcctcactttgggcataatctcttccttctttggcgcggcttccatcgtccgattgtacctttgtctgtttcgtcatcgctgttcgcccttacacgaccgaattgtcaccgattcaatgtccatttatttgtacagactctccctcctctctctgttctctgtttcgtatgtttcgttcattttttggcaacttttcggtgggccacgcagccccgaggacatttgcgactgggagcgcctgtggggcttcttccactgtctttgggtttgggtccgt

SEQ ID NO: 86092 - DNA, 561 bp, Heterodera glycines
caatgctcatgatttttgttaacaaattccgattttttattggaatatagcgacgagaaagcgctttcagcagtggaaaatggatttttaatgcgatgttccgatttggacgagcattggtttgattgtcagagtgtcaccgaatcggtcaatgccactgacatcaatcaaatggaactgctttgtccttatttcggcatttcgaagggtccacttctttttgccaatataagctgccgagttttgccatgcattgaatgctatgggacaagaaactttgcgaaagaatttccctgtaaaaagtatactggtcattactttctctcggcacttctttattccattttccttggaccttttgcggttgatcgcttctatttgggttattcggcgattgcgttgggcaaattgatgacattgggagggttgggtgtttggtggttagttgatattttcttgccgctttttggtcatttgaagcccgctgacgagtctgagtggcagccattttgataatgaaattcaagtgttcaaaaagatgttttggtttgatctcagatt

SEQ ID NO: 86093 - DNA, 487 bp, Heterodera glycines
tgaaggaattgaacctggaatatgacaattgagccttcgacgctcacttcgcttggtgtcagttgtccgggcagagtttgctgtgcctccgattcagtgattgttggcacaatgggagacgatcggatggagaacaatggcaattttctgctgttggaccgtctcactttcgaaccaatcggattttgggcagagaaagaagggcaaaaaggcacaaaatttggcggaacagatttctgcattcaaaccaaacaaaatgttttgctgagcgtcgggtggggaacgccggccaaattccgcggcggacttcggccgagagacgtgacaaacggtcattacagcaacgaagtgaatgtttgggagtggcgccaacgccgactgatccaaaccatcgctttggagggcgactgcggatggatgccaatggccgtgcgctttttgcacaacgccgacaaatgccatgcttttgtgtgcactcttctcggct

SEQ ID NO: 86094 - DNA, 449 bp, Heterodera glycines
cgcgccgaacgccatgagcagggggcttcggcacaaagccatggttcagcaacggctccgcgagagtgcgaagaaggcaaaggataaggaagttgaagaccatgaacttcggatgacactttttgtcaatggaacaggcggcgcgggcgagcttttcctctcgggaggaacgcgaagtgccaatggtcccagccccacggataattacatcgcaaaagcaaacggccgaaccgaccgaagaagacgaagtgaaagcaaagcttagggaacagaaaagaaagctcgccgcattgaaaaaacgttcaaagcaatcgcaattttggtcaccggacgaaggggaaatgggggaaggcgacttgccacttgaagaggaattggccgattgggtgcaggcggagacatcggacggacaattttactattggcacatttatacgggggaaactcct

SEQ ID NO: 86095 - DNA, 384 bp, Heterodera glycines
gtatggttgttggtaaccaagatggaaatgaagaggaccgaattgctgaggatacagcgttggggtggccgggattctatcgacgcttgagacaattctcggcctattggaggagcacccggacattgtgaagcgagtggagcccgttgtgcgaagttgcatcacaacaatattcgatgcttattgcgaaacttattttgaggaggcgctttctctcacccattccctcgttttggtgcacatttcgcctgagatgtggacggtttttgaccatatttacaaggcttttctggaggaaggcacttcatttttctcagattgtgcaccagtgctccacgctttttttgaccaatgacactgacaattttctgtctgtttttgacc

SEQ ID NO: 86096 - DNA, 319 bp, Heterodera glycines
ttgaacaattctttaacaatactgctcaactggccggatggggaaagattactaaatgtgttgcgaaagaaaaagctatctctgctccttatttgattggtcgggctgtccaattgtctgaatgccgtaaattgtatcgaggtgaccgaatttgctttcgtgggatcgcatctcaatcaggcgatactggcagcgcagtattggccagcaatgggacagactatgtccaaattgccgtttcttcttatgtagaatgtatatcgtcagctcctgaagcctcctacgccatttactctcgaatcgacgctaaatggcttga

SEQ ID NO: 86097 - DNA, 553 bp, Heterodera glycines
attgaaggggagcattacgcaaaatctgcccaaaatgaaatccaatttgtgatcgtccgcttgcttttcactttggttatgtttttcggttttgctattcaaatgtacgtcgtggtggaaatgctgtggcccgaatttgtcaaatttctgcgcaatttatgtccaaattttggggtttataatgaaaatgatcacaaaaatatggtcggcattgaattgctcttccgtgccgcgctcgtcaccgtctccatgctaattggcctcgctgtgcctgaattggagaatatcattccgttggttggactccaccgctggaatgcttttggcactgattttccccgctcttctcgaccttctcgtttttctgcccattcatttacaacgccacagaattcgtcaaactttttggcttctccttgacaattggacacttgtcgccattggagtctttggtttaattgccggactgagggcgaatttgcggaacatttttacaccggcagaagatattgttgcataataaaacggaattaaatatttttaaaataactag

SEQ ID NO: 86098 - DNA, 306 bp, Heterodera glycines
aaggaggaagcgaagctgctgcgcacgcagctgggcgacatgcgcggaaagttggccgatttggagggacgcaactctctgctggagagacaggccgaggaattggcctaccaagtggaggacgaccaaagggcgtacgaatcggcactgaacgacaaggacgcacagattcggaagctgcgcgacgaagcgcaggcactgatgttggagctgcaaatgttgctggacaccaagcagacattggacgccgaaattgccatttaccgaaaaatgctggagggggaggaggacagatcggggctttat

SEQ ID NO: 86099 - DNA, 444 bp, Heterodera glycines
ttccagcggttctggatgtggacatatgttgatcgactcctgaagaaaaagaagcaatacgacactgaatgtcgaattgattatgaagagtattttaccaaagaagaacgagaacttctaagccctattcccgcattccaaagtatcatggacgttcgctacaatagcgagctccttgaatccaacattcgcgtgtccctcctccactttgggggactacccgccgactgcagatggccaaatggaaaaagtccaccaaaaagggatgaaatcaaaaaagttaaaattttaaaaacaataagtgcaagcacaagaagaacaattatctgttccatagcataaaataaaatttcttttaaaccaaaaaaaaaaaaaaaaaaaaaaaaaaaaaaaaaaaaaaaaaaaaaaaaaaggaaaaaaaaaaaaaaaaaaaaaaaaaggtcc

SEQ ID NO: 86100 - DNA, 386 bp, Heterodera glycines
gcgctaacggaggtgccgaactacggtggacgaccgtgcctggatgatgtcgttggtgccctcgttgaccgtgctggccgctgctcatttgctgtacccgcgcatttatccactgaccgcactcggcacaccccaacaacagcagcagcaacagttggcggacgatggccacaatcagcagacagcggcaaacggcgggggaatgccaagcggcgcgaggaccagcacgttgtactccttgcttgaggacgaactcgccgccatgggcatcgccgaccgcggtggcacggacgcgcaacaacagttggtggtggaagtgccggcacaagtccgcgcctcctttgagtacttccaaccgcaagaggcctatctgatcgagaatgggc

SEQ ID NO: 86101 - DNA, 563 bp, Heterodera glycines
acgactcgtttcgatttcctttttttcttcttccttcctatggcctctgccccgtcctccgatcgcttttcctccgatcgcttttcctccgatcactttttctccgatcggtcccttcgcccgcaatgtctgcccaattgcgcttctctctcttttggctttgtagtggacaaattggcccagcattgtcactgctttagccatttgttcgaatgcggccaacgcattttcgaagtcagtgccaccgaattgagtcccaccaacggattcacttcacgagtgtttcgctgtgaattcgaatttggcgcatttgtcggagaaaagcgaatgccaacgccaaagaagcggacaatgagtgcaattgcaaaagtgatttcactggagagaatggacactttgtgggagaatttcgttggcaaaaagcaaatggaaaagatgcgaaatagcagagagcagacagaaatgataaaaagcactcttttgcaattacaccgcaacgaatgcaatttgtacaaatttatcggctcttccgcgccccttccgcttccgaaggttttttacac

SEQ ID NO: 86102 - DNA, 528 bp, Heterodera glycines
ttgcgcatggcctgcgggcaagaaagcgcgaattccctgccaaaattttccgacccacgccaattgtgccgacatcgaaataccgacacagtgtggcggacggaatgctgacaagagatttgagggacagtcaagtgtggaaaacggtggtgacggtggacggaattagtggcggacaagcggaacggcgggggcagcggagcaccgcgaaagacgaaaagcggcacggggacacagaggcggttgcactgcgccgccacttttacgccgaaaagccaacaaacgaacaatggcagcagaacggacgagtggcattggacgaggacgggcacaacgccaaccaacaaaagttggaccgagcgccgaatggtggacaaattcgacaattggtgtttagcgtgggacgaactcagttttcaatgggcggtgggcaaagtgccggcccattggtgcagtgccatgcccggggcgaaagtcacgacagtttgggcagcaacagcacggccaacatgcaccgctgcatttcgc

SEQ ID NO: 86103 - DNA, 471 bp, Heterodera glycines
aagtgcccgggactatgcaactgctgttcacaagcagcacagctccattcaacccaaatgcagcagcaacaatatccatcaacagcagcaagcgaccattgctcagcctcagcaagctgtttccgccggaatgggcgcagtttcttcttctggcggacctgcgattaatccgcaaactggacaaccggactacagtgcccagtgggccgaatactaccgcaccatgggaatgcatgaacaggccgcactcatcgaagctcagatgaagcaaacccacgccgccgctcaggcacaacgtcctcagcaacaactttacatgcaatgaaggcttgcagaactcgtcgaagaaagacaataatgtggctgaatttctggttatttggattgctttttctaatattatcagtttccgttcgatttcttttatatttaatcatcattacgaaccgttctttgactgatttatttgtc

SEQ ID NO: 86104 - DNA, 286 bp, Heterodera glycines
catcattatggactgtatgaaatgaaaaatgaattctctgtttatattgtgtcaaacataaatctttatgaactacagtacatgtaaataagcattcagttaggctactgaaagtacatatacttcagttaatttatttctcattttacaggggcattttggactccatctatgttttaggatggacttctcataactgatgtaatatctggttcctttgacctatttggtctttagtggatattaatataaatttgatttgatttcaaaaaaaaaaaaaaaaaac

SEQ ID NO: 86105 - DNA, 588 bp, Heterodera glycines
atcttcttgtgagacttctccttatgacacaacattattggcattttcatcatctcttcttgttttttggcatttccttatggcacaacattcttagcattttcgtcgacttttcgtttcttgtggcatttccctatggcacaacattcttggcattttcactcatctcttcttgttttttggcatttccttatggcacaacattcttagcattttcgtcgacttttcgtttcttgtggcatttccctatggcacaacattcttggcattttcatcatctcttcttgtttcttgtggcatttccctatggcacaacactattggcattttcatcatctcttcttgtttattggcatttccttatggcacaacatttcttatcttttcctcgtcttttcttatttcttgtggcatttccctatggcacaacactattggcattttcatcatctcttcttgtttattggcatttccttatggcacaacatttcttaccctatggcacaacattcttggcattttcatcatctcttcttgtttcttgtggcatttccctatggcacaacactattggcattttcatcatct

SEQ ID NO: 86106 - DNA, 569 bp, Heterodera glycines
acatgtgtctcttttccctacattttgccttgcgttctgtcccttttttctcctatggctctccccacaaattgctgcgtgtcatttgtgccagcatcgacccacgccaactctcccgactgatgagtgaaattgtgcgcgagaacattgtgctcttttcccctgatgaaatccttgttctcttgcacgactcactcaaatgggaatccatggagcagttcatgctttggcagttgatccaagtcgaagcagtcgagctcgacaaatttctcgatctcttgcaaaggttgaattatgcacaacaccccgaggcaactgcagcgattctcgtcattatacggaatatggaacccgacccggacccggctgttatgcgttccctgttgaggaacttgtttcttagacagccggacagggatttgttcacagttgatgctcttaaattgatcgttgattacagtgacaatattccaccaatgagcgattgcatcagcaaaatggtcaaacacgccattcacaatgacgaaattattgcgccatttggacaaacgaaattgggcaaggcacgt

SEQ ID NO: 86107 - DNA, 598 bp, Heterodera glycines
gtaataaaatattaaaagatccgaaaaaatgccaaacattttcaaaatccttctgattgtgcttttggccgtcgtctcattccgtctctcggcttctactggtgacaaaaaagctgctaatgatgggagtggaaacaactcatcagctgggattggtacgaagatcaaaagaattgtcaccgctggactgctcttcacttccctggcgacgggtggggcggaagcgattgggcgaagcaatgctcagggaggaaatgccgccggattggtgccatcgcatgtgaccaatcgctcaatggctccaccacctcctcctgtgcaatttgaaatgggggcaaatcgattagaaaaaatgagggcacacctacgcgaacttgctgagaaaatgccggtcaatgaatcgaagcgtctgtcaccgagtggacccgaccctcattatcattagggccatggatggatctaacggaggaagaaagaatggatgcttagttttcagattttattctatcctcttttatttattagtttttcaaaacaaatttcttccacaactttttaaactatttgctgttttgaatctttttagataaatctaaac

SEQ ID NO: 86108 - DNA, 544 bp, Heterodera glycines
ctctctgatttttttttttgtcgtcttgcaattttggtggtacaatgtcaaagggcaacaaaaatgtgaaggccgtggccgttttgggattggatgacacggacacggatgccacgatcgacttggaataccacgaccgacttgtggaggcatcgaaggacttcaaaagcgaatacctcactaagaattgctccgtctccgtttcaaattggtcgccactggcgtgctgaagctggggcgttcgttggacggtctgcaaatcccgcctccaatactcgaaaaaattggcgaactgtttgactgtttggactgggctttgtctgccgacgacgaatgaaacaaattgagggatcaaaggccaagccgaaactttggacggatctttcacccacccgtgtcctcccaaaaaaagccattttttaccccgtaatcgaatttttgtattatttttttgaccgaatgatatcacgcgacattcatttatttttgcccaatttatcatccttccaaatccatttttatcatcttttctctctcattcaat

SEQ ID NO: 86109 - DNA, 582 bp, Heterodera glycines
ggtgtcggacggccgttcccgcgggttatgcgtttccccgggtggcagccgtttttggccattctgagagaggctcttctgatgggtggggtcgaaatcaaagaagtcgccgctaattgcctctcgcaactcatccctctgagcagtgaggcgggacttagaccccacgttgtgaacatggccggtccattaatcagaattttgggtgaacggcacccggtccccgtgaaggtcgctgctgtcaacgcgttgctgagattgctggagaatgtctctctcctcctcaaagcgtttctcccccaaatgcaaagtgtcctcctcaaaattctacaagacccgtcttctcaaaatcttcggcagttggcttcccaagcagttgtccatctgatcgatttgcacccgaaacctgaaacgattttgaaagagttaaacaaattgcgtgaggctgataagtcgccagaaggattggatttgcataccgacaaactgatcaacgaactgatcgccaaaatcgacctgaaaaatggaaacacttcaaaataacagtgaatgaaaatggtctgcctatgacgcgaattattg

SEQ ID NO: 86110 - DNA, 383 bp, Heterodera glycines
tcattttaaaatgcgacacttttatagcattttatttgctcttgcacttttatgctcggcattcgtttttctgagcgcggaagaggacgcggccgaaggggaggagaaaccgaaggcggaggaacggacacagcgggaggtcgatcccgaggctgctgatctgattggcccttcttccgatgtgcaaagttcctttttgttcaccaatttgaagtcgggcgcctcgacgacggatttgatcgcaggagaaatcgtcaagtttctggtcgggttcgccaacaaaggcgagaaggacttcattgtcaagcactgcgaaacgtccttccgctatcccctcgacttttcctaccatattcaaaatttctccgccgtacgttatgaac

SEQ ID NO: 86111 - DNA, 465 bp, Heterodera glycines
attttttttgccgccatttaataatctcccatttttattttttatggccctctctgcccttctgcttcttctccccctgcttctcaatgttcaaaatatcccagatgagtcagtccaatcggatatgaaggctgtttattcggctatttcatcgccggaacaatggaagaactcacaaaattcattggcttcactcgaatcacaactgacagagccccaaagagcactggcaaaaatgcattgggaattggagaccatccaaaaggaaaagccggaggcaccgccacaattcgacttgggacttttctcggaagctttggaagtgatggtcgaaatggacgaagaagcgaaagaagtgaagctgaggaaggacaaactgattgaatgggcaggaggagaggaagcaaaaaaaaattgaaggaaaagatgacggaggaggacacagtgccggaagtgagggtgaac

SEQ ID NO: 86112 - DNA, 645 bp, Heterodera glycines
tggacttacgtgaaaaagctgttcatgcccggtgtttctgctggttcgtgtctttgccgccgcttttcctttgttggccgtcattccctttatgctcggcctttacttccaaatgctcgtcatttctcctcttcgcgtggccattttccaatcgccgcttttcttcccctggaaagaatgggccatgggtgttgtccacttcaaaattgtttgtgcttccgttttgatgggccccgactggtggctgaagacggcttttgaacagatttacgccgatggcatttggaacatccgtttgcgagacctttacacgaacctggtgttcccaattgtgaatacactcacttttctgatcgcgtttccttacgttctcagcaattttctcctcttttttgtcgatgcttcacgcgaggaacaaatcattgtgatacgatttgcttatccgtttctgctcggctccatttgtttctgtgctttaatcacatggcaatggcaaaagctcaaacttttggcccagaaaattcgtaacgacaagtatttaatcggcacacaattggtcaacttttatcgtgaaaacacttccgccattgtgggcaattcgacagtcaaaaaatcagtgacaccaatggaatcgattgtaaatca

SEQ ID NO: 86113 - DNA, 483 bp, Heterodera glycines
attgatgaccgaacggaccacgaaatgctgacatttgagaaagaatacgatcatgaaaatatggaggacgatgaaaatatggaagacgaagatgcaagtgacgattggctgttgaagcgatgccaaattggagaaacggcgacgattcaatgggtgtgggacccgagcgattggcaaaatgtcagccttacgctcgatagtgtcaggaagaattgcattgggcaattgtctccacccaaggcggaccaaatgaatgcaaaaatcgtctgaaaatgagcgccgggcccagcggaagaaaaagtgaaagaattattgagaaatgacaaatgagtgatcattatgaatggaagttgatctgctaattgcatttgttgcttctttcgtttgaatacatttatttggtttgaaaaaaaaaaaacccaaaaaaaaaaaaaaaaaaaaaaaaacaaacaaaaaaaaaaaaaaaaaaaaaaaaaaaaaaaa

SEQ ID NO: 86114 - DNA, 633 bp, Heterodera glycines
ttcgtgaaaaagctgcccatgcccggtgtttctgctggttcgtgtctttgccgccgcttttcctttgttggccgtcattccctttatgctcggcctttacttccaaatgctcgtcatttctcctcttcgcgtggccattttccaatcgccgcttttcttcccctggaaagaatgggccatgggtgttgtccacttcaaaattgtttgtgcttccgttttgatgggccccgactggtggctgaagacggcttttgaacagatttacgccgatggcatttggaacatccgtttgcgagacctttacacgaacctggtgttcccaattgtgaatacactcacttttctgatcgcgtttccttacgttctcagcaattttctcctcttttttgtcgatgcttcacgcgaggaacaaatcattgtgatacgatttgcttatccgtttctgctcggctccatttgtttctgtgctttaatcacatggcaatggcaaaagctcaaacttttggcccagaaaattcgtaacgacaagtatttaatcggcacacaattggtcaacttttatcgtgaaaacacttccgccattgtgggcaattcgacagtcaaaaaatcagtgacaccaatggaatcgattgt

SEQ ID NO: 86115 - DNA, 688 bp, Heterodera glycines
aggaagcaaattatgaatttgcgaatattacttttctttgctgtatttattccttcagcgaggtctttctatttgccaggtttagcgcctgtgaacttttgtgagggaaaggataaaaagcccacttgcccgaataaagtgactttgttcgtaaacaagcttgacagtgatcaatccgtcatcccatatgaataccacagcttcgacttttgtattggtagtgagcaagagtcgcctgtcgaaaacttgggtcaggttttgttcggtgaacggattaggccaagtccctatgagataaatttcaaagaaaacaaacagtgttcgtacctttgtgagaaggattacaaaagttcggacaaatcacaccaagaaaaattgcggttgcttcagcgtggaatgaagctcaactaccaacaccattggatcattgacaacatgcctgtcactttctgcttcataaatcaacaaaatatgaatgtatgcaccactggcttcccaatgggttgttatgtgacaaaggaggggaagcccaaagatgcctgcgttttggatggacgttaccgacagcaggacagtttttacctgttcaaccacgtagatattaagattgagtacagagacatgtctgatgatccaaatttcctcgatgagaaaattggtggccgtataattcggatcaaagtgcagc

SEQ ID NO: 86116 - DNA, 706 bp, Heterodera glycines
gtactccagaaagctagcgaccctggagagtgctcgccattgccgaattttcagctcaggacttgccgcaattgcagcagtgtcccatttgcttaattccggacagcatgtcatcgtgtcgggggattgtaacggcggcacgaaaaattatttcgacaaaatttgtgtgccgcatcatggcttggagctgatttttgtggatttgacgcgattggaaaacttggagaatgaatttaagcccaacacaaaaatggttttgtttgaaacaccctcaaatccgcttctaaaaatcgtcgacattgaagcggtgtgccgtatggttcgagcacgctcaaaagattgtgtcgtcgttgttgataatacgttcatgacaccgtactttcaacgcccgttggaacttggcgccgatgttacggtgcaatcgctcaccaaatacatcaacggacacaccgatgtgctgatgggcaccgtagttaccaacaaggagcagcttgatcagcacatatacgcccagcaaatttatgctggcgccgttccgtccgcctttgatgcctttttggtgcttcgtggcatcaaaacgctcccattgcgaatgcgccagcacatggaaaatgcgctggcaattggacgatggcttgagaaggacccgcgtgtggaaaatgtgctttatcccgagctcgagtcgcatccgcaacaccaaatccac

SEQ ID NO: 86117 - DNA, 798 bp, Heterodera glycines
accgtttgagtgagctattggtgctgattgtgagccgacatttttgcgcttggttttttgcgggcgatcacttgccgatggaatgcaaatatcaactctcgaacttggcccaaccacttctctcactctgctgatggatactgcacccaatttggatttatcttcttctattggccatccgtcgattgattggccagttggggcgtgttccactggaaatgactctgccgatgaagagcaatgggtgaaactctcttccgaccaatttgcggagaatgcagtgaatttttctgatgaaagtgcgttcagtgcctttttcgtcttttgcaaaagttgcgtttcgctcgaatgtgccaaattgcgtgcgtattgtcgcacgtgcgaatcgtccgcaataattttcctcaatgagccgcaacaatgggacgacgtcaaggagaacaattccattcgcatttttttgccactactgtgacaaggaaagttgcgtttcgttccgtttcaaatgcgttaaatgtggcgaacccgcttcacccctccaacacatttctcgcaatttctctctgcccccctccgaatgtgtcatttgcggctccaattcgtttcccttgggcgttcgattgcgcgactgcacccatctcagctgcgttcaatgtttcgtcgcatatgctgaagaacttttgtcccggatgagtctaaaatggcacccccaagtcggttacaccgtcggatgccccttttacgggtgcaccgctgtcgtcaccgatgttcacactttgtatttgctgggcaagcctt

SEQ ID NO: 86118 - DNA, 234 bp, Heterodera glycines
tgaagaatgcgcttgttcgcatgatcaaaggcaacaaataagcatgatcagaaaaaaacaatgatcactttgacactttcgaagagagaaattcctaatagttactgttggaagataattaagccttcgctaattgcttttttaaaaatttaatttgcttatttttttgtaatgttgataaatttggcttgcttttaaaaaaaaaaaaacaaaaaaaaaaaaaaaaaaaaaaaa

SEQ ID NO: 86119 - DNA, 560 bp, Heterodera glycines
ggctctgcgaagcagcaatgcgacgtatagggtctgacgcctgcccggtgcctgaaggttaaagggaggagtgaaagctccgaactgaagcccaggtaaacggcggccgtaacaataacggtcctaaggtagcgaaattccttgtcgggtaagttccgacctgcacgaatggcgtaacgacttccccactgtctccagcacaggctcagtgaaattgaattccccgtgaagatgcggggttcccgcggtcagacggaaagaccctatgaacctttactatagcttcgccttggcgttagcgaccgtatgtgtaggataggtgggagactatgaaaccggggcgccagctctggtggagtcgtccttgaaataccacccttactgtcgttgacgtctaaccgagggccgttatccggtcccgggacatggcgtggtgggtagtttgactggggcggtcgcctcccaaagtgtaacggaggcgcgcgatggtgagctcagagcggtcggaaatcgctcgtcgagtgcaatggcataagctcgcctgactgcgagactgacaa

SEQ ID NO: 86120 - DNA, 494 bp, Heterodera glycines
gaagtgtcgccggacggggactgcctttcagtgcggtggcacaccaagcgaatgtttcgggccttggtaagttttctgccttcgaaatacgtcggatggcggcggattacattcagcaaaatcccgaggatttccttccctttttggctaacgaaaacggagaaatgttcaaagatgagcagtttgacgaatactgctccaaagtggcgcgaatgtgcgcaagcggcggaacttggggtggggagccagaacttcgtgcattgagttgcgttttgcgctgtcctattgaagtgctgcacgcggacggagcaacaatcaaatttggcgaagtgttttctggccatcccctcattgtgacctaccacaaatttgcctacactctcggggaacattataatagcactaaaccgaccggagaatgatttgaattttgtaattgttacttttttgtttgattttttgtttggttttggcgaatacatttccatgaacgt

SEQ ID NO: 86121 - DNA, 176 bp, Heterodera glycines
  unsure (1)..(176): unsure at all n locations
cattggtcgaaatgcatattcaaccgtccttnntttctaattcttaaaattattttcgtcgtattttaatggggtttaattttgaatttaccgaagaacaaaaacaactccaagcggctgtaaagaaatttactcaagatgaaatcattcctaaagcgtcacattatgataagaca

SEQ ID NO: 86122 - DNA, 621 bp, Heterodera glycines
  unsure (1)..(621): unsure at all n locations
gtcccgcaacgatttcggcgatttggcgcctcctgtggccgtgccccgcaacgatttttgcgatatgccgcctcctgccgccgtgtcccgcaacgatgtggcgcaaacgttgtcctcggtcttcaagaggaacgaagcctattatgaagaggactttcatgcgttggcgtcgcctcggaatggttcaccggaaccacgaccggcgaaggaggagccgcacaatctgcagcaaccacgaccggcgaaggaggagccgcacaatctgcagcaaccacgaccggcgaaggaggagccgcacaatctgcaacaaccacgaccggcgaaggaggagccacacaatctgcagcaaccacgaccggcgaaggaggagccgcacaatctgcaacaaccacgaccggcgaaggaggagccgcacaatctgcagcaaccacaaccggccatggantgtggcggtgccgccaccgccgccagcagactctgtgccgtattcaagtgacgaatattactttgaggacatttctgacgactcagagagcgattgggacttacttgacgaggttttggatcacaatgattggaatgaggaggaggatgacgaggaatgtgacgcgttcttagaca

SEQ ID NO: 86123 - DNA, 698 bp, Heterodera glycines
  unsure (1)..(698): unsure at all n locations
ggaaccgggccgcgtacgcgtcgtacagctctgcccttcgcgagtcgctggtcgtaatcgaaactgagtttcttcttgcgaacaacgcagtgctgaacacggacactgtttcacttacgcaaaagtcggaagaactcgtcaattatcttttgtgccgaaatgaaattgactgggcggaaagtgaatcaatttctcgatgtttcaatatcgtcgactcaatttcaaaaatacattctgtagatgttgagagggtgtttttggcgctgatcgatcgttgggtcatcgaaggccaagaacagtcggaccaagccgtttcacagatcacttccgaccccgactccaccatcgactttactggcccttcggttctgtccaactcagtcaacaccgatgattccgactttttcgttccggtcctttacgacgacattcaaacaactcggatcattgtccttttgcgacggattagggaaccgacgaagaaaatcttggaattttcacacaagtctgaaattgatgtgtcggtgctccccggcggttatttaaccaaagttcgcattgcctgctgcattttgcgctttctgaccgatgaacagatgaggacaatgttcaacattagcatagaccaattntacggaaatttcgtcactatgctcaaccagcggctntactcattgtgccgcatcgattcgtcgccg

SEQ ID NO: 86124 - DNA, 638 bp, Heterodera glycines
ttaaattatcctcccaaatgcgtaccattcccttatggccatggtttgcttggtgatggctgtcctaatggaaatggcaaattcaaaagcagtcaaaaaagacaataaaaaaggagcagtggcggcatcaccagcaaaaggaaaagcatcgccaaaaggaggcaaaagcccagcaaaaggaaaagcggcaaaagttagtaaaaaagataacaaattgaaagcaaagaaagaaaccaaaggcattaaagttaaaaatgcaaagccaacaaaaaaaggtaaatcggcaaaaggcgcaccaaaaacagccaagaaagtccaagccgccaaaaaagcaccaggaaaggacaaaaagtcgctagttaagccaatcgtccttaaagcaccggtaccaccccataaaatgcacccgatgattgaatccgaagctgtgccaccgcccgcccatgcgcgttcgcttgcgaccgttccttacagtacaccgggggcagccgaccgtaactcattgccatcgtacacttcggctggcaccaatttggacatggccgatgataatgatgattatcagaattattactacggaacggaagacggcagcagggaatttgatgcatcggcggaggaggaggatgaactatatg

SEQ ID NO: 86125 - DNA, 617 bp, Heterodera glycines
agtttgcttcgttcttcagaattcgaccaatttgctaatttttccgcgtgtttctcctcaccctctgatggcagtgctccccgattggaaggttcttcaccaccaccgttggcatcttcaattcgcttcccccactttgtttctcgtcagaaatttactctctcttccacatatgaaaagcaagactggttcccaaaacacatgggcgttcaactgaaagtagtggagggaaaacttcgaaccgtcgatttggtcattgaagtgcatgacgcccgggttgccctgaccggaaggaatccttcgttcggtgccaaattatattcagtgcgaccgcacattctcgtctttaacaagatggatttaatcaacatgaaacgctacaaggaacccatcgaagagtactaccggaatgagcagaacattaccaatatttgctggacaaattgcaagaatttgacaaacaaaacgcagtttcaaaatttgatggacaaaatgttggatttgttgcgaaatgaacatcgcttcaacagaacagtgaagacggaataccaagtgatggttgttggtattccgaatacaggcaaatcctcgttgataaacgcattacgcaatgtgaa

SEQ ID NO: 86126 - DNA, 369 bp, Heterodera glycines
tggcggtcgcgctcgttgttactgacgccgtttcccacccgcccggcgtggacagtgtctggcattccccaccattccacagtgtgccgcgttttgctgtctgtcgtgacagagaaatgtgaagttgagaaacagtggagtaaatgtggaggttgatcagtacggaagagagtaaaagtgcggtgcgttatacgtcgttaaatccaagtcgtttgggtggacagagaaaatgaggtggagaaatagttgatgtggccggccggtgccctctgctgctgccacagagagaaaaagagagaaaaaagaaactggggagcagagagaaagagggggcaggaatttgccacactgttgtgttcagtccagttg

SEQ ID NO: 86127 - DNA, 130 bp, Heterodera glycines
gaatttattgacgtgtttatgaattcgttcgccatttagcccccctccccatctctgttccgtaacaaattaattgaaatgcgttgctgctgctgctgctgttgttgatgttgctgctgttgcttgttgg

SEQ ID NO: 86128 - DNA, 459 bp, Heterodera glycines
  unsure (1)..(459): unsure at all n locations
cagagatttccttcccttcggcaaagaattgccactccgaaaaaactttaacgcgattttatggcatttggaaaacgttcgccaatgaggccttccaacgcgaatttatggccttcggaaagcgaggggcaccgtctgatcacttccaaagggattttatggcattcgggaaaagagtcccggacggatttcagagggaattcatgacatttggaaaaaggagcagtgacgttggcaggggaggatcattcgacagggaattcatggcatttgggagaagaaagtgaagccgaaagggagagacggcgcgagagaaaaggacggcacgcactgatctaaggatgggattgatctgatcgacagaaaacagcaaaataaacagattcaaatcaaaatattttctgagacgaaaagcggataaaagtgaaaatgtcaacnaaaaaaaggataaaaaagaaa

SEQ ID NO: 86129 - DNA, 313 bp, Heterodera glycines
cgcttccatttgatgacacttattctgctgctattggttgttttgatggtccaactgaacgagtcggcaccggcagatggccaaggaggacacttggcaatggttaatgaagcggaaaacgaagccgaccattctcttaccgttttgcgctttaaacgttcatgtccacccccgtgtcaagaaaaagattgtccttctcctatgtgtgctctatgcagtttctgcggatgagcgttttaaaataggcaggcgaaaggaacatttgcgacgggatgacaaaatgaatgggaagaaaatgtgattttttaactaa

SEQ ID NO: 86130 - DNA, 227 bp, Heterodera glycines
ttatggaacgcacttttgtctgcataaacccgaatccgtccgaaggggcctggtgggaaagatcattgaacgctttgaagccaacggctttcggctaattgccataaaaatgatcgttgcatctcgcaaacaagcgatggaccattacgtcgcttgtgccggccaaccctttttccccaaagtgatcggttatatgacctcgggtccggtggtggcaatgatctggg

SEQ ID NO: 86131 - DNA, 185 bp, Heterodera glycines
aagagtttccctgacgcatcgcttcattttgccgagactttcgaccgcgccatttttttgcttcgcgcagactgtcgtacttcggagaaacacgtcacttttctgcacattctccgacaattgggcgcgagtgaagagaatggtggactccttggcaatttgaacgggctcattcgaaacctgag

SEQ ID NO: 86132 - DNA, 497 bp, Heterodera glycines
  unsure (1)..(497): unsure at all n locations
ggcaccgcgtcgcagaaatcggccgccggaggaactacgtcacagaaatcggcagcggcacctgctggaggagcgtcggcgctgggcaccgtgtcgcagaaatcggccgccggaggaaccgcgtcgcagaagtcagccgctgggggaaccgtgtcgcagaaatcggcagctggaggagccgcgtcccagaaggcctgagcaaccaccggacggcataagaacaagacgctctacaacccgcttcaatgatatttatcgacagtgatcagtaatgatgtttaaaagaccccgtattgttcccccacatacctatgcctaatgtgctctattgtctgtgatcacgtatatcatttgtaaaaccgttgtgtgatcattatttgtgtatatgtatgtatattgtatgtatngtgtttggctgatcagcggatgtcgataaaaggaactaataggtataaaatagagatagacctaaaaaaaaaaaaaaaaaaaaaaaaact

SEQ ID NO: 86133 - DNA, 745 bp, Heterodera glycines
gatcaaagtcgtgaaacccgacaattataaaaggaggtgaaccgagaatgtgacgaagggacagggcaatgtattgaatagcagatatacacgggattctggtaagacatggcatcgaggcattttttatgtcaatgaaacgacattcgattttgagaaaatgctcgagaaaaaaatcggagcagaagcaattctcaaatgtcctgcaaatgcagatgcccccgaggggtgtgtgcctgaccacggtcgtttgtcttggccttacgttgccaccatggccattatgccatttgtggtcggaacactgcaccatcccacacaaatgcagcagcgaacgcagtcggcgctggttattgggatgggcggcggcactttggacatgtttttgcacagaaaaacgcccagtttggacccaatggtcgtacaaatggcacgcaaatggttcggcacagtggaggattcaactcgacgcacatttgtcgaggatggaattgtcggaattgaaaaggcagcggaaaacggcgaacagttcgatttggtggcattggatgcgtgcgaagtgtacatcgatttaatttgtcccgcttcggtattctctgatgaaaagatattgcaaaaaatcaaagcaattttaaaacctacaggagcatttgtggtcaacattttaatgtcggatgagaaagaagaagacaaatatgttgcagaacaaaagcgcaaattgctcaacattttcccgatttgtctc

SEQ ID NO: 86134 - DNA, 665 bp, Heterodera glycines
  unsure (1)..(665): unsure at all n locations
ttgtaagttcgtacctgattatttttgggttccattggacgcttattagaacatcggtcgttcatttgcatggggaatggaattgtccattgacaaggggttcgctgtgcgtgccgtgcctgtcgtttggagaaatgtttgcaggtcggaatggacccgaatgcgatacaatccgagagagaccgaatcggttacacgaagagaacacggcgagaaaaacttgtgggatttgacgaaggcattggccacgagaggggcgacctttgcgcggagtcttttgcttcgaacgatgccgatttggaggagtccgatgaagatgacgtcatttttcgcgataccgaaccaaccggaggctcaccttctgtaaatattgcgcagcgttcaaaggtgggaacaaaaaattacataaatttacgttaacctaaaacagtgccttataatcaaccatagtcctcaaaaaattgttatattttatgccaaaatttgtcactaatgggcaaataattaatttttctttaagggtgtcattttcattgaacagctactcttggaaaaacaaggggcgaagaacaaaaaaaagtcttctgcctcccccccccccttttccgctttttttaattaaaaggcgtccgtcgggggttgatactgctatgaatntacagaat

SEQ ID NO: 86135 - DNA, 365 bp, Heterodera glycines
ccagtttgaggacaatggttgccgccaatctgaagctttccctgatttttgtggccggcttttgcctgctgttcatcgccgactccgatgccgggaagtcgtgcaaaccgggagaaaagggaccgccaggccctccagggaagccgggaaacaaggggaagcccggcgtgtgcaagcccaaatatgaaacaacttccaagtacggtacgactacttccaagtacgacaccaccacttccaagtacggtacaacaacacccgaatacgatacgacagcatccaaatacgatacaacgacttccaaatacgacacaacaacttccgactacggtacgacaacttccaaatacgatacaaccacttcc

SEQ ID NO: 86136 - DNA, 713 bp, Heterodera glycines
attaagcctttaattttggtgaaaatgtttaaatttgcaaaaccgatgaccaccaccgccgctcggatgattgcgcgcaagtcgcgtttggaggtgatgccgatggccaagaagtacaccgagtcagactaccagcgtgagctcacttaccggcgttccgactattcatttcccgcattctgcgagtccgatgtcacccacttcaagcgtggcgaagtgcaccacaaattgatgcagggcggcgcgtcggagggcggcttcacattgactgcgtatgtgctggttgctttgctggagaaccacgtgcagaacaaagtgacggaattggcacgaagcaatttggtgtcacacctcgccgacttcaaagaggacccgtacgcgttgacgttgtgcacttatgtgctgcatttggcgaacagtccggagaagggtgacgtgctgaagatgttggaaggcctccaaaccacagatggcatggtccattggacgacgaaggtgtcaaacggtgccaaagatggctctggtggagcagcaaagaacatcggcgatgtcgcttgggacaccaaccagtacttctctcagccccagtcggccaacgttgagatgagcgcttatgccttgctcacatacatgctgctggacaacaaagagcatgcgctgcccattgtccgttggctgaccgcgcagcgcaattccttgggcggcttttcatc

SEQ ID NO: 86137 - DNA, 617 bp, Heterodera glycines
  unsure (1)..(617): unsure at all n locations
aaaggtccccccttttgtttaaaaaggcccacttttagtatagcgccaacttttgattgtttaatattaaatacccaactccgtagtgctatgcagcaagtcaccagtggcacagatcattctcaatctcaaccagttcattctcctgctgtccattgtctggtctgtcaatgtcgcttggaattgcaccattcattgtttgggccgactgaggacggcaccgactgtgcttcttccaccaaatcgtatgctttgcgcagtgacggggcttcctgctcgacaacaacagatgcgaagcccgactttgcttcaaccattgcattgacttgacctccactgttggcacgtctcaatctgcaaatttgttggatttagtggccgaatccaccagtccattggaagtgccgatgtgtaagaaatgtgccaatgcagtgactgcggagctgaacaagcaattgggtcatttggagaaggaatgcatccaatacaaaaagtcgttggaccatttgttgcaacggcgtgcggactgtccatttgacatggaggcatcgcgcatcaaattggacgctntaaaatcagaagagcgcgacctattggaacaactgacgctgttggaa

SEQ ID NO: 86138 - DNA, 572 bp, Heterodera glycines
cggacggtgaggcacttaccacgctggtgttgaaccgtttgaaagttggtcttaagtgtgcgctgtgaaggcgcccggctttggcgacaaccgaaagaacacgttgaaggacatggcggtttcaactggtggcactgtgtttggtgaggaagcatcgctgatcaaacttgaggacatccaaattcaggactttggcgaggccgatgaagtcacggtgaccaaggatgacacgctgattttgcgcggcaaaggctctcaggaggacgttgagaaacgcattgcatcaatccaggatgaattggatgcttccacatcggactacgaaaaggaaaagctgaatgaacgtctcgccaagctgtccactggtgttgcactgctcaagattggaggtgccagcgaagtggaagtcaacgagaagaaggaccgtgtgacggacgctctgtgcgcaactcgtgcagcggttgaggagggaattgtgcccggtggtggtgttgcattgcttcgcgccttgaaaaagttggacacactgaaaccggacaatgatgaccaaaagagcggcatcaaaatcgtcc

SEQ ID NO: 86139 - DNA, 608 bp, Heterodera glycines
gaaaagccgcaggaaatggccagaaacaaatcgactttaaagaattcgtactccaatcaaagcgggcttctgctgttgactaacatgcgggaagacaaatgaaatttcatggcgggcgaagcaaatgaccgatttggactaccggagagaaaagccaaccagagactggacaacgaaagtcgcagaaatggacgaacttcggatagaattgctgagtttgctgcgcgttgacgtcgattgtattttccgaagcgtaaagccaaacattgcggtttgttgtgctgcactccaaaggtcgtaccctgacagaatttacgccaccgatgaaacaggcttggactatttgccatgcctgcagatgatccacaaatgtgctttgagctcgcgcgcgagtcgccgccatttgcaccctttcgaaacggtcgacagtgaaattggtgggaaaatagacgagtcgcataagctgcagtattacctcgaggagtacagcccaatcccttcggcctgattgttctcaatgcttgtgaagaaaatcgcagtgatattattgtataagattcgtcgcacaatgaatcagatttccttttgcagtgtatttatcccgctaa

SEQ ID NO: 86140 - DNA, 684 bp, Heterodera glycines
  unsure (1)..(684): unsure at all n locations
angtgaaggaattctacacaggaatagcatttgaagcggaagaaccaccgaattcattggagttgcaatttcaaagcaaaaagatggagaaatgaaagtgatcagagcaaaagccaaaggcacagaaggactttttgaactgaattctgacaacacagcaaatagggtgagagaaatcacaatgaaaaaacgacagaatggagaaatattgtcgaatttgcacgtcaattgaagggggagaatgaacgaaggttgcttactggatgcagaacatttaaattcccaacaaaatgggcacggatcccctcggggagttcatcattttccctaatggcaaagccgagagagatttgcgagctcgccgataattgtttctttgatgtacaagaattgaaaaaaaaaatcaagcatcgggaagctttctccccggtggatattgcacattctgttgatgtcagtggaaagggcgacccgtgcagtttcataaatgaaaattacgaagtgcgatgggcgtacgacagcaacacagccaacgttaattttgtgatgaaacaaaaggccaaaagtggaaaatggtggtcagctgtgggggattggcgacaatatgagcgacatggacattggcgttgtgttcctcgacggcggcgagccaaatgaaatgggcgattattactcaaacagtta

SEQ ID NO: 86141 - DNA, 669 bp, Heterodera glycines
catttcgaagtgcacccgctgcaacacttttaaacggcctcgacaaacagcaaattcttcaccaacacaccgatgaatagcggcgtcagcccaactccgttcctttcgctccgctgtgtgtgctcagtgctggtgctgctcatctgtgcgttcgatgtgtcactggcagcaaaagacaaggagaagaatggcaaagaagaaccaggaggccaatttaatacgctcagcatcattttgctgattccgctggtcatcgtcaccggcgcgttcgtctacctgctgtttatgaagccaaagagcgaaggaaccggcgatgacgacggagaaggggacgcggacgtggagaagggaccaaccgaagagacgaaaacggagcctcgaattgaatctccagcaactcttttgggcgtgacagtgccgttggagcaagacgaagaagagcagaaaaaggacgacgagggtggcgaccaaaccgcggagaagaaggaagaggacgcggtgacagcggacgaacaaccgaaagaaggcgccgcggaggcagcggaagcggagaaaagtgcgacaaaggaggagacgaccgaggacacggaggaaacgacggaaggatcgaccacagagacttccgacagcggctccgggtcgtcttcagcatcgggctctggctctgag

SEQ ID NO: 86142 - DNA, 709 bp, Heterodera glycines
aattttattttatctacaactcaataaaaaatgtccgcttggatttgtcctgggtttttgctgttttttgtgctcattctgatcactgatcactgtccgatgacccaagctgtcactcaaccgccctatggtcaattggctgtcagtggaaaaaatctagtacaaaaaagtacgaaaaaagccgtggcattgcacggcctgtcaatgtactggagccaatgggtgccgaagttttgggtgaaacagaccgtcaacaaattaaaatgttcatgcaatgccaacgttgtacgcgcagcaatggcatccagctttggcggttacatttcaaacccaactgctgaatataaaaaaatgactgcaatcattgatggggcaattgaccaaggcctttacgtggttgtcgattggcacacgggcgacgatttggccaccaccgaaataaaatatgcgactgaattctttacaaaaattgctaaagcctataataaatacccgcacattttgtacgaaatttggaatgagcccaacaaatttgtggcatgggaagcggtggtcaaaccatacgcaaagacgatgattgacgtgattcgtaaatatgacaaaaacaatgtgatcattgttggcacgccaaactgggaccaagatgttgacattgttgcaaaaagtccgttgaaagacgcaaatattatttacactatgcacttttacg

SEQ ID NO: 86143 - DNA, 701 bp, Heterodera glycines
gataatgatgtaatttacaataaatttcgaaatatttgaagtcagtcccgttttctgtttttttcccgtcgatctcgaggcattattttgtgccaatgcttccgtcgccgtcattttccattcaattggtgtctcgtcttttttcccagttttttaatcgacccttatgttcgtccgcacatttattgtcaaaggacccttcaaattctcgcaattccggtcgcgatcacaactttttcgaaggcctctattttgagggagagataccacgagatcgcatcaaacagaagtacactttgtccagcggaccgggcggttcgaacgtaaacagtcaccccacaaaggcggaaattcgtttcactgtcgacgaggccgattggattccgcggagagtgcgcgaacggctggtggaacgatacccacgctacatgaacaacaggggcgagttcgcattcacttcgcagaagacgcgctaccagattcaaaacatgaatgactgttttgatcggctccataacatgctgctgaactgctccgaggagttggtcaaggaagagcaccgaacgcatgtttcaccacaacgcatcagcataatggaagaacggaaaaaacgctccgaagaatttcggttagcatcaaaaaaattctcattcgcggaaaaaacaaaaccgacgttcgggcttcagcatttaaacgggccg

SEQ ID NO: 86144 - DNA, 616 bp, Heterodera glycines
  unsure (1)..(616): unsure at all n locations
ctgacatgaggcgaaggctactgatactgaggtgaaaaccaccgacaatgaggcaaaagcactgaagaaaaagaagaagaaggccattggagagccatcgaaggactttcgtatcaaggaggagggcctttgttcgatgtttctcattaaggtggaggagggtcgaaaagcctaccgttacgacatcgaagtgatgaacatggtcaaacagaagagcctcacccgtggaactgacgatggccttcgcgcattcaaccgcaaaatctgttacgaactgttgatcattgcctatgagaagacgggacaattcgggatgaaaccggacgaaaagggccgtatgggcgagattgtctacgacagcaaagccactatgtactcatccatgccgttccaccttgagtgtccgaagattgaaattacgcatgaagaaattgttgacgactacgtgcgagatcataccgcgatggacagctttttggtgactattacgccaaaccatcagaagcctgtgttggacatttcggattatcgtcagtattattcgaagaagtctctgttcgacgaagatcgcactgtgcgcacttttctggaaaaaaangaaaaaaaaaaaaaaaaa

SEQ ID NO: 86145 - DNA, 556 bp, Heterodera glycines
tcccttcgttcggtcgaatacttcgctgagaatgaaattgacatattcgccattctgtttgtggcattgtttattgccatcgctgaagcagatggcaatgtccgggcaaaacgccatgaagaacgattgaagcgccaagacaaccgagctgatgaggagaaccgccaggtagacagtgctgatcgggagaagcgccaagacaaccgagctgatcgggagaagcgccaggaagacagtgctgatcgcgagaagcgccaagacaaccgagctgatcgggagaagcgccaagacaaccgagctgatcgggagaagcgccaagacaaccgagctgatcgggagaagcgccaagacaaccgagctgatcgggagaagcgccaagacaaccgagctgatcgggagaagcgccaagacaaccgagctgatcgggagaagcgccaagacaaccgggctgatcaggagaaccgccaggaagacagtgctgatcgcgagaagcgccaagacaaccgagctgatcgggagaagcgccaagacaaccgagctgatcgggagaagcgcc

SEQ ID NO: 86146 - DNA, 552 bp, Heterodera glycines
tgcattgcgaatgcgccagccatggaaaatgcgctggcaattggacgatggcttgagaaggacccgcgtgtggaaaaggtgctttatcccgagctcgagtcgcatccgcaacaccaaatccacaagaaacagagcagcggaatgtccggcatgctctccttttacattcgcacagattttgacggggcactgaaattcctggccattaaaggtgtttttggtcgcccgatcactcggcggtttcgaatcattggcctcactgccggcggccatgtcgcgtgattccgtgccagcgaaggttcgcgctcagaccggcatcagtgataatctgatcagactgtcaattggctgtgaggacaaagctgatctgatcaacgacttggatatggcaatgcgagtggtgacggaatagcaaattccttttttttggtttttcgaaatttaagaaatgttgattgatgatttacaccttttatgatgttactaataatgagatatattcacatttgccttgtcttttattccgattttttataaaatgtttttacctga

SEQ ID NO: 86147 - DNA, 714 bp, Heterodera glycines
  unsure (1)..(714): unsure at all n locations
acattcgctactaccacttgagncccatnnttctaaagnncgtatcagccgctacaaatattttaaaaggccttcgacaagcaagcaacaaattcttcacccaacacacaccaccaacgatgagaagcgtcaacacaacaccgttccgtcgccgacctcttccgcttcgcattgtgtcgtccgcgctggtgctgctgctctgtacgttcgatgtgtcgctggcagcggagaagaacggcgccagcccgcctatatataatacgctcaccttcattttgctcgttccgctggtcatcgtcatctgcgcgttcatctacctcctgttcatgaagccaaagaatgcggaaggcgacgaagaagacgaagaaggcaaaggaggagctgacggcgatgtcgagaagggagcggacgacgacaaaaaggagactccaccttctgctgctggtgacgtcgtggcggtgccatcggaacgcgtggttgatgagcagcaaaaggaggacgagggtggcgacaaagctgaagaggagaagaaggaggagggcgggtcggcagcggaagagaagaaagaggaggcagccgcggagaccggcggagagaagtcggcgaccacggaagagacgactgaggaaacgacggaaacgaccgacgaaacttctggaacccctgagacttccgaaagcggctccggctcggcatcgtcatctgcctctggct

SEQ ID NO: 86148 - DNA, 372 bp, Heterodera glycines
caatgttaggaagttggaagaatggttaaaggacggagctgcacaattcggacccgattttgatgtcgattccgcgataaagctgttacgatccgctgaactttttcacttggcctcaaaattagcagcaaaatccgatcgaccattcacatttttggacattctttgtcaggacactcgcgaatggggaaaagccgtcaaatttataagtgaaaggccgctgtcagtttcatgcgaattactggaaacttatggcccgattttgcttgaacatgtcgaggaacaaaccctcgcgcttatcggacgattgatttggtcggaaggagtgaaccttaaaaatctgacgaaaaaaaaaaaaaaaaaaaaaaaaaa

SEQ ID NO: 86149 - DNA, 432 bp, Heterodera glycines
cctgacgatgggtcgttgagcgcggagcaaaaaatggagcgaattgactcgatcatttgcactctgccggagaatgtcattgaccaaattccggacccgccagaagttgcgcaactcccggctgatgtgcgccagcgcgtcaaacaaattgaacgccagcagggaaagtcattcagcactaaatttgaagagatcatgaaatatgtggacactttgcctgaaggcacaaaatcggctgccaaaaacattttccattgaatttttcatggaaaaggaggagaggaaagaagtggaaaaagcagcatggattaatgaaagcaaggctaaacaatatttattaaatattttattttttggtaaaatatttccaatttttcatttccaataaatatttttgctttgttgaaaaaaaaaaaaaaaaaaaaaaaaaaa

SEQ ID NO: 86150 - DNA, 401 bp, Heterodera glycines
cagggttctgcgcgactacctcaacacgaatggcatccacgagttcccttacgactgggagaaagaagcgaatcgacgaacaaggagtgcaacctgattgattgattgtcgtgccccgcgtgtttcattcattattccgtgttgttcggacctatattcattattccgtgttgtcagccctatgtatatattatatgtatgtatattctatattgtatattatgtgtacttgttcgacctatactatgtatttgtgtgtaataaacaattcatgggaaaaaaaaaaaaaaaaaaaaaaaaaaaaaaaaaaaaaaaaaaaaaaaaaaaaaaaaaaaaaaaaaaaaaaaaaaaaaaaaaaaaaaaaaaaaagaaaaaaaaaaaaaaaaaaaaaaaaaaaaatt

SEQ ID NO: 86151 - DNA, 574 bp, Heterodera glycines
cggcccgaactcgtcgctaatttacggactttctttcctccactcttctgctttgaatcctttggttgtgagtttctttagccgtgttgtgatctgttatctttttgctgatgcccaaatgttattggcttattggaagacagtgcttttttggagaattgcttgacagcattggacaactgttcgctgttcgaattgctctgtgctattgccaattgtatgcccgacccttgccttcacggagcgaatgaaaacttggtatgtcaaaaaggattttgctcaacaaatgctccaaaaccttcggtccaaccaaccttctaccattcacgaaaatcagctgcatcttagggtggaattcataaaagcattgcgtgacttccaatacaatgtcgagcaatgccacgaccctctcctccactcgctccaatcggaagaggcggttttgaagttgctcgagttgatgtttcctcggacaaatcctgacgaagaaagtgaaaatggggacgttatgaaattcactaatccttcggttgtttcgaacggggttttggtattaaatgcattgatggagaca

SEQ ID NO: 86152 - DNA, 607 bp, Heterodera glycines
  unsure (1)..(607): unsure at all n locations
ggaacatttacgtgattgtaaagaacgcggctactatattaaagaaacatcgattgataatgatatgctccgttttgcatttattttatcactacaaaatgattctccttcttcttcaagaattgataaagcagctaattgtaagcaccatacagatgaaaatgatgaaaagttggaggaacttttgttgatattgaatgacaacaccataaagcgagatatcccggagttaattgaagaggcgatgaattggttgaaagaacacattggagaagaagaatatgtgaaactcgagaaagtcttagaagaaaaaaggcaagcggaacagaagccgagcattattgagaaaaagcatgacaaagatggagagaatagtgaagaaggcatgggaaagagaattaaggacaaaattagtcaagcaaaagaaaatttaaaaggcataatcaagcagaaattgatgaagaaaactaattgaggataattgaggagaagaggaagaaaatattcagcagtttccatgaaaaaatttgttgaccaattaatgaagaatatcactaatgtagccagcaaaaaaaaaaactttcgaaaaattaagtgaatnttaact

SEQ ID NO: 86153 - DNA, 641 bp, Heterodera glycines
gacttttgccacaccaccaaccgttcactcgtaatttctgagaaaccgacagttttgctcacgttcaacacagcgccattctcagcaacatcgcacaaaaatggcacgccgacgaagaaagaaggagccgcgaaagcagtcgtacaagctgtacgttcgacgtgtgctgaaggaagttcatccgggcaaggaaatctcaatgcgtgcgttgaacatcatgaactccttcgtcatcgacgccttggaccgcattgcaacggaggcgacgcgaatggcccacaacgaccggcgcaaaaccatcacgcttcgcgacatggagttttctgtccgactgtgcctgcctgacgtcatggccaaagatgcgaaccagaaggctcagaaaacggtgaccaagttctatgctgcaaaagtgcgggatcggatgagaaggacggagatgcgtcgtggcgaatttgcgatgatgcagatggcagcgctgtgagcacactcaacttttggacgaccggcggatgaagccacctgtatattgttgatgattggccccgtatcccccattactgtatgtgtatgtattatacaatgtatctaccattcttgtgtgtgtatgtattattcactatgtgctttatatgtatacctgg

SEQ ID NO: 86154 - DNA, 429 bp, Heterodera glycines
cgctatttctttggccttacagagattgccggaataattactacagtaaagacgatttaacgaaatcgacactcaagcacttggcttttattatttgtggccttacactttggtcccaattgactaaatcttttattatctgtggccttacattttggtcccaattgtctcaatttggctctattcaattgtgtaccaggcgtacaaatttgagcagcaaaatgaggaagacaaaaatggcggatcgtatggacagaatgccaaagtggtcaatcaacaatatgccaaagttatgccaatgccaatttaatcatttggctcaaaacggtttttttttgaaaaataatgacaaatcggagatatttttgatgaaagaacacctggtgagccctgcaaaaacctgttgatgtttgattacattatgcttat

SEQ ID NO: 86155 - DNA, 551 bp, Heterodera glycines
ttacttccttccattttttaccgcgtaaactgccagcaccgcggatggtctacgaggagtactgcttcgatgtgaggctcgacacttcacaggagtctgtttcaggtgagcaacgccgacatcgtacacaacagctgcctctatgtggaacagacgaatccgaactacatgaccttccatggcgtcactacgacattttcgtctgtgagaagacaatcagcgggctcaaagatgaccgaagcgaaaatgtgttcaaccgtagacaaggagcatgtgcaagcggggacgaccgatgcgataacgttttcaaccgtggacaagtggcaagtgcgcgcaatggtgaaggaagagacagcatcctcattcaaggattggcgttcgtcattgtgaaagtggtcaatgcagtgtacgatatgattgtttaattgtgatcaggatatattcatcacgtatatgtaaacaattatttttgtgtgtgtcgtatatgtacgaactgaatttctgaacattcgtcatatgtatgtaaaaataaatgtgtgtgaaataaattt

SEQ ID NO: 86156 - DNA, 694 bp, Heterodera glycines
taagcctttaattttggtgaaaatgtttaaatttgcaaaaccgatgaccaccaccgccgctcggatgattgcgcgcaagtcgcgtttggaggtgatgccgatggccaagaagtacaccgagtcagactaccagcgtgagctcacttaccggcgttccgactattcatttcccgcattctgcgagtccgatgtcacccacttcaagcgtggcgaagtgcaccacaaattgatgcagggcggcgcgtcggagggcggcttcacattgactgcgtatgtgctggttgctttgctggagaaccacgtgcagaacaaagtgacggaattggcacgaagcaatttggtgtcacacctcgccgacttcaaaggggacccgtacgcgttgacgttgtgcacttatgtgctgcatttggcgaacagtccggagaagggtgacgtgctgaagatgttggaaggccttcaaaccacagatggcatggtccattggacgacgaaggtgtcaaacggtgccaaagatggctctggtggagcagcaaagaacatcggcgatgtcgcttgggacaccaaccagtacttctctcagccccagtcggccgacgttgagatgagcgcttatgccttgctcacatacatgctgctggacaacaaagagcatgcgctgcccattgtccgttggctgaccgcgcagcgcaatttc

SEQ ID NO: 86157 - DNA, 726 bp, Heterodera glycines
aaattgacaaataaatccacccaacgcattaaaatgaattattttattatcaaatttcttcctttaattatttatttctcccttttctcaattgttaactcatttgcggtaagtttaatagagacgaattggccattttactaatttattaaattattgcccgcaggcgttttttaattatattctaagataagaaggcctgaaaaaaaattagcgaaattgttaggatctttcaaaaaaattttaattgagaattaattgcagtttgacgatgaagcatttcttgccttcgtgaaaggacctgccaattttgacaaattttgcgccggaaaaggggtcactaatgaccaaagcaaagaactgttggcacaaatttatggcactcatctaggcattttgttttacatgcgaaagaattggcattgtgccaatgttaggaaagaatttgaagaatttatcggcccagaggaatgtcagctgtttcaaaattatttgtgcattgtttacgaatttttgttcaatgtttatgccgaacaagaggatataatgaaaccaattttcaagcaaccaattggatttcgaatatcaattttgatgtcattaatgtcggcattggaattaatggcaaaattttcgaaattttgtctttatgaattgaaattaattgaaagaaatgattcgacattggccgaaacaattcaacttgaaaatgagcaggaaaccttg

SEQ ID NO: 86158 - DNA, 680 bp, Heterodera glycines
gtgaatgatggaaatgacaattctcgggaatcggatatgcattaccgcggacggcgccaaggtgtcgccatttggcagcaaaatggacatgggggactattatgttgaaaataacaagctgagaaaaacacggggattgggctgggtaatggccgcactttttgtggtcgccgacatggcaggcggaggcattgtggcattgccaacggcggtggtccgatgccagttcttttccgggttgctcattctgttgtgcatggcgatcatctccaccttttccgcagttatgctgggccaatgttgggaaatattattgcgccgtttcccggtttaccgtactcactgtcgaaaaccgtacgctgaaattggccttaaggccctcgggccaaaaattagaactatcgtatcgatttgcgtcaacgtcacccagtacggtgccaccaccgttttcctgctgctctgtgccaaaaacattcgtgacttcatccgtgcctttctagacaaggagatcagcttctgctatttgatcgtggtcattgcgcttgtgcttttgcccgtcactttgctcaaatcgcccaacggtttttggccggtcattgtgggcggaatgcttagcacaatcgttgccattgtgttcatttgcattggtgccatgatggactggcgcagctgtgccccct

SEQ ID NO: 86159 - DNA, 627 bp, Heterodera glycines
gcaaaacaaaaggtccccccttttgtttaaaaaggcccacttttagtatagcgccaacttttgattgtttaatattaaatacccaactccgtagtgctatgcagcaagccaccagtggcacagatcattctcaatctcaaccagttcattctcctgctgtccattgtctggtctgtcaatgtcgcttggaattgcaccattcattgtttgggccgactgaggacggcaccgactgtgcttcttccaccaaatcgtatgctttgcgcagtgacggggcttcctgctcgacaacaacagatgcgaagcccgactttgcttcaaccattgcattgacttgacctccactgttggcacgtctcaatctgcaaatttgttggatttagtggccgaatccaccagtccattggaagtgccgatgtgtaagaaatgtgccaatgcagtgactgcggagctgaacaagcaattgggtcatttggagaaggaatgcatccaatacaaaaagtcgttggaccatttgttgcaacggcgtgcggactgtccatttgacatggaggcatcgcgcatcaaattggacgctttaaaatcagaagagcgcgacctattggaacaactgacgctgttggaaga

SEQ ID NO: 86160 - DNA, 671 bp, Heterodera glycines
  unsure (1)..(671): unsure at all n locations
gatttttgaatcattaaaatatttaaaaatcggaaaaatttgtaaaccaaattccaaaccaaagcaaaaactttattcatcaaattttcttctattacaatattttatccttacaatggcagatttaagaatggaggccagcaatgatgtgatcattcccgtcaatgttgcaattcgcatattcagttttgttagtagagatgatttggaaaattgcaaactcacctgcaaatcatggaaagacgtaattgattacgcagacaaccgaaagaactcggagttgcaactgaggcacattgacgccatttgtctctcaactaattctgaattttctatcaaaatttactacaaccaaactattcgcgagttttactacaaaaaatatttcgctgatatggaaattgatgaaattgaagtgaaaaaagtcaggcatttaacgaatcaatttgacgagaaaaaatacgttttcccatgtggagagcatttgccaattcggcaaagtcattcctttgtttttccagcggttgatatttttcaccaacacaggtgtaaaatggtgaggccaaccgtttaccaggaccatgtcaattacacgcgaaaactcttcacacctccgctcagnttttatgaacgccttcaacanatgctcaaaaaatgtaaaattcgtctgg

SEQ ID NO: 86161 - DNA, 399 bp, Heterodera glycines
ggatggtaagggacccaaaatcaatgcacctaatacacgattagaagctgatgcgaagatacccgaataggaaaacgcaaatgctcaagctcctaatatggtgaaagaggacccttagaagggactgtgacaagtgaacagaaccactcggctatgggatgcacaaactggacccttttcctatgctttatttagccaatattttatagttctacccagacataaccatgattgacaaaacttctgcccataacaaaaccatcgcatctaagcctatgtgcatgaacgccttaatcttctataaaatgcttcatgtggtatatgagcgttacactgaaataaaagctatccggtaccaaaatccaggcgctttgatcaaccgatttccgtttgaatccg

SEQ ID NO: 86162 - DNA, 619 bp, Heterodera glycines
tgatttctggagcaggaaattggcaaagaggaggaaaaagacaacggaacatcagaagaaaagggcatggagaggacggaggaacaacagacgaagacaccaacggaagaggaaaaaaggggggaggaggacaaaacggagggacagcgaatggcggactttcagagggaaaacgcaccgagtccggaagaaagggatgaagcaaagcaaagcccaatagaagagaaggcattcgtgtggcaaacagtgcaaacacatccggctgaagaaagagctgaagatacatatgcagaatcagttgatcaccccgcaaaatttgaagaaatcactgcaaaaacggatgaacgtgaaggagaagacagtgcccgatcagttgatcatcattttgaagaagttaatgccacatcggaccatgttggagaagaaggcagtcccagattagctgatcatcattttgaagaagtcaatgccagatcggaagccagtcccggatcagttgatcatcattttgaagaagttaatgccagatcggaagccagtcccggatcagttgatcatcattttgaagaagttaatgccagatctgaagccagtcccagatcagttgatcatcattttg

SEQ ID NO: 86163 - DNA, 671 bp, Heterodera glycines
  unsure (1)..(671): unsure at all n locations
tggatctgggatgctgatactctaagtcggtggaaaaatttgcattcgagcagcccatttccagctttcattggttcgttccgtgcgattgcaactcttcgcttatttccattgccacttcctcgtcaaatgtcgttttgttgggcccgcgattgggtaacactgcacaacaaattcgctgtttgcagcaacgcatttggtcagtccgctgggaccgtttccgtgactatgttttggtgactgggagcgacagtggcgaaatcgctttgtgggacattagaagtggcaaaaacgagttgaaacgcgtgaaaggtccttacgaaaatgacaatgcgaaaagcgaatcggaccgaaaacgaacagcgaacagaatgagaaattctgcaaaattattccattccgatcgcattgtctgtttgcgttgcacgtcggacggccgtttccttctttccctctcccaaaacagaaatgtttgtgtttgggatgccgaaacgatgcgaatgctttgccatctgaaggtgcccgaatctgaaggcgacctcagcacttttcccgtacaatttgagctttgtgacgaggggcgtttaatttggctgttcattcccaattcgaacaatgttactgtggtngggaattgctgatccgaaattgttctcaaatcgtccgattgt

SEQ ID NO: 86164 - DNA, 566 bp, Heterodera glycines
atgctctgacacctcctctgaaaatgttactgattggcccgaatgcctccttccctgttagggaaaccttataagttcaaacaccttccaagggaattgagtgaacgatggactgagcccacttgggtcgaagctgtaaagcaagcgcatgaaaatgacgccggaaaattgaagccatggcagcaacggtatctcgactggatgatcctccaagctcgactctgtggctatttgacggtgaaaaagaacgacaaaaaggcacaactccaacaggaagtgaatttctcgtggaattccgctacaaaccaattctgcttccgatttctggccaatcacatgcaggacaatggcgtcattgtccctatcgaacatcgctatttgctcaaaagtgcccctccgcgtgctctcgcgttactctccaaaggaaatgacccggagaatggtccgtgggaagtgacaagcaaaaaacacgacgctcttttcgctgccttaaattattgcagtgcgcgggagattcggcaagggttgtggcagagttacgtcacaagatccgcattcagttcgca

SEQ ID NO: 86165 - DNA, 682 bp, Heterodera glycines
tctctcttttgggacggctccgtcgctttttgccccgaattgcagccgcaaatgcagctttgtcagacacgatgggtgccggcggtggtgatggtgctgctgttactgtactggacgacgatgaggaagacaactatagaaacggcggtgcccatggaactgacggcggccacgacgacggcaagcagtacaaacaaaaacagcagcagcagaaagaagcgccggcagtgactgtgcatgtgatcgactcggacgacgacgaagacgaggaggaggaagaagaggaagtgattagcgaggatgacgacgacggtgccgagatggtcgttgagaatgggccactaggaggagaaggcggcgatggtggaggagttggtcgtcgggagattaagcccaagcagttcatccaatttgacaccattctctacaaaattgacgacgaacagagtgaccatgacaacgtcggcgtcaagacggagggcaacaacaacaaagtcgacgacagcggcggtggtgatgaaaatatggtggtgtcgcagccgaaagtgaaggtccagcaaatggtggcggagcgcaaaaacaacaacgacagcactgccacaactgctggtgccggcggaggaggggagccgttgctgaagaagaaatatttggttttcgacgccatgacgatggacgcgga

SEQ ID NO: 86166 - DNA, 634 bp, Heterodera glycines
agatggagtccgtcaaatgaaaatgttaacggggacaacgtgccaacgcggcgcagatgcaagcgcaccagcagttccagccaagacgctttggacacctgaagttccagacacgcgagtacggcccgttgcacaaacagtgagggggaaaatgaatagtgccaccgcgacgaatggatgggagagggatgcataggaaaacgatcgacggatgatgagataaaattgggcgagagcaaacgacgacgagatgccgagagttgtttattttgttgttttgattccagtgtctgatggagcactgcttttctctttctttcttttctctgtcatttccacacttttcccttccttttttcttgacatggtccaaaatgttgatgattgttttcgtaacaaaacttcaaattgtacaaatgcaacatttctcatttatagtaaattattttgttttggttttggaccagttcgggcaaattgtctatgttttgatgatgcgagacgccattttggttgatgatgacggtgatccatttttaggattgaatttgcctctatttgtattagtattttttataatacattatttttcgttttgctgaaataaaaatgtaaatattggaaaaaaaaaaat

SEQ ID NO: 86167 - DNA, 637 bp, Heterodera glycines
aagggaatcgctcatcgcgatctgaagctggaaaacgtccttctttgtgaaaacggcgtcatcaaagtcactgactacggattctctaagcagagttctgatttgtcttaacattttgcgggtcgcgttcctattcgtcaccggagattttgcttggcatcgcttatgacatgttcaaatcggacatttggtcattaggcgtcaccgcgttcatcatgatcacaaacacaatgcctttccatgaagactcgcccaaccagcaaatcgttgactcgcagcggaagcgccgttacaaatacccgtcatggcttaacattacgaagcaatgccgcactgccatcgatgccttgctgacttaccaaccggcttttcgtccgaacatctttgaatgtgccaagttggaatggtttgcccaagattccgcctctttgtggtgcggtggtcgtcgtgccggtgttggagtgatgggtcaagtgcgtgggcgatgataggccatgtgatgaccaatggcagaagatacatttgataggattaaatccccctatctttcgtttgtacatagaacctaagcttttcttcgtttgtacacatacctgtctatagtctttgttcgtacacacatacacttgttaatagg

SEQ ID NO: 86168 - DNA, 593 bp, Heterodera glycines
gtgtgtgaagatgaaacgcactgctgatgtactctcccatatttgaacctaacaaagtgccgtcaaccaccatcaatggagaccggccgcaaaaacttcgacatgcggccttggatgattttcgggctggccgttaccaagtggtcgtcacgactgatgtctgtgctcgtgggatcgatctcaaggaattggaccatgtgatcaacatggacttacccatcgactacacaacttatgtccatcggatcgggcgcactggtcggatcaaagaaggagcatctacatcgttttttgatctcgcggaagatgttgagctggcgaaagaactcgttgaaggactccaaaaacaagaccaagaagtgccggattggcttaagctggtggctgaggggaaaatgccacttgacgagtcggaagcagccagcggtgcaaattcggtgccgatcgctgttcgcgttccgtcggaaactgttcctgacaccaattctttgccagctgctgtaactgttccgactgataatgtggctgcaaccggtgctaattcggtgccgcttggaacccgcgttcaagacgacggaaccccgaatggagaa

SEQ ID NO: 86169 - DNA, 667 bp, Heterodera glycines
atctgttcgattgcttacaccgacccaattcgcgcttttccgcctctgatgtcattggttcccaatgggttaagagtcacgggcaaaaggacgaaacggcggaaagtgaggctgaaccgcttctgaacgcggcactgtccgaaatgcgttttggccaaaacgaggaggaggaggacggacatggggatgctgattcgtgcgattttgcggtgtccgagtcgagcgccgagtttttcttctcgagacgcgccagcatggacgagctcagcgagcagggcgggagcagcagcggaccaccgatggatcaacagcagaaaacaaatgcgaacagtgatggaaccaacaaaaagggaggcattgaagcggcaaatgttgtcggaacaagtcgacgagagagcgtccagaagcacattcaaattggcaccacgacaccggcgacattggcattggcactgaatgggacaacgatggacggcgagacagcgacgacgacgggcaaagaaacgccgaaagtgggccgacgggtggtggtgggacagcagcagatgaggaagacatgagcagacagcgactgattatggacggaggaaaagcccagaaagacggaccctaaattatggaccgattgtttgttgccaaagttgctttctgttaatcggtttactat

SEQ ID NO: 86170 - DNA, 614 bp, Heterodera glycines
caaaaagggatgaagttgaactgttcgatgaaagtcgcatgattcgatgtgggaaacatttcgttgacgctttttccgatgagagtcaaatcactgtgctcaccggagggggaactacgcaaattgaattgattcggtctttcgacgaatgcgaacttccggagccaataaagcgtaacatcgaattgaaaaagtacactcaacctactccaatccaaaaggcggtcatcccactgatcgcaaacactaaaagggacataatgggccatgcccaaaccgggacgggaaagacggccgcctttttgctgcccatcgtttgccacgtccagaaattggtggaggcgaggggaagcggagttgtgaacggcactcacccagtcgcgctgattgtggtgcccaccaaagaattggcggaacaattatatgaagaggcacgggcattcgctgcggggacctccgtctccgtctgtcacacttacggccatatgccaatggcgctgagtctgcgcgaaaaaagcgacggctgcgacattttcatcggaacgtgtggccgaattcagcaatttgtggaggagagatatattcaattggacattttgcgctatttggtgttg

SEQ ID NO: 86171 - DNA, 613 bp, Heterodera glycines
tgataaaaaattgattcggaatgggattttcgacaaagcacataattattgacggaaaagatcgtttgcttggacgttagggcgctggcacttcgaaaaaacttttgcttggccagaaaatggttattgtgcgatgcgaatccatcaacatttctggaaacttccatcgttccaagctcaaattcctcggatttttgcacagacgctgcaatgtgaatccatctcgcggacccttccactaccgtgcaccatatcagatattgtggcgcacgggtcgtggaatgcttccgcataaaaccgcacgaggtatggaagcactgaaaaagttgaaatgttttgacggatgcccgcagccgtatgacacaaagaagaaattcgtacttcccaattctcttcgccacatagcattgaaaccgcgacgcaaatattgcacagtcggccgtctcgcacacgaagatggttggcagtatcaacgcgttgtggacaaattggagacgaatcgaaaggtcagaggcgctgctttacatgagaagaaaaaggcactgctgaagctgaagaggaaggcggtcgaaaatgcaaagccaaagacggcactgttcgacaaaattctcga

SEQ ID NO: 86172 - DNA, 659 bp, Heterodera glycines
aacggacggcgacacttcgggcgcccgtgagtcgccgattcgaatggcttcgacgtgccctccacgcgtcgtccgccggcttggatttgatcggctccgacgccacgctcattctcaaccagcagcagcaaatgatacggcagggcgacaccgtcgagcccatcgcggacgaccttttgcgagccgacttttccatgccaaaactgcgcgagtttttcgaatgccaaaaagcgatgggcgtgccgaactttgccgaggatttcgatgaattttggctgctcgtcgtcaaggcgcgtcttttcaacgtgttcaaataccgcggccccgacgcgtacaatcgagttgtgctcaaaattcgtgacattgcgcaccaattgcgagcacaagtcgaagaaaatgagcacagcgatgggacggagaagccgaaaagagggaaaaagcaaatgaccaattaattaatcaattgaccgaccgatgccaaaggcgaataacggaggcaaaaacagacaaatgaccaaacaataaacaaataattgtaattgttttttaagcattttgtttctcatctctaactttaattgtgattgtgtggcgacccattttcttctcctccttttttttctttttacattacgcttttttaaagaggggttgataaa

SEQ ID NO: 86173 - DNA, 324 bp, Heterodera glycines
tagcgaagacgacgacggagaatgtgaaagttcgcattgccgtggccacgtggagaaacagcgaaagccgccgccgtcggacgatggaaatggcggcggtgggcccggcccttcgtccatttcaacctgatcaattttgccaatcatttgcctatccatttactattatttatcgatttcctttatttaaacattgatacaatgtattagaaatttaatgtataatttccatccattcttttgtgatttgtgcgttaaaattgggacaatccgtcgaatggattaaaagaaatccaaaaaaaaaaaaaaaaaaaaaaaaaaaaa

SEQ ID NO: 86174 - DNA, 650 bp, Heterodera glycines
tactgagtccgttcacaagaaatgggaagtggagcgcacgctcagttctggcgcctacggcgtggtgtttttgtgcaaggacccgttaatggacatcaaaggcgtcgtgaaggttgcgcgtgcggagtccggaagtgaaacggccgagtgggaggcagctgtcatggacaaagtcacgaaaaatacacacggaaagagcataaacattgtcaaactcctggacaagggcgttctggttgctccggacaacagtcggctgaacttcatggtgctcgaattctgcgaattgactgtcaagaaataccttagctatcgaccggctggacctccacgaagggctcgcatctgtcaagtgttgctgggagcattgaaggccatttacgacatgcacaaccaaggactgttgcaccgtgacttgaagccggaaaacatgggcattttgtcgagggccgacccggtcactgtgctttacgatttgggcatgtcacgcatgtttaccaaccaattgggacaagtgcgcgaaccacgaactgttgtcccgttcaagggcgccgttgagtgggcatcgggccatgcgctcaatgggcgtgagcagactcgttgggacgatttgatcgcttggctgtacattgctgtggaactgtttgacc

SEQ ID NO: 86175 - DNA, 591 bp, Heterodera glycines
taaaaaaaaattgcaattattctttttattcgccgttttcattgctgccaatgcttttgactctgcccaaagtgtcggcaaaacgtccgctgaggacgaagttcgagcggtaacggaaggggcggcaccgcagcggcaaacgccgacgcggaaatcgttgaaaatgttcggccacggcctacgccatcacacgggcatggatttgctgatgaaactcggccagcagcaggcggaggagcccaagtcattctcctcaatggacattcttcgcctttttgatgggcttgaccaccagttttaccacgatttggagaaagcacaatcgctttttgaagaaaatgccaaagttgtgaaaagtcttgaaaatcgtgttgtcaaacttgagagtgcaatggcaaaggcagcggagcattgcgaacccggcaaagtccaattggtctcggctcattacgacacggccattgttctgttggctttgctgattgttcttctcctgtgcctttcgttgctgttcgccaatttgatgctcgccaacttcaaacgcaaaggcgtcgtgcaaatgccgttggcaatgatgcggggagagagcga

SEQ ID NO: 86176 - DNA, 162 bp, Heterodera glycines
tggggacatgatcagggcgggacagattgcaatgctcatcaaaatgagcagagcggggatacactgaaacagtgctgacacagagtaatgattgctgttctgttatggactcccccgttctatttgctttattttaaaaaaaaaaaaaaaaaaaaaaggtac

SEQ ID NO: 86177 - DNA, 559 bp, Heterodera glycines
cacgcttttgttgcccttgccgtaaatggaattgcgggtcggaggtcgttaccgccttgagcgtaaaattggcagcggttccttcggagatatttatttaggcgagaacattatgacacacgaggaagtggcaataaaattggagtgcgtcaaaaccaaacatccacagcttcacattgaggccaaactgtacaaaatgatgtccggcggagtcggcattccacaggtccggtggtgtggttttgagggtgaatacaatgtgatggtgatggaactgcttggcccttcgctcgaggatctgtccaatttttgctcacggaaattcacactgaaaacagtgctgttgctcgccgaccaaatgttggccaggatccaatacattcacagcaaggatttcatccatcgcgacataaagccagacaattttctgatgggtctcggcaagcggggcaatcttgtctacattattgactttggactggccaaacggtatcgtgaccagcggaccaagcagcacattccatacagggaccacaaaaatttgacgggtacagcgcgt

SEQ ID NO: 86178 - DNA, 266 bp, Heterodera glycines
actcttcgaaaatattcgctctttttcggcctgttatcccaaaattttttcagttttgcgagtgtctgaatttgatttatgaacaacaaaattcgtctttgattcactccgtttatgggccatcagtgctcgaaatgggctcttcggagaggctaatgcttgtctcatcacttaaccccgaaggaatggaaaacggcggaaagaaaggaacggacgaattcgagtcgagtcaaacgaatggagccaaaaaaaaaaaaaaaaaaaaa

SEQ ID NO: 86179 - DNA, 638 bp, Heterodera glycines
  unsure (1)..(638): unsure at all n locations
cattgaaaaacgctgcaaactttntaacacaaaacaaatggaatgccaattcgatggaactgaagccggaaaatgtgctttttgtgtaaagcttccgtgtaaatttggagcagttaattgtgcagaggaagtgagcatctcttgtgtaaatccgcaagaattggaaaaatgctgcaaggcgcgtgacaacgaatgctgcgtgtgtgtgctatgcgagaaaaacaaagttatgaaggttttggtcgaatgttgcggaaagcgcaccgaaacgagtgccgaggccgggaaagcgctttgcatttgtgtgccgaaaattggtggaggcaaatgtggaggacaagtgcaagtgaaacaatgcgatgcgaagctggttgacgagtgctgcgcagctaacacggagagtggcgactgctgttgcgtctgtttgagctgcaatgaccaaaagtgtgtggtcaccgtccgttgtcctactggagaagcaaagtcgactggtccaacttgtactgcttcaaaatgcgaaagtgtgaagtgctgctgaagtcaaaaaactgatcgaagactgaaaggatgcatgcatttaactgactcagttttaaaaatgctttttcaattagcaaataaataattgttgaaaatta

SEQ ID NO: 86180 - DNA, 682 bp, Heterodera glycines
actcttcttcgccgtacgggtacacaacgtgaacagcttcaatgtcatggctactaccgtaaatggcaatgcatcatcgttggtggcaccgctgtcgccgccaaagaccgggccgtctggcccacaagtggcaattgtcagcgctaaattgatcatcaccagcaatggcattgagaaggagggcgatcaaatgagtaccgccgcctcggttgctcgccgtactccgctgtccatcgtccaaacggcgggtggcgcggtgcatcgccaactgagcgacagcatgtgctacaagagtgggcacagcaatgggagtggtaatgagaacaacgatggcggcgcggacagtgacacgacattggaccgtccggcgtactgcggggacgggttgccaccgcgttcggccaccatgccaccattgcgcagcattctgaagaagccgagggcgccgcagccgccgtcgccggttcctgccaacaatgactcgacgctgctgatgatgacgaagatggcatttgcaaatggtgccgctagtggacaacaacaacagctgcggcaacatcagcagccgaacaggttcaccatggtgccgtcgccgatgccgcgcaaccatttgcgacgcgtgccgaccagattggttttggagcgttcggtgtccgacagtgtgttggacgacgcggcaatt

SEQ ID NO: 86181 - DNA, 564 bp, Heterodera glycines
  unsure (1)..(564): unsure at all n locations
gagccttcgactaataaacacttaatgtgtccattcaaactcgaaaacttcggtgtgtatcttcctgcatggcataaacccgttactaaccgttacgggaaacgtaaacgtgtggtaagagaggctgggggcatggaggtccccggagacacggagacacaagccactgaaactgacagcaacaatcaaattgatgaagatggatggataactgtgacaagaaagcacaaattttcattccggaataaagtaagtcgatctgacgaaggcaatgccacttttatgggaatggaaggaagtgcggacgagccatacgatcgtccgagaaagaaaaaacggactcgatagatttctgacaaatatacaattcctttaaacaataaatgttatggaaaagagacaagcaaacaacgaactttaaattaaaaatggacctaatttaagtgaattagcggaaaattttcaagccactgtatttatattcgtcctcaaaatgaattactgatattatcgacgagagccattaaattgtcgaagcgcatannanaaaaaaaaaaaaaaaaa

SEQ ID NO: 86182 - DNA, 417 bp, Heterodera glycines
gcgctgacgaaaaacccgtatcctaacggccgatcaaaaccgtacatcacaccaacctcataaccgactagacaagtaccacagccaccgagcaaggtgaacacatgactatttcggagctgtgatgtatccttcgccgaaaccaaggaaacagcggtggaggcggcggccggacaccgaagaagcgcccaaggaagaacagccgagcgcggagacgaaggaaacaaccggagacgcacctgccgccaccgaagaagcgcccaaagaagaacagggatgaccggccggcgacttatgaccagcgatcgatgattggcttggtttggattgtccataccccttcttgttgtactataatttgtgtccgtcctttattcctatgtatcccaatttcgctgtgatcggtgtgtgatgatt

SEQ ID NO: 86183 - DNA, 190 bp, Heterodera glycines
cgccttggggccatttggacggctccttctggagctactcttcctccggacgaagaactccatctcgtcaacaccacgggcataccaaggccgaattcacaaacccatgccaaacattgagcaaacagcagcacccaaccaaatgcattggacagtctacacaaaattgtagaggaaaaaaacgaccggt

SEQ ID NO: 86184 - DNA, 587 bp, Heterodera glycines
tcatttttaatattaaatggttgttctgcccattttcgccgccgtcgccggcgccgtcggcgaagataagaaaaggcaacggacgggggaggccgaggagcaattggacggagacggagtgataacatcggcggagcagccgacgacgacggcgaacagcgaatgttcatcaattgtcggcgaagcgaccgacggcggcgggaaaacgccgacggggggagagacagtgacaaacgagtaccagcagcagtgccatcggaacaacatcattaacagcggcggcagctgccctttggcactttcgtcgtccgagcgaatggtcagcgaactgatcgcagcggtcattgagcagagcagacaaaggcaacagctgcagaaacaccagcaacagttgctgatcagtacgaacaaagtagaggagaccaataacagcggaggaagcgaaatgagggcggagggggaggaaagaggggacgaaatggcaccggaggagggcgggagcatttggcaacagagtaagggcgagaacggcacggtaacggcggaagctgtgccgaaccatccgacgacggcaaatgccgggggag

SEQ ID NO: 86185 - DNA, 677 bp, Heterodera glycines
aagcggactcttttgctgttggacgggtgcgtgagcggagtgaaaaccgcatgcaaaggcaaagtgaaagtcgagttcaccgagccgggcaccggcttcttctccggaaattgttacgaagaagccaaaactgcgctcgagaacgatttcgaactcagcaaagggaatgacctttctggtttttctgaaaaagacgataatggcactatcaccgaacaagcatacgacagcaccgtgttcacgttgcccgtgctgttgcagcatcgcaagtgcagcggactcggcagtgccaccatggacaacacgttcaaggacatcactctcacaatcagcggcggcgattgcgagtcgcaaagcttcaaactcaaggacgtggacgcaagcaaaggccgtgtgcaggaaatgcgcggactcgagctgataatgatcgacggcactgccaaacaatggactgacgattctgggaattatcaatacacaaagaaggatcagctgatgttcaagccgatggagaacatcgataaaatcgatgaatttgggaagttcgaaagtccatcttactgaacggaaaagaccgaacgatgccgatgaaagggaaggaaaggacgaaccgaagaccgattaattaattaatggaccaattaacagtcaaacaaaacggcaatcaacaaatgcaa

SEQ ID NO: 86186 - DNA, 729 bp, Heterodera glycines
  unsure (1)..(729): unsure at all n locations
aaatgcgggccgcgaatgaccgattttacccgcaaatgccgcaaatcatgggcccttaaaaaatggactgcaaatgtcggtttttggctgaggttacaaatgtctggaccgcaaaagtcgggccgcaaatattggaaagtggcccttaataaatcatccgcaaatatcggtcgccgcaaatgtcggtttttggctggggccgcctatgttcgggacttgttttgatcaaacagttcaattcttgactttaaaaataagagagagagagcgagacaattagaaaattttaaattcatatttaaaatattgcaagatttcaagaattaagtaattagccattggtaattgatacatatcatgaagatgagcaacagcaacgacatgagtggttatgaaaaattggggaaaattggtgaaggcacatatggaacggtaaaaaaaagtgacaacatataattaattataagttaaattataaagaatttgttaatttaaggttttcaaggcaagaaacaaggacaccgagcaaattgttgctcttaagatagtgcgactggatgatgaagatgaaggagttccgtcttcggcactgcgtgaaatttgtttgttgcgcgaactacggcatgcaaatgttgtgcgattgcagaatgttgtgcatacaaacaagacgctgaacttagtctttgaatnttgtgaccttgatttacgcaaatttatgctattgtcatg

SEQ ID NO: 86187 - DNA, 704 bp, Heterodera glycines
  unsure (1)..(704): unsure at all n locations
aggataaagccgacccggggcatggagcagacgatgcagtccatcttcccgcgcattcagtggcactgcgccggtccatgcagaccttccaagactccattgaagctgagttggcacagtggaggtactgctcgaagatgcaatcgagcaaaatggaggcattgatcagattggtcggcgaatcggttgaagttcagattcgcggccctccggaaaaggccactgcgtgcatttacttcctggaggatctgtccacattggtggagctgacgagtgccgaagtggcgcccggtatcagcacagaacggcacttcctttccccggcacatttgagggaacacagaacgacacctgccatttttacgccagaaacaataatggaaatgcaacagaacgagtcgctggtcattgtgaacagtgacggggaggaggagngaggagttcaccgatgtggtttgtttcggctccaaagaagctgccggtctgctcacgctcggcgtcgacatttccgtctcccaattgcaattgtccgcccgctcggaactcgccgctttgctggacgcaccgaacactttgggcatggactggagcatcctggcggtgaagctgaacttgactgaacaaataccggaggtcgactcgtcaggccaatcgttgtcccgcactgatcagctgctcaccgaatgggcacttcactcgcccga

SEQ ID NO: 86188 - DNA, 556 bp, Heterodera glycines
taacggcctaccgatccgataactgatgcgtgggcaccccgtacaaatttgtcggccaaccggacatctgaccaagcaatggccaaccaacggtgccctgacgactcggtcaatgcacgaactcaacaaattcatgcaaataatgcaatgatgccaaccaaccgaagcaatttgtcattgaatcagccaaatgttacgcctgtacatcgtcagaatgggccatcaaatgtcgcacaaatgttggcggaccgtcgagctggagccgttacgccgaatcatcgactggcaacaaattccaccatcagaatcgggggacaatcgtctcaattggggcccttccagcaaatgaaaatgcgaatgaactggagcatgcgaccgccctccgggcttgcagttagcacgccggtccaaccacgtccaattgggcaggcaaacaacagcagtacgtcgatgctgcgtcaattcccaatccgaggtggacgcggacaaccgcagcaacagcaaatgcgtcgcgcgccaccgccagggaattgtgatgtgccatcgccaccgcaga

SEQ ID NO: 86189 - DNA, 683 bp, Heterodera glycines
cacgtctttttgccgattcgccgcttttgccgatcagtgcgaccactttggcacatcgattattggccgactatttggaggggatcaaaaaaccaatcttggatttgagcagccaatttccgactacgtgtggaccggcgaagatccaactggacaatctgatccaaaatgggcaccaatttatggcacaggcggaagagttcgaacggcacgcccaaggccaaagtgcgggtgccaatttggcccaattagcgtgggcaaatgaccgactgagaaagttggagcaatgttttgtgaacccggcgatgggactcgcgcgggaagaaccgctcaaaaggcacgtgctgttcgctacaggaaatgacaacagttacgcggccaccacactggcaaatgtttacaacaaaattggtcaatttcgcggtgcgaaaagcgacaacgaacgcacaaaacggggcaatgaattggccttggaattgaccgttgtgcagcaggcaattcgctgtgccgtcagcacacttagcaaaggcatttgataaatcggaaggactccgaagggacaaattttgccgaaatattttgtttatcttttcaaaaggggcatttgttgaattcaaaatgttctcaaaaaagacatttatttttgaaattttaaagttaaaacacaaattcaacttttccat

SEQ ID NO: 86190 - DNA, 320 bp, Heterodera glycines
gcagtccgtttcctcctaaagaaataccttctggcagcagacttcctctgaaactgctctatcggctcatacactttgtaacgggctcctctaatttctctgttgcgtccaatttgtctcagcaaacaccaatcgctaatgtgaacaatgcattttcgttgaaaatgcgacctcccaaatcactcagtgaaattgttattaattactttagaaatgaacatttcatgtgtcgtgttcctgtcgctaactgtcctcccttttcccttttttatcctcatcgttgtcctgaaccaaaaaaaaaaaaaaaaaaaaaaaaaaaa

SEQ ID NO: 86191 - DNA, 663 bp, Heterodera glycines
gtcggtgatggaaaagacacaaaattgccaaagaatgctatgaaaaaatgggaaaagatggcatttctgctggtggaagacattggcgtggcatcaaagtgaaaacgaagccgaaaagtggcccaaacggagaacaaatgagaaactttgagcttgaaacatcatttacctctcaaatcatcaatgtcgggttgaatcgacgtcaattttcgatcagatttgatggtaatgaccaaagcgattccttcacaatgttttcgccgtcaaataatgattcgtcttcctttgccgatcagagcgaccttcaaaatgagtttttgaataatctgccaaaaagtgcatttttgggggaatttgccggattttggctgctcgggttggacatgttgccaccaatgaacgccgttccatcatcaagcctgagacacgaaaatgttcagctgtacatccaccgaggcgctcagtgcaccatggaagcatggtttacccaaccatcggattcggtaaatcccattgatcctaaagtggcaactgttgtgccaaagtcatttccaccagtgtcaacatctccaccgatgtcaactgctgatcagcaatttacgaccaatgtcactgatagcgaacaccagagcattaacatttccaccacggcatagagggaca

SEQ ID NO: 86192 - DNA, 233 bp, Heterodera glycines
cctggtcgcttgatactttccgaaaatttcgacgaatacctggaggcgcaagggtacggctggttcatgcgccaagtggtcaagcttgtcggcatcaccaaaacattttcgaagaatgagaacggcacgtatgcatgcaaaattgaaaccaccaaaaagaatgtggattggtccagcttcaaattgggcgaggagttccaagccgagtatttggacgactccgtgcacaagat

SEQ ID NO: 86193 - DNA, 685 bp, Heterodera glycines
  unsure (1)..(685): unsure at all n locations
attcgctgatgtgacggaacggtattttagcgagaaaatgtggccggacgaaaaaattgttgagaaagttgttgggacagacaatcgactgttcatcattctctacaaggagctttactaccgcgacttgtacacgcggatgcaacgcgtgaccctaatgcatcgcttccacagttacatgaactaccagagacttttttccgaaattcttaaccaaaaggacccgaacaatccgcaaaattacatcgcggttaacctccaattgcctaacatttggctttgggatatcattgacgaattcgtttaccaattccaagccttttgtctctacaaagcaaacccatcaaaacggtcgcccgaagagattgaggatttgcacgagttggagcagtcacaagatgcatggaatatttatccggtgctgaacattctctactcactgcttacaaagtctcaaataaatgagcaactcaaagccattcggggagggnggggcgagccggacgaaagtcgctgacgagtttggacgaaatgancctctacttcaagctgggctatttctcacttatcggtctgctgaggacgcatgttctgcttggggattatcaccaggcgctgcaaactgttgagtatttggaaatggatgctaagggtttgtacaacactgtgccctcctgtctggtca

SEQ ID NO: 86194 - DNA, 635 bp, Heterodera glycines
ttaacggatatcgcttggcctgcaaagaagctgtccgctacatgaccgagaacctttccttccctgttgaagagcttgaccgtgccagtcttattcgtgctgctaagacatcgatgtcttcaaagttgattggatcggagtcagacttttttgccgaactttgtgtcgatgcaacagtggcagttaaacggactgacaaggcaggcagagtgagctatccaatcaattcggtaaatgtgttgaaagctcatgggaaatcgagcaaagaaagtcaattgatcagtggatatgcattgaactgcacacgagccagtgacgcgatgccacggaaaattttgaatgcaaaaatcgcgtgtttggacttttcgcttcaaaaagcgaagatgcacttgggcatttctattattgtcgaggacccagaaaagttggaagcaattcgaagggaggaattggacatcacaaaacgccgcgttgaaaaaataattaaatcgggtgccaacgttgttctgactaccggcggcatcgacgacctttgtttgaaagaatttgttgaggctggtgcgatcggagtgcgtcgctgtaaaaaggcggacttgaagcgcatagcgaaagcaaccggagcgacattgaccgcc

SEQ ID NO: 86195 - DNA, 656 bp, Heterodera glycines
  unsure (1)..(656): unsure at all n locations
gttgaaatcacgcaaaaaaaattaccgacctaacaacgaaatgacgcgactgcgtgccgaaaatgaacaattgcgcaagcgtgtcatggagttggaggaggagacgaagcgattgcaacaaattgagcaacaacaacaggcggagaagcgcatgttggccgagttggaagctgaggaacaacaacaacagcagcaatcgcatgaccaaggagcaggaggagggcacaagaagatgaagctggacggcggtgatgaccacgagggattgccgtcttcggcaacgacgacgatggctgaacaacaaagacagcagcaacaacagcaagaacagtcgcatttgatggacgaagaaatgatggtgatggacgagcatagccttggcggcgtggatgctcatggcgatgtggaggcggaagaagtgttgcaccatccggacgtgccgaacccgccgatgacgccgcctgtgccggaacgaatgtcgccctcggacagctatgggctgaagtttgacagcgatgtgcaggacattgttggtggtgacgatgatgacggagtggagagtgggaaggaccggtgctgacgaagtgttgtacgctcatgaagaagttgaagggaggcgaggagganggcgtggatgaatatgatgaagatgaaga

SEQ ID NO: 86196 - DNA, 553 bp, Heterodera glycines
cgcttgcagccttcacccaaatatgatggcgccaaatcaacctcctatcagcccgatgggcgaaaggtggcaatacagtacggcactggctcaatgaaaggatttgtttccaaagacattgtttgtatggcaaacatttgtgtacaaaaacaggaattcactgaagcgaccagtgagcctggcctcaccttcgtggctgcgaaatttgatggcattcttggcatgggattttcggaaatttctgtccaaaaattgccgaccgtgttcgacaacatggtcacgcaacagaaagtgccggagccggtgttcgcattttggcttaaccgtgacccgacctctgaatttggtggtgagatcaccattgggggcactgatcagcgacgctttgtggccccaatcacttacacaccggtcacacacaaagcctactggcaattcaagatggattcgatcagtggaggtaatggcaaacttgcgtgccaaaatgggtgccaagccattgcggacaccggcacttccctgcttgctgggcccaaaaatgacattgaaaaga

SEQ ID NO: 86197 - DNA, 710 bp, Heterodera glycines
caaccccgcttggcatgctactatcgcgagatcactgcgagctcatttgccaagatcagcgttgacggatgcgtcattgatccgggatcacacctttgggcatcaaccaggctggctacgtcctgcacagtgccatccatgcggcgcgtcatgacgtgaactgtgtgctgcacttgcacaccgcgtccgcagccgcagtttcggcaatgaaatgcggacttttgcccatcatccaagaagcaatgattttgggtccggtggcataccatgaatatcgtggcattctaacggatgtacaagaacggaaagaaattgtcaaaagtttgggcgacaaaaaagtgctgatgttgcgtaaccatggcttcgccacttgtggcgcaaccatagaggaggcctttcatttggcatacgaaacgattgtcgcatgtgaaacacaggttgccgcaatgcgcacagatttgaataagaatttggtgcttcccagggaatcggcggttgcacatgcctatcaaattgccaagcatggaaccaatggaatgaatcgaacagccgttcccgaagagaatggcaaaatggagcacacttttgaacgcatgggcaacattcagtggggcgttggagaattggagtgggaggcatggatgcgccagttggacggagccggctaccaaactggacacaagtacagattaccgattctgctcgaacca

SEQ ID NO: 86198 - DNA, 419 bp, Heterodera glycines
ctaccgctgactgctgccgcgcgaggacgtagtggagctgctgccgaacgacggggacttcctggtgcgcatgacagaataaatttcgggcacggagcgtgtgtatgcactgtcggtggacgtcggcggcttcctgaaccacgtgatcttccgccgacacaagggaatgttcaccgtggacctcaactccgacaagggcttccgaacaatcgaacgattcgtcgacaattatctgcgcaccggagtttccgtcaccactcaacaatacgtcgctctcatcatggccgtgccccgcgcgcactgggagctgtcgcacacttcaatcatcctgggcaatgaacttggccgcggcacgttcggggtcgtcaagagtggcgtctacgtggatcagcaggggactcgagcggcggtggccatca

SEQ ID NO: 86199 - DNA, 281 bp, Heterodera glycines
attcgcttcgattcggctaatgactttttgcgcattagcaatgcttctttatcccctctcccataatccctcccaattttttttttattgctgatcaggatttattttgcttctgctgctgatgatcctttacggatgaccaatgggatcagtcagatcaacccgtgggattgtttggatttgtgtcaaaataattttccgattttatcgctagagcttggatcaccggccggctttcgctgaaatctgggtcttccatagattttttttttggggggggg

SEQ ID NO: 86200 - DNA, 619 bp, Heterodera glycines
caatttcgaaaaagggatttgaccggcaactcaataagaaaaattttgaaatggctaacccaattgcaaccaaaaaacaaaaagtaaaattgtcttacgaaggccacctttacaccttcgctaaaatgagttctgatgggatgacaaaattttggagatgcgagttaaaaacagcaccgacaaatgcaacggccgaatctggacggacctccacgaccaattcattcgcctcgcaactccgcacacatgtccagcagatgcgtcacgtgttgatgctcaaatggtcacgaccacaatcaaaaggcgcgcaattgccaccttcgaaccgccttctgtcatcagagcagaagcgcttcaaaatgtcccgtctccgtcggcaattttggtgtcaaaacaagcagcaaaagatgtgaaaaactgcaccgattctgtgtttgccgagaacgctcgaatgatcacgtctgttgcgttcgtgcccttgtgtgacattagaatggcggtagcggcacttgatacggagttcggaaatttggcggttttccaaccgctgattgactggtccaatggcacatggtctcaaccaacttttcgccctgaacaatggaacgtctacacacgc

SEQ ID NO: 86201 - DNA, 583 bp, Heterodera glycines
ggctgttagcggcaaactccaacaacattgttccgccgcttttcccagctgctgatcaatcgatttgcaatgtgaaacgaaccgaaacttttgactcttttcgccatttccacgaaaattaaaaagttaaactgatcaatttatttatttattgtgtatttcttttgaatgtttgttttctaacagttatttttgatcgtttttaccactgatctgtgcttttggtcggcgatggacggaataaatcggtcagttgagctgaaccgctccttccgcctcacccggtcgcagtccctctgcggcattcgttccacttcggccggcaattaccccgtcatcccggtccgattggcactcactcattcgccaattttggcattctttcactccgtgccatcccattcagcgcacttattccatctgcgacttcgatgactaccggcgcgaagtgatcgcccatccgatcacttggccccgtgtgcccgtctttcggcccattcgctccgcttatgtgtgccgcccccattggacttaccgctcctattggccatacaacgcgtcccgctttgagagccctccaatt

SEQ ID NO: 86202 - DNA, 605 bp, Heterodera glycines
agaaagttccgaagctgttggcatggaacatgaaacagcgctcgctgtgccggcggacccgcaaagtcagcattccgaactgctggagatgaacgacgtgttgcaatgggagatggccactaggtcggaggacgagcaagtcctcgaccctgagggtgaccttgaaggcttcacggtgttgattttccaaaaattggaaaaattcttgcaaaatgtgccaccctcggaggagtacacaaaaattacggaggaattggccaaaatggtcgaaaattggaagcagtcggtgcaaccaattgatgttgatcaagaaactaggcagctcttcgaggtggagaacagcttggaaaatttggacgaacagctgaccgaacagaatttgagcggcattaatgcaactccggcagttttggacattgtgcttgacatcatcaaaaatgatgtacatgaaaaagagaagtcagaattcatgtggaaaatggtcaaccgaaaggcgacacattacgtgaaaaatttgggccaacttttgggcggcattccaattgccatcaaatacttggaccaagtggtctttgtcggcaaatgggctttggataatagtttcc

SEQ ID NO: 86203 - DNA, 572 bp, Heterodera glycines
taaaagatccgaaaaaatgccaaacattttcaaaatccttctgattgtgcttttggccgtcgtctcattccgtctctcggcttctactggtgacaaaaaaactgctaatgatgggagtggaaacaactcatcagctgggattggtacgaagatcaaaagaattgtcaccgctggactgctcttcacttccctggcgacgggtggggcggaagcgattgggcgaagcaatgctcagggaggaaatgccgccggattggtgccatcgcatgtgaccaatcgctcaatggctccaccacctcctcctgtgcaatttgaaatgggggcaaatcgattagaaaaaatgagggcacacctacgcgaacttgctgagaaaatgccggtcaatgaatcgaagcgtctgtcaccgagtggacccgacccacatcatcattagggccatggatggatctaacggaggaagaaagaatggatgcttagttttcagattttattctatcctcttttatttattagtttttcaaaacaaatttcttccacaactttttaaactatttgttgttttgaatcttttt

SEQ ID NO: 86204 - DNA, 742 bp, Heterodera glycines
cattctaacgtaattattctgctctttgagacatcattccaaataagccaaatcgtcaaaaatgaaccgacgctggctgtgcaatgacgtttggatggacattctgccgttttttgaccgtcctcagctcggcctcaaattggcaatgctttcgccccgtttcaatgcgctggtggacatccatttcgatgccaaaacggaattgacgctttggagaccaatcgcaattcgcaacgacggtggcacagcgacgccacacttagcggtgttagtcgacggtgtccattccgtgccgtttgagttgcccgacgcccattcgccgccaatgccaaacaacattcgctttaaggaccttcgaattaattgcattgaccattccgtgatcgcatttcttcgtgccaatcaactcattttccagaagggcaccaatttgcgtctgtcggctccttttggtccattcaacattgatgatgtgcagccaatttgggatgattttgcctgtcgaatttggcccatttttgcgtcaacaattcgccacttttgctttccgaacggccatcatctggacatgttgctccgtctcgtttcgccgacaattctcacggatgatctgatcaacatccattcaatcgattccggtcgtcagtttcccgaagcgattggtgatgatcattttgatgggccaacaattacaaattttgatggatcaattgtgacttctgttgctgctggtcaagcgttg

SEQ ID NO: 86205 - DNA, 671 bp, Heterodera glycines
atttatccgaccgataacacaaatttaatggcagcgctctctccgatcagataaatcaattagagaattggcattcggccaatcagcaaaatggaattcatagtgaaaatgctccattcgattttgaaacagaccgacagaggagcgaaaatcccgaaaacgctggcgaattggccgcttcgttacgccaacgctgcgtaaaagcgccaaattcgaaagggatggccgacaaagagacaattcgcttggatggccagcagcagcaaaatgatcaacagcagcagcaaaagcgctcacaagaacagtcgtggcatcgaattatgatgctgatcattgccataacggcacataatttccccgagggattgtccgtcggcgttggcttcggcggtgccggccggtcggagtccgttagcctggagaaggcgtcaaatttggcgctgagcattggcctccaaaacttccccgagggcatggccgtcgctttgcctctggcggcctttggccactccaaatggaaggcgtttttgtacggccaaatcagcggaatggttgagccaatggccgctctgatcggcgcttcgcttgtgctaagcattgaatttgtgctgccctacgcactttcctttgccgccggcgcaatgattttcgtcgttttcgattcaattatc

SEQ ID NO: 86206 - DNA, 700 bp, Heterodera glycines
gacggtcctttgggctcttccttcgttggcactgccatcccgcaaattgcgtacgaagtgccacaaattgtgcactgaatcgaccacaacaacagcagcgggacaccaaaaggaagcacagccgacggatgagggggaagaatattacgaggaggaatatgaggaggacgagtacgaagagggcgaggagagggaggaggaggccgagaacatcagcggggacgggtcctgctccaattcgttggcctcgtcgctggagggcgaccatctgctgcgcgagcccccaaaagtgttcactacgcctcaccatcctccacctccccccgccgccgttcactcgcatcaccagcagcagcgtcagcctcagtttccttttgatgggaaacggcacttttccaacggtttccatggccatgccaaattgggacacaaaacggtgcaggcgatcggcgacagtcagcagctggcggccgagttggccaagcaggggctgcaagtgatctgtgcacccgactgcgagccgaaggcatttgccattttgattgactttgtgtacagtgacttcgacgtgcgttcgctgtccgtccgtggccaattgactgatgacaatgtgatgaacacgctttacgcagccaaaaaatacgccatcgatgcgctcgtcacggaatgcgtgcgctattgcaccgcgcgactgaccgcg

SEQ ID NO: 86207 - DNA, 685 bp, Heterodera glycines
ttggcgcaattcggcgtcagtattacgcgatcggagtgggatgacacttgcacggcttgattacaacgtgaagggtccgacctgattaggagttggagcaaggaggatgtgtccaatggggaaatgtctgcgcatcatttcggcaacgggggaccgtccacctctcaccagccgacagcaaatcagcaaagacgcgactcgccgcctaaaagaatgcagaaacaatcgcagcaaaagcagaagcaaatgtcgccagacgagtggttgaagaagttggaggccgaatcgggcggccttcgagacgaagaggaggagcaggcggagaaagacgtgctgaaagggagcgccggggagagcatgcggaagggagcgaaagcacagaaaggcaacggggtgattaggagagatcagcaacagcagcagcaacacgatatgaacggaatgaatctgaagggatcactcggtggacagaatcggaggcggaagaagagctgttgctgcattatttgatcacgccttcgccttctccccaatcgcttgttgcccctttttcgcattttggtcatcctttgattcgtgattaaatatatacgtaaattgtatcgcctctttctctatttctatccccaaatggtcattcgttcattcagctcacaattcctaccaaatctgcacatttaaagag

SEQ ID NO: 86208 - DNA, 596 bp, Heterodera glycines
gcaggggacggaattggcgacgaattggcccattttttggccggtcttccgcccgtggatgaattagggcaattggtgctgaacaagttcaatactcgtgcgaatttgcccaacttctctacaccggcggaggccatgtggactcggtgttctgcaatattttcagcggatatccgcccactttcttcgaagaattgatcgagtacgccctcacaacgcatcgtccggatgcgttaatccgtcgcatttgcgtttggctggccgcggatgagccttggcccgacatcgccaccctttttccctccgctgtccaacgccgcgtcagcaacgaccgcgtgctgtacgaattccaaaacattggcaaaagttgcggccagcagcagcacaaacggtccgaatttgtgcttcgcattcgtgcgccttcgcggccaatgctttttcgggcgatgagcaatttttctttgtgccgaaaatgagaaaaaaaacagttgcaatcttttggccatttcattttgtattgtattcaatggcatcgtctttcctttctccctttttgaacgccttcactttttttgattgttttttcttgcccattg

SEQ ID NO: 86209 - DNA, 393 bp, Heterodera glycines
aactgcgctcctctccttcactagattgagtggcaggctgtctggagcaggtgccaatatgggcggagatggcgtgcaacttcgccacctgctgatttcccagggtgttctgtcgtagctagccaggctggctcgactgcgccgatactttgggcatctccctcggctctttcctacctgcggctgctccaactcgtgccgccacaaaaagccacgagtgccattgcaaatggacgccctaacggcaccctgaatgaccacactgctcagatatgaggacaccaccgcccaaactgatgccacttgcgcacttacctatctgactcgatggaaataatgacaacgtttccctcggtatgggctgtctttcggacatggtcactttcatctcgt

SEQ ID NO: 86210 - DNA, 618 bp, Heterodera glycines
tagttagatttgttttgcttatttgatctgaaaattaatcagaatgaccagcgaaaagaatttgccgttgacaattggcgtgtgtgcttcttccgttgcgctcggctgtattgcgtacaaattgttgcagcgcaaaggctcccagcaagaacttctagacgaaatgactttgaggaaaaagaaagacgaggcacagcttatggactcactgaagttggacccgaacactccgctcaactcacacgagttggcccttgcttcactcatctcattttccgaggatgccgcttcgttcgagaaagtgggcggctgttcttccattttggaacttctgaggcagaaagttgttgtccctcttcaactggcgtccaacaggaccactcttccgtcgttgctgtacagtgcgccgaaaggaattcttctttatggaccaaatggttgtgggaaaactctgattgcgcgtgccattgccaaagaggtggatgcgtacttcatcaattttggaacttcgctcgtcgattttgtcaacggatcatccgttactatgaagtctctgttcactttggcagagaaaattcagccgtgtgtcattttcatcgatgaaattgacttgctgtt

SEQ ID NO: 86211 - DNA, 450 bp, Heterodera glycines
ctgtttccgctgcaaaagacccacttattctaatgacaaagtcggcccccttaaggacggagttttgttcccaagggatgctttaaatgttggatttgtggaagccgtctctccctaaaatcgtatcataacaacagaaacgacaaccaagacttggagttcaggtttactgtgctggccatgtcccaacgcctggaccgcacgacgccattcccttccggtcgaatttgctttggtcgccaaaaacgaagggcgaatacccgcacaatttgatgcagacgtaaaacaattcgaacgacgcgacggaaccaatcaaagcattgctcagcaaacttagaacacattttctaatcagagaacaaatggacggcaccactcaaatgatttttgatttaatttgcacaaatgataaattctacaggaaaaaaaaaaaaaaaaaaaaaaaaaaaa

SEQ ID NO: 86212 - DNA, 183 bp, Heterodera glycines
aaaaaatgggaaaaaaaaaaaaaaaaaatgactaaaaaaagagaaaaaattgaaaatatataaaataaaagaaaaaataaagcaaaaaggaagaaaacactcaacaaaagaatggaataaaattgaagaaaaaataacgaaaaaattggggacaaatcgaaaaaaaaaaaaaaaaaaaaaaga

SEQ ID NO: 86213 - DNA, 673 bp, Heterodera glycines
ataattcgtttcccctccaaatgccttttctgtcccttttctcttccgtctccgcttttgcccttctctctctcctttccttttcttcttctgtccatcacttccatcataaccatcactccgattcgtccaaaggacacaacggccatcatcagcagaaggaccatcaaacggcacaagaaattccttccaattcgttcccttgcgcctgcggcggtcattcgtccggcggggaaaatgcgcgatggatgaacggaatgccggcgaatggagttccgttgtttttgtttccggacaatgtcttgcgattggtcggcgtcgttctccgaagtgaaaatgcttttcatagggacaacaacgaattggcgcggcatcttttccatcttttggcccaccagttcccccgaaaatggtttatcgtcggaatcggcacaatgccatcgaatggtgcgaacgaaccgaaaatgtgggcccgcgaaggaatcgacgcactgaacgggactgtacagttgcaaagcccgcccggttacgacagctttccctttttggacggacggcgttttcaacgagaaaacggaagcaaaatttggtatttcgtatatgcggtggggccaatgacggacaaagcaaaggacggattgccagagcaaagcttggcaaagtgtttgtcgga

SEQ ID NO: 86214 - DNA, 651 bp, Heterodera glycines
aaatttattaatggagaaattggcaccgcaaaattattgtctagccgattaacagcatcatctttggcaaaagctgcccaaatggaattggacttcatccaaagcgttttgttgggcccacagcgaggaaatttgacggcaattgaatgtttattggcacaaaactttaacaaacagtcatcaatgatgccaaattatggcacggaacgtaaaaatgcaaaagtaccaaaattagaaatggaaaaggctggtggtggtgatgaagccaaattggacaatggaagcgagaccgatcaaagtgatcagaagcaaaagagaaaaggggtgggacgaccgaaaaggcatccgagtgaatgcaaagtgtgcgggaggaagagcttttactgttattacagtgtccgatgttgtgaaagctgtaagcaattctttcgtcgtattgttgcaaagcgaacattgttaaactgttttggagcgaaaaattgtcaaattggaaaagatggcattcgatgccgcggctgtcgcctggacaaatgccttttggccggcatggacccgacaatgatcaatgcaatgcaacatgaaggaatggcccaatatttggacagactggaattgcgaaaaaggagtgctttgttgagaaagaattgcaga

SEQ ID NO: 86215 - DNA, 605 bp, Heterodera glycines
aagatcctaaaaatgtcttctccgtccgtctctctgctcgccatcgtcgcaattttctgttcactatacaaatgttgcgtttcggcaccgcattcgtgctgtcccggcagccaaaaagtggtttcgctgatggctaattacgttggcactttcgcccattccttttccagtcatactttgttcggatgcccaaagtgttgcgggcgcattgaaaggccaactgatcggttgcccgaaaggcggcgacgcaattcttttggccgacattgaggcatctcttggcactcattttgctgatgagtgtgcccacagccttggcttcgtccgtgccatgttcgccattgccgcatccgcttcttcccatgccagcaacaacaacgaatggcaggcattgagtgcccagtttggtcagcaaatcagtgaaattgactcgaaaagtgccgagtttgacattggcattgccaaagtgccatttgacagcccaaagggagaccactcccaacgtaatgtgcctggcacgaacagtgtgatttccatgcctggatggaccggctcacacaaacactgaaatgaataatgagtgactgaatggaatgaaatgattg

SEQ ID NO: 86216 - DNA, 686 bp, Heterodera glycines
cactgatattttggttttctctctctatctcaaccaacaacaacaactcaatgtctgacaaccgtggtgcctccgttgcttcgaccggtacgaccaacagtcaggagtctcaagtggcgtctccagtgaaagccggaaaagctactacgaagacgacggctagcggaaagggcggcaaagcgaaggcggacggaaaagtgaaggcgggcggaaaaggggcgaagaaggcgggcggaaagggtggaaaagtgaagattgctgcgagcggatcgaagaacacgcgctctgctcgtgctggcgttgcatttcccgtcggacgtatccatcgtttgctgcgccacggtcgccatgctcagcgcattggggccggagcgcctgtctatatggcatcggtgttggaatacctggcggccgaagtgctcgagctggccggcaacgcggcgagggagaacaaaaagttgcgaatcactccgcgccatttgcaattggctgtgcgcaacgacgaggagttgaacaagcttctcgcggaggtcaccatttctcgtggcggtgtgttgcccaacattcacgcggaacttttgtcgaagatgcagcagaagaagcagcagaacgacgacagtcagtgaacggttgggaagaagaaacggacggatgaacggatagaaaaatgaatgatcccaaatatc

SEQ ID NO: 86217 - DNA, 690 bp, Heterodera glycines
cggcaccggtttaatggtccatattttaaaaaagacagctgtggcactcgccctgcaaagccccttattacgggttcagcaataagattgccatcctcctcaacaagtaaagcaccgccgatgttcaaccaacgtaccaataccaaaaataatgtactcgagaatgcggtcaaaatcccaccgttcaaagagctgcatgcaaatccattgggcaatggcatcgaattggcaaaacatgggcaaatggaaaacgaaatggcggcacactttcacgaccagcgaaaattgtccaccaaatcatcagtggcggaaggaaagtttaacccaaagatgaggacgatcgacccaaagttttatccgcaggcgccacgaggcaatgtcaaggacacttacaaaagtcaaagtggcaaagaagtgaaaaaaatctctgtccccgatccctaccgcggcttggagaacgcaacagctaatgccactaagcaatttgtcgaagaaatcaacaacatttcacagcgttatctcaatgcgaccccagtgcgccagaagctaaaccattcgcttactaaaatgtggaactacgaaatattcttcacgccagaattttgtggcggtttattctattattatcacaacagcggcttacaaaaccaaagagtgctctaccaaactaaatccctgaacagtacggga

SEQ ID NO: 86218 - DNA, 682 bp, Heterodera glycines
caatcggtggaacggaaatggcgtatcggaacgacaattgcacgacgagtggcggaaacggcggcagaatgccactaattgaacatgtggtgaagaacggggaaagtctgatgcaaatttcgctgcaatattcagtgccggtctccgaaatcaaacgtgtcaacaacatcgtcgcggaccacgaaatccacgggttgcccctgctcagaataccaatgactcgcgcctttctgctgagaaggcaaatgatggaagcggaggaagagataggcggacaaagcgaggccaaaataatcgacattttgggcgacgagggcacatcgacggcaaattgtggcacattcgacgcaatgacggaggaggacaacaacgaagggatgagaacgacacatcgaaatgtgatgaaggaatttggaagtcatcggagccaaacaaatcgacaacaaaacgcacttagaaaaacggatttcggtgctttactcaatggtcgacaaaacgacgcgctgcggagctccgatgaaagtttggcagcctacgcgaaggaagcgattgagggcattttggatgagacggatcggaatgtggcgaccgttcgacagaatttgccctccccttcccttgagggggggcgcttttcatttcgtcgatgccggtgtgcccgacaattcatcgaatgtttggc

SEQ ID NO: 86219 - DNA, 730 bp, Heterodera glycines
gattttgggtgagtagcacaaatggcagtacaagagcgataaaagcagcagcagatgcacaaagaatttgcgaaaattgagggatggacgaagtgtggactttgacccgcggcagatgtgcaggcgtataaaagggcgaacgaaatgaccgttccatccaacgccaagcaaatcgcaaatccagcgattcattcagtcatttgcctacccaatttgtgaatgaaattcatggcgaagggcacaatgcattcgcaaattaaagcactaatgaccaacggtcattcttcccaaatgttttcccctccctcccattttaaatcaaattgcaaatcacaacaaaattcacagagccaattcaactccaaaagccgaaaatgtctcctgttattgcccctttcgtcctcgccatcattggcatcatcgccttgcccaccatcgaaggcgcagtcgggcgtcagcaagtcaagctgggcgagcagtacaaatacgagaatgtgcccggcaaattgatggtcaagcggcaaactgcggccagcaaggagccccagtatttgttcgccggtcaaacggcatggaccacggacggaaaagaccgctttggccatgccgagttggacttcgccactggcacaatgaccatccccaacttctccgagaacgacttgggctcctacaccttcccgcttgagcagcccaacttcagcgcagtgaatgggcccaacggatgcga

SEQ ID NO: 86220 - DNA, 383 bp, Heterodera glycines
  unsure (1)..(383): unsure at all n locations
caccgcccgtcgtttttacttttcgagaaaaagcaatccatcaaagtgacaattggcatttgttgccttcggtacagtctgaatctgttcaccaatgtcagttggtcttgccaataaacaaatattctgtcacttcattttcctcgaacacccaaaaaatcaaccaccaaagaaattctcgtgtctccaaaatggaacatttcgaagggatctctcactgcaaaacatctaccgaaccgaaggaagatgaggagaatgctgancgactgttgaaatattcgaggaattgcctctcacaattgccacaccaaagcggaaggaacgaaatgttttctgcgaaaagcatttcccaacaaatgcgaatgccgttttcgctgtggcct

SEQ ID NO: 86221 - DNA, 606 bp, Heterodera glycines
tcatgcgccgccttttgtcacttttgcaggaggcccaaaccgattgcactgacacagagtgttccacgagcactggcggcgaccccacgggcactgccgggtccaacgttctgctgattgccatggcctggggactgtttgccatgcttatgtttttcatgcggcctgcttcgatgcgttccggcggaaacgatcgcgaaaatggccaaatcgcgggcaaaccgtcgtcagcagcgaacggacacaacaacgatgatggcaatggcccaccgcccggcgacgttttctgaatacagcgaaaggaacggaggagacgaagacgcaaacatggaattttttgaccagcgaatgccttttccgtcgacgatcactccatccgtccttcgatttgtcctccatcactttccctccctttttctgtcgctttgcctttcctttcgtttcgctgtctcccaaaaaggctgatgaatggcatttttcaactttgagctccgtctcaaaattggattgtttttctttttgccggtgcttctccccccccccccccctttctcccacatttctttctccgaatttcgtgcaaaaaaaaaaaaaaaaaaaaaaaaa

SEQ ID NO: 86222 - DNA, 681 bp, Heterodera glycines
  unsure (1)..(681): unsure at all n locations
cgtctttggagagaaagtcgctggtaattccacgaaaaccgaggtaaacgaacagggcgaattaagcgctgtggtaaaaactgaggcggagagtcaaaactcaacggaagtgcaaaattatgctttggtggaccttgattgggtgaacaactcgcagaagagccatgtgctcttgcagatgatgaatgcgatgggctacgaacatggcaagggacttggcaaaagggggcagggcattgtggagccgatcaaaaccaacccaaaccaggggaagaaagcatttggggccaaccacgacagccgacgagaagggaggcggaggcgaagaacgagggaaagcggacacatggaaggacaacaaacggacagcggaaaaaacgcaatcgccgaacagcagcaaaaggacgaatggaagagacggccgaatccgtcacggagggcgcaaatgcattacgaagacaatgtgagggacacgctgaggacggcggggctttccgaacaatcggcggaggaaatttggcaggcgcttggcattctcgcgaggcaccaaataatgccacttggcatgggacttggacttgtaaaacggcgagcgggaagaagacgcattgaaatggaggccaaaaacgaagggaaggcagaatnttgaagtgacatggacacattaattattctttgtga

SEQ ID NO: 86223 - DNA, 707 bp, Heterodera glycines
gattggcaattccttcgttcggtcgaatacttcgctgagaatgaaattgacatattcgccattctgtttgtggcattgtttattgccatcgctgaagcagatggcaatgtccgggcaaaacgccatgaagaacgattgaagcgccaagacaaccgagctgatgaggagaaccgccaggtagacagtgctgatcgggagaagcgccaagacaaccgagctgatcgggagaagcgccaggaagacagtgctgatcgcgagaagcgccaagacaaccgagctgatcgggagaagcgccaagacaaccgagctgatcgggagaagcgccaggaaaacagtgctgatcgcgagaagcgccaagacaaccgagctgatcgggagaagcgccaagacaaccgagctgatcgggagaagcgccaagacaaccgagctgatcgggagaagcgccaggaaaacagtgctgatcgcgagaagcgccaagacaaccgagctgatcgggagaagcgccaagacaaccgagctgatcgggagaagcgccaagacaaccgggctgatcaggagaaccgccaggaagacagtgctgatcgcgagaagcgccaagacaaccgagctgatcgggagaagcgccaagacaaccgggctgatcgcgagaagcgccaagacaaccgagctgatcgggagaagcgccaagacaaccgagctgatcggga

SEQ ID NO: 86224 - DNA, 750 bp, Heterodera glycines
gaatatgagtctagcttctatttggaatatatacggcgtgatgttgacattccaaaatcagccccaactgaattactgactgagaagcacaaagaatttttactttcctatggtcaagaagagaagtcgtttgaatatatcatggctgagcatctgaggatgagtggcatttactggtgtttagctgcactcaaagtattgggagaaaatataaacgacgaagaaaaattagctgacctcatcaaagaaaatcaaaatgaagatggtggttttgctgcggctgatggccatgactcacacattttgcatacactaagtgcgattcaagtggctgttatcattggcagactcgatattataaatttggatgcgaccgtcgaattcattaaatcgttacaacaaaatgatgggagttttgccggtgatcacgggggagagattgacacgaggttttctttctgtgctgctgcatctctgtattttcttaatcgtcttggttcaattgacgttcataaagcagttgaatttgttattaactgttacaattttgatggcggctttggaacaaggcctggctctgaaagtcatgctggacaggtttactgttgccttggaacactctctgtttgtggttgcttggagcttattgatgtggaacgaaccgcaacatggctggctgaacgacaatgcccttccggcggactttgcggacggcccgagaaactgcctgatgtgtgttattcttggtgg

SEQ ID NO: 86225 - DNA, 423 bp, Heterodera glycines
  unsure (1)..(423): unsure at all n locations
caatccgcaaaatgtcccttttccgtcctcaatcgctgcttcttctggccgctctttgcctgtcctttgcgctgctctttgtcacttcgtcggaagagggagggcgagtgaagcgcggcggatggccttgggattgggccggcaaacaactgtgcaaaacatcggcaaattgcaagtgcaaggatggcaaaaattgggccaaatgtgtaaagtcggaaggctacgcggccagcaattgttgcgacaaaaattacgtgtgggcatgttgcgggaagaagcccaaacattgatgagagaagagaaagggagagaatgagaagcgagttcacataattcattctgttttggatttttagtcttttttttctttttgggtttttttggtaaatattttctccannnnaaaaaaaaaaaaaaaaaaaa

SEQ ID NO: 86226 - DNA, 564 bp, Heterodera glycines
gtaccctccgttgctgcacaatgccaaaatgcgcagcactttccatccgccgatgggcgagggcgagcagcacaaacagcagtccaattcgagcgtcgcttcgtccgtccgttcttcgaccactttggacgggggagggccttcgtgttctcagtcgactgctggcgatgagtcggacagtgccgtcgctgggggcacaacgccgcgtccctttggcatcggcagcggcgaatttgtcacggttcagcaccatcagcagcagtacaacaccaacaacaacggcaccaatggcgggacgaaaatgcacagcacattcagcaggtgtccaactgcggaatcaaacgcaatgctggtgatgaacaacggtgaccatctcaacgagtccttctccattctttaaagatcttcaaccgtgaattttgtgatatgaattctttaaagtttaaacattcaaacgggggatgttcatataaatcacaaaattcccctctttaagttaaatatcactattttcacctgctctattatttttttattttcaaaccagataaatattaatttttg

SEQ ID NO: 86227 - DNA, 747 bp, Heterodera glycines
ccgttttcgaccgccagacgtggcacagccgacgctgtccctttctggagtgtccgagtatttcttgaacattaaattagaaaaaactgaacgcgaaggcaattggagtcagcggccgctccgtctcgagcagaaaaaatacgcggcgcaagacgcgcactgtctgaatcggatcttcagaattgtggcatcgaaattgaaaagattgaaggacaatgaactcgccaaggagttgaaacggcactcactgatcgatttcaacgaagaaaaggcaaagccaacgatggcaattccgctgctcagcggacaattggtgcgagtgaaggaaggcgaggaggacttcattttgaacgtgcaaaaagccgccgtggaaattgagcgatcagccaacggagtgttggacggcttcagaaccattggagatgtccgcttcatcgtcgactcgatgcttttcgggttgggcaaacgtttacgcaagtgcggcttcgacacgcgaatgattggcgaccgtgaacaaattgtcgagttttgcaagcagtcgaaggacgaaaaatttgtggtgttaggcgccggcaaaggacataaacagctcgccctccaaatgccagacaacgaagtggtcaatgtgccaattgcgaccgacggcaccaccccaccttccctgttggtcaggaacttgttggacgaactccgcatcattctccgtccttccgacatgtggtcacgctgtgtggagtgcaacaagcg

SEQ ID NO: 86228 - DNA, 343 bp, Heterodera glycines
aacaaccgaaggcgatcattgacccgacataaagagatcagagatcggaaacaataacgtgaacagtgcacggggaagacgaacaactgccgggataagacttatcgcagaaggaaaatccatgaacatcgcgaactacacaaggatggaggaatatgaagagcggagtcagcatgctaaaacaactcggacataaaagacccactgatgagagtgtctaaaaaggacggaggcttgaacgcccgtttggcacaccgataatgacctatcaccatgttggaatatgttgtgagacaaagtttcatgaacctgatgaggtctatgtaaaatgttattgtggtac

SEQ ID NO: 86229 - DNA, 157 bp, Heterodera glycines
aggtgtcctaaggcgagcctagagaggacggaaacctctcgtagagcaaaaaggcaaatgcttacttgatcctgattttcagtacgaatacggaccgcgaaagcgtggcttatcgatccttttgaatgtgtaaagtttccagcaagaggtgtcagaa

SEQ ID NO: 86230 - DNA, 521 bp, Heterodera glycines
acgccgcactggacattctgccggattttgcgtttgccgtgcccgtttctctgttcgttgccaatccgccggctgcaattctatgggccggatggttggcggttggagagtattttgccaagaaaagttggagtttggttctgcgagatatcgttctgccaacaaaaagtggtggaaaatttatggagttactgcagcaaacagaagtgccagttgaaagagtatttccaaaggaggttgaggaagatgctgacaaacttggcgaaggaagcaaaggccaaaaagaaacgatgccagtaattgaagcgctggctgccagtcaggtggattccaacctgtaccagtacctgttcatgaacactttacgcgcctattacgtgaccgcgaccagcatttactcacattttatggaaaaaattgaattagccaaagacgaacatgcgatgacagaatttgccaaggacgtgaagaataagatggtcgaaaatgaagttatgaaggaaaaaaaaaaaaaaaaaaaa

SEQ ID NO: 86231 - DNA, 681 bp, Heterodera glycines
caattattctgctctttgagacatcattcgaaataagccaaattgttttttaatcgcccccaaaatgaaccgacgctggctgtgcaatgacatttggatggacattctgccgctttttgaccgtcctcagctcggcctcaaattggcaatgctttcgccccgtttcgatgctcttgtggacatccattttgatggcaaaacggaattgacactttggagaccaatcgcaattcgcaacagtgtcgcagcagtgccagaattacatgtgtttttcgacggtgccaacaaatccgtgccatttccattgcccgacgcccattcgccgccgatgccaaacaacattcgttttaaggaccttcgaattaattgcattgaccattccgtgatcgcatttcttcgtgccaatcaactcattttccagaagggctccaatttgcgtctgtcgcttccttttggtccattcaacattgatgatgtccagtcaatttgggatgattttgcgcgtcaaatttggcccatttttgcaccaaccattcgacactttggcgttcccgatggccatcttttggacactttgcttcgtctcgtttcgccgacaattctcacggatgatctgatcaacatccattcaatcaattccggtcgtcagtttctcgaagcgattggtgatgatcattttga

SEQ ID NO: 86232 - DNA, 574 bp, Heterodera glycines
aaacttgatgtctgctggaattccggcgggcgattcggacatcgaattagttggcattgacgaattttatgcgagtgccacgggagagaaaaatgggacggaagtggcgaagacggacgaacatcagttgcacgtggcaaggctaaagcacgaactaaacgagcggagaagtatgttggcgaatttgcaagaattggaagggcggaagagtgcccttctcagtgacattcgcggcaaagagcagcgactgagtcaaatcgggtcgaaaataagtgcaattaaaaaggccacaattccgctgttcgatgtgctcggactaaaagcacagccctccgaaattggagacaaagcgaaacagtcgtcctgccctttctccgtccaattgcgccctctgtacacaaatgaagaattttgcagagaaatattcggcacacattccatcgaattggggtgtgacgcattggtcctagtgacggaagagagcgccgggccatcgaatggcacaaaagaaaatgccgaaatggacgaaacgagcgacgggaaagagaaagaaccaatggcaagtgcaaattcg

SEQ ID NO: 86233 - DNA, 645 bp, Heterodera glycines
ggcacaagcgattgcaaacgcaggacgtggccgaaggaggacggattggcattagaaaggggccatttgcctcaaggcaacaaccagagtccgacgcgactccagtcgacgcccaggatttggattcaagaagatgaccggtggcgccaaccgatgactttctcccgaaaagacgtgcgggaaagaagttggctcgagtcggacaccgactcggacttggacagcccaacttcggtgttgcgctcgcggcgaaggagtcgagtgaacattttggacgacgaccaaccgacaagaagaacggcctggggaaggtcgccgacgccatcgccaaatggacgtgctgttgtacaacgaacaacgaccacaacgacgacgacaactgaggaggaggaaggggggcgaagaacggtcagatttggcgaagtggtggtcgttgagccggaagagagaacagtgaacagacggacggaagtacggacacaacagcgggagaccgaagtggagaggacgtcggaatataccctaattctgcgaattgatttcatcgatgcctccgtttttttggacaaatcgttggcttactttggaagtctgaacactgccaggaaagacgaaaggagtgtgcagcgattgtgctacgtactg

SEQ ID NO: 86234 - DNA, 673 bp, Heterodera glycines
cgatgtccggcacaacaaaatgacgacgatgccgccgccattgtgcaaccgaagcgtaaaggcatcaaaaggccctacgacgaatttatgggtgacgaatcggctgtcggaatggtcaagtcgccatcatttactgaacaaatgcagcacacggcgccccccaatctgaacgatttctgcatggaacactacggctttgacgagcagtacattcgcgctcagccggacagagtctacgacattttattccattcgtccggtcgcgttgagttgcaactgtcgcgcaatttgagtgccaccattttgtccattccatgcccgcccgaggaggagcacaactggggcatggtccgccagtaccgtatgaccacccagaaccgggagggcgacacactgtactttcgctgttcgcgctgcgagtcgctgatgcgttacacaaatgatgaatatcggccaaagttgacgatgaaggacggtgatatccaaggcgattgcttcccggctcatcacccgcaatgctacccggtgaacaaggaatgggtgattctgcaacagttggaccgccaggcacgcctttacatgatgcagtttgacatggcacaatgggaggccatgcgccagcaacaacagcagcagccggcggaggacaacgacggcaccgcagcggcggaat

SEQ ID NO: 86235 - DNA, 384 bp, Heterodera glycines
caagaaaagaaaaaggaaattcttgccagtttgttccgaccgcaacacggaacattttcctgatcagacacggacaatacgaattggattcaaagacgaaggagcttaccgctctcggacgtgaacaggccgacctcttgggaaagcgattggcggagttcgaagttggcaagggaaagaaaataacaaatgttttgtgtccacaatgaaaagagccgaagaaacagccgatattgccttgaagcatttgccacacgccgcacaaatccaaaaacattcggatttgctgagggaaggggcgccttgcgaaccggaaccgcctttaagttcatggagaccgcagtattacgagttccacgaggacggtgctcggattgaggctgc

SEQ ID NO: 86236 - DNA, 670 bp, Heterodera glycines
acaaattggtggcgcgggtcgacggaacgcggcggcggagcgagcggactttttccggcgagttttgtgaccgaaaacttcgacaacggacaaatttcgaacggaacggaacgaaacggcgagagaacggaggcagtggaaacggcggttgtcccaaaagtgcaaatcgatgaaactgtgctgatgaaatgcatcgaactgctcgagaagtgtgaccccgaggccgacccgtcgtccgaccctgccgaattgccttttctcgagcaaatggcgaaggctcaagcaccactcatcgatcagaaactcgtcaaaattgacaaacagctcagcatgttggccgaggtggacatcgcaattcgcgaggtgctcaccgcgtatgacacggccgtgcagcgggtgcccatgccaatgcctttctctcctcccgcgggctcactcgcctcgtccgcccctccgcccgtctccttcgcctccaccgcttcagttccgtctgttaatacgccttctttcccaacccaatggactatgaatggacagtggcaacagcagcagaaccaaaaccaatgaaattgttggagtggttcggatggaggagagagagtcattctgtggtccatataaatccattataaaaatgaccgatttaaaaactaattttactgcttaagag

SEQ ID NO: 86237 - DNA, 653 bp, Heterodera glycines
agcgttggttgtcctccgcccgtccgtccgagtgatgagaatgtttttttgttctacccaaacctgctcggttatgtgcgtattttgctcgcttttggcgctctttttgcgatgtcttacgaggaaaagccatggagcgccgcactgctatacttcgctagtgcacttttagatgcttttgacggatatttggcccggaaatttaaccaaagttctcgctttggtgctatgttggaccaactcactgatcgcctcacttttcttggtgttctgatgaccctttgccattactacccaacaaaaatgctcttctttcaatttgttgcttttttagacatcgccgcacattggatgcatctccacgccactgatctaaccggaaaagagacgcacaaagggtcgaagaatcccattttgaacgtttattatacatcgaagacatgtttgttttggaggtgctttggcaacgagttattctacggattgctatttgtcaaccatttttgggctggccctgggcttttaggaattcattttgtgcctctgttggcctgcgttgtctgcccgctcgcccttgctaagtcagcgatcaatgtgcttcatttagtgacggctagtcaaactgtggctgaacacgatcgagaaaaacgcgg

SEQ ID NO: 86238 - DNA, 683 bp, Heterodera glycines
cggatatatgtgccatgttgtgaaagacgagaactcagaaaaaggagaacgttatgagctaaaacagattgaattaatactggccaacttggcggtgtccatctcgcgcgtcttctcacccaactgcaccgtcggacaatgcaaaaagcgggccttgaagcatccaaagatcagcttctgaacaatgggtcggactttgtcatcgccgaagcgttattcatggcctggactgcgtttggcgacccgaaagcggtcttcctgttcgtggccagcaaaacgagtcgcaatcggtttggccaacgacaaattgagtaccttctcgagaaaatatcaaattacaaaatgaaaatcatccgtatttcgctgccagcttgtgccagacaaatgaagttgggacaattaacattggatccccaggacaacacattgcgttttgtatgggcaaaaagttgccgtcacttatatcgcaacggaggcgccaaaaccgagcgacgatgaatggaaagtccgacttttgttcgaacgttcgacggccattaaaagtccaacaattgggcaggatttggcaaatcagaaaaaagtgcagcagcttctgactaagccgggtatgttggaacgctttttgccggaacctgaacatgccgcaaaggtggaagcgcttcggcgatcctttgccggactgt

SEQ ID NO: 86239 - DNA, 568 bp, Heterodera glycines
  unsure (1)..(568): unsure at all n locations
tacgagaaaaaaatataaaaaacaaatctaataaatatttaaaaaaaattaaattcattccaaaattgagttaattgggtatcaatgaatttctgctcttcctttgcctttctcgtcgttttaatgttgctgatcggtgaagcatcgagcggttgctgcatatcaaagtcaagaatccgagcggagaatgagagacgaaccaaatcagatggtacgatgagatatggacaagcgcttaattacggagttattaaagtaccgcaaaaaaattggaccaatggactccgacgagagctggaggagtgtttgggcttggagttcatccgggccttagaataaacaccaattaattgtcaacagaattccattttttgatgttcatttcgtaaaagggacttcagaatgtgattccttctcggcaaaaaacgccaaagcgaatataatacattttctaagaatatttttgtgatttccgaacaatgcatactgtaaaattatttttatatgtaatattgtaatgtatgtaatattaaacggtnaaccanannanaaaaaaaaaaaaaaaaaa

SEQ ID NO: 86240 - DNA, 229 bp, Heterodera glycines
  unsure (1)..(229): unsure at all n locations
atcacattgttcgtcaatgagcaccagcaacaaattgcgtcttaaaaacagcagcagcgcaacgccctcctccgcctcactgctgcacatcaatgacgcacggattgcgggactgtacgatctggagcacaccattggcaagggacactttgcggnggtcaaattggctcggcacgtgttcaccggggattttgccatgatccctcaaaaaaaaaaaaaaaaaaaaaaa

SEQ ID NO: 86241 - DNA, 601 bp, Heterodera glycines
  unsure (1)..(601): unsure at all n locations
cagaaatggaggcacagcagtacatggacatgggactgtacatcggactaacgggatttctgtggaaggaccgtgccgtggacggcgtaaaacgcgcgttgcggcaacggaccattcgaatggatcgccttttgttggaaacggacgcgccgtacatgtacccgaatttggaggacaaaaaattgcgcaaagacattgacattcggcaacggatcagcaccgaagcccttgccctgcacaaacactccgacttcaagcgcaacgagcccagctcgttggccgccatttgtgagctggtcgctgccttcatggactgtccggcgcacgaattggccaatgcgacgacggcaaatgcgcagagagtgttcggcttggagttggaggacaaccaccaccagcagcaacaacaaggacaacagcagtgtaacgacaacgaaaacgaaaatgacgagagttcaatggtgaactgatcggagcagaaaggatgaacgagtaatgaatgatggatgattaattatttgaaaaaattgttcaaaaattttaaaggattttgatattgctctattccaaaaaaattttatatntgcttttcgattttttg

SEQ ID NO: 86242 - DNA, 639 bp, Heterodera glycines
taattcctgcgtattattgcggctgctgttctctgtccgtgccatcatcaaatcaaatcaacgaaagctgagccatcggaagtgtgcacaaatcgactaccaaacgaaactgggcaccacaaatcaacaaaatcatcattatcatcagcagtaaaagtggtgcagaaggaaacgcatggaccaaatcggcggcactttcagcgaccaaatttggctcgacacattggcgtggattggacgtggcgaggtcggatggcacttggcgctggtcaacgcccgcttcgccgccctggtgaacatgcagctgcagcagaggcggtggtgtttggaggagtttcacatcagtgagcggaagccgaaacggactggcgccgaagtgttgagcttggcaaacaacggctcctacttctcgttgccattggccacctcaccgttgccggacagtgtcatcggattcaacggcacattcaacatttggtatttggacgcagaagtgatcaattttctgcaacgatttcggcgcctcttcaacacgtacatctcgctgaagttcaccattccgataacagaatttcgcgcttggcaagccgtggcacctcacatttggcccttgctgaagcacgggctcggcacgttggc

SEQ ID NO: 86243 - DNA, 695 bp, Heterodera glycines
ggaaactgaggcacaattggaaaatggaatgcgcgagaataaaatgcattggccgagaaagtgtcggaaactgaggccaaattggaaaatggaatgcgcgagaatcaaaatgcattggccaagaaagtgtcggaaactgaggccaaattggaaaacggaatgcgcgagaatcaaaatgcattggccgagaaagtgtcggaaactgaggccaaattggaaaatggaatgcgcgagaatcaaaatgcattggccaagaaagtgtcggaaactgaggccaaattggaaaatggaattcaaaacaaccaaaaggcgttgtctctgatgaagaatatggcaacattagcgttctttcacttcccccttccaatttatcatcgatggaatgcctcggattgtgacccagaaattgtgatcaatgaaagcacaaatgccattcagcacaacggaacagaagatattgactggcgttcttgccgagcatggccaattcaaatgtcatctgctgttggtcgcattggcattatttatgcggaatatcggattcttgctataattggaggattgcgcattggactatcaacaaaagaaatgccattggaccgttgggttggaaatggccatgtttcgtacggttacgcatattatggagagattgaaagcacaaataccaatgggaatcgagcagtcatttcgga

SEQ ID NO: 86244 - DNA, 794 bp, Heterodera glycines
  unsure (1)..(794): unsure at all n locations
ggagttggagcggacccaaaatcacgcattgaaaaagacacgttcgacttggcaatcattgcaatggcacaacactatcatcagcaaagtcaaacattgcatgtgaacaatttggtgctgcccgtgtaccaatttcgctgttcggacagaaaggacgaggaatttggcaaagagtttatcagtcggcttcagtacctcagctcattccaattgacttccactgaaaccgcccttttgtccgcctttgtgcttatggaccaatcccaggcgcccggcatggaagcgtttgtgggacagttgaagagctgtttggggggtcagttgcaccagcggatgccggacggggacgaggcattgcgccaactgctcgagttccttccgcgcctgcgggaattggcaaaaacgcatcgcaaatgtttgggacgcttccgattacaaatggtggaccagcaaagcgaacaccaaacggacagaggcgccgcggaggccaatgtgctcgccagcttcccgcccctttacacggaactctttgccggaaatagcgactgacagcgaatgggggaaaaagacggagttggcttcggcgaagggggaatcactacggcgaatgcgcgaacttttaaatgccgtcactttagcgggaaattttcattttgtgcgggaagaaaccttttatttgtttattttctccgaccttnccaggccatcaaacattccaaagcccacaatctntcactntctttttgtctcagatgcaataacccattaattaataactcattcatcattctccg

SEQ ID NO: 86245 - DNA, 494 bp, Heterodera glycines
catcctttctttaggcttgacgaggcgtttaccgactcttctggctccttccaatgagagggtcgacacgcgaactgacaaacattgaccccgtgctgaagatttatcacgactgtgacgatgggataatgccaggacaacgcaaagtgaaactgcgcatccccagccaatacatcacaaacggagggttggccagacgaacttttgaagtcggagtactcaatttggagacagtctttgctggggaggaaagggacttcatttgaacatggaggggaagaagaactggcgaaatgaaagctgatttattatcacatacagtataaccagccattccatttggtattctttgtataccacattcgtattcagcaaaagaatgtagaaacaataataaactatacaatttgtcaaaaaaaaaaaaaaaaaaaaaaaaaaaaaaaaaaaaaaaaaaaaaaaaccccaaaaaaaaaaaaaaaaaaaaaaaaaaaagg

SEQ ID NO: 86246 - DNA, 712 bp, Heterodera glycines
gtgattcgttttttgattctctttttgctcttcccccttcttccgcctcgcaaaatggaccaatccgtccacgaatggcactgtctctgccgccacgtcttcgtcggcacgcattctctgcttcgaccatatccgtttttgggttggcaatgccaaacaggcggcccattggtattgcgtcaacttcggcttcatccctttcgcctacaggggcctcgagacgggaagtagaaaaacggtggcatatgcagtgaaacaggacaaaatcgtttttgtgttcgagtcggcactgctgcctaacaacggggaaatgagcgcacatttggccaaacatggcgatggtgtcaaggatgttgcgttcgaagtggacaatttggactgggttttggacactgcgcgtcgtgcgggcgccgttgtggcggaagaaacggccgaggagagagaccaaaacggacacatccgaagggcatccatccgaacgtacggagacaccattcattcactgattgaacggcatcactactcgggcccctttctgcccggcttttgcctcgtcgccgcttcgtccgtgccgcgctttttgctcggccaattgccttctgtcgggcttaacttcattgaccattgcgttggaaatcagcccgaactgcaaatggagtctgtggcccagtggtacgagcgtgtgctgcttttccaccgcttttggtccgtc

SEQ ID NO: 86247 - DNA, 646 bp, Heterodera glycines
ccgcaaggcgcatggcctgcgggaagaaagcgcgaattccctgccaaaattttccgacccacgccaattgtgccgacatcgaaataccgacacagtgtggcggacggaatgctgacaagagatttgagggacagtcaagtgtggaaaacggtggtgacggtggacggaattagtggcggacaagcggaacggcgggggcagcggagcaccgcgaaagacgaaaaacggcacggggacacagaggcggttgcactgcgccgccacttttacgccgaaaagccaacaaacgaacaatggcagcagaacggacgagtggcattggacgaggacgggcacaacgccaaccaacaaaagttggaccgagcgccgaatggtggacaaattcgacaattggtgtttagcgtgggacgaactcagttttcaatgggcggtgggcaaagtgccggcccattggtgcagtgccatgcccggggcgaaagtcaggacagtttgggcagcaacagcacggccaacatgcaccgctgcatttcgccaatgttcgccccgacggactacggccgactgatcgaatgcacgacgccattcagtgcccaaggggacaaccaactgagtttggcgatcggggagagagtgttgctggtgaaga

SEQ ID NO: 86248 - DNA, 644 bp, Heterodera glycines
ggacaagaaatggttgcctgtgacgattgcgaccgttggtaccattggggatgcgttggtattctgattccgccgcccgaaaaagcgcaatggtactgtacggaatgtcgtcgcgagcgcaaaaaggcggcgcaacgacagcaaacgtcgacgggcgggggaagcgggtcgaacagtcgcaagtcgtcgttcatcggcggaacaccgacaggcggcacagcgccagcgaaaaagcagcgaattgccaaggcgtaaattggggacaaatgcaaaacgtatagacaaattggcctttacaataaagaaatcggttatcatcgaagtgcttttcacgacaaatttgactgtgatacatttcctttctcccctttgtcacgtccgtttcgcctgtcactaaatttttttctgattcggcgtacctttttttctttcttttgacccttgccccgtccattttctcttttcttctctaagacaggctttaccataaaataatattatgctcttcattacattttttttgcgtgtctttgtgtgtattgagaaatgaggccaaaaccttccatttacggcttattatcggttaattgtttatcggatctgaaatttaaacagaatgtctttgacacaataaataaacgatt

SEQ ID NO: 86249 - DNA, 468 bp, Heterodera glycines
  unsure (1)..(468): unsure at all n locations
atgaattcgtcgaaataatgaaaatgctcaaacggangcattcttttacaattaacaaagaaagagcggctgaaaaagctgaaggcggaaatgttgagacaaacaaaaacggagttttgttttcgatgactttggccagcgagtctaatttctgcacttcgacgccaatcaaaaaacaacaaaaagtcagcaattcgcccaaaagtcccatcgaaattacgaatgaatttgaaagttgcttctgtaaatggttgcgatattttaccaattttgaggacaaattgggacgtgaaattagcgcctttgagaacgatcaaacgaagaaagaatttcgcatcgaactttcgcgcacaattgcaaatcgaataaacgacggcgccaagaagaatgtgtccagtcatgagatgggttggctcttcaacttcttcgacgatctcctcgcctgccgccccgtcgacagttggcgag

SEQ ID NO: 86250 - DNA, 650 bp, Heterodera glycines
  unsure (1)..(650): unsure at all n locations
caactcgaaaaccatagctgctcgaattccggcggatttctgccttcctttacaaaggaaacaaccgctggaaacaatcggttgaactttgcaaaaaggacaagctgtacaacgacgccatggaatacgccgccgagagtcgtcagccggagattgttgaagatctgatgcagtacttcctatcacaaggcttgaaggattgcttctccactctgctgtacaaatgctatgaatttctgcggcccgacgttgtgcttgagctcgcctggcggaacaatcttgttgattacgccatgccgttcatgatacagaccgtacgcgactatggttctcggcttgatcgtctggaaagggctgaggtggaacgcaaggaggaggtcaaagagcagcaacagcgaagcggaagtctgattgaaccccaactgatgctgaccgcgtactccaccgccgcgacgactccaaatgcgacggcgtatcccacgggaggcattggcacgattccgccggcacaaggctntccgtcatatcccttctacaaataatgttgtttcgttgtgatggtgtgacttatgatatgaccatctttgatggattcatttcttacttttaatatgtaatatttttcgacgtaaatgtgttccgcgctgttg

SEQ ID NO: 86251 - DNA, 600 bp, Heterodera glycines
ggtttttattaacacatctaaaagccgattttttcgtccattttcgcataaatgccgcccgatactgaccaaggcaatgcacgccgtcagcgccgacgttcatcaagaggacttaatgactctctgtccacgcattgcaatttgtatgagctgttggccctgccaaaaacggccactgacgaagacatcaaaagggcgtatcggcgcatggcactgaaataccatccggacaaaaatcggaatgatcccgaggcgtccaaaaagttccaagacatcaattacaccaatgccgtcctttccaatccgacgaagcgacaaatttacgaccgatacggcgagatgggtctgaagatgatgcagcaattcggcgaggaaaacatgtcattggcactccgtccttggctgaagtggctcatctgtatcatcgccgtgctgacttgtggctgtttttgctgctgctgttgttgcttcggctgcttcaagtgttgctgcaacttttgcttcggcgcctgcaaaccggaggacgcgtccaacgccgactttagcccctttgatgcatttgatgacgtggaaagtcagccagttcgcgctcaaccggca

SEQ ID NO: 86252 - DNA, 697 bp, Heterodera glycines
cgaactgaagaaattcccgtcacttacggatgcgtttaagaagaagaggggcaacatactcaatttcgaggaagaggaatttgacgagatcatcagcaatggcaccagcaagcgcgacaacagtccgtacaccgaccacgactacgcaggcacgcgccaattggcgacggcgaagggagcgaccggcaaacaccaacggcagaagggcggcggagggacggcgaaagagccgaaaaagaaaacggcacttgtcaatgggaccgattcggtggtccgttcatcggcacggccgcaccgtccgaccaaacgttttgtagaggaaacaaacgaatcattcattcgtgggacttcgaaagtgcgccgaacatcgccacgcaaacatggcaagaaatcgactgcggagggaggaagcgaaggggaagaatcggaggatgacgggaaggagtacagcgtggaaaaagtgttcaagaagcgtgtgaagggtggaaaaatggaatactttgtcaaatgggctgggtatgacgacggttggaacacttgggaaccgcgtgagagcttgaaacatttggaagtgttcaagcagtacgagaaggcgcaacaaaatgcggcggagaaaaacaaattggaagccgaagagacggaggaggacgaagaagaggaagacgaggacaacgaatacaaagtggagaaagtgttg

SEQ ID NO: 86253 - DNA, 611 bp, Heterodera glycines
gccccgaatttcccctgatgacgtgccatgcgtcggatggtcaagcaattaccaaatggctgttcttgcctcgtcctgacaatttgatgaaggagctgacaatatgcattgaggattcagcggtggagcagcaatggttggcagccgtggaacaaatcaaagcggcattttccaatgcttcttctcctgtttacttcgacattactgtttactttccgccgccgtcttcgctttctgccgttgtgccatttaaactgaccaacgaaatgactggagagaaattggaaatgtacaaagaagatgtagaagaagatttaagttgtttttccctcattcgttgtccaattgcgcccgatgataagagagagcggatgaagatgattaaggaattggacaaacgatggaatcgaattaacatttttctcatcggcgatggtcttctcgacggtttcccgggggcgagtggcgatcagaaagagcagaagaaatgaatcgatggttgattgattgatgtgattatgattacctatgcgatctaaatgttgggcttagccatttaaatgttgttgtatttgatttttttacaaatccataaaaacgaattaggcttc

SEQ ID NO: 86254 - DNA, 672 bp, Heterodera glycines
ttcttattattgttagaaattaatgttcccatgagagaatcggacgagggtggcctctgtctgggcaaaggtcagtgctttttcgttatgccaatgtgcccttcttctgagtttgtgcctttggcctgacttcgacgcttcgcggtttctgcctttcccccgctgatcagcagacgaatcttttctcattttgcagtgaaatggcgacgaacgcctcacagaaaaggaaggagatctatcggtacaaagcgtcgttcaatgtttatgcgatgggatggtcaaccaaattggacaatcacctcaaatttcgcttggccatcggcagtttcatcgaggaatacaacaacaaagtgtccattgtgcagctgcacgaggaccaaggcgaatttggccatctcggcactttcgaccatccttacccctcgacaaaggtgctgtggatccccgatccaaagtcggcttttcctgatttattagcgaccaccggcgattatttgcgcatttggcgaatcggcggtcacaacggcgcttcgttggaagttcggctggacaataaccgttcgtctgagtattgcgcgcctctcacttcggccgattggaacgaagtggacgtgtcactgattggaacgtcgagcattgacacgacgtgcaccatttggcagatagagacag

SEQ ID NO: 86255 - DNA, 714 bp, Heterodera glycines
cattctgccgattacaagcaaatgttcgtgccctgttgtacagctttgcgttttattatcgttgagcagcctcggcccgtcgatgattttcttcgtccggttattggcaaatttttggccacagttagagactcggatatgactgtgcgccgtgtggcaatcgttacgctgaattcggtggcacataacaaaccaaaattgatcaaagaatgtctcccaaatttgctaccggccctttatgaagagactaaggtcaagcaggaacttgtgcgggaagttgagatgggaccgtttaaacacattgtcgacgacggactcgacctgcgaaaggcggcctttgaatgtatgtacacattggcagaccaatcgttggatcgtgtgaatatcaacgaatacctgacttatgttgaaaacggacttaaggaccaacacgacataaaactgctcacttatctgatgttggtccgattggttcacaaatgcccaattcaaatggcacaacgtctcgatgctttttgtgaacacataaaaccccaattgcttttgcgcccaaagcaaaacgccgtaaaacgggaaaatgacaagcaggacgaactgaaacggtccgccgtgcgctcagtgatcgctttgcgcaaagtgccgaacagtgacagatcgcagaaaatgaccgacatttggggatgtgatcaatggcaatcctgacctaacacagat

SEQ ID NO: 86256 - DNA, 713 bp, Heterodera glycines
caaaagtgtctgacaacctttgccgataatggaagcaggagacgttgacataattcgacaacaacatatccgctattatgctgacattgatggcaggaaatatccaactgaaggacccgattatgatgttcttctttatgggacggatcttttagtcgacggaaagttatataaaaatgcagtccccactggttatatcaattatatcaatcgaattgaggaacgaattcccgttctcggctcatcaggccgaagcattcaactgaatgcggcgggagatgatcaaggaaataatgcacgtttacatacgaatgttgttggtcaccaaatttcagggagtgtctccttgccagaaattccgattgggggaaactctgattatataaacactggacataacaagcatgatggaaaacccacttttggagacaccaaacgggaagaaaaacagaagaataaacagaaacagcaaaagagaggagagctaatcggtggaaattttacacatataaacaatcaaaacaatgaaaacattggtggtactcaagacatcggacgcatacaaattggaggaatgccaccaggaggagctcttcatttaaatactggtggaaatcgcaacgttggtggtactcagatgattggaggcataaaaataggaaagatgccgacaggagggacatttggtttaaatattggaggcaatcgaaacg

SEQ ID NO: 86257 - DNA, 561 bp, Heterodera glycines
  unsure (1)..(561): unsure at all n locations
cagaaccgcatgcctggtatgggcggaggccatcagcagcaaggaatgcgttaccagggacagccgagaggaatgcaacaacaacagcaggctcaacagccacaaattgcctattcgtcgtatccgcagcagcagagccgtggcggcatagcaccgcagatgggtggcggagcgagtggcggtggagccaacgctggccatgtgatcacttcttcaacacaccaggagccgtgaacacacagtgcttaccgaggctacataaccgacaaaacaatgctggagcgtctgtccgatggtgcgcgtgcttcgggatgggatgcaaaaatcgcaatcacggaatgcttctcaatggaaaatgccaattggtgtgtggaacagaaatgtgcgtgccgtggacaacacacaggctttaccagccacggtaaagagcgcatagataaatgaagggatggattggatgaataaattgatgagtaaaaggaaaatcaaaaaaattgatatgttatttggcttctttgtctgagtaaatgcttatctgctaaanaaaaaaaaaaaaaaaaa

SEQ ID NO: 86258 - DNA, 375 bp, Heterodera glycines
tttttaacttttccaatgctattttaaggattatagtaggattcgtctttatatgaggtttttagactatcttaataaatttatatcaatatatggaagaagattatgagcaactagattatgacgaagatcaattgaaaaatgcgcttagaaaagcacagcaattaaaaaatatttttccaaaagatcaagaacgcaagaagcctttaattcagaatgcattcatcgctaagaaagaggttcgcaatatttcgtccaaatgttacctaaaccctaaatttgcaaaacaaaacatcatcaaaaatggtatattaaataaaacattgagttcaatattctcttcaaatttgttaaatgttaattcgtaattactaa

SEQ ID NO: 86259 - DNA, 472 bp, Heterodera glycines
  unsure (1)..(472): unsure at all n locations
gaggaggcccgaaaatgatcgaacgtgctcttggccagtgatttcctactcggaagcgccaatggagtccaaaatgcaattggaacaggtgttcatgacgctgacggacgagaccaagacgcccaaagagaagatggagcggatcaaggacatccagcagaaatggacaccggaaatccgcgcggcgttgaagccatccactgacgacaaggaaattgccgaggcaatccgcttcttcaccgacttgccggctcagattgagcttggcaaaaagtgatcggagctgtggcgcaattgtgccgatctgatcaatggccggacatcgcacaatgtcccaaaaaattcatagaaaaacaaaaacagtaacgatcattcggattttcttttaaatgatcaatgtcaaacaaggattgttttttttgtggttaaataaattttcattttccaaanaaaaaaaaaaaaaaaaaaaaaa

SEQ ID NO: 86260 - DNA, 734 bp, Heterodera glycines
tggaaaaatttgataccgaagaattgcatttttagaaaaaaaagatttttaattatgccatttttgactttgaatgccatgcgttcgttgtgccgtcttccaccatacttttttccaccggcatcatgcaaattcgttttgtgcaccatcacaaggaattggaggaacccggtgggtttgagcgtttcatgggctggcgacgctcgaaccccgcaaaagcgaaccgaaacacccacatcaacgaacgatacatgagaaggttgaggggcgccaaacggctgataattgacctggaagaggattatgccgagcgacgacaattggatcagatgcgaccggatgaagtccgaatgtacttattgtggaagggggagccgaacattttcaaggatgtggcgccaagggattggaatgagcaccagataactctgaacacattcggtcaagcaattgacccgtatattcctcccgaaacttcgctgttttcacgaggggccaaagacattttccccgatttgaaggcatttgctacccgcaaataccaagggatattctacgggttgaggaggattcggaagaaggacggatttcagaacttcaatttgaaggatttcacaaaacttgccgagcaaatctacgcaaatgcgtacaatgcgttggcactgcgagacaaaacgaagctgcacgaactgatcactgaggccgcgttctctaaaatgtggcccgatgttgag

SEQ ID NO: 86261 - DNA, 743 bp, Heterodera glycines
  unsure (1)..(743): unsure at all n locations
cgtaaaaatggactgcagtcatgaaccgtcacttggcacggaatgcagcggcgaagaaagcgaagcagcaaaaacagcggatgaaactgaaggagaattgaagccgtcacaacgcgacgaagaagaggaaaatgggacaacggggaaaaggcagcaaaagagacgaaagcgacgaattcgactcacagatattggaccgaaggcaaagaaaaaggccgaacgaagggaaaaaccaatggcggagaagaagaatgaagtgcaagatgagaccaatccaaccgaaactcattgtcagtcatccaaaatgtcgcctcctttacttgaaatcgaaaatgaactcggacaaaacccaccaaataaagtgaagccttctcctcactttttcacgccatttcaattactttgtgacaatttgatacggaaattcatggccaaagatcccgagaaatattttgcgcagccagtgacagagttggaagcgcctggatatcattcaatcgttgattatccgatgtcattttcaacaatccatgacaaaatagataataatatgtacttgaatttggatcaattcaaatctgacatttgtctggtttctgacaacgcaatgctttacaataacacggngaagtgtttatttcttggcagcgcaaaaattgaaagttttggcaaaatattatttttccgagaagtatcttttgttcctcgtctattcgttgccctttggaaaagccttaactgag

SEQ ID NO: 86262 - DNA, 196 bp, Heterodera glycines
cggcgtccactttgcctcactttcgtgtctgtcgaccattactcaatcgacctctgacgaattgggcaaaaagtcgaaaggctctcccacaattgaattgctccgtgccgagtcggactgtcttcctcccgaatggcttttgcccaactcttccgacatcattttgaagccgctgattccaatggccgagcacagc

SEQ ID NO: 86263 - DNA, 722 bp, Heterodera glycines
ggaaatattgctgtcttacttttggaataaactaattattctccaaatgccgtgctctctcgctacacaatcttctgttctgaagcgcagagcacctgcgtctccccagcatgcaaaaatgcatgacaaaaagagacactttgacgaatcggcaaacaatggacaagcaaaagcggacaaagtgccatccaaaggggacaaagtgtcaccgacaaatgaggaaaagaagaaaaatgttgcctttgccacattggcaatccatgcgggaaatgaacccgagaaatgggacatgaatcatgtggttccaccaatttcactggcaacaacatataagcagcaatttgctggaatgcccaaaggtcatgattacgcacgaggcggcaatcccacccgtgatgtgctacaacaaagcattgccgcgctggaaaatgctcgtcactgtcgcgtgttcagctccggactttcagccacagcagcaatggcaaattggcttcattctggcgaccacattattgcgtcggatgatggctatggtggcactcaacgctattttcggcaaatctctgtccagcatcatggcatggaattgagctttgttgatttaacgaaattgtcaaacttggagaaggaatttaagccgaatacgaagatggtggtggttttgaaacaccctcaaatcctcttctgaaagtgatagacattgaagcagtgtgtcgtgcagt

SEQ ID NO: 86264 - DNA, 663 bp, Heterodera glycines
  unsure (1)..(663): unsure at all n locations
cattcccttgtgtntatgccgtcattcacttctcctcattcatcctgccctaagtcactcgccaaagatttatttttgtttaagcgtacccggttgaaaatttttatttttgaggtttatttatgtatttgatgcctcaataagaggggggtatcaaaatttgtagtcaatttatgatcatttgttatgccaattgcttatttttcattgtcacattgcaatcttacagaatgagttgagcgaccgtagccgtgcctatctgcgccggtgtgagcgcgtgaaggcatttcttacggccaccgaagtggtcgaagttcggaatgcgcaagtaacggagccgggcgatgaccgatcggtgtgccattttttggagctgttgagcacccagcgaatgcacaaacaaaatgagcattttgtgttcggaaatcggatgttcgagaagaacagtgccgtggaattggccggtgacccgcgcatttgcaaggagggcatgcagaagaacgtgcgctttgtcggcgacagtcccctgcagagcaaagccatcattcagttagatgcaaagaaatcggccttcttcccggccattgatcttatcgaatttgtttgccgatttctcaattctcgccctgattacatccaaaatgatttctcacagcccgcgaa

SEQ ID NO: 86265 - DNA, 634 bp, Heterodera glycines
ttgaaaaggaactttccgaattgcgtgggaacaattcgggcgctgttcgtgttcttgaggttgatgagtctaatttgcttcgctggagccttatgctttatccggaccgtgaaccatacaacaaaggtgcttttcgtgtgaatgttgattttccaactgagtacccattcaaaccgccatccgtgacattcgcaaccaaaatttaccatcctaacatcaacgataagggccaagtcgtgtctcggcatcattctcgcggagaattggaagccggcaacgcgtgcagagcaagtgatgaacgcgctgctgtcgctgattgccgagccggaaattgctcatccgttgcgctccgatcttgccgaggaattccaacgggacaagaagaagttcttcaaaaatgcagaatactacacgaaaaagtatgccgaacgtcgcgactgagtttgtttggacagatggagttatttgtgcatgaaagtcccgctggtatctacgaataatctctcgccactcaaattgtgcaatttataaattattgtgttttgtctgtcgttgattattttgacttttttgtatcgatttaaacttgaagaaaatatattaataaggattcaaaaaaaaaaaaaaaaaaaaa

SEQ ID NO: 86266 - DNA, 575 bp, Heterodera glycines
  unsure (1)..(575): unsure at all n locations
cgcatcggaaatgctatggcaatggcagtgatgggcgaaagtaaaaggtggccgggaaggagtccatcgcaatggaagcattcgcacgggcacccgccaattgcccacatcatttgcgacaacgccggactggacagtgccgaaataatttcgcatgtgcgagccgaacacagcaaagggaatcgccaatttggcattgatgttgaaaatggtcgtatggcggatgtttacgagttgggcgtgttggagtcgtacaacgttaaattgggcgtgcttcgcagtggcgccgaagcggccgagcagcttcttcgtgtcgattgcatcatcaaatgcgcgccgcgccctcgcacgaaggaccgtcgtccgtgctgagaaaacgcagctagcgaatgcgaattattgaagacgcgcacaggaaaaggaatacttcattgcttgctttaccgtactttgttattgttttttgacatgttaaaaccttaaaaaccgagccatcactgcgtaattaaatctcgtcgatttttctttcataaatcgaatgcttttgcaaaanaaaaaaanaaaaaaaaaaaaaa

SEQ ID NO: 86267 - DNA, 451 bp, Heterodera glycines
  unsure (1)..(451): unsure at all n locations
ttcccgaattttaaaaaagagccaaagaacaggtgaatggaataatagcccgagaaagcccaacaacggctctccgagaaaggataaaaaagctctacaaaaggaacgtcaagaagaaagaaagcaaaaagaaagagaaagagaaaaccgtttcctgcgaacgaaatcaacagcaggtaatacgactgacgcgactgacgtggaaaccgaaagcgaagtgattccgacatttgttgccgaactcgaagattctacggtggaatatccaacagacattgaatgtcatgttgcaacaaaaactgaccttggacggaaatgatcgnagcaggaagcactgcaagaatgaggaaaaaagaggcacggaaagaatgatttgtgatagattctttcttcagtgcattttcatctgttgcgtaaatgttgagagcnnnnnaaaaaaaaaaaaaaaaaa

SEQ ID NO: 86268 - DNA, 273 bp, Heterodera glycines
agagaacgcctttcttccgtacagtatgcaaaaccaaggccaccgacacagctgaagcaaaacaagcgaccgtagcaacaatttgttactgagcggggacagcagggcgaattcggtgatggccgttgagaggaaagcgtcctttgaatccgttcgtcgtgaatcgcagcacgcaatttccgccctccgttcaactaccccccgccacttgagtcccttctcgtgttgctcgtgcttccgccggtctcggcaaaagcccactctgcggaagag

SEQ ID NO: 86269 - DNA, 607 bp, Heterodera glycines
ccggaaggtatccaatacgcggaaggcgaaacggcaggaaaagtgcgatatgaggtgaccgttcggagaatgaactgcttgccggacccacctgaggtcgaagtcgaatttgacggagaagtgccaatggaagtgagcaaactgctgggaaatgccaaaaacaaagaagtgacggataaagtgaacagagcagggggaacgcagcagcagcagcagaacggaagccgaaagaaagtgccgatgagacagaaaagccgaaaggacggacaaccaaacgcaaaacagcagcagcaacagactgcttccatgggacaaagaaagcaacttcagtcattgcaacagcagcaacaagtcgaattgcaagaagtaacaggaggagagggagaacggcagccatttggtcgtaataacgaagtggccatacaaccaaacaatggacaaatgccacggaaaaataaccaccggccgcaaaaacaacaacaacaacaaaatgaagccgtgcaaggagatcaacaacaaatattcaatggggggagaagggcaacacgcgattaaattcatcgagcaaaaccaacacaatttgggcacacactttgcggagcagcag

SEQ ID NO: 86270 - DNA, 639 bp, Heterodera glycines
aaaattattgtgcggagatagaggtggagtcgcggtcgcactccacccctgctgctggtggagatcgaacaatggcagaaattctgaaggccgtggagcggccgccaatggcgagcatgagtcgattgataaataattagaacagcagcatcaactgatggcgggtcgtgcagaggcgagtctttcgcgtttctctgttgtttatgtgaccgttccctccgctgaaattggcaaacgaattgctcatgaattggtccgcagtcggttggccgcttgtgtgaacattgtgccacagattacttcagtctacgaatggaagggaaaggtggaggaggacagcgagtcattgctgatcatcaaaaccggcagagaacggctggaacagctcagagaggcagtgatcaaactgcacccttacgaggtccccgaatttgtggcatttccaattgactacgggtcatagccgtacttgcggtggatttccgatcagatcagtgacaaagatggacaaacggaagacaaataagaggcgaagaacgaggcaaaaaaagaggaagagtaatgggagaattgtcatatgtaattttgaaattattcctttcttttcgttaaattattcttattttttcttaaacatgt

SEQ ID NO: 86271 - DNA, 717 bp, Heterodera glycines
  unsure (1)..(717): unsure at all n locations
acaatgacgcgtccaattcgaactttttcgtctgctctgtgctatcattgaacagcagcaccaccacgacgacgaacaggagcaggacggactgagggacatccaaattggagcggaaaaaggcacttcggcttcagtgctcgttgccgagctgttcagccacccgcgatttcaacatgcgccactgcacatttttcaccgatttctccgtcaaattttgctttggtgcgaaattcgcgtgctgatggaacgggcaacgcgcgactgcgcccgccacgaattggccgttcaattcgcgcacaacacaatgttggggctgggcaaaaggcccgcctttgccatccaacagtcctccgtcgacaacaaaggttttccggatgaatatgccaaaggtgccgtcgttggcacatcagcagcgctctcaccaacaaaatcctcctccgtcgacatggacgttggcatgcccattggccactgtctgtggcgccgtcgtcgcattgacaagtccttccacctgttcccctgcgggcacacacttcacttggagtgtgntggaggagcagcacaaactgatgcagcaacatgacttgccagggatgccaacaacaacggcaatgacgacgacaacggcacttccggcggcaaaaggacgccagcgcccgcgggcgtttctgtccatgcgatgcccggcagcaaaactgtgccgcggctggcatg

SEQ ID NO: 86272 - DNA, 673 bp, Heterodera glycines
cctctgaagatgccacatttatttgtggcggaccggctattgccagttcgttgggtgtgcgcaaggaccggaaccacgcatgggaacgcattcgagcgcaccaatcggcggttagctttgaccttttgttttggcgtttatctgaatgcgagaattggtaagctcgagttattcttgtatatcgcaaacgggagcagttcgcccctcccccggaaaattttttcaaacctaaaaatttattacaagaaaatttaaagagtgtccgtttttctctttcctttcattccttaaatttgtcccccttttgtatccatttcaatgcttttgctcattgtctcaacaggtgatcacggctgtgtttgcccccaaacctcagttggtcctcaaatggcttgcggaccaacagcaaaagttgggctccgcctcgcccccggggctttcttctctgttccatgtgcccggcgcttcttccgctgctgtctctgcccccgcccattgcccccccactcattcctccgccgttgccctttcccagcacaattcgtccgcaagttcggcctgtgcctcgctgatgatgctcttcccgagcatttctttgtcctccgcaacatcccatcaacccgttgctgaagctgctgcggcgaatggaactgcacggagcaagtagggaaac

SEQ ID NO: 86273 - DNA, 724 bp, Heterodera glycines
gaagatgagacacgacacgcatttttggcaagaattttggcagaattgaagcacttacgaactttggatttgtccgaatggttactcaccgatttcactgtcctacagaaattggaaaaccttacgtcattaattctttacgacattcacaatttggaagggtctatcgacacgttgcgcaaattttgcaaactcacgggactcgatctgtcccaaagcgatcgttcctccagcggactgtacgctcagccggtgacagcacttcacaaattggtgtccagtttgccaaagttgaaatatttggacatttctggcacaaatcttacgactttgccttccgaaaatgatcgtccatttcgcggtgccggaacgattgacagtgacatcccgggactgagttatctgaagaaaccgctcaaatatttgggcattttcaactgtgaatcgagctcgcaatacaaaaacatcccggcggaaaagataagtggcgaccatggagaggaccaagtgctgacagcgatggaaatgtacttggaaagacccaaaacaatgcaagcggtgctcaacgaaagttaccatttgtaccgttttggcaccaatttgagtcgacaagttgaagcgcttcacctcgtgctaaagtcgatgtccttgcacctcaacaacagcaacctccaaattgccggcagtgcttcgatgttttacataattcgctctgtcaaaatga

SEQ ID NO: 86274 - DNA, 459 bp, Heterodera glycines
tgggaaaaacgtgtctttgattagtgttccatcatctcggacggcaccacgccggatgaacagtagccctccaacccgacatcgccacatgccgggaactagagcaccctactcagtggcaacgccggctttctgatgccggtacatgaggatcgtccgctaatgatggttgggccgccacacataacctcatctctgttgacctccaaagatcttacatcggcgcaatataaacaaaacagacgcgaacatctgcgatgaacaagttggctcacgagaccaactgatcactagtccccgtagcaccacgacgaaggggacagcgtgcaccctctgtgcacacactggacaacaccatcgttgctcacattaacttacgctggcggaacttattctttctcaggaacaatgaatgaataagacggcgtttatcgccttccacgacgcttgctccgtctg

SEQ ID NO: 86275 - DNA, 598 bp, Heterodera glycines
attttttaaataaaatttccttggaccgacaaaaatggcaaaattcgttgccattgctcttctctcgctgaccattgtttcgatggcacttgcaaaaactggcaaaagtcaaacggcagacgaagttgagggatttcgcaatatgaacatcggcgacaacaataaggttgacgccggaaaggagcccgcggctgataaagcaaccaaaaagggaaaagctcagaaagccggaacgaaatcggcggcggccactaatgagcccgcggctgctaaaggaactaaaaatggaaaagccccgaaaaccaaagcgaagcaagaggtggccactaatgagcccgcggctgctaatgaatggaacgaccaattgatgggcatgagcgttgagaaatttaacgaggagcttgctgtgttgttgccaaaagccaacacttttatggaaaatgctttgagcttcatcaatgaacaaatggaaaaaaatggtattgcaactggcgctgccggggactcgtgctcgaccgggatcccggccaactaggagaccaatgccacaggacggcaccggaggagggaagaaaggatgacgagctctttggatgag

SEQ ID NO: 86276 - DNA, 677 bp, Heterodera glycines
taatctctttttacttaaattgttctgaatctgaattcagttctgctcggactataataaatgtcagacgaaggtcagcagttgttggagtccaccttgcgcaatgtgttggaccagcagtcgcttcgatggattttcgttggcggaaagggcggcgtcggaaagaccacgtgcagttgctctttggccgttcagttggccaaatatcgtcgcaatgtgctgatcatttccaccgatccggcccataacatttcggacgcgttcaaccaaaaattcacacggagtcccaccaaagtgaacggcttcgacaatttgttcgcgatggaagtcgacgggtccaatttcggggaccatggtgtgcccaatttgggtgacgaggacgacaagtctgatatcttttccatcggaaagaattttttggccgattttgctgccggacttcccggcgttgacgacgccaccagtttttctcaaatgattaaactgatccgttccatggacttcgaagttgttttgttcgacaccgcacccaccggtcacactctccggttgctccaatttccgacagttatcgagaagggtctgtctaaatttctgaaggcgaagacgcaatttatgccgatagtctctcagatggaccaatgtttgggtttgcccgactcgactttggactccac

SEQ ID NO: 86277 - DNA, 623 bp, Heterodera glycines
tgacgaagtgccttggcaaaatgcgcgaaattcatgcacggattgatcgtgtccattcgaccaacttaaatggcacgccgttatttggatgcaattggtcgcggaacaacaaacgtttcggtggatgagctcgctattggcctgcaatgggtggatgaacacctccaaaaaaccgatgtgcaagtcaggcgagaagtgaaaccagaagaacgtggcacgaataactcgtcgaagaggacgcggttcatctattttgacgagcagatttccaagtacgctgatggagatgggttccgaaaggcacgggctgccattcggcaaaaatcgctgcttgagcgactcactgcgttaagcaaagaggagcgtgaccaacttatattagtcttgtccgaaaaataatttttctttaattcccgcatatataattttccgttccaattttgtacctttgtattagttattactgtttttaaaattttattgcgacttaagaattctaagacattcccttttggtgtaatcctcctaacatatcttgcctttgacttaagcccaatgagtttatattttttgtcccaatggctgctataaatatttctgattgtggtgaataaaagactttg

SEQ ID NO: 86278 - DNA, 653 bp, Heterodera glycines
gcattctacatgatcatggcttcacggatgaagaacgggaaaaacaaaatagcagtgtacaacaatacagttttggctatggccactttactccatggaatgcaaaggctgaacatcccatttcacaatccacgaattgaaaatgaagcaatgatcgtaatggaggtggtaaatcatgggaaagaatctgagccattaagcgatgaattagcacatgccattaaaacattatgggcagataggaacattagagaaaaggaatcggttgatcggatcgcaaaacaggattatcgtccaactgagcaggacatactgttatcaacgatcaaaacgacgggtctcattgaggttgaattcaaaatgaaaacggctgatttccgcgtctttgacgtcggtggacaacgttctgaacggaagaaatggattcattgctttgaagatgtcaacgcaatcattttcatcacagccatcagcgaatgtgatcaagtgctttttgaggatgaaacaacgaacacaatggtcgagagtatgatattgttctgagtcaatttgcaactcaagatggttcacaaacacgtcaatgatcctttttttgaacaaaatggatctgttcattgaaaaaatcaaacgaatttccataagtgtttgcttca

SEQ ID NO: 86279 - DNA, 705 bp, Heterodera glycines
  unsure (1)..(705): unsure at all n locations
gatggtggggcctcggcagtgcacttttcgtcggtcctttcgctttgtccaaaaagaaaaatatgaaattggcgtttgttcgtttgaatgttcttacggtactttgtctgttctgctcaatgagtcattcctacggtaatccatccgacgaatccgatgacgaaatttgcgaggaagaagaaaatgaagcacaatcagaagcagaagaagcggacgaattttttcataattttaacggcacaattcaaagtgaaagagaggagaaaagaacggttgtcgaaatattttgccgaaatacaaatgacaaatttcaattttccaccgacgacgagggaaatttcaaaattcaaatggaagcgaaaatcaaatggaaatttcacaaatgcaccaccggactgagaatggcattttacaagaaaaaagtgatggaaaacaaagtgccaaaatgtttgcccattattttgcggagtccaaaacggaaattaaaaaatgcaaaaagattggatatttgtgttgtcccaattcgcatcaaatggcttaaatttggcccaaaaataaatgcagaagaagccgaaaccgaagaaaatgacgaaattttgagaaatgaatttgcattggattttgatgtggaaaagaacgcgcaaatgaacggacaaattagaaattgcagtgatttacattctgctgaacacaattntgaaatga

SEQ ID NO: 86280 - DNA, 659 bp, Heterodera glycines
tacggaattggggaaattggcacgaatttttaaattagggagagggaagtgctcaaagaattgccattttatgccgatttatttgctgccgcaaacattggcacggacgagccgttgttggacgacaacgaggaatgcggggtgctgcagcaaaatgcggaattcgatgcttttgacgacgaccaaaactatgcgccacagcccaaaatgcggaaaacctctaattcaagcagtgcggctgttcatttgccggtcggcaacggttgtgccgtcggcggcggtggctttgtttggccggccaagtcgtcctttacgggtgccgcttttgttgccggtggtgcaaattgtggtcagtcagcggcgatgccaaatttacgagtgattagcaaatgggaggaaaattgtggcgaaacgaatgacgacggaatggacgaagtcgaaaaccaggcttcttcctcctccacccctttgctcgtcggcacaatttgtccaaccgaaggcaacagtttgagtttccaaaacgcttcgctgtccacggggacacgcgttttctcactcgattttggcaatgttgacaacatttccatttacccgggcatgaaaatggctgccaaatgcaccgtcgaagactgtcatgggcagcaactgtgccgtatgca

SEQ ID NO: 86281 - DNA, 527 bp, Heterodera glycines
cattccctgcatttacgtgctgaacaaatcgaccaattagcgtcgaagagttggacattctttacactgtgccgcattgtgtgccaatctcggcacatcacaaatggaactttgacgatttgttggaaaagatttgggcctatttgaatctgatcagagtttatacaaagccaaagggccaattgccggattataacgcaccgatcattttaaacgcagaaaaaaaactttctcgacgatttatgtatgaaaattcacaaaagtctgtcaaaggacttcaaatgtgccctcgtctggggaagcagcgtaaaacacaatccgcaaagtgtgggcaaaacccatttgctgaacgacgaagacgttgtccaagtgatcaaaaagtgagggaaaggcaccaccgaacgcggcaaagagagaagcgccaaaagagtgccctcctaattgatcaattaattaatgtgtgtgttcgttccattgttttttttttgctttttgtacatttattttttacgaaaataaaaagcaac

SEQ ID NO: 86282 - DNA, 605 bp, Heterodera glycines
tccgcccgttttatacctgcgattggaaattgcatcgccgcccacaccgacataatttgctactgtttcgtgatcattgtgcacgggtacactgccggactgctcactttgccacttcctgcgcttgtctttctttgggggacgttggccagcccgcgcccctccaaattgttttggattgtcatgataatttacaccgaattcgaaatcgtggccaaattcgcttttcaattcggattttggccttggaatggggacacagtcggcaataacaaagtgtacaagacggagtatgtgttcggagttcagcgcattcagggctttgccggcaaggacgtcgccctgctcatcgcactctttttccaccgttatatgttgaggaaatttggactttggagagacgcaagttccgacagattgattaacgaaatgcccaaaaaacggatggacaatgggtcatcttcatcatcatctgctgaaaaaagtccacagaaatcgactcaatcgacggttgttccatcgtcgagtggagaaaactttgaatcggtggccaaggcacaacgggaacagaactccgacgacatcgaaaagggcataaagcgaca

SEQ ID NO: 86283 - DNA, 588 bp, Heterodera glycines
aagactccgaaaaaatgccaaacattttcaaaatccttctgattgtgcttttggccgtcgtctcattccgtctctcggcttctactggtgacaaaaaaactgctaatgatgggagtggaaacaactcatcagctgggattggtacgaagatcaaaagaattgtcaccgctggactgctcttcacttccctggcgacgggtggggcggaagcgattgggcgaagcaatgctcagggaggaaatgccgccggattggtgccatcgcatgtgaccaatcgctcaatggctccaccacctcctcctgtgcaatttgaaatgggggcaaatcgattagaaaaaatgagggcacacctacgcgaacttgctgagaaaatgccggtcaatgaatcgaagcgtctgtcaccgagtggacccgacccacatcatcattagggccatggatggatctaacggaggaagaaagaatggatgcttagttttcagattttattctatcctcttttatttattagtttttcaaaacaaatttcttccacaactttttaaactatttgttgttttgaatctttttagataaatctaaacccct

SEQ ID NO: 86284 - DNA, 628 bp, Heterodera glycines
tgatgtccgcttcgttagcccgtaattggtcgaacttagacgaacccgaccgatggattcgctgtccgtggcctcgttggcgacaatatcttcaaatggcaagtgatcatttttggtccgcccgaatcgccctacgaaggcggcacctttttggcacaactcgactttccgatcagttacccgcaacatccgccgaagatgcgctttatcactaacattttgcatccaaatgggatggctatgtgtgcatcagtattctccacccgccgggcgacggaccgcatggcgtcgagagggcggcagaacgttggcagccagtgcacacggtggagtccatcgtcatctcagtccaatccatgctgtcggagccgaactttttgagccctgcaaatctcgaggcgctcctgatgtttcgcatcaatccccagcggtacaatgagagggtaaaagaatgcgtgaaggagtcgaacgtggcgcttgacagtgattaccgcgacagtccaacaaatggaaggacgccgggcgcagtgaatggtttaagatcgatctaacaccctgaaaactcctctgttgtgatctttttcataagaaactcgtgtgtatattgtaaataatacgattcaccaaa

SEQ ID NO: 86285 - DNA, 690 bp, Heterodera glycines
atcgtcgacaagttacctatagatcacttcaatattttaaacgtcgccacaaaccttatcgcccatgcatttgaactatcaaaaagtaaccgaggaaattttcagcaattggattgacgatttggtcaaaagggatgtccgattgccgttataccaaccgtacaaagaccgtcgcgaagccctttttcaattgaggataaacaatgatggcaaatggccaaccgatacaccaaaacagcacaaaatcccccgacagccgcccccgacatttgtgcagacatttggcgccgacattctcagctgtatggtcaacccgtggcatttgatccatttgcaactgcttggcccaagggattttgaaaaggtggcgattggactgtacgtgcgttgcaaggttaaggaactctgttctgtcgagcgcatcgaaagggtctcatgggatgcgagtccgccgtacgaaatctatggaaggcaaatgcaagtgctgctccatttctacgggcccagccaaacgccgccttcgcccatttcggccgttcagtttccaagcacagaaattgaccgtcaggtggtcgaacagcagcggaagtgccgcacttttgttcccccgtcgggcaatcacattaagcgcaagagtgaagagttgcaaaacgcgttgtacaaaatccattattaatttgaccgttggtt

SEQ ID NO: 86286 - DNA, 639 bp, Heterodera glycines
cgttttgttcttaattcgttgcctgaaattaattcgcttctgccccgttttaaagggctttttgtttgaaatgttctcatcggagaaagccaaacgcggcgcatttgctaagaaaagtttgaacggaaatgaattggagtccgaggccaacgagggggacgcggaggacattgggaagagtttggaggagcagtcgcatcagttggcactgccacggcttttcaagacacttctctcttttgagtttgccaattactcccgtctgaacgaatccgaagtcgaccctttgctgctttcatgggatgttctgatgcgtttttttggagatttggacgtcctttcccgggttcgcttttgcgatgccatcgatgccaaaaccctttccaatgcgttggcccatttgtttaattctctctccgaccccccggggcataaagatgccatttgcgttgtttctaatgtcgacgaccttttcactggcccttttcattataaattggtggaccgtcctttcgatcgtgaacattttacgagtaatctcttcttccggactttggccacgatccccgctttgtttcgcgaatggcacggcactctcagcaaaacggaagcgaacacagtcaatgaatacacccaaaa

SEQ ID NO: 86287 - DNA, 672 bp, Heterodera glycines
atgcaaccgcagcaaaggaacaaagcgagcaaatacgacgtgattggcaaaacgaatgagcagctcttccacctgctgaccatctgtttgagtctgcagccgcaacgcatcgacgagtccatccaatcgcaacttcaggacaaatacggggaaagaatgctgcgtatggccaacggcgacatcgacgagttccgaaacgccttccagcagggatgtcccaagttcttgtcccccaccactgttgtctacgaagggagcagtgtggccaaagagcctttgcttcgccaatgcaatgcgtttttggaaggcatcgaaagtcaaattagtctgccaattttgcgtggctatcttaaactctacacaactcttcccgtccaaaagttggccagtttcatggatattcccgactcggagttggactccttcatcggcaagctcctaacctacaaaatgattgtcaccgaattgggcaaggaaaccattgacaaaaccgaaggggccgatgagaccaccgatttggatttctacgttgataaggacatgattctgatcgctgacactaaagtggctcgtcgcgtcagcgaatatttcatcaaacaaatcggaaaacttcgtgagatttctcgaaaaatcaaatcatctgtcactcccgttggtcaaatacacaagaat

SEQ ID NO: 86288 - DNA, 616 bp, Heterodera glycines
cggagaccaactttcttctgctggtgcgtcattattggcactgtgttgcccgtgtcatttttcgtgtggctcttctcgaaagcctttggtaaggatggttcagcttcgttgcagttgtttttaattggtgcggcaatcagcaccttcgtggtggtcatggttctatgctgtatttgtccagacaaagacggtcacagttcgctggaagtgctgtacaaatgttcggcgtgtggcaaaaatgtgcacagaacttatgagtgcattattgacgtcacttacaactggtccggcggacgacaccgcgacacctttcgctaccgtaatcaaacgtacagtgtgtggggaaagtacacggcaaatgtcataaaaacggtattgcggacgcggatgaccatgaacaactttgaggcggtggagcgcgtgatgagcgttgttcagacggacaattattacaagacaagcgatgaatggaccgacgatttgataaggcgtcttgaataattgaggcagaaagccaaatggcaacaacaatttttgtgtatttctcgtatatactgtatgtattatatttgtataagggagcaaaatactgtatggtttgaataaatggtatacg

SEQ ID NO: 86289 - DNA, 688 bp, Heterodera glycines
  unsure (1)..(688): unsure at all n locations
gattttataaaatttattctcttccataaaatttntacttttccttcaaaaatgtcacttttttctccccttttctgttcttcatttttacttttgtcattctgcttttcaatttgtgcttttttgcctcaaataagcgaagttgaaaatgaaattgccgaatttattcaccgtaaccctttggccattgaccaccgtatcgcactcgtccaactcattttcgaacaccaaaccgaactgattttggccaatgaacaaatctcattcccaaagaacatctctttagacgatctggcatttccctatgaaatgcttgtcagcaaaataacaagtgaaaattttgaagagttggcacagaatttgcggaaaaatgcactcaaattggcaaaagaaagcactggcaaattccattttctcactgaaaatcacttttatggccaatttatcaattatttggcaaaaattgcccaacttaaagtggaagaagcactgaagcaacgacgggagaatgacaatttggacgaattatcggagaaggaaacgaatgacttttcggagggatggaaatcattacaaatgtttgtcgaaatgtattcatttggctcggaactgttcatgcaattagcggccaactacggcgggaaaatttcccaagaaaacgcgaaaaacaatgaagcaattagtggcc

SEQ ID NO: 86290 - DNA, 746 bp, Heterodera glycines
tttcggactttgccagcgatgatcgatttgggtgtcgtggcactttgccgttacgccttcacataaattcaaacccgaaaatggcctgtctcatccccaaaataagcaaagaggccaattatccggttctcatccattatcttatgccttttcgcgacgactttcgctatttcgattttccgctcatcaaaacgccgttgtcaaaatatcagctggatctgatggacagttacatcgacgccctaatgctttacgacgagggcagccaagtggagcagctgaagaagcgccaagtgcacgacccgcggcttcagtacgaatgccaactgttgcggaaccgcgccgtgcacccggacaaaaaagggatggaactgagtgcggaagaccgtcagagactgctcgaaaccctttcggcaccaaagcaacggatggacgaagcgcaggtcgtactggacgaaatccgtgaggagtttccgcgggagctgaacgaaaacacacggatggccgcatttcgtacaaccaaagctaagacggacacgctcggccaagtcgatgaccgtctccagcccattgtgccgggtgcgcccgttaaggacgaacagagaacggcaaagaaagaagacgcggactgaccggcgaaatttattcattttacactccatccatccattatttggtttgatcccacagcagatccttaccagcgatttacacagttttcaaatttactcaaataaaatcagttc

SEQ ID NO: 86291 - DNA, 681 bp, Heterodera glycines
gtgattgatgcggaactctttgcgcattggctgttactatggacgactttcagtttgcactcggtaaaaacagtccgtccgcgttgcgtgaaaccgtcgttgagactccgaatgtcacttgggaagacattggaggccttgaaaatgtgaagagggaatacaggaattggtccagtacccggttgaacacccagagatgttcctcaaattcggaatgcaaccatcccgcggtgtcctcttctacggtccgcctggttgtggaaaaactttgcttgcgaaagcaattgcacgcgagtgccaagcaaacttcataagcatcaagggccccgaactgttgaccatgtggttcggcgagtccgaggccaacgtgagagatgtgttcgacaaggcacgtgcagctgctccatgcgtgctgttttttgatgagctggactcaattgctaaatctcgtggtggaaacgttggcgatgcgggaggggctgccgaccgtgtcattaaccaagtgttgaccgagatggatggaatgggatcgaagaagaatgtgtttatcatcggagcgacaaatcgtcctgacattattgactccgccattctgcgcccgggtcgtctggaccaactcatttacattccgttgccggacgagcccagtcgcctgcaaatctatcgtgcttctctacgcaa

SEQ ID NO: 86292 - DNA, 655 bp, Heterodera glycines
tcccctgcgattgcttcttatgttagcactgagccgttcgtccatcttttccttatgcagccttgccatttgttttcgccgttttctttttatttcagcgggactttttctcatttattttggattttattgtttgtttcgttgccatcaaaatggagaataacatctgatcattctttttctataatcagtgaaagatttgaatttaattccacagcctcaaaaacggaacaattaagaaatgacaaattgaattggattgatttttcaacagataatgctgaatcgctgttggaaaccgtggcaaattcttccggcggaagcttttgtcctgacaacgatcagaatggtcttttgcttgggcatattggacaagcgactttgctgatcgaagacttgcaagaagaggacgttgagttggcatttcccgaattgagtccgggcggtcactggaaaccgagcaattgtgtggctcttcataaggtgggcatcgtcattccctacagagacagaaaaagtcatttggtccgacttctcgactttctgatccccgtgcttaagcggcaacaactcgacttccgattcattgtcacggaacagaatggcgattcgttgtttgacaaagggcgaattatgaatgccgccttccgttttg

SEQ ID NO: 86293 - DNA, 703 bp, Heterodera glycines
gagcaagaggaagaaaaacacgaggaatggaagagaaagaggaggaaaaaccagaggaatggaagagaaagaggaagagaaggaaaaagacaagggaatggaagagaaagaggaagaggaggaaaaagacaagggaatggaagagaaagaggaagaggaggaaaaagacaagggaatggaagagaaagaggaagaggaggaaagcgatagggaaagaatgacatggctcaaaaagaggaaaagccgaaaacggccaattcatttgcatcgccatgttcacgtttgggggagaaacagtgaccacacacggacgagaaacaacagaaataataacagacacagatttggaagcagcgcatcggcaccaaaacgttcaaattcggcacattttcctcccctttcaacgccgttcaaacgaaagctttctttcgtcgattcgtccagggaagaagcccatcagaagggttattcacctcagtcattctcagatcattcctggggttctgccaatcactcgtcggcttctgatcacttttattcgcctcatgatcagtcgcccccaatctctgctgccgagcgatcattgtccatcgatggacataaatattcggacaattgggatcattttgataaaagaaaagagcacacaaagaaagcgcctcgtcataaaatcaacaaaatgacaaagtcaaatcaatcacaa

SEQ ID NO: 86294 - DNA, 677 bp, Heterodera glycines
tgaaagccgaaattccattgaatttttgcacgggcgaccgattgctgtcccgaagacgaactttcgttctttcaaaatttcgagggttattccgatgagagacgctcccgacttctcccgacttcagttttgttcttcaattcgttgcctgaaattcaattcgcttctgccaccgttttaaagggctttttgtttgaaatgttctcatcggagaacgccaaacgcggcgcatttgctaagaaaagtttgaacggaaatgaattggagtccgaggccaacgagggggacgcggaggacattgggaagagtttggaggagcagtcgcatcagttggcactgccacggcttttcaaggcacttctctcttttgagtttgccaattactcccgtctgaacgaatccgaagtcgaccctttgctgctttcctgggatgttctgatgcgtttttttggagatttggacgtcctttcccgggttcgcttttgcgatgccatcgatgtcaaaaccctttccaatgcgttggcccatttgtttaattctctctccgaccccccggggcataaagatgccatttgcgttgtttctaatgtcgacgaccttttcactggcccttttcactataaattggtggaccgtcctttcgatcgtgaacattttacgagtaatctcttcttccg

SEQ ID NO: 86295 - DNA, 442 bp, Heterodera glycines
atctggttgatcctgcctgaactgatgtgttactttcaaagattaagcatgcatgtgtaagtttaacctgccagacagggaaactgcgtacggctcattacaccagctataatttacttgaccttgacttcttacttggataactgtggtaattctagagctaatacatgcaccaaagctccaatctccccagagcggagcgcatttgttcgccacaaaaccaagcgccctccgggcgtccagtgttgactcagaacaactaagctgatcgcacggtcttgtaccggcgacgtgtctttcaagtgtctgccttatcaactttcgatggtagtgtatctgactaccatggtgatgacgggtaacggaggataagggttcgactccggagaaggggcctgagaaatggccactacgtctaaggatggcagcaggcgcgcaaatt

SEQ ID NO: 86296 - DNA, 193 bp, Heterodera glycines
  unsure (1)..(193): unsure at all n locations
gaaaacaattggggcgctggacatggacgaattggaacgggcattgaaggagagcgtgcacgatgtngaaggcgattgtggtgantcaatccgggcaacccaaccgggcaggtgctgagccgagccaacattgaaagcatcatccaatttgcgcacaaacaccgactgtcatcttcgctgacgaagtgtacca

SEQ ID NO: 86297 - DNA, 577 bp, Heterodera glycines
catcttctgtactcctaaagaacctgaactcaacacattaacgccacttaatgacgatgatggacttaacaacattacactcataagtccctaagcaatctgtagctgtaaatcttcacaccgattcgtcattggctgcttccaccgtaaaagaagcgtcaaatacacaatttaaactgttttacacttgccctgactgtcctcgtgatcaatccccggtgcgctctgagtgttcagattatgtggacgacgattggtcatccattgaagatggggacaatccacgaacatctcgtgaagcgcaagaagcggagattgaggacaaataccgaagtgctttgaactttttgcaagagggaaacattgaaagggctgtctccatattttcggcacttcttgtccacccggtgatgtccaaatatcacatcgctgactggtcaacatttgattggcaaaaatcaatgactgccggcgacggcacttcatcgcaacgaattgtgccaaatatggcaaaactgtatttcaacatcaatttggccatgagtggactggccaaggacccgttccaattttatgt

SEQ ID NO: 86298 - DNA, 543 bp, Heterodera glycines
caccaccagcagcacgccaacgacgccaaaggggacgacgacggaaaattggagcgaatcattagcggctgctgttggcggaaagacccacttgtgctgatcatcgttggcgcactgattgcaatcattgtcctgctcgtggttgttgtgtgctgctgctgctgcaaaaaacgcaaacgccgccgccgccacacttctgccgacgacgacaaggaggacaacaaaaagcgcaaacgtcgccaccacacttctgatgacgacaaaaaggaggaggaccactaccacattgaccagcacaataagaaggagggggagcagcacggaaaggaggacaacaaatcgccgatacaaagcgaactgaaagtgtcgacgatttccgccgtgccaagcgactacaacacgaacaaacggctgggcgcaacagaattggacgtggaagcggaagaggtgccgaagacgaagccggttcccaaaaagccgaagtcagaaggaggcacaaagcgcaaactgtccaatttcttttggtccaccggcaccaccgag

SEQ ID NO: 86299 - DNA, 692 bp, Heterodera glycines
tatttggccgtttgctgttttggcattgtcgcgggcgctgtcggcggtgtttactattacaatcatgtccgttcaagtcgaattgacgaccccttcaacgaattcactcgctattcccccgccgggcccacaaaagacaaacttaagaagtcgggttcgcccatattcggtcagagcggcgacgacactttggcttacaaagcgcaactgcaccattaccagcagcagaaacagaaaatactgggcacagcgtcggggccggtggtggacaatgtgagcgacaacgaagaagacacggacgaaatggaccacaattacagcgtttttgagtgtccgggtctcgcaccaaccggtgatctcgaaatacaaaaccccaatttcgtgggcgctgagaagtcggcagccggcgaaacacgccgcacagaatgaagccaaggaattgttacccccttccaccctacatttattattgcgttccttcccaccaattcccttgtaaattaggcctcaaaatccccgtgaccgaccaaaacatccttttccccttccactgctctagtctgaacacttccgcacattccgaagttctgtccgattaaacattcctatttgagctattggatttgaatgtctacgctttggggggcttttcgataaacttgggcgcagtgttgtacagaaattgacgataa

SEQ ID NO: 86300 - DNA, 745 bp, Heterodera glycines
ggctgaccgaccatttccacttccatttgctgtttcggcacttccttttcactcctttttgctgcaactcaccagtaatgagcagcagccatcgcgagaccggcagaagtccaagaagtgtgctgatgcgccagtacgaaatgctgctgcaaaactcgaacgacaacagcggattccgtgcctggttcgacaataacaatctcttcaaatggcgcattctaatcgacgggccgccgggaacgccttacgcgggatgcaaactcacggcactgctccatttcccggcttcgtacccaaatgatccaccgacaatgaccttcctcaccgacattcttcatccgaacattgaccagagtggcaaagtctgcatcagcattcttcatgcgccgggcattgatccgcttggccatgagcagccgtccgagcgttggaatcccaaccgttccgtggagtccattttggtgtcgatccaagtgctgctggcagagccgaatttcaacagtcctgccaatgtggatgctgccattttgttccgcaacgatccggcgcaatacaggaaggaagtgcgacggcgcgtggagagggcatcagcatcgacaccgcgagcgaggtcgtcatcaacaccaccgccggtagcgcagccgtcgggagaacagcagcaggggacgccgcaaccaccagcgacaccgccgacgccaccgcaagaagagccgcagcagcaatagcaacaaactttgcgaatggt

SEQ ID NO: 86301 - DNA, 693 bp, Heterodera glycines
acgggcaaaattttgtcggaaggccgtggcgaagtgcaggagtttgttgacatcgccgattacgcaactggtctttcccgtatgttttccgggcgtattatgccatccgagcggaagaagcacctttttcttgagcagtggaaccctctcggagtggtcggtgtcatcagtgcgttcattttccctgccgccgtttacggttggaatgccgcgttggccctcgtctgtggcaattccgtgctttggaagccgtctcccagcactccgttgacgtccattgccatcactcgactcattggcgaagtgttgtccaaaaacggactgtcgcccgccatttgctcattgatttgtggcggaggggacgtcggaatgtgccttgttaaggaccctcgggtcaatttgctctcatttaccgggtcaactgaggttggccgtgtggttggtcagcatgtccaagcgcggtttggcaagttactgctcgaactcggcggtaacaatgccatcattgtgatggatgacgccgatttgagtttggttgtgcccgccgtcactttctcttccgttggcactgctgggcagcgctgtacgagcacacggcgactgattatccatgaaaaagtgtacgacgtggtgttggaacggggtggtcaacgcgtacaaacagctgatggacacgcgcatcggggtcgcgaa

SEQ ID NO: 86302 - DNA, 707 bp, Heterodera glycines
ggacaaaaacctggagaacattcgccgaattgaccaattcgcccgcaaagtgatcgaacattgcacccatgcggcactgttcaatttcagcattgagcagaacaaatggctgaagacggaggtggacggcccgctgttcatctacgaacggcttgaccagccgctgtactcgatgattgtcgtcaatcgccagtcgcccaaaaattttgtggaaccaatcacggacgggctgcagttgcgctacgagccgccctacatttttgtgcatcgcgaagatggctgtattcgcggtctttgggtgttcggcgaagacgaatgcaaacgagtttttgacactctgacgaatctgagcatggagctgaagatgaaaagtgccggtgccaccaccagcagccccaaaaacagcatctccgccatcaacaacgacagcggtgccgtcgccgctttcgctgccgcaacgccgccgacgaaaattgtcgctgccgccaaaccgtcaccgccgccaccgtcgcagcagcaacagcaacagtcgatccgcgtcagcagcttcatctcttccaacagcagcccgttcaacaacaccaatcagtacaccaactcgaacaggggaaccaccagcagcaccaacaccggtggtgggtggagccaatgccatgagcactgtcagcaacaacaacacaaccagcaccaccaccgtcggcagggac

SEQ ID NO: 86303 - DNA, 573 bp, Heterodera glycines
cacaaggaacgacagacatacggcgaggaagacaaaagcaatgcccaaaatcaaatgccgacgagggatgaacgacggaagatcagaagagagcgaaaagcgatgagtgacaaagcggacgacggcactcgaattcccgaaggtttggtcgagctgaaatttgaagcaccggcagcagcggcggaagaacaattgatcgaaggagagacgtcgacaaagtcggctttcgtttccaaattttccacgcatccgctgggcccatgggttccggtcaaaaaggaggagaaaaggcccgatctcgactcggccgactctgagcttcaacctcatggaaagaagcgagcaaagcattacgacgacttgcccgagcagtcgtacgggcccgggtcagctgactactcgcaaacgccggctgaactgcttgaaattgccgaaatggaccctgacgatttgtcattcaagccaaagcagacgggacagccgcagaaaagtgccaaagggaaagcgattggattcagaaagccgggcacaagccatgcaacgaaatcattcagaaaggcaaacaaaactgaa

SEQ ID NO: 86304 - DNA, 574 bp, Heterodera glycines
ttttcccaggatggccctgccttcttacaattctttctccggcactcaattcgcacatcgctttccctttgcgcctctttcgtcctccgttcgccctatttcgttttgcggcgtaattccgtcgcctcctcctccgcattcccttaattcgttgccgtcttcttcgtcctcactaaactctaacaattgttctcttctgctcccttctgagatcagtgccaaagtgttttgtccgccgagtgcaattgacccgaaattatgccggagggctgcacgtcgaagtcggcacgaactcagccacaaaaggacccatcgctgcaccgttggaggctgtgacaaagtgtacaccaaaagttcgcatttgaaggcccaccaacgactgcacaccggtgagacttgtgcttttggcacttttgtcggtgtcaaatcggtgcttttctgtccattccttcgattggcctttaaagtcaacaattgtcggtttatgtgtggcggcgctcaaaggacattcattcgcgctgactttgttctttctctgctcccctcattaagtgccttcttcaccagcgaacga

SEQ ID NO: 86305 - DNA, 642 bp, Heterodera glycines
tatgacaagtcaagtccgtagcggaacgactcgtaccaagaagcgtaccgctgaccaagttgtaaagacggtgttccgtcgcaaaatctgtctgttctgctttatggcctcactgattgttttcgcgctggtccttggtttggccatcactttgacagttatcacagtgaacaattggaaggaaatcggcgtgcttcttagcaaacaatcggcgttgaagagccgctcggacattgaagcgttttatgaaattgattgcccaatttacagtgacaactccaaacttccggacaaatgggaccaatttgatttggcattctgcaatcgctattgtgatcgcaaccaaatgttcgagttcatgtaccgtcaactcgaccccaaccggaaatcttcagccaagagcaaagacaatcaagagcttatgtgtcccatatacattgaattcaaacaatgtcagatggaggaagggggtcactgtgaggagaagttattcagcgaggaattcaccgaattcgttcaaccgggcggtgctggcacttcgtccaaaggggagaatgagacgattggcacgtgcgttccctgcccttcctaatccgaattaaaggaaaaagctgatgtttatctggccatgttaatctattg

SEQ ID NO: 86306 - DNA, 322 bp, Heterodera glycines
cgtatcgcactcctccaaccctatttgcgatcacacaaacgcggctgctctcggccaatgaacacatctcattaccaaataacatctctttgcacaatctggcatttccctatgaaatgcttgctatcaaaatatctattgaaaattatgaaaacctggcacacaattttccgtataacgcactcaaattggctacagaaaacactggctaatgccatcctctcactgaaaatcacttgtatggacatattatcaatgatttggcaaaaattgccgctcttaaagtggaatacgcactgaagcaacgacgggagaatgacct

SEQ ID NO: 86307 - DNA, 681 bp, Heterodera glycines
gctcggttacgtgttttccgctgctctgtccagcttggtcctttccttcggtgcgtaccgcgccagcttggcctttacgacaacttctccctcgcttttccgttctccgatggcttttttcgaccggactcccctcggccgaattctcaaccgaattggcaatgacatcgaccgaattgacgaaaacattccctgggcggttggctattccttgtcaattcttgccgaggcgttcaattccatcatcgctatttgcattgtcatcccttttcttgtccttgtcgctgttccgttgatggttatcttcctctgtattacgcacttttacaacgtttcttcggtccaatttcgtcgtttgaccagcaaatcgcgttcttcccatctctcttttgtggaggatgcttactccggctccgattccattcgcatttttaaggcgatcaaacaattcagggccaaaggctaccgaatttctgacatttgcaacgaatgctttatcgttgaaatattctctaacagatggctccaaattcggcttgacattgtcgccgatgtttccgtttttatttgtgtggctgttgcaatttggatggcaagtcaaggcgtcatttcgttgggggttcttgcgttggtcatcggctgcggatatacgttcaccggttaccttggcgaagttgcacg

SEQ ID NO: 86308 - DNA, 668 bp, Heterodera glycines
cataaaaaaatatgagaattcccattatattaatattattacgcatcgttgcattgctaatacatgatgcatgcgccggcaaaaagacgccgaggaaagcaaacagaaatcgtgccaataaaaatgggaatagtgggaccccgtccagacaagcagcggcaccaggaaaacagaacaaaaatacgccggaagcaagaaccaatgggcaatctccgaaaaagggtggtaagagcattggaaaccaagcaaatccagccgaagtaaaagatgctcctcaacagtccacgccaaaaaaattattacatgctgcaagcgttggtgtacttctactttcgaatcttgcagggcccataccggcaggagcctatgacattaaccaggatcggaattcacatatgaccgaacagtacaaaatgcatggacggaataatatggcggcatatatgaatcaaagaagtaatttatatggagaaactgcagcggcaaacaatatacatgggaagaataataatattcatgcgccaccaaaaaataaagcggttgaagagaaaaccaagccacaaatgacacacaataattttgcacgtcatacacgaacaagatatccgcctccaccacacaaaaagactcttcgatcaccaaacttttcagcattagctgctgaaaga

SEQ ID NO: 86309 - DNA, 698 bp, Heterodera glycines
tagtctgttccagtgcagccaactcgtggcattctgtgtcagaggtgctcagtgaacagaaacagcgcctttcccttaacggatggttccattacgctccggggacggcgaatgttgcacagacagggccaaattgcgctgtggaagagccgatttgtcgggtggagccatcgatgaatatcacgttggcagaagtcaacgaatggctgagtccaaattacattcgtccgggacaacatcggcaaatcaaacggatttttgcatacaaatccgagctgtccctccaacaatttctcaataatgaacgttataacaaagctttggatgagttggaaaaggcgcaatttgaaagtgttggcccaccgcacaaaagaaatgtatggcgtctcgtcgagtcatccttggaacagaacagcgttctccaaagtctattgcgtttgtttcgctccgaggccatcactcttttgttgacccaatggactggcctccatctgtacgatttgaagacaaaacgtggcacggcacattctccgaatggcgcaaaaagggcggcggaaccgccaaagaaacggaagagagcggacgaagaggaggaagggacgacgagcggaggactgaagcaggggggggaaagccgacagaggcggagaaagcgaagatacaaatgttcgaatcgcttctttcatccatcgtttcga

SEQ ID NO: 86310 - DNA, 542 bp, Heterodera glycines
  unsure (1)..(542): unsure at all n locations
gtacgcggtgaattgtggtgccaggagagccttacgttggcgccaaaatcttcctgatggaggctgacacgcttgatccggatgatttgttgggcgaagaacgatcggcgcccgacgggcgctttgaagtgcgcggaggtgagagcgaaattggcgacgaagaaccgtatttgatggttgggcacacctgtccacagcgaggtgtcccacctgacccggcctgccattttttgactcgcgttgatttgccaaatttcctcactcacattgaagtgccgccaattcatttggacggacaatacgaatttcagcatatttgtggcgaggatgatgtttaaaaaatatgaatgatggatgaataagataataaacagttcatttgcccatctttttggctaaatatgtaaaattaaattaattaatggcattnaaaaaaaaaaaaaaaaaaaaaaaaaaaaaaaaaaaaaaaaaaaaaaaaaaaaaaaaaaaaaaaaaaaaaaaaaaaaaaaaaccccccaaaaaaaaaaaaaaaaaaaaaaaaa

SEQ ID NO: 86311 - DNA, 704 bp, Heterodera glycines
cgacccggggcatggagcagacgatgcagtccatcttcccgcgcattcaagtggcactgcgccggtccatgcagaccttccaagactccattgaagctgagttggcacagtggaggtactgctcgaagatgcaatcgagcaaaatggaggcattgatcagattggtcggcgaatcggttgaagttcagattcgcggccctccggaaaaggccactgcgtgcatttacttcctggaggatctgtccacattggtggagctgacgagtgccgaagtggcgcccggtatcagcacagaacggcacttcctttccccggcacatttgagggaacacagaacgacacctgccatttttacgccagaaacaataatggaaatgcaacagaacgagtcgctggtcattgtgaacagtgacggggaggaggaggatggagttcaccgatgtggtttgtttcggctccaaagaagctgccggtctgctcacgctcggcgtcgacatttccgtctcccaattgcaattgtccgcccgctcggaactcgccgctttgctggacgcaccgaacactttgggcatggactggagcatcctggcggtgaagctgaacttgactgaacaaataccggaggtcgactcgtcaggccaatcgttgtcccgcactgatcagctgctcaccgaatgggcacttcactcgcccgacagcgcttc

SEQ ID NO: 86312 - DNA, 708 bp, Heterodera glycines
ggggcactcggaattggagttgcattgcgactacccatttggacttttggtcggttctgcagcaaccaattagctgatggactgtctgatttcacaaaaaacgccggcgaagacgcgactcaatcgtggtctttccgtggaacacggccatcgacaaacgcatttatgccgccatcgaggcaactcaagaaatagccaagaacccttctgagaagttgactgcccatgcgaattccttccttgacattgcgaattcgctcagcgaaagcattttgggactgccgcgtgctgtggaggaccccgagtgggggctgaaggagcgcgtcacgtttctcgcgtcgcgtatcggtcaccgaatcagctcaaagaccaacgaacgcatcgtggaaccgctgctgcagcagatgtgtgtcctcacagagcagttgtcgaagtgcattgtcctcgtggactgcgccaagcagcgccaggaatggactttcaacaaagtgagccaattgtcgacatcggtcgttgagttgcgcaacaaaatcgaaacggaggcaacgcgaacgcgaaagatcccgggagaagtgctgctgaagatcatccgcttttactcctccaagctgaacgttcagatgagcaaactgcgcgaccgcagttcggagttgctttcttcttcgatgcagaaacaaattctgacattgactgcatacgttcagcaat

SEQ ID NO: 86313 - DNA, 591 bp, Heterodera glycines
acatttcttcttcttcttcttacccactccaaccacgaaccgcttcagtgcgcaacgcaacgcaatggccacttacctattcatcgctgctgctgccttcggagcaggaatttactgttggaaggcgtacctcggcccgatgctcgaccaaccgaagagcgacgacgaggagaagcccaagccggaaggaggcgaagaagcgacaaccgccggcgacaaggaggagaagaaggctggcagcaagggcgacaagcacaagaagaaggacaagaagggcgaaggcgcagcagcagcaccagcggcggacaaaaaggaggagaagcgcaaggacaaacaccgatcgaaggaggcggggaagagcgacgacaacaaagcgggcaagaaggacaagcacgggaagaaggacaagaagaaggacaccgccgatgcatccaccgtggacgaagcgctgggagaacagagcacagcggagatgagccaagcagaggaatagccaggccctgctgcgtgcaaatgacagtgttcgacgacgacgtctcgcgacaccaacacacccatcccttgctttcgatcattcccttcccgtccgat

SEQ ID NO: 86314 - DNA, 579 bp, Heterodera glycines
ccttttaaaatttatggttcattcttagcattaattgccgtgtcaaagtgtccaaatgcttcttcctctgcttgtgctgatgcttctctcggcttcatttcccctcagtgccttttccccctcctattcgtcttactccaattggccttatcccaattctcctcgctattctgactacaaccgattgtatccatcatattcgggccaatatggcaattacagtggctacaattacggcaattattacaatccatatgggggcaatagccgaggctactacggtatgtacgacagtccttcttacggtagcggatattcgccctcatattatggtggctattatgggaggaatggtggcctagggtatggtggaatgtacccgggctacggtggctattcgactgcgtcctactacggcggttggccctatacggctgggtacggtgctcagaacggatacacatcgccgtggagataagcagaagaattgcgagggatttgcgaagggaccgatcagaaaggacggaaatggcaaactctctcataacaatggcataaatgataaaaaaatatgaagcc

SEQ ID NO: 86315 - DNA, 301 bp, Heterodera glycines
gtaatgctttgtgctgaatttaggacttgttcttcctgctcagcactttcatcttcagaattcccactccgattggctgttcccacgatggcattcgccgctggcaaaatctcattgaaaatttccttttcgcaaacaaaaaaagaaagaaagaaagaaatgttcgtttggctataaaaataaaaatgaattttcagtgatttatgttcaaatttcattaatatttcacaaaaaataaataaaacaaaaaaaaaaaaaaaaaaaaaaaaaattgaaaaaaaaaaaaaaaaaaaaaaaaaaa

SEQ ID NO: 86316 - DNA, 677 bp, Heterodera glycines
cggtttggtgccctccggcgccgttgttaaactttttggaagaatttgtttcagaatgaacttcctaaagtgaccgatcggcccaaaatttcgagctgtttgccgaattggacgaggtcgattcggtgctaaccgaccgcatgtccgcagtgattccgcaacctccgagcccggcacatccaaaattccagaaattgtatttggacaaaaaagacaagtccaccggccaagcgcacaaaccgaagaccaacaaagggccgttgcatcggttgcgtacctttttttccagggtaatattagagaagaaaattgatggcattgtgcaagtgtacgagaagataaaggacagccccggggggtgggctgttctcatccagaaaatgttcaccgaaatggtgctggccaagcagttcggcgagggaagtgccggcgagtcgcgcaaaaactgccaaatcgcactgcaattgatcagcaacggaggggacaaagttggaggagttcatttggacaaggtcaagccgttcgacagcacttggtccctggtgaaaagtgcagcacaatcgctggtagaactgttcaagcgcaatgccggaggtgaaaaggccaggatgaagagaacggagacgattttgcgagtgttcaaaacgtttgccatggatggaaatgcattggaagga

SEQ ID NO: 86317 - DNA, 630 bp, Heterodera glycines
  unsure (1)..(630): unsure at all n locations
cagatgtacgtggcacagcagcagatgaaggccggcacgggagggggcaaaaagtgaacgtgtcgaatgcgaactcacttcgattatgctctttcctcgtgtctttggcgctgcttttaaccattgcccagcaaaaggtctcttcaactcgtgtgcacattttcaccattacgctacccgtcgccgaattcctcgcccaaaatcattcgcggatttgtgatggttcaagacacctcaaacaaaaaaaaggaaatatttctttttgttggtcgattgtccgacaaatagcttttcgtctgtcttcacaatgacttttaaataaaaggggggggggaggggctaaaaatngactntgcccttctccccgtcccttaaacattcattcgtacgcctccgctttcgacatgatattccttccatccccttcagttccactcctttttgttttgcttgtgttaatttttgtttgttgtttggccactctttctttccatttccttttttacttttgtcgctgtccaatgagtggcaaataaatgcccttaaattattatttcttcatgggttctcacctctgtgtaccgtgtaccaatcattntgtttgtgtattttattaactcatcatctgtt

SEQ ID NO: 86318 - DNA, 178 bp, Heterodera glycines
taccgttactcggcgacatttcttccgattacacatttcctttccctccgttctgtcgtccaactgctgccactttcaattgtccttcacggcaatggctgaaactcctcctcctcctcctcctgctgatgctgccgctgttggtggtgatgaagccgttgatttggagcaacgtgtt

SEQ ID NO: 86319 - DNA, 388 bp, Heterodera glycines
tggaaagcatgtgttcatctctgcatcaactctagtaaaaatgtcaacaactgtgtcatggacatgcttactccatattgatgcatgcgaaacttctatggcgaaatcaatccccgtgcattacgccatcatatgccctaacatcaaacatggccgaatgtatcataattcataagtgccaatgaaacttgcctgtgatatggtctgcaaatctggaacgactcgaatagttgcacttgactcataccgcaaggaaattcaatgcttaaatatcattcctgtggataatcttcccgcgtctcctttttttgcttcaatacatgaaatacaatattcccgactacaaaaatgcggtaattgttgctaaaacgcccggagtcatgaacac

SEQ ID NO: 86320 - DNA, 521 bp, Heterodera glycines
atgtggaagaggcgaagacaggcgagaaagatgacgaggaagacgacgatgtggtcgtaattggcgaatgggagggagggagagaaagagatactctctccaccgccagcgatcgttccccggccgtccctcataaggcgctttatccatcgcttccgtccgattcgtccgcttcccaaatggaccctcctccgcagtatggtcatcctcaagctcagcaacaacagcagcagcagtccacgtggttctctcctgcttcctttctcggctcttccaccaattcgcctccctccgccgccaatggcaccgatcaatcggtgccgtccgcctcggccagtgcccagcgattgctgaccgaactccgtcagagatatcagccgtggtccgtgttcttcaagtgcgccaagttcggttttcctcccggcgtggcagcgattggaccgcgcgtcaaacgcaatttggcgacatttaccaccaattacctgtgccttttcgcccttctccttctttactgcgtgctc

SEQ ID NO: 86321 - DNA, 114 bp, Heterodera glycines
agttggatatatgatatcaaaattaactatggacaatcatcgcgcaacaaaacgtgccaaaatagaactaagctgaccaaacatgaaacgaactttcacaaacaatttggtcaa

SEQ ID NO: 86322 - DNA, 557 bp, Heterodera glycines
tgattgccgacaccttcttgtttaaagagggcgaccgttttctgcaggaggccaatgcttgccgttattggcccaccggacgcggaattttccataacgccaagaaaacctttttggtgtgggtcaacgaggaagatcacctccgtatcatttcgatgcaaaatggcggcaatgttggacaagtgctggagcgtctcataaagggagtcaaggccatcgaatcgaaagttccgttttcgcgtgacgaccgtcttggctggctgactttctgtcctaccaacttgggaacgactgttcgcgcgagtgtgcatatccgacttccgaagatcagcgcaaaacccgacttcaagtccatctgcgacggcctgaaattgcaaatccgcgggattcacggcgaacattccgagagcgctggcggcgtttatgacatcagcaacaaggcccgtcttggtctcacggagttcgaagcggtgaagcagatgtacgacggagtgaaacacctgatcgaattggagaagaaagcataatgggaggaccgatctatgatgatgacttta

SEQ ID NO: 86323 - DNA, 683 bp, Heterodera glycines
aggaattggatggcgagcagcgccgtcaccaagaaacagacaaaaactaccgcaaggctgagcggcgtgtcaaagagcttgatttccaggtggaagaagacaaaaagaacacggaacgtctgacggatctgatcgacaaattgcagggcaaattgaaggtgtacaaacgccaagtggatgaggcggaagaggtggcggccaccaatttgggcaagtaccgccagctgcaggcacagttggacgaggcggaagagcgtgccgatatggcggagaactcattgagcaaattgcgagccaagaaccgctcttcggcgtcaattgcgcccgcttcggcctccggcctggccacttccgccagtgccgccgtcctccggtccacttcttttgcgcgtaacagcttcgccgactattgagagaatgtgctaagattgttcctatccgtcctccgtttcctctttgctttgttctccctttccattcgtttgtcaatccctttaaatgtgtccactcattcacataaataatctatgaaattgccctggcggaaaatgtgccgaaattagcccccgaaaccctcacaaaatgttaatgttctttctagcgaatacatagccaaaagaataacccttttccctccccctttttattttcgttcatttgtgctcattttggtgatgatggcg

SEQ ID NO: 86324 - DNA, 682 bp, Heterodera glycines
ccaagctccttgcttctgaaatgtggcaacgaatcaaagaccgagttcttatttatgatcgaatgggcaggggaacggtgcacggcgagacatcaatcaaatatgagtttaaaacggacgaagattttgggaaatggctgaccggatccgactcggaatggagcgagggcttttccaagtgcaaattgtacagaagcgaccgtggctcggcaatctttgagggcacactcagcacacgactggtcaaagatggtaaaactcaaggagcaggatggtgttcgatgcgttcgctgaacgacaaaaaagccttcgataggaaaaattttttttcggactggtcccactacacccatcttctgatcaagtgccgtggcgatggtcgcacttacaaagtgatgttgcacattccgcagtttatggacatcacttggggcaattcctacacgtatttgctgcacacccacggcggcccccattggcaattcgaaatgattcccttttcacgcttcgttttcacagtcgaagggcgtgcaattgatgttcaatatccgttggaccctcgggcggcgagctcgattggaatcactctcatggacagaattgaggggccatttcgtctggaaatcgactttattggtgccacacatgacataagtcacctcgaaaagcatgcttatgagaa

SEQ ID NO: 86325 - DNA, 682 bp, Heterodera glycines
  unsure (1)..(682): unsure at all n locations
agccttaacagaattatagactcantcgtggccgaaatgaggaggaaatgacactacaaaagaaggtggacgagctgaagcgtgagttgaagggaattggcaatgaattggcagtgttgggcgcaaaattgaaagccggcgaaacaaaattagcatcgctcaaatgtttccgtacgaaatggcttgccaatgcgttgtccaaagaatcgggagcgattgttgagcgtccaccgaagaaaaaacgcttacaattaataactgaagacgaggaagcagcagaagatgacgaagaagaggaggatgaaggagaagaagacggagagggcgacgaattgcacgaacaaatggaatttgaggaggacggaattgaggatggacaacgacaattggaggaagcggaaaacgaagagtctgtggacgacctcgaccagtttctacacgactgtgtggcgattgacgatagcgatgttaattttgatgagacagatgcaagagatgcggaagaccaaatggaaattgacgaagaggacgacgatgaggagggagagagagaaacgaacaaccaattggacaatggccaaagagcgacgaaatcgaccgctaaagtcgttgctaacccggacaatctcaacaaactctttatgccgttgcccaaacttaacgaacagcttttacgtgatga

SEQ ID NO: 86326 - DNA, 586 bp, Heterodera glycines
catcctctaagaattcaaatcctctcagaaaatggcttcatctttctgctcttcactcatttccatcgtcgcaattgtctgtttgctgtgcaaatgctgcttttcagcaccccatccatgctgtcctggcagccaacatgttgtttcgatgatgaaagatcacaccggcacattctccgcttcgatgccaaagtcttcgctttgtctgagtgccgaaagagtcgccgctgcggtggaaaaccaactgaaaacaatttggtgccctggcaatggtggccaaacactcatcaacgagatcaacgcagctcaatcatcatctgatgagtgtgctcgctctctcggcttcgtccgtgccatgttcgaaattgccgcttccgccgcttcccatgtcggtgccaacgccgaattggccaatttggctgtccagttccgagaacaagttggcacaattgacaccaactgtgctgcgctgggcattcatgttgggcaaatcagcttgggcactcccaaaggagaccatccgcaagtgccttgactctgagagtgtgcttagtaaccctggcaccagcgggtctcacaagcgcca

SEQ ID NO: 86327 - DNA, 334 bp, Heterodera glycines
cactgcggtggtacttgggcttaaggacgaaactgcgctcgaagggtcagtggacagtgttgacccgaagtcgctgaacacgcagctgagcaacgttgtgttgtacagacgacggcagaaagggctaaaacccgcgcatttgcccagttttttttgtaagggcaaacacattcgcttcgtgcattttgagaattacgcttgtgcgctgcatttgttgaaaaagtcgttgcgcaaattgtaaaagccatgcccaaaagaagcaacaacaaacacccgtaaagctcatctccgtgtcttctgtctaattggaaatattccatagcttttgattttt

SEQ ID NO: 86328 - DNA, 254 bp, Heterodera glycines
attattttttgtattatttttcaatgccgcaattaattttgtcagttcacatcgcattgtcggttattatcagggcatacgtccattgacaaatgatcaagccaagaagtagacccatcttatcctggcattttcaacccctgactctcaaggcaatttgagtccattgagctctgtgcttaaacaagcgctaaaagcgggtaaatccgctaatggtgcgctcaaagtgatgattgccattggaggaggtggct

SEQ ID NO: 86329 - DNA, 531 bp, Heterodera glycines
ttttcgacatttcgattggtggcgtcaaaaaaggacggattgtgattggtctctttggtgaagtcgtgcccaaaacggccaaaaactttttggaattggccaaaggcacccatggctacggttacaaagactcaaaattccatcgcgtaatccggaacttcatgatccaaggtggtgattttacgcgaggtgacggcactggtgggaagtccatttttgagggcaaatcatttgaggacgagaatttcaaactgcatcactatggcgccggatggcttagtatggccaatgcgggccctgacaccaacggatcccagtttttcattaccacggtccatactccatggttggatggacgccacgttgttttcggtaaagtgctcgagggcatgaacattgttagagaaatcgaagacggcgaaactgctggcggagaccgtcccaaaaaagacgtcgtgatcgttgacagtggagagctaacagtcagtgaaccgttcaaagttgcacgtgaacctgtggtttgataaatta

SEQ ID NO: 86330 - DNA, 712 bp, Heterodera glycines
tcagaatgtgaacactgggtactaagcagctgaagcgcgacaacgtttacgagctaattggcgattttgcaaaagcgctgcttccctcctcatttctttacggctattgcaaagaggcgaattgcgcaccttcgtccattttgctcaattatgctgttgaactgtgcaaattgtcctcttctttaactgccgatgcgaatcgttttgaactttgcattgaaacagcgaaagctgccattttgaaagcggagatggacgaacgtactgtgatggtattgctgtccactgtgaaagacatttgcccatacaattacgaggccatcgaactgttgttccacacaatgcacgaaattgcaactaatggaaaaattgagccggaaaaccctgatttggtgctgatcaggggcgggtacatgcttctcaaattcctgagatgcacaaatcgtggcaaaaacatcagttccggagaaattcgttggtacaaacagttcaccagtcagaaaaattggaactcctctctgtcctacgtcacgaacactgaactcgttttagctgatgaaactgctggcgctccttcgctcgatgagagtgcaatgggcccagtccgacaacaatcgaatttattgccgtcaaatgagtccaattccattctgccgtcttgggcaatgaaacgactgccattccatttgctgttcaacgaagagaatgaatc

SEQ ID NO: 86331 - DNA, 318 bp, Heterodera glycines
  unsure (1)..(318): unsure at all n locations
tgatttctttttcttgtagtatatataccacactttctttattcttttccatattcctctaatntaggcgaattgataggataggcattaaataattagcggctttttccccttgggtattttcctttaaaattttcttgttcaaaattatgttttattttgctaattggccattttgccactttttgtatgtgtacatgtaaaaattatgtgtatatgtcattgtatttgtactaattttctccaattaaatacatacttatcgcgtttaatctttcttcgcttttgggccaaaaaaaaaaaaaaaaaaaacaaaaa

SEQ ID NO: 86332 - DNA, 663 bp, Heterodera glycines
atttttagtcggaagagtcaatttttcggataaattcatatataaaaggcacaaaaaattcatttggttgccattattttcatcattcattaattatcggcaattcatcttcatcaatcatcccttctctgtgtacaacgaaaacgacgacaattgagcaatgtcggaccatccaaatgttgcgctggccgacctcagctgcgtggcaaacgacgtttggctggacactctgttttggattgaccgcgtggaggtgggcacgaagtttgcactgatcgacgcacgtttcggcaagctggtggccacgcatttcaacctgcgcaagtggaggctgggcgagctgggcgttcatcgtgcaccaagcggatgggaccggggcggcacggcggctgtcaccgttatggacgacaacgcgttgatcaatcgactgccgctcgccacgtgtcctgcaccgggcggcgtgattggcttcagtgccatctacatttggtcttagcgaacaaaatttttttgcaaatttttaaaaattccctaattttccaggtacgtcgacctggaagtgatcgcatttctgcagtgcctgcaacgtgtcatcaatcgcggcatcgctgtgcagttcaccatccattcgacggacctccgctgctgggcggtgatggcgca

SEQ ID NO: 86333 - DNA, 632 bp, Heterodera glycines
ttatttacaaattcctccctaacgggcaacaagggctacaaggcagccgattggaaattggacagtcccgactgggtgggaaggctcaggctaatttcaatcggcgacaagctcgagattcgacttgaggacaaaacttcaggtgaactgtttgcgaaagcgccgattggtcagctgaactctgtcgactatggatcggtatccgactcatcccgctattttgttgtccgactgcgcaacgacaacgcccagaccgcatttgttggcatcggcttcgctgaccgagctgactcatttgacttgaatgtggcgatccaagatcatttcaaagcggtgaaaaagtgcgacgattcggcggaggataacgcagaaactgtgcccaagttggacttgagcttcaaagagggacagaccatcacggtcaacattgggaagaaaacgatcacttccaacaacaacagtagcagtgctgtgcccaaccttcggacatcgctcggcggtagcagtgccgtgccgcttttgccaccaccgcctgcctctgggaataaaattcgaaaatgacgtgtcattttttcacagattttgcttttcatttttctattgactgctgtgatttcattcgcataatttat

SEQ ID NO: 86334 - DNA, 666 bp, Heterodera glycines
acctcgtctttcgtctacctcaacaagttcaacatgtacatgaacagcatgggctctcgtggtgcgtcatccgctgctgttgttgcttctgcagcagcattgtgcctattttcggcaatggcagtggtggtgtacggtgccgaaagcgctgggcctaaagcagaccaggccatggctgccaagcagttcaacccgtccgcatttccggccatgccaccagagcttgagaaaatcctgccagccgatgttgtgcaaaagttgaaagctgtccatgccgatatgtcgttgaacatcatgcagaaacaagacaagattgaccgtatcatgagctccttgccgggagaggttttggaccaaatcccggccccgcccggctttgaacgtctccccgacgatgtgaagaaccgtctgaagcagatcaatcgccaaaccaacaaagcatgggccgacaagcaaaaggaactgcaggagtatgtcaagacattgccgcaggaacaacgtgccattctgatgatgggcccaatgggaggtccgcatccgccaccgcccagctttggccggcgccgatgaagcagtgtttatgtgcatatatgttgtgtcttttgattaatggatcatcaatttctttttcattttcttttgtttttgatgaattcaatgataaaa

SEQ ID NO: 86335 - DNA, 683 bp, Heterodera glycines
aaactctaaatatggacagacgtgctttcgattcggcaccaaacaaagaatttactccccacgaattggaattgcgtccccatttgtccttcttggaacggtaccgataggacccaaattcgaactcatgcatccgtttggaaaatgttcccaaaatggtttacgcggaacaactcgccgaatttctcggtgtccaattcgatgcgccatatgaaaacattgcgcggatgcaaaacggcgtcctttacattaatttggtaagcatttttttgcaaaatggcattttcaggaaacccttgagctcaactcgccttttgaggcggtcagcaccgtaaatgggcaccaatttatgctgcagtcgtccaaggggcggaatccgtactgtgagacgtgtctgggcacaatttggcggcttgcgcagcactggcgaagatgcaaaagttgtggttatcgaacgcatgagaaatacattgacaaagtgcggcgcgtttgtccgagtttggccctggcgagaacggaattctctctccaattcgatttgtgccccgagaaatcgctgcttgaacaaaattatcagtgcgccgaatgtttttgcccatcggattcgacgacgactctgaaaaactgcctcggatttgcgatttcaccggccttttctgttgtcggcgctgtcattggaacga

SEQ ID NO: 86336 - DNA, 543 bp, Heterodera glycines
attccaatgcatcggcccaggcactgctcagagttccgcccgtttatactcaacagaagggcagtgccgtgccgtccttcgcttcatcttccgtaccgtatgcccaacaacaacaacgacagtacccccaaaacagcgttcagtcttcgccccactcgcactcattgtcagcagcctatgcacatccacaaccccttttcgtgccctcctcctcctcgccaccgttccaacctctccaaattcgaccccagcaaaatgccgccgcaattcccagcgttcggcaatcctccgtcccccgaggggatgactttgaccgggcgaatgcctcgccaaaaaacaaaattccaccggcagtgtgcgcagttttctccgttttggaagtgctttttggcgtcgtctcactgttcgtgggttcgtccgtgcccaaatgctttgagtctctccaaattcgcccgtcccattcgcaggtgcgctcaatgcgaatccgtacaattgcctcatccaacccaacgtgcccatttatttgatcctttccggcatcct

SEQ ID NO: 86337 - DNA, 209 bp, Heterodera glycines
cgaaaaggggaaggagagcaatgcacagaagacggacggagaaaaggaagtgaagaaggaaaagaaggatgctagagagtctacgaaggtggcagagaagaagagcaacgagagactaaatgaaggggataaagatgaaaagagagttgcacggaatgaaagcaatgggaagaagagtgatcaaaaaaaaaaaaaaaaaaaaaaaaaaa

SEQ ID NO: 86338 - DNA, 109 bp, Heterodera glycines
caaaccgattgttagctgtcgtcccttttcttgtccgtacaaattttaatggcgctcgtgttgtgcatcgggcacttgatcagtctcgtgcattgctgcattgtccgtc

SEQ ID NO: 86339 - DNA, 622 bp, Heterodera glycines
actcggtcgttgagttgcgcaacaaaatcgaaacggaggcaacgcgaacgcgaaagaacccgggagaagtgctgctgaagatcatccgcttttactcctccaagctgaacgttcagatgagcaaactgcgcgaccgcagttcggagttgctttcttcttcgatgcagaaacaaattctgacattgactgcatacgttcagcaattggatgacagttttgtgaaggcaaaggacatcgacgaggttaagcaggaggtgctcgaagaagccaagcagaagctgttcgacatcgctcgttggtcggcttcgctgagccttcgcgggccaccgaagacttcgacggctgacgacgtggaacatgaaaacctaagcagtaacatcgaaacggagccgaagcaggaggagaccaaaggggaagaggaggagacgctgcagcagtcgatgaaggaagatgaggaagaaaagggcgaagaggaggaggacgaggaagaagaggaggactaagcaaattaacacagtgacagcggaaaagaacacttcgcctaatttgacatcctgagttaacgtataagacagttttgatgtcgtttttataatttaaattaattgaataaagggaatcg

SEQ ID NO: 86340 - DNA, 648 bp, Heterodera glycines
gaccttttgactatggctgccgtttcctctgctaaatcttcctccgccctcaaatgggtttcactgattgtgctcattggtcaaacgacagcgctcgtgctgactttgcgttattcgcagacccaaaaatcgcatccctccgacgggcccaaatatttgtcgtcgactgccgttttgatggccgaaatagtcaagtttttcacatgtgtctccgtcttagggtatcagaacaaatggaattttggccgtttgttgcacgattttgacgggagagattcgctgaaagtcggcgtgccagcgttactttatgttgtccaaaacaatttgctgtttttggccctttccaaattggacgccgccacttaccaagtcacttaccaattgaaaattctgaccacggcctttttctccgttacgatgttaaacaaaaagttggacctaatcaaatggatgtctctcattttgcttacttttggcgttgcgcttgtccagctcccaaaaagtgccgaaagtccgtccctcgctgtcgatgaaaaggcatttggggctgacaatccgccgcaaaaatcgaccggcgatggattcgtcggacttttcgccattttggccgcctgctgctcaagcggatttgccggcgtttatttggag

SEQ ID NO: 86341 - DNA, 591 bp, Heterodera glycines
ttcttaaaccataaattgtgtacaatattttaatttctttacaaaaaacaaaataaaatattcgttttgaatggattacgccaatcgtacacatgttgttggggaccgttccgcaccagaattgaaacgggaaccactgtgatggcattgttcggatttgggctcggaattctttctgcaatttccagctatgttggctttcacaacatctatgccggaatggtgtacctggcttcgtctcttttctatctgtcggttattattgccatgaaaaagaaggagccgtcactgttcctgccttatctgattttcgagggcatcggcttgttatgcgcagcggtgatctcattgactatgtttatctttggaatttggtctccacagcaagccttctctactaaggaacaggaaatgaattttcgttccctcatgcttttctttgccgccaccgtgggcattgacgtcgctttgaacgcctggttctactccatcatttaccgcacctacaatttgctcaaaaagacaacaaagttggtggcatcggcttccaccgtcgcttcggcacgcgtgccgccgcccgtgtgatttatg

SEQ ID NO: 86342 - DNA, 574 bp, Heterodera glycines
cacccaacgcattaaaatgaattattttattatcaaatttcttcctttaattatttatttctcccttttctaattgtaactatttgcggaagttaatagagacgaattggccattttactaatttattaaattattgcccgcaggcgttttttaattatattctaagataagaaggcctgaaaaaaaattagcgaaattgttagaatctttcaaaaaaattttaattgagaattaattgcagtttgacgatgaagcatttcttgccttcgtgaaaggacctgccaattttgacaaattttgcgccggaaaaggggtcactaatgaccaaagcaaagaactgttgacacaaatttatggcactcatctaggcattttgttttacatgcgaaagaattggcattgtgccaatgttaggaaagaatttgaagaatttatcgacccagaggaatgtcaactgtttcaaaattatttgtgcattgtttacgaatttttgttcaatgtttatgccgaacaagaggatataatgaaaccaattctcaagccaccaattggatttcgaatatcaattttgat

SEQ ID NO: 86343 - DNA, 591 bp, Heterodera glycines
  unsure (1)..(591): unsure at all n locations
agatgggntctcctttntactggctcgtattaattattttcgtgctttttcttcaactgtttcaagatctttcaagcaggtaaagcataccgtccaggacaatgttacaaccattgaattagtcgatgttcctattgcgtcaactcatagagaattgaaggaatctgctgctactcaatctaaaactccggatgactgttcttgtgttttatgcaaaattccaacaagcatttcctacaaagatgtgcttattctggaacaattcatgcgattggacggcactgttttcccaagacaattaactggtctttgccatgaccagcaacaacgacttgagcggtgtgtgatgcaagcgcattggtcgggacttttcccggatcggactataccggaatttgaccgtgctgggtacaagcgattcaaccgacattgggacgacgatttggcaatgtttcggctgaagtacaaattgcaccctggcagttggttttacatcaaacggtacaatccacgaattcgagagtaccgcccattcaaagccgacgaaattcctgacattgagagagagtgatttattgtgaattctctnta

SEQ ID NO: 86344 - DNA, 638 bp, Heterodera glycines
cattgaaggattgttgcttggtgacgctaaaacagaattggatgcgttaacagcagaaccaccggcagaacggagaatggcactgttaagccatcgctgatttgcgggaaggaggaggaagagacggagcaaatggccgagtcgaagtccgaattgggcgacgaattgtggacgggcatggaagggcctccggtgaaggaaatgaaactcgagacgagggcggaggaggaagaggacgagttcgacgaacagtttctaaacgaacccaaaacaattccaatggacacagaaacactcactgccgcggattctctccgctcgcatttcggctcactgaccaaaggaattccaaaccgaatgcatcgttcgtctcttctcagtgcctgggaaccgccgacttcgtccgcatctattctcaaaaatcccgaacaacagcggccttcccttttgtcggacattacagaagtgttcagtgcacaacaaaatgtactcggtccatcgacttcaattgggaaaattacggaaatgactcacaatgttccgttccaattcaacgccaaagttaccgttaaagagctcatctcccaatcatttggagagacaaaaggcgaagaattggccaaaattgtacaagccaa

SEQ ID NO: 86345 - DNA, 516 bp, Heterodera glycines
cagtcctccgcgtgcgaacgaatcgacgaattgcatttggagctcaatttcactattttggacatcacttctattgaaagtaaagcattgacaaaatggttgaccggcaaaaaggcgaaaaaaagctcaaaaaagttgctcattcgaccccgaagtcgtgaatttgccactagttggattcgcatattgcaatcggatcgtctcgacaacatttaccaagtgcgcgttcaatgcgagttcagcctcgagcaattctccattagttgtggcgccaatggaaccatgaccatggaaatgcgccaagacgggcagaaggattacttattgaacaaataccccaccggagagaaaatgccgccgaattacgcctttcagctgaatgggcctctcattaaggtgtcctttgttgcacaacagaaatcttgagagtgttgcttctgacgcggttttattcaatttctgaaaatggatgaatttcttgctccggatgaccacattattttttgtcttttccct

SEQ ID NO: 86346 - DNA, 560 bp, Heterodera glycines
tccgccctttcgactctttggcggcttttctccttttataaagcgtcactgtcgcgcagccaaagcgaatcgaagccgacgaattcttttggcagtctcgctattaaacctccgactttggcaaacactcattgtcagttcaactacaacaacattttggcaacacttggcaatggcattgattatcatcgtcagaacagtggaacaggtgaagggactcagcttccagtgggacctttcggtgtttttgctgggttttcgcctttctccaagccgtcgctgtcgcgcagtcaaagcgaatcaaaaccaacgaattcgacgaattcatttgccaacatcgccgcaaagccaccgactgcggcaaacactcagtacaattacaaccagcaacttcgcatgataatgccacaaccttcggtggtgtccaaaaagaattcaccgacttcacagaatgataaacgaatggataaattggaaaatggtgagacgaacacaccatcattgtgtggggatgaagaggagaaacctgcaaagaattaccttcacaagacccaaatttg

SEQ ID NO: 86347 - DNA, 595 bp, Heterodera glycines
  unsure (1)..(595): unsure at all n locations
tcaatgaaccgacaaaagcgccaaaatttaaattcaatttntaaaaagaaggcaattgacttggccctcaatcagtcccctctctcggtacgcttatcattgagctgtttccatctctttctcacagcagaaaaaattaatgagcggaacaaagtgaaagtcactcttttgtcaaaacctcagtgtgatgcgaatggttatgagataattgtggactataagctaattgtgggaaattggaccaaattggtacaaaaggacaaatgggacgtggaagaaacgctcttaagcatggagcacgactcgtgttacattgacactttggaagtgctggccaatgtgagggaaactttggccccacaagacatcaaaacttcaacaggatttcgcagttttaatatcttgtgttccgacagaagtttttacgtcaacacgacacatttgaatttgttgggtggccgaatgttcaaggaatggtatgaaagagaatgtcaaggggagaaaaacgctgtcatccaatcgattgacgccaatgaattagaaaagttgctccaaacttgttgtgcttacgggtcaactccaacgataccacagg

SEQ ID NO: 86348 - DNA, 516 bp, Heterodera glycines
atcgccaaaaaagtgaaccaattggaggacaaaaaggaaaatgacgttgaagaaaaggcggaagaactgaagacacagggggacaccttcaaaaaacagctgaacaatctctttgctcaggttgacgatcgtagacggaagcgcgacctcccggactatttgtgtggcaaaatcagtttcgagctgctcaaagaccctgtaatcactccttccgggatcacttacgaccgacaggacattctcacccatttgcaccgagtcggacatttcgaccccgtcacccgggttcctctcactgccgaccaactaatcccaaatttttccatgaaggaggttgttgaccattttgttcaggaaaacgaatgggctatagatttttgaatttgtttcggtgatttgatgggtttattcctgaaatttaattccgatgggcacgtgccgatgaaagtgttaatatagtattctatttattttgcctgtattactttaaactcaaccaaagtgcctttttaacct

SEQ ID NO: 86349 - DNA, 559 bp, Heterodera glycines
  unsure (1)..(559): unsure at all n locations
atgcngtcgacggacattcagccgaacgcacggaatcgcaaaaagtggtcgattggatttggaaaaccgagcaaatccacacttcttccgccgtttgtcagcttcctccgttactttggtccttttctaccattcgcttggcacacgttcggtcagtcagaaattgtgctgcaaaatatttttcacacttaacaatgggacttggccgtcggctttatcttatgacgaggaccccaattcgaattgtccctaccaatgcatctacacaacggaacgaacggccgaggcttcggcctcagtgttgctgttccacgttttctggtcgaatccgatcggattttggcctttttggagctggccccagcatcgcagtgaagaacaattatacgcctttttcactcaagagtcgccatattacgcgggaagtgccttcaacaaattgtctaacgattggttcaatttgtccatgacttaccatgctgacagtacaatagccacaaaatacgatgagttgttggagcacagaagcggcgaaatgctggcgggggaagacgaattc

SEQ ID NO: 86350 - DNA, 428 bp, Heterodera glycines
gcagtgctttcggccgcccctccaccatttttgcccggttaaccgtggcggacgaacacacaaacgatgcgggcattatgcacacaggatttgctgcagcaatggccgacgtgctgacggctgcgaccgttcgaatcaccgccgcccaacaaacgcccgtcgtttcggtggaccttacaactgcaattgttcaacctgcccgaattggtgacattttgttgatggaggccaactgtttgcaggcggaccggtccattgcgttcaccgaggccattttccgtcggaaaagtgacggacaactgattgtgaaggcgagccaacagttggccatcctccattatttgccattgaaaacgaagggaaagggcggtgacggaaatgacgccaaaaaggggccgactgattgtgaacaacagcagcagcagaac

SEQ ID NO: 86351 - DNA, 556 bp, Heterodera glycines
catcggcgaaacttccggctatttccagcgtctgctcatttcgctgtgttccggcgcgcgtgatgagcaaatgcacaccgacccaattaaggccaatcaggatgcccagcgattgtggcgcgccggtgaggcacgcctcggttccgacgaaatcgccttcaactctattttggcggtgcagaactttgttctttttcgcatggtctttgacgaataccaacgacagcatggccattccattgaacaggcaattagcaacgagtttagcggtgacattcgtgatgccaatttggctttggtgaagagtattcgcaaccgtgcctcatatttcgctgagcttctccacaattcgatgaagggcattggcacccgcgacaccgatttgattcgtctcgtcgtcacccgctccgaagtcgacttggtcgacattcgccaggcatatcaaaatatgtacggcacttcactggaaaatgccatcgctagcgactgctctggcgcttataaggatggtttggtcgctattgtgaagggatattaccactgattgcttggcact

SEQ ID NO: 86352 - DNA, 612 bp, Heterodera glycines
caggtgctccttccgctcatccgtcttccccttgctcttcctctttgcttcccccgcccgtctcgtctctctccgtcccattgcatcaccgatccagcatttctggcggcgggtcccgcccaattgtcattcggaaagggccccaaggcttcggattttccatacgatccgtccgcgtttatttgagcgaaatgtccgagtattactccattgaacatattgtggccgctgtgcgcgagggttcgcccgctcgggaagccggtctccggacaaacgatttaatcacgcgcgtgcacacccaatcggtccacaacatgactcaccccgaaatgatgcgccgtctcctctcctgcggcaatgaactcactatccatgtcgttccattgtccagcacctccataaaagagggcgaaccgcgtcgaaacattggcaaacccttgcgcaagaagccgcgacggccgccaaccgcacaacagaaaaacaaacaacagagtcgcaaaggttctgcacttctgcgacgactcagcggcaaacggacagtcggagacaccgttcccggcacttcgtctcagaagcaaatgttcattccccgttccgtgtcctcccaagaaa

SEQ ID NO: 86353 - DNA, 611 bp, Heterodera glycines
acctcgtaatttctgagaaaccgacagttttgctcacgttcacaacagcgccattctcagcaacatcgcacaaaaatggcacgccgacgaagaaagaaggagccgcgaaagcagtcgtacaagctgtacgttcgacgtgtgctgaaggaagttcatccgggcaaggaaatctcaatgcgtgcgttgaacatcatgaactccttcgtcatcgacgccttggaccgcattgcaacggaggcgacgcgaatggcccacaacgaccggcgcaaaaccatcacgcttcgcgacatggagttttctgtccgactgtgcctgcctgacgtcatggccaaagatgcgaaccagaaggctcagaaaacggtgaccaagttctatgctgcaaaagtgcgggatcggatgagaaggacggagatgcgtcgtggcgaatttgcgatgatgcagatggcagcgctgtgagcacactcaacttttggacgaccggcggatgaagccacctgtatattgttgatgattggccccgtatcccccattactgtatgtgtatgtattatacaatgtatctaccattcttgtgtgtgtatgtattattcactatgtgctttatatgtata

SEQ ID NO: 86354 - DNA, 671 bp, Heterodera glycines
catgaaaatggcagtgaacaacacagaaagactccatttcagcagttttgccagtcaaaaatttagcctacaaaatttccaaaactgtaacatcgttgaaaagctgaacattaggaacacgaagcagttcaacattgacattcgcgtcgaggagggcaatgggctgttcactgtgacatttgacacgggcggaaaagcgacaaaatgccaatacagaagcccagatatgccaacatgggcagtccaatacataacagtgagaactgaattagcccaactattttgaaagaaatggaaaaaacatttataaaggaatgaatttcaaaaagtcagaataaaaatgggggattaatcgcaatttaaagctatcgcaattttatccaaagtgctaagtgaatttttacactttctcctaaagattgagtttaaaaatgaccgtccgcgggcactttcgcttcagccggaaatcacatgcgaaccgcccgatcgttgcataggagtgaatgaattgatgaagaaagaaattcatgattagcttttctatgttaaatttaaattatatttatatagataaaattgatttccaacaaaataattttctttttgtaaacaaaaatttctcgaaaaataaatcatttatttttcccaaaaaaaaaaaaaaaaaaaaaaaa

SEQ ID NO: 86355 - DNA, 705 bp, Heterodera glycines
  unsure (1)..(705): unsure at all n locations
cnaattcctcttcgccgctttctgcgccttttgctgctcattttcggaaattcgtctgaccctgcccaaattgtgtctccgtgggcttggcgaatgccgtggctgcaatggctgcttctcttttggtttctcattttcatgcagcgcgtccaatattattacgcgtggacaatgaccgatgccatctgcaatattagcggttttggcttcgatgggttcacaagcgatggaaaacccaagtgggacttgaccaccacagtggacgtgtggaaagtggagacagcgcaaagtttcaaagaaacgctggacggatggaatttgaaaacgatgttttggctgcgttacattgcctacgaaagaatgccgaaaaactacagaacattgtccacctacgcactttccgccgtttggcacggccttttcatgggttattacctttgttttgccaccggtgctctgataacagtcgccgggagaatgtctcgccgttgcattcgccaccatttccaacggaatgcatttcttcaccatttgtacaatttgctgacttttttggccaccaaattcgcactcgcctacacaacatttccatttgtgacaatgcatctgaacccgggcctcctcctttacaggcgactctttttcttcctgcattttctcgcattgttcgccattttggcgctcccccggcttttgcctccggag

SEQ ID NO: 86356 - DNA, 683 bp, Heterodera glycines
tgacggaagttgcagaaacggaagaaaattgggacactttatttttggaaagaaaaacaaatggaactgccctgaaaaggcgaacgacaaacaaagaaaacgtccatcgctacaacgtaatgatgcaactgctgggcaaatgttggaaaattgtaacttactccggtttgctaacaatgcattgcgaaagtattttctctaccttaaagcgaataagaaatttttagaagaagacagagataatcgtggagctgaacaaatcattaaggcgaaagacgatttgttgaaaaaattgtcattgaagccctcatttttgcagttatcggaaaacaatttgtcgacggtaaaaattgttctgctgaaggcatacaaacacttcaatttgcaaactgaaaaccttgaagaaaatgaattcaaattaattacggaaaaatttgtaaattttgaaaattgtgctaaattgatgaagttgagcaaggcatttcaaaaaaagaagtcattagaatttccaattgatgatacgatgaacagataccgtaaagcattaggaaaaatcaaagccaaaatggaagatgacgatgattattgtataaaatgcaaaattcctacagtcgatgaaattataaacggaaaagaagcaaaacttaaggaccgtttcgaagatgcatttcaaaaagctacca

SEQ ID NO: 86357 - DNA, 573 bp, Heterodera glycines
cgcaaactgactgtccatatgacggacgaaagcagattggaggatgtatacaaactgatttgggcaattggacgtgacccgttgacagctgagctgaacttggccgatgttggggtcaagctaatatttggcgactacatcaaagtggacgattaccaaaacacgaccaaggagggtttttacgcggttggcgacgtctgcacaccgaaattcgaactgacgccagttgcaattgccgctggtcgccgtttggcccatcgtttgttcaacaaggaagcggagaaccgtctcacctacgaaaacattcccactgttgtgtttagtcatccgccgcttgccacaacgggcctcagtgaaaaggaggcagtggagcgcttcgggcgtgaccaggtgaagacgtacaatgccggcttcacgaacatgtactttgccatgactcaacacaaagagaaaacccacatgaaaatcgtgtgccacggaaaggatgagaaggtgattggattgcacattttgggcatgggtgcggacgaaatgttgcagggcttcgctgtctgtgtgaaggcgggtcttacc

SEQ ID NO: 86358 - DNA, 308 bp, Heterodera glycines
tttaattttttgtctgttttttaataattagttaatttttttgtcggaactttcgttcattgtgtgtctgtcctctctctctaattataatccttcatcttctttgttctttaatctgaatctgctaatttcgtcttgtaaacatgcattttcatcgtcacgctttaaacagtcaattttatgactgactgactatgaattaattggtgttacattttttaccatggaaaatcgtcatcttgggatagacacacccaatcattttttcttgctatattctgtcacaatattgtttgtgttggaaaaat

SEQ ID NO: 86359 - DNA, 632 bp, Heterodera glycines
gatgtccatgcttcgtccgtccgttctgcccttgggcacttctgctcgtccattggtcctctcctgcgtggccatcgtcgcctccgttggcattgtctgtgcccattcccaatcgaagggtatttccggcgccccactcaatccgagcccttcactgctttttgtgtgtgggctgagtttcgccacgcttttctccgtcattttggccatgttcggcctttcttggctccgtccgatttttcttttgcccattatttgcgcctcgggcgttgtctgcgtctttcacactctctccgtggccaattggctctccgactggtggatcagtgctgatcagtcactcgacttggattggctgatcattttcacctcggcgattaccttccaagcaatttccatgctggtcttttctttaaaagcatttaatgattttcaaattgttaaggccttttaccttcaaattcgctgctatcgccttttttgacagtcaaattcaaaatattccattaattgttgcgttaataatcgcttcgactgctgctgaaagtgagctatttctaaaaggtggcggtaaatcatttttatttccataggccattttcaatattttttaattgaatgaaattccctgg

SEQ ID NO: 86360 - DNA, 423 bp, Heterodera glycines
attgaaaatggcagtgaacccacagaaagactccatttcagcagttttgccagtcaaaaatttagcctacaaaatttccaaaactgtaacatcgttgaaaagctgaacattaggaacacgaagcagttcaacattgacattcgcgtcgaggagggcaatgggctgttcactgtgacatttgacacgggcggaaaagcgacaaaatgccaatacagaagcccagatatgccaacatgggcagtccaatacataacagtgagaactgaattagcccaactatcttgaaagaaatggaaaaaacatttataaaggaatgaatttcaaaaagtcagaataaaaatgggggattaatcgcaatttaaagctatcgtaattctatccccagtgctaagtgaatttttacactttctcctaaagattgag

SEQ ID NO: 86361 - DNA, 320 bp, Heterodera glycines
gaagaagctgcccattgagaggggtacatggaaacggcgacgatttctcagagagattggccctaatgagagagaggcaaattaaataattattaggacgattttcacttttttttctctttctcctgctgttgttagaattgatgttctgtcatggactgattagtttattattaaattaattcactctgaccaatttcattttaacctttgttttggccggtaagacttttttttttttaaataaatcgataaatatttacattgctaaaaaaaaaaaaaaaaaaaaaaaaaacgtccaaaaaaaaaaaaaaaaaaaa

SEQ ID NO: 86362 - DNA, 664 bp, Heterodera glycines
caatttgtttgtggatgatgaggacggcgaaggacagcagcaaaccctgcttatcctgaacaatgttgatgatgatgatgttccactgctgccaatgacgacgacagttgaaatgtcttccggtgctgcaacaactgcttctgccgctgctgttgctggaactgctccgtccgctggccctatgccctcatgcatttgctcgtccacctcacagctgttgacagcggccggcatggacggcattccgccggccaaaacgcccgcaaattcgggcccggacgcaaattttcttgccgattcgttgggcgtctcaccgctataccgccaagaagatactaaacgatggcaaaccgccgccaaagtgtaccagtcaagccgtagtcaaatgcacagtccaacctccggcacttgtgcaccgcagcactttcattttggcgaatcgctgacggcggagggccatttgacgcaaaaaattcgccaatgccgaagcagcggttcccccatttcgttggaggacattgccgcggtgaaccgccaattccatcggcaaatggacagcggacagcgccggcgggtgaacggcccggcgctgaacggctcgctggagttggaggcaattgcggcggtgcatgaactcgcctcacaggtcaaacaaatctctgtc

SEQ ID NO: 86363 - DNA, 730 bp, Heterodera glycines
ggctgcccaacgccacggttcgcgtaacactaacaacaagacgtacaacaaccacgacgaggacgacaacaacggatacatatacaacccaacgaaaagtgaccttctacgaggatgatgttgatgaggagttcgaatttactggaataatttggccaaagggcatttatggcgtatacgcggacatcaaagacttcgacatgtcggattcggagaaagtgacaacgcgaaatgcgcggccaaaagtgttagacaccagagatgatggcaaatttacggcaaaatttatcgcgcccagaagcagggagcccgactcggtgttcctccacatatttgggagcaaaaaagatcctcatttgtatttggacgtgtccgaagtgcaatggggcaatgtgtacatttttgacttgaacaaaacggaagtgatcgctgttcggccgcgcagagttgcggatgaattgaggaagttggaagaacgggaccgaccaccggtgaagagggagcaaccaaaaccgcaaccgcagccacaagcacaacctcaacctgtgacttttcaaaaaattctgtccggtttggtttggccaaccactgaaaagtacaccctgctggtgtcatcgcgtgattttgatttggatggacgaggatcaccgatcaaacaacgcgccaccaatcccgacccgaccagagccgagacaaactacaagggcacattcgacgtcaaaatggcact

SEQ ID NO: 86364 - DNA, 686 bp, Heterodera glycines
ccatttctgttggaggggcggactgaatgtttacgatatttatgaaaattgcacgccgcacccaaacaatttggacataatgagaagaggcattttcaacgcaaagtcaatgcactcaaacgattcagttttgtggcggactgacgacgcttttgaaaacgccaatcagccgaaggaggaaaaagtgaattatttgctccgctgtttgaacggtcaaccattggttgattatttgaacaaggaccaggtacgaaaagcgctgcacattccgccgacagtaccctcttggacccaatgcagccgatgggtggccatgcattaccgtaaccaatacgccgacatgtcccatttcgtgtggaaagcgttgtgggccaatgttcgggtactgctcttttacggagacacggacatggcgtgcaactttctgctgggccaacgcttctccgaaatgctgggcttaaagcgactcggcactaatctttggcattttggtggccaaattgccggcataaaaacggaatatggcagcggacttacatacataaccgtgcgcggtgctggacacatggtacctcaaaaacgtggaagtgaaattgaatatgcgatagggcaatttccgacaaacagaaccatttgagaaaatacagctacaatttgcaggctaatgggttcatccaattactgtt

SEQ ID NO: 86365 - DNA, 685 bp, Heterodera glycines
taaaagttattgcgcagacattggacatttaattgcaaaccgtacattcgtgtggtcaactttggcctacaccgccgtggtttttgtcaccggaactttgtcatggggtcccaccgccatggaacacgccaaagcgatggacgaacatttgaacgacacctcaaaattgagacctgccgaaaagaatcaaattgcgctaatttttggagtgatcacttgcgttgccggaattttggcgtttcgttgggcagtttaattgcgcagcattggaagacgggcaaattctgttttgcgcaccaccgctcgggaagggccgatccgatcgtttccgcggtcggttcgttcgtcgccgctccgttgatgttcgtcgcgttctctttgatcaccactgatcagcttctgtcatggttcgtcgttttcctcaccattttgtgtctctgtttgaattgggccattaacgtggacatgctaatgagtataatcgtccccgaaaggcgtagcattgccagcgccattcagattctcttttcccatttgttcggcgatgcctccggcccctatttggtcggtgccatctccgacttcgtccgcggctcttctgatttgccaaccgatcgtttccattcactgatcttcgctttttatctgcccaatgctttgctttttctcagcggcgcggcatttc

SEQ ID NO: 86366 - DNA, 691 bp, Heterodera glycines
caatccgatgtatgtgaaggtgatacatccctacggcgaagtgttgcacgtcgactggaccaaacagtacaaagcattgaggggcaaaattggcattgcctttcccgggtacatgatccacgagtccggccaatggtccgacattcacaagaaatggtttttcttgccgagaagagcgtcaaacgacacttattccgaaacggaagatgagcacatgggcaccaatttattgctgatagccgacgaggactttgaacatattcaggtccgtcacattgggccccccggcgatggcttccgcggtttctctgccttccgatttttgccaaacaccgaagatgacatcatcgtcgcgataaagtcggaagagcgaggcggcaagccaatcgcctcctatttgttcgtcttccgtctcagtgatggccatgtgctgttggacgaccaaaagtttgacgggccctacaaattcgaaggggtcgtcgtgtactgacagagcaaattgggcaatattgttgtggagtcagagtttgttatttgtgtatttaaaaaagagcagacaaaacgccgtcggcggaggagaaaaagctgacaataaatattccatgaaattttttaattaaaggcatttggaaccactcgaaacgcaactatttttttttgcttttttaattattttgcccacctcatttgg

SEQ ID NO: 86367 - DNA, 714 bp, Heterodera glycines
aagcgaaaatgtcgctgctgagtgttctcccgacgcgtcacttaaggggcagttctgagtaacaacaaacaatttcttctttctcgatatttttccgtctcaaatttggcaatgaaaaaaattcgagtcgccaatccggtggtggatttggatggagacgaaatgacgaggataatttgggctggcatcaaagagaagctgatcctgccctatctcgacatcgacatcaaatattacgacttgagcatcgaaaatcgagacgccactgacgatgaagtgacagtggacgcagcggaagccatcaaaaaatacaatgtgggcataaaatgtgcgacaattacggcggacgaggcgcgcgtgaaagaatttggccttaaaaaaatgtggttgagtccgaacggaacaatccgaaacattctcggggggacagtgttccgtgagccgatcatttgcaagaacattccccgagttgtgcccgggtggaagaaggaaattgtgatcggacgccacgcatttggtgaccaatacaaagcgacggatattgtggtgccgaaggggtccaaatttgaaataaacatcattaaaagtgacggacaagttgagaggcactcggtgttcaactttgccgatacgggcggtattataatgggcatgtataacacggacgactccatccgtggctttgcccattcctgcttccaatacgccctcaaa

SEQ ID NO: 86368 - DNA, 657 bp, Heterodera glycines
ccacgaaccgcttcagtgcgcaacgcaacgcaatggccacttacctattcatcgctgctgctgccttcggagcaggaatttactgttggaaggcgtacctcggcccgatgctcgaccaacctattagcgacgacgaggagaagcccaagccggaaggaggcgaagaatctactaccgccggcgacaaggaggatattaaggctggcagcaagggcgacaagcacaagaagaaggacaagaagggcgaaggcgcagcagcagcaccagcggcggacaaaaaggaggagaagcgcaaggacaaacaccgatcgaaggaggcggggaagagcgacgacagcaaagcgggcaagaaggacaagcacgggaagaaggacaagaagggcaagaagaaggacaccgccgatgcatccaccgtggacgaagcgctgggagaacagagcacagcggagacgagccaagcagaggaatagccaggccctgctgcgtgcaaatgacagtgttcgacgacgacgtctcgcgacaccaacacacccgtcccttgctttcgaccattcccttcccatccgattgctgtgttttgtctgttccaatgcttcctaaatgttccccttgtgaacagtgatccttcctcatatgacctgaatatgtatatattgt

SEQ ID NO: 86369 - DNA, 528 bp, Heterodera glycines
tttattgagaattttacatcgaattgtccgattgtgtcctcactgtgtctatcagacgacggaattattctgcgaacggtttctttaacgtctttccttttatacaaaaacgttctacgcctaagcctactggacctgtccgtcgaacttcccgctgttatcattcgaagtgatgtgcgacaaaagcattctgaaagaacctgctgaaaaggtgatggaacaaatggattctggcaaccatggaatgcttctgatgattacagtgaaattaaaaaacgtcttttgcgtcctccgaatgatttctccgagctcagggaaattatacgcaaagacattgaaagaatggcacagataaaggaggaaaacgtaaaaaagaggaagggaacgaccaatgggaagaagcaaatgacggatgagcagaacgaaacactggaagaagatgggcaggaggaggacgaaactcgcaggaacagaatgatcaagcgaatgttcttcgttttttgcctgacctttcctttctttgtgatc

SEQ ID NO: 86370 - DNA, 454 bp, Heterodera glycines
  unsure (1)..(454): unsure at all n locations
gcttccatttgatgacacttattctgctgctattggttgttttgatggtccaactgaacgagtcggcaccggcagatggccaaggaggacacttggcaatggttaatgaagcggaaaacgaagccgaccattctcttaccgttttgcgctttaaacgttcatgtccacccccgtgtcaagaaaaagattgtccttctcctatgtgtgctctatgcagtttctgcggatgagcgttttaaaataggcaggcgaaaggaacatttgcgacgggatgacaaaatgaatgggaagaaaatgtgattttttaactaatttgatggacaatataattaattaaaaataatttttaagttttatgaaaataaatttaatgtcagcnnaaaaaaaaaaaaaaaaaaaaaaaaaaaaaaaaaaaaaaaaaaaaaaaaaaaaaaaaaaaaaaaaaaaaaaaaaa

SEQ ID NO: 86371 - DNA, 430 bp, Heterodera glycines
tgacgatgggtcgttgagcgcggagcaaaaaatggagcgaattgactcgatcatttgcactctgccggagaatgtcattgaccaaattccggacccgccagaagttgcgcaactcccggctgatgtgcgccagcgcgtcaaacaaattgaacgccagcagggaaagtcattcagcactaaatttgaagagatcatgaaatatgtggacactttgcctgaaggcacaaaatcggctgccaaaaacattttccattgaatttttcatggaaaaggaggagaggaaagaagtggaaaaagcagcatggattaatgaaagcaaggctaaacaatatttattaaatattttattttttggtaaaatatttccaatttttcatttccaataaatatttttgctttgttgaaaaaaaaaaaaaaaaaaaaaaaaaaa

SEQ ID NO: 86372 - DNA, 320 bp, Heterodera glycines
tcagtccgtttcctcctaaagcaataccttctggcagcagacttcctctgaaactgctctatcggctcatacactttgtaacgggctcctctaatttctctgttgcgtccaatttgtctcagcaaacaccaatcgctaatgtgaacaatgcattttcgttgaaaatgcgacctcccaaatcactcagtgaaattgttattaattactttagaaatgaacatttcatgtgtcgtgttcctgtcgctaactgtcctcccttttcccttttttatcctcatcgttgtcctgaaccaaaaaaaaaaaaaaaaaaaaaaaaaaaa

SEQ ID NO: 86373 - DNA, 732 bp, Heterodera glycines
gtgattttgggtgaagtagcacaaatggcagtacaagagcgataaaagcagcagcagatgcacaaagaatttgcgaaaattgagggatggacgaagtgtggactttgacccgcggcagatgtgcaggcgtataaaagggcgaacgaaatgaccgttccatccaacgccaagcaaatcgcaaatccagcgattcattcagtcatttgcctacccaatttgtgaatgaaattcatggcgaagggcacaatgcattcgcaaattaaagcactaatgaccaacggtcattcttcccaaatgttttcccctccctcccattttaaatcaaattgcaaatcacaacaaaattcacagagccaattcaactccaaaagccgaaaatgtctcctgttattgcccctttcgtcctcgccatcattggcatcatcgccttgcccaccatcgaaggcgcagtcgggcgtcagcaagtcaagctgggcgagcagtacaaatacgagaatgtgcccggcaaattgatggtcaagcggcaaactgcggccagcaaggagccccagtatttgttcgccggtcaaacggcatggaccacggacggaaaagaccgctttggccatgccgagttggacttcgccactggcacaatgaccatccccaacttctccgagaacgacttgggctcctacaccttcccgcttgagcagcccaacttcagcgcagtgaatgggcccaacggatgcg

SEQ ID NO: 86374 - DNA, 656 bp, Heterodera glycines
gtggggaaactgaggcacaattggaaaatggaatgcgcgagaataaaatgcattggccgagaaagtgtcggaaactgaggccaaattggaaaatggaatgcgcgagaatcaaaatgcattggccaagaaagtgtcggaaactgaggccaaattggaaaacggaatgcgcgagaatcaaaatgcattggccgagaaagtgtcggaaactgaggccaaattggaaaatggaatgcgcgagaatcaaaatgcattggccaagaaagtgtcggaaactgaggccaaattggaaaatggaattcaaaacaaccaaaaggcgttgtctctgatgaagaatatggcaacattagcgttctttcacttcccccttccaatttatcatcgatggaatgcctcggattgtgacccagaaattgtgatcaatgaaagcacaaatgccattcagcacaacggaacagaagatattgactggcgttcttgccgagcatggccaattcaaatgtcatctgctgttggtcgcattggcattatttatgcggaatatcggattcttgctataattggaggattgcgcattggactatcaacaaaagaaatgccattggaccgttgggttggaaatggccatgtttcgtacggttacgcatattatggagaga

SEQ ID NO: 86375 - DNA, 659 bp, Heterodera glycines
agaagctgtatcacttggaggattttatcggtttacgagttccattcgcccgctttggatgatcccgactttaatgccaaaccgatgattttgttggtcggacagtattcaactgggaaaacgacattcattcgctatctgttggaacagaactttcctggaattagaattggtccagagccgaccaccgatcgtttcatcgtggtgatgtacggcgaagaagaagctgttattcctggcaatgcgcttgtcgtcgactccactaaacaattcagagcactgacaaaatttggaaatgctttcttaaaccgttttcaatgttcgatgctgaagaatgaagtgctaaatggtgtgacaataatcgacacccccggaattttgagtggcgaaaaacagcgaattgatcgtggctatgatttttctggcgtccttgagtggttcgctgaacgagtggatcgtattattttgcttttcgacgcacataaattggatatttccgacgagttcaaacgctgtattgaggcactttcagggaatgaagacaaaattcgaattgtgttaaacaagtcggacatggtcgaccatcagcaactgatgcgtgtttacggcgcactgatgtggtccctcggaaaagtgttcaaaacgcctgaagttgcgcg

SEQ ID NO: 86376 - DNA, 689 bp, Heterodera glycines
atttggccgtttgctgttttggcattgtcgcgggcgctgtcggcggtgtttactattacaatcatgtccgttcaagtcgaattgacgaccccttcaacgaattcactcgctattcccccgccgggcccacaaaagacaaacttaagaagtcgggttcgcccatattcggtcagagcggcgacgacactttggcttacaaagcgcaactgcaccattaccagcagcagaaacagaaaatactgggcacagcgtcggggccggtggtggacaatgtgagcgacaacgaagaagacacggacgaaatggaccacaattacagcgtttttgagtgtccgggtctcgcaccaaccggtgatctcgaaatacaaaaccccaatttcgtgggcgctgagaagtcggcagccggcgaaacacgccgcacagaatgaagccaaggaattgttacccccttccaccctacatttattattgcgttccttcccaccaattcccttgtaaattaggcctcaaaatccccgtgaccgaccaaaacatccttttccccttccactgctctagtctgaacacttccgcacattccgaagttctgtccgattaaacattcctatttgagctattggatttgaatgtctacgctttggggggcttttcgataaacttgggcgcagtgttgtacagaaattgacgat

SEQ ID NO: 86377 - DNA, 506 bp, Heterodera glycines
tgagccggacgcattgttacgtttggcccggtccgtatgaaggaatggcggcaactttgtgaagaggtggacgtggacgagttggaacgtgccaaacggtctcttctaccaattctcttctgatgttggatggttctacgcctatttgcgatgatgttggaagacaattgctgtgttttgatcggcgcatttcaacagaggaattggaagagaaaataaatgcaataacaccatacaccatacggatcatcggacgtcgctattttgtcaacaaaccttttgcctacgtgatcattggaaagacatccaactggccaaatcccatgaaaattcataagtggctgagctggtgacctgttcaatactttgtcataaatgtatgatgttttgatttgataattataccatttttgttgtgcttttattttgaaatattatttctatggtagaacaagcaacattcactttattgacttcaatacatgaaaatacaatattcccgacta

SEQ ID NO: 86378 - DNA, 658 bp, Heterodera glycines
ttcggccgaattgcaccaagtcaaactctcaaatatggacagacgtgctttcgattcggcaccaaacaaagaatttactccccacgaattggaattgcgtccccatttgtccttcttggaacggtaccgagaggacccaaattcgaactcatgcatccgtttggaaaatgttcccaaaatggtttacgcggaacaactcgccgaatttctcggtgtccaattcgatgcgccatatgaaaacattgcgcggatgcaaaacggcgtcctttacattaatttggtaagcatttttttgcaaaatggcattttcaggaaacccttgagctcaactcgccttttgaggcggtcagcaccgtaaatgggcaccaatttatgctgcagtcgtccaaggggcggaatccgtactgtgagacgtgtctgggcacaatttggcggcttgcgcagcactggcgaagatgcaaaagttgtggttatcgaacgcatgagaaatacattgacaaagtgcggcgcgtttgtccgagtttggccctggcgagaacggaattctctctccaattcgatttgtgccccgagaaatcgctgcttgaacaaaattatcagtgcgccgaatgtttttgcccatcggattcgacgacgactctgaaaaactgcctcggat

SEQ ID NO: 86379 - DNA, 683 bp, Heterodera glycines
atgctgctttcttcctcccttttcctttgctttccctctccatttgcaattccacttgcaatgagcagtttgcccattgttcgttctcaatcaacttcttacatcggatttccgcgcgctcgcgactttgccattggcgatgggcacgtgccatcactcatcatagtcacttcggtgcccaatttgaaccatttgcacgtgtcggatgcctatcggtcgtcaactttgtacaaataccgaagagattgggatttgttggactcggccatctccgaccattctcatcgtggtcccggcttccattgggtggatcgtcgctttcgagcccgtcgctttatgaacaccgacccaattcccgactcgctcgggttggactaccccaacttctggtcccgttacaaatggtactccgactatttggagccgcgtcattggcgtcgtcatcgagacccaaattatgaccgtcccctttggaactcgtggaaaccgtacattttggacgggaagaatcagaagcaagccatcgacatgtaccggcaaggactcgtctcttttgcctatttggacaaggattggataaccccgtgggcgttgggtcggaaggaaaaagactgggccgacatttacccaccggccggatagtacggctcacgccggtacatgtactcatgggcatgaacaaa

SEQ ID NO: 86380 - DNA, 627 bp, Heterodera glycines
  unsure (1)..(627): unsure at all n locations
actggctcgtattaattattttcgtgctttttcttcaactgtttcaagatctttcaagcaggtaaagcataccgtccaggacaatgttacaaccattgaattagtcgatgttcctattgcgtcaactcatagagaattgaaggaatctgctgctactcaatctaaaactccggatgactgttcttgtgttttatgcaaaattccaacaagcatttcctacaaagatgtgcttattctggaacaattcatgcgattggacggcactgttttcccaagacaattaactggtctttgccatgaccagcaacaacgacttgagcggtgtgtgatgcaagcgcattggtcgggacttttcccggatcggactataccggaatttgaccgtgctgggtacaagcgattcaaccgacattgggacgacgatttggcaatgtttcggctgaagtacaaattgcaccctggcagttggttttacatcaaacggtacaatccacgaattcgagagtaccgcccattcaaagccgacgaaattcctgacattgagagagagtgatttattgtgaattctctttatttcatttgataaacgtaaacggctnaaaaaaaaaaaaaaaaaaaaaaaaaaaa

SEQ ID NO: 86381 - DNA, 471 bp, Heterodera glycines
gaaaaaatgcgtgttctcccccttctcttttctgccctcctcctcctctctgttggcctttgctttgcccagtttgatcagtctccgtccgctgctctgaatcatgtgcgggccaaaagaggctacaagccgtggaagaagcaatccttctcctcttcttcaagcgaaatgtacagaaggagaagacccagtggtaacggtcattacagggattacaacggctacggtagcaatggatactatcgacgaaaacccggcattttagaacgggcgctgggaaaaattacgcggagctattaacggacgagcagaagaagagaagcaaaaagccaaacaatgggcgtaacacttttaattgatcaaacgatattacagtatccaacaccaaaattacagtaaccaaacatccaatggaacgaatgactcatttaattcagcaaatttgctggaattgccgataaagaaacttag

SEQ ID NO: 86382 - DNA, 617 bp, Heterodera glycines
atgttttctgcgttggactttgttctgttcggcttgtttctgctcctttctctgttggtcggtctttggccaatttgccgcgtttcgtccggccgtccctcgccgcttcttcgtccacaaaagtggccccaccggtgacccgtcgaccctcaaacattcttccgccaatgatttcctcgacggtgggcgtcgtctccccgtgctccccgtgtgtctttcgctgctcaccactttcgtctccggcattggccttctttcgacgcccgctgagatttattcgcgtggttcggcctttgctttgttcaatctttgcggctcttttgccttcgctctcatcggcatcttcttccttcccatctttttcaaactgaaatgcctcaatgcgtacgagtacttcgagcttcgcttccagtcccagtctctgcgtcgtctggccactctcgtctttatggccaacactctcttttacatggcggtggtcatttacgccccggcaatttctttgtccggtgtcacttcgttgcgcctttggcccttcgttcttctcgtcggcgtcgtttccacaatttatacggctgccgggggaattcgggcggtaatttggacggacactttgc

SEQ ID NO: 86383 - DNA, 574 bp, Heterodera glycines
aaattatcggtcccaacaatatcaaattggatgacttcaccgaccgtctctgttatcgttacacgcctgtgctacttggacttttcatgttcatcaccggaacagtggacaattttggctcgcccatccgatgtatggtgccacaggaattctcagcttcttggtccaacttcgtccatcagtactgctacgtgacggggacttatgtgaaaatagttgacccatcggatcagacggttgagcgcatttacgtcaattactatcagtgggtgccgtatttgctcattctgcaggcattgattatgcgtttgccgttaagtttctggcgtttcggtcgcagaatttcggatgctgactttgactatgtcaacgaattgggcctgaaggcgcgcacttcgactgctgaaaagcgcacggagtttcttaccgaggcagccaattacatttgtcagatagtcggcagtcgcaaaactcacaacggactcggttctttggtcggctatatgtatttgctctacaaaatgatcaacgtcatcgtggtctttgctcaaatttatatgctgaaaatatttat

SEQ ID NO: 86384 - DNA, 715 bp, Heterodera glycines
  unsure (1)..(715): unsure at all n locations
aaaaagaatttcttaactaaaataccaacacatacaataagaaaatgattcttttattctattggtctaacttttgtccaaattggtcaactgagtgctggcatatgcaaatttccaaatccgtcaaaaagtgttacggtccaatcgatgatgactgtttcatcgaataccgactataagaacactttgtttgtcggcggttccggcattttgaacggcgcgtgtgatgtgaacaatggcaaactgaaatatttgatgacattgaagaatggcgtgaccatcaaaaatgccattctcgacacgcccggtttgggcatttactgcgagggcaattgtgtgctggaaaatatttactacaagcgattgtgttaccatgctactgggttcgggtataagagcaccagcacttcatacacttaccaagtgattggcggtgctggccaaggttcaccggacaaatatttcacccaatcgggcaaaggcacaaccatcatcaagaatttctgcgcagaaggcaaatacggcaaattgtggtgttcatgcgggaattgtgctttccaaacggcgcgtaccgtacaaatttcaaacaccgtccttaaggggcccggactttcggttgtctcgcttaattccaactacggtgacaaaatgtcactttcgggactgactntgcatggccaaaaatcatcgagcacaaaaactaattacatttgcc

SEQ ID NO: 86385 - DNA, 388 bp, Heterodera glycines
ccgctggactgtcgcccattgaaacagtgacggagatgcgcagtcagctctcaatgggaaacaaagagcacggagtgaatgtgcgaatgggtgccattacggacattcgtgaggaaaatgtggtgcagccttttttggtcagttcgttcgccgtcaaacaggcggctgaatgtgtgctccgtcctctcaaaatcgacgactttgttctgtccgtgcgttaaagtgacggaaatgcaattagaaatttgtggacagccatttttgaatgttatgacgttctctcgcataaatcgctttttacttaaaaaaaaaaaaaaaaaaaaaaaaaaaaaaaaaaaaaaaaaaaaaaaaaaaaaggccaaaaaaaaaaaaaaaaaaaaaaaaagtc

SEQ ID NO: 86386 - DNA, 650 bp, Heterodera glycines
caccgatacggtgattttcattggaatgtaatgtacgcgttcgaaggacagacaatgattttgcctattgaaaacaaattggcaacccctgaagattttcttgacaattttggtgttctttttcgacgatgtgcctttgcacgttttttatgatagcgattggattctttttgtcaacggtttcgggactattgtcagagagacgatcactgtaaatgtgccgcacacgggtctctattccgccgtcaatggctttctgtgcattcagtccatgcttggccattccattgcgatgtacgtcgtgttcgacatgttctacaagggattccgcagaaagttcactgctcgttttccgaatgtcccttcccttgttgtcgacaaagggtttcgcgtcggttgggtttttctcacttatctgatggccattctcatcccccgtttggctgtgatgattcccttggtcggtgtcacttcgggtactttgtgcgctttagtttatccaccattttttcaaattgtcactttttggagcgattggaaattgaatatgagtcccgttcgacgtgcctttctcattggacgtaattgtttcgtcatcgttctcggcttctttgcaattggtgccggcgttgcagcaaatgttctccaaa

SEQ ID NO: 86387 - DNA, 695 bp, Heterodera glycines
catccgagagtagaatctccgatgagcactccctggttttattcatttcgcttcgttcttgctttcgtcctactagagatgaattgtttcgggcggttgaacgtctcagagaatccattcttcttcgtccactgaaagagcccgattccgacgaacgaacggggcaaaactaccgtcgatcgagcgattgtcatgtttcttcccgccaaattttaatcatgctcattttgctgctgctgcacagccggtcgtcaatgtgactgcggttctcgccaatgccaatcccactgggcagaattaccaacgccttctgaatttgaacgccgatttgacggagaccatcgcccgtttaactgtagaaatttcccaattgggatatatgaatgagcaattgacggaacaacttgaacatctcacggaagtgcctccgaatgcgaattttaatctggatgatgttgtgtttcatccgcccctcgaccaacagcacgaagtgcctccgaatgcgaattttaatctggatgatgttgtgtttcatccgcccctcgaccaacagcacgaagtgcctccgaacccgaattttaatccggctttgcttgagtttgatgatgttgggcttcagccgcccctcgaccagcagaacggtggggcactgaacaacaatggccagcaataattctccctcaaaatcagcaaca

SEQ ID NO: 86388 - DNA, 583 bp, Heterodera glycines
tccagtggggaattgaacccaggcgaaaaattatgaaaggtggaaagtttaaccactacaccacatgtgcatgttaaaaaaaaaaaaaaaaagtttggaacgcttcacgaatttgcgtgtcatccatgcgccgctgctttgttggacgctggtttagacgatgtattcagacgcagtgaagagatttggtcgagaaaacagtcactgcggccgacggccgtcggaatgggcgcttcgctaaagaccaaccaggacttaagtcagctttcatccacccgtctccccatatcaaaaattgccgaaaagcctccgtcggctgatgcttctgaccgttacgaggatataaacactgatgttttgaatgaacgatttacggatgcagaaacaaacaaatttgtgcaacgtacgattgaacgagctcagattgaggcggagcggaccttcctcaaccagcaaattttggagcgacgctttgcacccggggaaagtttgtttggccccgtgaacaaaagggcaatgggctcggcacaaccggacagaacagtaagtggtggaataaagcgtttcataaatcttccgaatg

SEQ ID NO: 86389 - DNA, 645 bp, Heterodera glycines
ccggctcggcggcagggcgatgtgatttcgcctcatcgtgcggttttgactctctccaaagcatgttcaatgccggatgcttctcattgccttacgcttggatgctcggcggaaaatgggtgtcattggctctcacttttgtcattgccggctttaattggtacggcaaccacattctcgtccgttcgtctcaacatttggctaaaaagtccggtgttgcctctctcgattatggacattttgcgaaaagagtgtgcgactacagcgaattgccatttttgcgacgtcacagcaagcgaataatgtacgtcgtcaacatcaccatcctcttctaccaacttggaatgtgtgccgttgccattcttttcattgctgacaatatggtgcacatgcttggctcctggcttggcaattccaccactcttatggccaccattgccattgttttcattatctttacgaacatgttcaccgaaatgcgcgtgatcggtgtttttgccgccgtttcttccgttttccttttgcttggtgccggagtgattatgcaatttacgctgactcagcccagcaaatgggacgaattgccggcctacacaaatttcaccgatacggtgattttcattggaatgtcaatgtacgcgttcg

SEQ ID NO: 86390 - DNA, 590 bp, Heterodera glycines
gtgtgttgctgacactggaccgaacgcactgctgggcaagcactcaccaaatggttgccacgcctaccgtcgatggacagccgaaggaattgtattgcagtgatcatgtttggggcttcaaattcgactggatcaaaacgttcaaagaggaatttctccgttccaccactccggccagttactacatcttgctgcacttatgctcaatgccagaaaagccgtttgagctggtgaacgatcaaacccaggaaaagctgagcttggccaaaattgagggcaatgtgttgatcagttattggttgctgaagcgatggccaatcgccggcggggagacggcgcagcgcaaagacgaaaatggcaacaaattgaacaacgtccgccttctgattcgtggcattaactgcattgggccattgtccccatcgacggcggaccaaagcaacggaaatgccgtgccaagtggcgccggttccagcgaatgatcggacggaagaaacgaatatctaatttgaggaattgtttagatgagggaaattatattcgttgagatgatgatgcacacattacaaatgctattttcttcatgtgtg

SEQ ID NO: 86391 - DNA, 406 bp, Heterodera glycines
gacgtcgattatacagcagccgtcgttacactgctcggaccgtgattacgatactcgcatccgctctcgctaccgtactcgaacgtacagtgcgtggggacagtacacggcaaatgtcgcaaaaatggcactgctggggcggatgaccatgaacaattttgaggcggtggagcgcaaattcgatgtgatgagcattgttcaggacaattattacaagacaaccgatgattggaccgacactttgataaggcgtcttgaataaataggcatgccaaatggcaacactttattgtataactgtattatatatatgcgtatttctcgtataactgtattacctacgctctagaaataatctctaaataaatgttatacggccaaaaaaaaaaaaaaaaaaaaaaaaaaa

SEQ ID NO: 86392 - DNA, 278 bp, Heterodera glycines
ggctttgccaagcgcttggcttttcgtcgactgcgcaccaccgaatttcttccaaatggccgggagtccccaaactgtccgcgtctttgtcgacgaactttccaggcgctttcgtcccgtgtttttctcccgactcgaaggcgcttggaaaacgtatgccgaagaacaggaagaaagggtgatttccgatttggaagcctttgatctcttttacatttgtcgtaaagaggcagaacataaccaaaatgttgactctcttgagctgatgaaacatttcc

SEQ ID NO: 86393 - DNA, 276 bp, Heterodera glycines
gatcacacactaactattacctctagaattacccttatatcgacaatggggaacacaatacccactaacccctgaacatttgacactgctaaattaaaaaattggagattatgtacaatctgtgacaaccgcgaagacgtaatgataccacaataacttaagtgatcaatggaaagtgtaatgctccggcacactcttttattgtggatccacaaacaaaagctgtagacggtcattctgaaaaatccaccgcctcctgacaacatagagagcgaa

SEQ ID NO: 86394 - DNA, 600 bp, Heterodera glycines
atgtggaagaggcgaagacaggcgaggaagatgacgaggaagacgacgatgtggtcgtaattggcgaatgggagggagggagagaaagagatactctctccaccgccagcgatcgttccccggccgtccctcataaggcgctttatccatcgcttccgtccgattcgtccgcttcccaaatggaccctcctccgcagtatggtcatcctcaagctcagcaacaacagcagcagcagtccacgtggttctctcctgcttcctttctcggctcttccaccaattcgcctccctccgccgccaatggcaccgatcaatcggtgccgtccgcctcggccagtgcccagcgattgctgaccgaactccgtcagagatatcagccgtggtccgtgttcttcaagtgcgccaagctcggttttcctcccggcgtggcagcgattggaccgcgcgtcaaacgcaatttggcgacatttaccaccaattacctgtgtcttttcgcccttctccttctttactgcgtgctcacttctctgctgatactgctcagtttgatcgttcttggcgggcttctctacagcgtttaccaattcacgcagaaagggc

SEQ ID NO: 86395 - DNA, 654 bp, Heterodera glycines
ggcccaattgcccatttcttaaaaatagcaatgaatacgcacaagagatgtcgtcattaatattggtgtcttttgaaagctttggaggacggaatgaaattaagcggaaatgagccgaacacgaataagtttttgcttgatttgatgacagtccttgaaaatgtgaaacagtcgcacaaggaaaatgacgccataatgcaggaaattgtgggccaatcacacatcgaagaccaagcgcaacggttgttccaattcgcttacggattggaccagcagagccaattcggacagaagctcataaaggcattttacactgcaggttattggtgtgacgtgctcacatgttttggacaattggacgacaacattcagtctgcacggaaatatgccaaatggcgagcaattgacgttcacaactgtctgaaaaatggagaacaaccgaagcccgcgaccaatccgacggtccaacatcaaaaagaattgagtgaccaagatgacattgctgcacaaataaacgacaaactttcgggcgaattgaatgatttgaacgcgtatttaaccaaatcgccgcaggcggccgccgtcccacagcaacaatgtttcaatcccatgctcactcatccgtcgcaacagcgtcaaattccttcaaattat

SEQ ID NO: 86396 - DNA, 589 bp, Heterodera glycines
ataaaagatccgaaaaaatgccaaacattttcaaaatccttctgattgtgcttttggccgtcgtctcattccgtctctcggcttctactggtgacaaaaaaactgctaatgatgggagtggaaacaactcatcagctgggattggtacgaagatcaaaagaattgtcaccgctggactgctcctcacttccctggcgacgggtggggcggaagcgattgggcgaagcaatgctcagggaggaaatgccgccggattggtgccatcgcatgtgaccaatcgctcaatggctccaccacctcctcctgtgcaatttgaaatgggggcaaatcgattagaaaaaatgagggcacacctacgcgaacttgctgagaaaatgccggtcaatgaatcgaagcgtctgtcaccgagtggacccgaccctcatcatcattagggccatggatggatctaacggaggaagaaaatggatgcttagttttcagattttattctatcctcttttatttattagtttttcaaaacaaatttcttccacaactttttaaactatttgttgttttgaatctttttagataaatctaaacccct

SEQ ID NO: 86397 - DNA, 288 bp, Heterodera glycines
acagcagacatcagagcacccttagggattaagacactatgacacatgtagcgtaaccgcacacaatagcatgaaacatctaaacacaccccaatgtccatcaaaggccttgagaaactcatttcttaattatggtccattggaccatacggcaactatgctggaccttactcatcaccctgtggatcaatgactgagggatctccgcaacagaagagtactgctgataaaggacccgaggcaccgaacaaagcgccggagccggaacttgactgaaaaggggacctc

SEQ ID NO: 86398 - DNA, 710 bp, Heterodera glycines
tttattgatctgtttttggatgcggtcacggatgaggagaacattgagtacaagaaccagttttgcgtgttcacaaagctgtacaaagataaccggataacactgttgatgaaattggaatgcaattgcttttgtttcttttggctggctttgacaccaccgccaattcgttgggatttgtcagctattatttggcatgtcaccctgatgtacagttgagggcccaagaagaaattgataccgtatgctcgagcgaaaatccgacatacgaagagctgagccaattgaaatatatggaagcggttataaaagagacacttcgactggttccagtcgctgcaaccgttgtgacgcgtgtttgttcacagacgacgacattgggccaaattttggtggaaaaagggaccggagtgacaattgacttgtacacttttcatcgaaataaggagttatggggtgacgatgctgacgaatttcgaccggaaagatggcttgacatagatcctcctccggcctcagcctattattacgcatttggcggcggtcctcgcatttgcattggcatgcgatttgcacttttggaggagaaaatggcacttgcgcgactgttgcggcgctatccactggccaaaaatgagcaaacggagaaatttctaaaggtcaattcgcaagttgtgcttaatcctggcgcagtgatggtacaattgaat

SEQ ID NO: 86399 - DNA, 646 bp, Heterodera glycines
ttaactccttttatcgtgcattcctccgccgttctttcgtcctttccctttcccttttttctctctttttactctctcttctgtccctttcccttccccaatcattcatttgcctgccattcttctcacattcattcattgttttttgactgatgaaggtcatcttttcgtcacacagtagaagtgggaaaaaaatttgccacccctcctttgtcggcacatgccattggctgctgcacggcaccgaaacggtgccaaagacggcggagcagcgcacctttacactccgttgtaggcacgtcgtgttggcatgcggacgacaacagcccaaactgttaggggtgcccggcgagtcggccgccgctgctgacggtcgcgtggtgtacagtctcagctcgttgaagcagcgattggaggagacagagggcggcgattcgggcgcgacagatacggcaacgacaatggcaccggcgaccgaagcgacggcgaccacaatggcacgagcgactattgccgccactgcggagacggaataagtgtccggcgactgtcccgtggtggtggtcggcgacggcatttccgccgcggacgcggtgctgcactgtctgagcattgaacagcccgtgctgcacattgtccgtcgtac

SEQ ID NO: 86400 - DNA, 665 bp, Heterodera glycines
  unsure (1)..(665): unsure at all n locations
acaacgcatcgtggaaccgctgctgcagcagatgtgtgtcctacagagcagttgtcgaagtgcattgtcctcgtggactacgccaagcagcgccaggaatggactttcaacaaagtgagccaattgtcgacatcggtcgttgagttgcgcaacaaaatcgaaacggaggcaacgcgaacgcgaaagaacccgggagaagtgctgctgaagatcatccgcttttactcctccaagctgaacgttcagatgagcaaactgcgcgaccgcagttcggagttgctttcttcttcgatgcagaaacaaattctgacattgactgcatacgttcagcaattggatgacagttttgtgaaggcaaaggacatcgacgaggttaagcaggaggtgctcgaagaagccaagcagaagctgttcgacatcgctcgttggtcggcttcgctgagccttcgcgggccaccgaagacttcgacggctgacgacgtggaaaatgaaaacctaagcagtaacatcgaaacggagccgaagcaggaggagaccaaaggggaagaggaggagacgctgcagcagtcgatgaaggaagatgaggaagaaaagggcgaagaggatgatgacgangaataagaggatgactaagcaaattaacacagtgacagcggaaaagaaca

SEQ ID NO: 86401 - DNA, 396 bp, Heterodera glycines
gaggcgcccccggcggaaggcgcgccggcggaggcgtctgatgtgccctcggcttaagcaaaaagggaaaagccgaacgcaccgatggaaagggagaaaaagaagaaaagcggcggagaggagacaaatgctttaccttttccttgctcaattgtgtacaaatccctccccttttccccatttcgctattccccgactctccaatttcttttggctgttagcttttgctttccgagtgatccttccgatgaattcgccgtgccttttcttccgtcaatgactcatccccaaaaggcaattaattcattaatttttcttctcccttaaatatatttgtgccaattgaggagtttaataaatgttgtggtgcaaaaaaaaaaaacaaaacaaaaaaaa

SEQ ID NO: 86402 - DNA, 616 bp, Heterodera glycines
tacccggcaaatcaatactttccttccatttgcatcataaaaaataaataatttgggcttcgccttcggcttcggcttcgagtgctaagccgagcttcgcccagccctgatcagggaggggaacggattctggaatttttttaggagaatttcaggggactttattagaagaaatagatatttctatataagagtgttttatgttcattcatttaacgaaaagagttataatttttagtcaatttttgtatgcctcttttatacaattctaatttcaacagattttcaaccaaaaagcaatagaaattgtcgtcaattgtttaatttttgatgactaattccatgccgaaaatcctcttcacaatcatcgctttcgtcaacatctcacaaattttattcgctactgctatgtataagggcaaagaaatttgcggtaaaaccgtggaagagtgtcaagcggcactgattgcttttatgaaggatagcggaagtaatcagaactatcacgcgagcggtaacacttaatatttacggaaataatgggcttaataagcattggattgatttctttatttgtgcgattggttgttttttggggcctttttctttggcttag

SEQ ID NO: 86403 - DNA, 512 bp, Heterodera glycines
  unsure (1)..(512): unsure at all n locations
agttctgattcgcatttgtttattacacttctaacaatgccgaaagcttcgaaaaacaaggaccccaacatgccaaagcgtgcccaatctgcctacttcatctggatgttggccaacagggagaagatcaaaaagccggggatgagtgtggctgaagtggctaaagccgcaggtgtcgagtggggacgcatgtcagcagcggacaagacactttgggaacagaaggcggcagacgacaagaagcgctacgagcaggaaatgactcagtacagagctcgccagaagtagacgattgggcagtgaatgacgttttatctttgacttccttttccgctgttctctcctatatttaaaagtcaacaaaaatcgaccttccatttgtcgtccttttcgacattctgatttatttctctcagtttaacttttattctgatcatgtacgtatacattgcatctggaaaatgatgatcaaataaatggaaatcaccnnntaaaaaaaaaaaaaaaaaaaa

SEQ ID NO: 86404 - DNA, 548 bp, Heterodera glycines
  unsure (1)..(548): unsure at all n locations
tcaggaaaagagaacgaaaagcagttggaagaggaggaaaaggaaaagcagcgggaagaggaagagaagaagcaggaagagaaggaaacgcaacagaaagaggaagagaagaagcagaacgaggaagagaaaatgcatgaagagaaggaggttgaagaaataattatgttggacagcaacgacgatgaagccatggaaaaggaaggggaggagaaggaaaagcaattggaagataaggaaaagccggaggaagcgcaaggggagcaggaggaagagaaggagaagcagttgggagagaaggaaatgcaaattgatgaattaattgtgttagacagcgatgatgaagagaaggaaaagcaaggggaagagaaggaggagacgcaaaggaaaaagatgagaagacaaggaaaggcaagaggaagagaaggagacgcaaggagaggagaatgaaaagcaagcggaagataaggagacgcaaggagaggagaaggaaaagcgagaggaagagaaggagaagnctctcttacaaaaaaaatataaaaaataaa

SEQ ID NO: 86405 - DNA, 672 bp, Heterodera glycines
tatccgacgaatggaggtaccggggtggcgatctctatgcactcctctcgcaatgtgttcgcctattttgtctcttccgacacctctcagcctgccattcagcactttcatcgagttgcctcgactttgcgcgacaattgcaccttttggctcggttctggggaatgggttcgctcggtggttggcaatgaaagtgccattttcttccgggaccctcacgttgatgacgatccttcgctacaacggaccattggacaacttggactctgtcaaaaaatggctcactgacaaatgcgtgccattggtgcgcgagatcacttttgataatgcggaggagctcaccgaggagggcattcctttcctcattttatttcgaattccgggcgatttgcaagcggagcgaacattcactgacattgtcacaaccgaattggaaggccaaaaaaatgctgccaattttctgatggctgatggaaaaaaattcgcccatccgttgcatcatttgggcaaatccgagcgcgacttgccactcatagccatcgactgcttccgtcatatgtattagttccctgacatgaaacagttcggcgtcaaacgtcatcttcctcagtttgttcttgacatgcattctggaaaactccatcgtgagttccaccagtggcccgaccccac

SEQ ID NO: 86406 - DNA, 745 bp, Heterodera glycines
tggattctctcctctttttttttctcctagcatgcttaacaaatacctccgatattcgtcaccctttcatttgttttattcgtttttctgttattcgaattttcttctgaagctgtcacacgaaaaaggaaaattccatgcaaaaagacagcatttaatcggcgaaccacaaattaccaggcgtggaaagagcagattaccgtttgtgaactgctcgaaaattatgacccggccgtgcgtccgcttggtcaagaaccaactctcgagaaaaggggtcccgtggtggtcactacttcgttgttcgtcaattcaattagtgcagttagtgaacggaatatggagtatgtggtgcagttccgcttccaacaagaatggcttgacgatcggttggcctacagcagactcggcgacgagcgcagctttgcccacctttttgtggcacgtgatcagacaatttggatcccggatagcttttttcaaaacgaacgaagtggccattatcatatgcttgaccaggaaaatcgttttgttaaaattcgtgcggatggacgagtcacttacaaccggcggctgacactgaccttggcctgcaacatgaacttgctcagatatccgatggacgtgcagtcgtgtctgatcgatttcgccagctatgcctacacaaccaatgacatcatttacaagtgggaccaagtgggcgtggagatcgctccgaccgctaacggagcattgccaaactttgaaa

SEQ ID NO: 86407 - DNA, 696 bp, Heterodera glycines
ctggcattccgtctttacctctcttagcctgggtttgtgcagtgccctcgtttggatgaccaaattcgcttacggccttttcttgcccttggcaatggatttcctcggcatttctgctacctttctgctgcttctccttttcactccactttcaactatttttgtgtggctttttctgcctgaaactcgtgacaaaacattggaagagatggagaaacagttcagggaggaagattgggcagcactgaagaggaaagggaggaagagaagcaaagagacacgagagagaattgaagacggagagagcggagagagaagctaagagacatgagagagaactgaagacggagagagcggagagagaagctaagagacttgggagagaactgaagacggaaagagcggagagaagctaaggggagaaaaagaacgaaaaagtgcaaaaaggaagagaagaacaaatattaattattgtaatttgttgctaatttaaattagtttccttatggcattctgccttttaaaaataacgccttaagcaatgaacgaagcaaatggacaaaagcagaaaagaagaggaaggcacaaaaccgaatagatccttttcttcgtataaacaaagtattgccaatcattgagcatatgtttcagcagagaacaaagaaagagagcaaaaaaaaaaaaaaaaaaaaaaaa

SEQ ID NO: 86408 - DNA, 651 bp, Heterodera glycines
gattcgacctcgattttggcgtttcgtccctaaaaacgaatcgagtaataaaacgatttgttcttcgtccgcctatataaaggaaacgatttgaagaaaatgctctcattttttgcgtccgtcagtattttcaccattgttttctatttgccaattgtgtcaaagcatcgttctgctcctccatctatcacagcaaacggaagttgtcaaacgcggcttcagcatggagaagatcgtctacttaaagctgttgcaatttgtgctcactttgaccatcatttggcaactccgttcacttcaccaattctgcggcacttttgccgacccaaaagccttcctccatgacatctcaattggccattgcaaaaattttacgctcattggaaaggactcaaaaagcggcgaattcagcgctttgttcgaccaggacaaatggcacaaccaactgattatgatgagcagcaccaatggacaactaatcgaagaacagcaacaccaattcatggacgaattggccacgaaattgccatccgctggacgcatttgtattccgataacgatttcgccttttgactggattttttatcggattgccaatgacagaattctcatcgacaatgacattttgtacttttcttccgtccaactctg

SEQ ID NO: 86409 - DNA, 404 bp, Heterodera glycines
cattgcttatgagcacgtgtgggcgattggaccggaaaaaccgcccccccgaaaggcgcaggaagtgcacggatggatccgcaaatttttgagcgagaaagtatcgcaagaaattgctgagaaaactcgaattatttatggaggttctgtgacagccgaaaattgcaaagatttggcagctaagcaagacattgatggatttttggttggcggagcatcgcttaagccggattttgtgaacatcattaatgcgaaatcctaaaaaagaaacgaacaattggtgaagggaaagaaaacattgacttaggactactactaattgtaagatgataaaaaggaatcatttatttatacgatatgacagaaaacgatacagtaaattatttttttaaaaaaaaaaagaa

SEQ ID NO: 86410 - DNA, 310 bp, Heterodera glycines
tttgccgaactcagagggaagatcgaataactgactgcgtaggatgatcgtcgtcgcggcgaggaacgtgaacaaaataacacaattgccgagttggccttgcgtttgggaatggtcgaaagggcattaacaaacatttaaacaccggtcaaaaatgccatgaagagaatcgtgaaaatggcaaaccaaaagcctacaaatgcactggagcggacaatttggatgaagaagaaactgaggaacagaacacaccgaaagaacgacgagttgccaagacgagtgttgggaaaagaatggtgttgaaacaacg

SEQ ID NO: 86411 - DNA, 656 bp, Heterodera glycines
cattgctgccgtccataatgttgagcagatgctgttggctccgttcctgtcttccaggcctcggaaaatgctctgatcaaggagttggaagcgggagaaaatgccgaagtcgcccagaaattcttcagacggatagggccaaggagggaagcgttcagaaagcgagacatgacggggaacagcatccggaaaatcctcgtccacgccgatcaaatggaggcccttttcgagacggaatggggcaaaacaatttgccaaacgatggcacatttggggaaaatccaaattttcaccaaagcccagctattgtccccaggtgatttggacggactggaacagcagttgagcagttcaaggcatttctcgacgaacaaccaatggtgcgaacccttctttcaaaaacgacaaaggcccatttgctgcttcaccactttgttccatttgcgcgccaacaccgatttttggggcttttgcatgagcagggagatgaggcactgcactccgtgtggcggcgacttgagcaactgtggaagacgatgccggactctgaacaaatgcgacagcagctggagcatcatttcgtctcgaattggctgctggacaccggcagactcgacgaattgaagctgcgggaggaggaacaacgggagcaagcg

SEQ ID NO: 86412 - DNA, 621 bp, Heterodera glycines
cctatgtccgtggagtgagcgacgcactaaacagttacagaaaaatggcgatgtccgtcctcccatacgcacccactgaatacgcccaagtgattcaccacgtcgtaaagttcgcaaaagcatccgagaaggcacagactggccacttctttctgctggtcattctgacgaacggagtgatcaaagaccaccgggatacggtggacactatcgttgaggcctcttcgctacccattgccattgcatttatcgccgtaagcaacgcgcaccatccatcgcagttggctgcactccgtcaacaatttgccgtccatacgctaaaatcgtcgcgcaatgtgccgcttgcgcgagagacagtgactgccgtgtcatgcgcggacccatccatggcataccattttctgatggccgttcaacgacagctcattttgcatctgctaagggcagcgacggacgcggacgcaatcactgccagcggatgaagacggaaatgacttcaattcttcaaatttcacaatttcaaaccaatccatttattccatataatccatttttgtattttccctctcaaaacactaaaactgtgcctatagcccatcataattatatacttattggtaa

SEQ ID NO: 86413 - DNA, 530 bp, Heterodera glycines
tctcgtctttcgtctacctgaacaagttcaacatgtacatgaacagcatgggctctcgtggtgcgtcatccgctgctgttgttgcttctgcagcagcattgtgcctattttcggcaatggcagtggtggtgtacggtgccgaaagcgctgggcctaaagcagaccagactctggctgccaagcagttcaacccgtccgcatttccggccatgccaccagagcttgagaaaatcctgccagccgatgttgtgcaaaagttgaaagctgtccatgccgatatgtcgttgaacatcatgcagaaacaagacaagattgaccgtatcatgagctccttgccgggagaggttttggaccaaatcccggccccgcccggctttgaacgtctccccgacgatgtgaagaaccgtctgaagcagatcaatcgccaaaccaacaaatcatgggccgacaagcaaaaggaactgcaggagtatgtcaagacattgccgcacgaacaacgtgccattctgatgatgggcccaatgggaggt

SEQ ID NO: 86414 - DNA, 465 bp, Heterodera glycines
cggaccgacaaaaatggcaaaattcgttgccattgctcttctctcgctgaccgttgttccgatggcacttgcaaaaactggcaaaagtcaaacggcagacgaagttgagggatttcgcaatatgaacatcggcgacaacaataaggttgacgccggaaaggatcccgcgggtgataaagcaaccataaaagggaaaagctcagaaagccggaacgaaatcggacggaggacactaatgagcccgcggctgctaaaggaactaaaaatggaaaatccccgaaaaccaaagcgaagcaagaggtggccactaatgatcccgcggctgctaatgaatggaacgaccaattgatgggcatgatcgttgagaaatttagcgaggagcttgctgtgttgttgccaaaagccaacacttttatggaaaatgctttgagcttcatcaatgaacaaatggaaaaaaatggtatt

SEQ ID NO: 86415 - DNA, 658 bp, Heterodera glycines
gaacattctgctgaagtctgttctattcctctctcttctgtctttgtttggtgattgcatgaaaaactcagatcaaattggagtcaaaagaaaatcagcaggaataagaattgaggaaccatttgttgtaaaaggcaaaggaaaagtcgtcgaaacaagcagaaaaggctcctaaatagtcggcgaaaaaatattcgttatgaacacagctgaacgcattaaaaaaatggacattgcccaagacaaagctaaaatggatatagacgccaatggcaaacccaaacaaaatgaggaaaatgctcctccaaaatatgttttcatttggagcagtaacaatgagaagaagaaccttgaggttgacctcagagtgatccgtcactccaaaaaactcagcgaattattccatgccaaaagtgatcaatccgtcaatgcaaaacacggaaagcaggaagcattaccggttccgaaacaggaagctgaaaaaatactgaaggaagtggaagaatggtacgcacatcacaaaaatgataaacataaaaacgctccagtttttgtgttcaagtgtaaagacaatgtcagtctggtgataaatgttcatcttgatgcagtccggctttccaaggagttgtcaaatatgcttgaagatactgccgacgaa

SEQ ID NO: 86416 - DNA, 649 bp, Heterodera glycines
acccgcgcgtcgattggcctggggcaaatggcttaactgtggccagacatgcttggcacccgactacgtaatggtgaccaacgaaatgaagccgagactggtcgaggaactgaaggcggtgcttgtggaatattacgggacgaatccggagacgagcaaagactacagccgagtcatcaacgaagcccactttgaccgtatttgcgcgttgctgaaaaactctgtcggcattgaaatttgcaaaatgggacagcccaaccgggaggatttgttcattccgccgaccattttggaggtgcaaaccgacgacgcactgatgcaatccgaaatttttgggcccattcttccgtttctcatcgtccgttcttttgacgaggccattgacattataaagcggggagagaagccactggccgcttatttattcactcgcgacgagcgcaaagtgaacagatgggtcgccgagacgcattcgggctccgtttgtgtcaacgacgtgatgctccaaattacggtggacactttgccatttggcggagttggcgagagcggaatgggcagttaccgggggaagttcggcttcgacgagttcatccaccaaaaggcggtgctgaagcgctgctttttcggcgatggcattgctgctggt

SEQ ID NO: 86417 - DNA, 411 bp, Heterodera glycines
ccgtcgcatccctcgccattcgccttttggttctctctttgctcttccccacttctttcgcctcgcaaaatggacatctccgtccacgaatggcactgtctctgccgccccgtcttcgtcggcacgcattctctgcttcgaccatatccgtttttgggttggcaatgccaaacatgcggcccattggtattgcgtcaacttcagcttcatccctttcgcctacacgggcctcgagacgggaagtcgaaaaacggcggcatatgcagtgaaacaggacaaagtcgtttttgtgttcgagtcggcactgctgcctaacaacggggaaatgatcgcacatttggccaaacatggcgatggtgtcaaggatgtcgcgcccgaagtggacaattcggactgggttttggacactgc

SEQ ID NO: 86418 - DNA, 683 bp, Heterodera glycines
  unsure (1)..(683): unsure at all n locations
agggccttgatatgcgtttacccatttctccgtccataagttaaatatagttgggaaaacagtagtacccttctttggctcagttgtccactgtccttcttggagtgtcagatttgtttcgacggtgccgaattggattcatggacaaagggtcgaatccaaaacgaaagaatggattgaactaacaaatccagccacaaatgaagtggtcggccttgtgcccgagtcgacgttggacgaaatgcaattggccgtcgattcgtgcaaaaaggcatttcgaagttggcgcaattcgtcggttgtcactcggcagcagtgcatgtttaaactccaggaattgatcaaaagggacatgaagaaattggctgagaacgtgaccaaagagcagggaaagacgctttccgatgccgagggcgacgttttccgaggcttacaggtgaaaaaggaggacatttttggggcaatcgtttagaaggacactatccatcgaaggtggtcgaattcgcatgcaatgcggcgagtttgctgttgggcgaacatttgccaaacatagccaaagacatggaaacgtacagcttgcgactgccattgggcgtaacggccggcatttgcccgttcaatttccccgcaatgattcctctntggatgttccctttggcactggtttctggcaacacgatgct

SEQ ID NO: 86419 - DNA, 684 bp, Heterodera glycines
gatgaacctttgtcggtgttgggtgaattcgaaaaacgcaggacaaaaagtgtacgaagagcggagagagaaaatggaagtttggagtgaacaaaagcggaagcgaaaggctgatgaagaaaacgaagaggaggagcggcaaaataagcgaaatggcgacaatcgagacagacaaaatgagcgaaatgggaacaaatcgaaacggacaaaatgagcgaaatggcgacaatcaaaacggacaaagtgggcggaggaacgatggcattgaccaacggcagacggacgaccacgcgggggaagatcctccgttggacgcgctggtgcacagcgcgcaaatgctgcaaaaagccatctttccctttttggaaatgaaatatttggcccaaaaaaggcgtcgaggcgacacacccgctgatggtgggctgcttaaccgtgtgcaaactgaacgaaaaccccaacaaagttatcgtcgacgaagtttacctcatagatcgacttcaaatcatcttcaaacagtcgccaacaaaaccttatcgccacatgcatttgaactaccaaaaagtgaccgaggaaatcttcagcatttggattgacgatttggtcaaaaggaatgtccgattgccgttataccaaccgtacaaagaccgtcgcgaagcccttttccaattgaagataaacaatgat

SEQ ID NO: 86420 - DNA, 739 bp, Heterodera glycines
cgacgctctcttcgtcggacgtcggtggtggcaatcgcagtagtaacagcaagcactcctcagccgacaacactaaccgaggaaagaaagcggcaaaggtggtggtgaacaagaggagggaagtgaaggaatttgtgttggtcggaggaggtggtgacgtgaaggaggcagcagtggccgccggaacggtaacacttccggaaggagcagcaggggtgggaagagtggacgacccgaggcgggaaaacagcaaccgaatggttgccgcctgtgttgcgaccccttccgtcactgttaccgccaccgccgccacttatttcaataatcagacggggtttgccggcactctcggaggtggtggtggttccaaaaaagggatggaggcgaacagtaacccatccaaagcctcgaaaggagtgaccatgaccaccgcagaggtggaccagctcatgcaacagctgcaatcggtggttgaaaatggagatctccctacatggacattggccttccggactggagagtgcacgactttccccaaccggaccgattcttgtttcctgagccaagtgaatggcacaaaaagccttcctgaagagacaagaaaattcatccctgatccctcattcataaatctgtttgcttttcttcttggatgctttatgacacatcggacaccaatcataatcccattattatttgcatccagcaatcagtcagttggccttttaataaccaactg

SEQ ID NO: 86421 - DNA, 595 bp, Heterodera glycines
cctgcttagattgttccaaaccagcctgtctggttgcgcacaatggtctcaactttgacttccgaattctgtgccacgagttgcgcaagagcgacctgttccgtacccatccgatcccagaacaggtttatttcctcgacacgctttcctgcttttacgaactcgagaaggagtacaaccgtgagatagaattaacgatggaaaatgttgattggactctcgttttgtcccaattccaaccgaacagcgaaactgtcgttgcaactgccgagatagaggaaactgtacaacaaaatggcactgcttctgagggaacacaaaattccaatggtcacaaaagcaccaccgttcttcaccgactaacagttttacaagaaacaccaacaaaaaaaccggagcttatttctgtcgcgaagacaactgctaagcgatcactatttgatgaggatgttcacccgatacagttcatgcgcaaaacgcattggtcgccggccaaacgccgctgcattgacgccaaattttttgagagcaacaatcgcggtgaatggaatttcaatggtaaccatgccaggcggttgttgtgcggacgtggcaa

SEQ ID NO: 86422 - DNA, 369 bp, Heterodera glycines
agtccgccctcgtattttaagggggacatgaactatcggaagttggtcggcgacagggcgtggccccaccaaacgcctttttcggaagctctttgcggcttttgcccaaccactcttttggcacttcgaacattaaaagcggaaaccgtcgccggtgttccgctcgaatcgctgcgcaaaatcaaagaaaagttcggagagaaggacctcagttggatgagctctagcgaatatgccgtggcccaattgtgcgaacggcggaacggaccgtaaaggatggggaaaagacgaaataggcacattgactcttatgaatatatgtttagtagaattgattaaatgtatcggatgtttaaaaaaaaaaaaaaa

SEQ ID NO: 86423 - DNA, 538 bp, Heterodera glycines
caaagtgccggggatgaagccgtttggcgcagaattgggccagaagtaaacatcttccgcccaggtcctttctcccgactaccaagaccccttcacgggcacgaaccgatacatgccgggctgtaacaacggagtgacgacggcacaacaaaatacgaaacgtagtccgattgtgcctctgccagacaatttctgcacttttggcctcgacggtgtgtccaaaaaagtgattgaacggctgcgcgagatgaatttgctccagccaaaagcgttgcaactgaacgatgacgaattcgcttcggcagaagtgatactctcccaagctgactttgccatcaatgagtgccaaatcgtcgcattagaaaaaggaattttgtggtcgcccgaaacgattgtgcccgcgttggatttgtttcgaattgctttgctccatccaaaattgaacgaaatcttttgctcattggagtccgttcttggaaacccgccaaaaggtgttccgaccgtacggcgtttggtggaattgctcaacttggcccac

SEQ ID NO: 86424 - DNA, 615 bp, Heterodera glycines
actggatgattctcataggataatggacgaaagcagcaaaacacttttttgactccaaaattctccattttgctgccgacatacaacgaagctgaaaaccttcccatttgtctctggctgataatcaaatatttaaaggggctgagttatgaagtgattatcatcgacgacaacagtccagacggaacacaggaagtcgcaaaaagtttgcagaaagaatttggagcgggaagaattaaattgttgacgagggagtgcaaactcggattgggaagtgcctatgtttttggggcgaatttgtcattttgatggacgccgatttgtcccaccatccgaggcatattccggagatggtcactcttcaggagaagcatggctatgacattgtcacgggaacgcgttatgcgatgggcggcggagtgtccgggtgggactttagacggaaaatgatcagccgaggagccaactttttggcacaattccttcttcagccgggcgtctccgacttgactggttcgttccgtctctatcgaaagtccgttttgtcaaaactcgtcgtcgaatcagtgtcaaagggatacgtttttcagatggaaatgatgtttcgggcaaaaa

SEQ ID NO: 86425 - DNA, 645 bp, Heterodera glycines
tcaattctttgataacgaaattgagagacgagtcgaattgagaaaaagtgccgacggatacagcggagacggcacttttttggacattttggaccaattcattgaccaaatggaagagaaacggaggaaaagcaaagcgaaagcatttctaaagctgaagtatctgtccaccctttgctacgacattttcttggccgggcaggagacgacctcaaatacgctcaactttctaattttgttcatgctgctcgaccaaaaatcacaacaaaagttgcacgccgagttggattcgctggcgaatgacaaaaatgagcaaacggcgccggagggcagaggcaccgtattccgaatggaagacagactcagactaccgtacacccacgcggttgtaaatgtaaagggggcgagggaacagcgacaaattaatgaaacaattaattaattaaccattggaaaggaaagccttcgcttgtccaaccttcttccgctgaacctccacaaagtgcttcaaacggacgtcgaaatcggtggccataagctcaaaaagggcaccgccgttgtcaatcaaatcgcaacagtgcttttcgacgacaaaattttccctgaccatgagaagttcatgccgagccgttttttggaggaaga

SEQ ID NO: 86426 - DNA, 660 bp, Heterodera glycines
ggcgggaaaggtcgaactccgttgcgagaagacgggctatcgggccgaaattgacttcctggccagccgttcttccgcggcaaagcccaccaaatccatggccaaatctttacaccagtcgaaagactgcgttgatgcagctgaagggagaatggaacggggaaatttacttgaagcgggacggagccaccgactaccaactgttcaccgatgttcggcaaaagccggatgttcgaaaggaatgtgtgccggtcagggaacaggaggacagagaaagtcgcaaattgtggcgtcacgtcactgcagcactgttcatcaacaacatcgaaatcgcatcccaatcaaagcgatgcattgagcaacgccaacgggacgaaaaggtggggcgtgagcggctcggtcaccattggcaaccgcgcttctttgtccgcatcggcgacggttcaccgtccgactcgtggcggtactgtgacgcgttggagcaacggacgacgacggacgggccgtagttatggagcagtacaacaaccaaacagagtgtgtgtggttgatgaaagaacagatcgacaaaaaacaaccaaaaactgcacggattcttctaattattattgtctattcgttcgttgttgtcctctttcatcatcatcagccgatgaaatt

SEQ ID NO: 86427 - DNA, 623 bp, Heterodera glycines
ttatcgggaactcggctgctattttaactttgaacacagcagcaaaagatgaaccagaccgtgcccatttctggttccttcggtgttgatgaccaccagaaaactgcaaaaaacatctatccgtctttggaactattggaaaaagaaccacgcggagggacactgatgggctgcgtggatggagaggaggtgtgcaccgccggactgccctacccgggctatcagaagccaaagggtcagaagcacagtcgtcactgcgagtggaagcacaaaaacttggtcatccagagtttggttgaacagttggtcgggatgggcttcgacaactgcaacggttggctgttccgtgtggcggagaaggaaggcgccgagttggaccgcatttttgtcgcgattgacgaggacacgatgtaccgtgcgcggatcagccttcagtgaagaaagaggcaatggaaaacgaaatgaggaaatttatgatgaggtggataaaagaaaacgatgctttttcggctttggtctttaattttaatgagctaattaattaagcaatgctttggaattaaactataaaatcatctaaatatttgtcccttattccttcgctcctcatttactcattcatt

SEQ ID NO: 86428 - DNA, 594 bp, Heterodera glycines
catcttgcgtatcggttaatgggagcttcatttcctttcggttggtccgacatttctaatccttcgccttcgtctgaaggaatttgggccgcgccgtcatcatcatcatcgaaaaaccgaatattgtactcatggggatcgatgacaacgttttcttcatcgtccacttcaaaatgggcttcgttttctctcttcgtcccacttggacttggcccttttgggttctgatcatcaaagaccattgtcgtgtcaaggtcctcgtcatttttagaggccctatttgttgctgcgtcgtgaacattgaacaaatgaaagtcgtaacgatccaaatcagcacaacaactggcaaatgtgaggtccgatttttggtaaaaagtgaagtttgcttcctgaaatttgctgtttacagtgaatcattctcttgtggataaaagaaactcaccttcagagaaaaagggtcgcttcgaatttgacgcgacagaccgcaattacacctaaagaaatgaacagagggaagtgggaaatgagcagacaattaattacattgagtaagtttttacacccgaacagtgctccttccgcgggcgcttttca

SEQ ID NO: 86429 - DNA, 633 bp, Heterodera glycines
tttactttcctccttttccgggcaacgacgcagcagttcgaaacaaccgacgcagaagtgggcgcaacggcaccagtcaaacggcacagtgacaacaccattatttatcatcagcaacagcaacagcagcgacgcatgggccaaatcaatctctgcgacgacgtttggttggacacattggcatggatcaatcgtggagaagtcggcatgaagttcgcgctggtcaatgctcggttcaacactttggtggacaggcatttcgagcagaggaagtggtgctttggcgagtttcacatctgtgagcggatgacggaagaatcgggcgcagaaatcatgacatcgatcgacggctccgacttcagcacgttgccattgcccaccactccgctgccggacagtgtcgtcggcttccaatcaatctccatttggtacatcaacgaagaggtcatcaattttctgtgcacaattcgccgtctcctcgccgaagacattgcgctggaattttccacttacttcacagaatatcgcagttggaaagtgatggcacgacacatttggccgctgttgcgggatgggatcagcactttgttcctgaagaagtgtgacttggccatgctccgtaaacacgtgtcg

SEQ ID NO: 86430 - DNA, 601 bp, Heterodera glycines
gaatggtaaaacaatggacagagaagaaacggccagcgtaccacggctcaatgcccaaaacaacaataaccgtgtggagccggaggaggaggaggtggacagtttctggtcggtgaaagaggacgatctcgtgtggggccgatgaaccaacagaagcgatatttgagggaagatattggaatgagcgaagagatgcccgattttgtactcgtcatgtcttttttgttttgtttattcgttttgcctttccaaatgttctgcttttatacaatcgtcgtttttgtcgccatttttggcttttctcagctttttaaagtggccttttcaccttcgattgttttccttgaattgtttgtcggtcttttcaagttctttcatggcttttttctcaggttcgtctgcccattgtttttcccactgctcctttggcttttccttagtcattgctttgttagcggaggatttgtttggactccattccattcattgtacgaatgtcccccccccccaattaaagtgcgtttcctttgatactcatcgtcaattcccccttttgagcctctttctctcatttcgttgtcatttgttccttaattagatt

SEQ ID NO: 86431 - DNA, 725 bp, Heterodera glycines
tggagtttcgctcattttggacatttcgcggtccggtaccgtactcttctcattcggcaccgtagccaacacgcgcactttgggcgaatcgttgcgacgtacgcttctccacacattcagccaattccccgattatgagttcatttggaaattggacgcagaatcggcagcaaatgagtcggaactgatcaaagccacgccaaatgtgcacactttcgaatgggtgccgcaaaatgccattttaaggcatccaaaattgcgcgcttttgtcactcattgcggccaaaacagtctggcggaggcagcaaaaatcggtgtgccaattgtgggcattccgctgttcggtgaccagctttacaacgccgtgttggcaaagcaccgagggatggccgtccacgttggcattcgccagctaatcgcagacaaaacgggcaaagtgctgagaacagcgctcagtcgggttctccacgacgcctcttttcgtgccaatgccaaactcatccaaaagaaaattgctttgtcgccattcggtgcaaaagagcaattggtgcgttgggtggaattcgcagccgaatttccgcatctgaacgagcttaacatgccaaccgatgccgaattgggatgggtcgcttattattcaatcgatgccattctgttcaccatcagtgcggtatttttggcaattttggcacttttttttgatgctgcggatggcatttcgtcaa

SEQ ID NO: 86432 - DNA, 691 bp, Heterodera glycines
  unsure (1)..(691): unsure at all n locations
tctttatactcctccgttatctttttgctgccagttcaatttctgctcgttgtcatcggcgctgtgttcatcatcctcagccaatgctgtggtggcggttcgaagaagaaaaagaaagccggagcagctaaaaagaaagccggagcagcaccgacgccaacgccatcaatatcggcgagcgtaggatcggaagcgccgtcgtcactgaaaacgcaagagaaaagcgcaagcgccagctcaaaaacagcaccaccagcgaagaaaggcgccgttgcacaaaaaaaaggaccgactgaagcaaaggcagggaaagcgaccgatgaaaagacagtgaccacaaaaaagaaagaaaagtcgagcaaatcagcgaaaggaaaaccgacgagcaacccaaagccagagcgaactgagccttcagttaaagaagattctaagccggttgcagcggagaaaggagttgaagtgccgcattccatgatgtcgaaaggagactcagttgtcgatgaggaagacgaggtgggctacaccaccaccactgatgtgtaatcttatcatcttaatggtctgtattgtaaatgtttgttcccaagaattatgtatgatctaatgtcttacccttatccaatgttgttacttgtatacatttattatgtcgtggaagataaagtaaatgccacttttaaaaaanaaa

SEQ ID NO: 86433 - DNA, 658 bp, Heterodera glycines
caggcgcttattctgcacgcggtgggtgacagaggtaatttcggcactggaggtattttctctgcgttacgtcgtttgagcagcgcaattccgaattgctatgaatatgcccatcgcatgagagacttgaacagaggcgacgtccatttggtggaaaacattgctgtgcagtcggtgcccgagcccttcaaacagttggataacattaacaacatcaaaaacgaaaatgagccagaattaaaagcaaagaaagggtcgaacaatgcctcgaggacattgtctgttgcgctgatggtcgtccaaacgcaccgcacaaaaaagacaaacgttggtacgcaattggaagccctggagcagtgtctgttaagaattcgtttgttcgcgcgacgtttcgcctgcagtgttcatttgttgcgtatttggttcgatcttgacgagatcgaagagcgacaagttcgagaattgttggatcagcacttgtgcgcgcatggcatcaacgtgtacatttacaaattgcggaggtctgaggggaaatcggcggctgcggagaaaatggagaattgaggagtaaaaacgatcacaaataaataaacccccgaactaacgtaataatgcatgagaattaactcatacttttgttctgatgacctcacttctc

SEQ ID NO: 86434 - DNA, 633 bp, Heterodera glycines
  unsure (1)..(633): unsure at all n locations
cngttggagtgggacgagaagaagctaaagaacgccagctgggccgacatgacgccgatggactacttgagcccgatggagtggggcacgaagaagcgtccggtgtacgtggacaactcgaacggcggcgagtacaacaaagaaaacgaaaactgcgtgttcattggccaatggccacgcgagggcaagcagtacctgaagttggactcggcagtagacaagtacgggctggacgtgctgtggagagacgaggtgtgcgagaagccgggcgaggactgtccgcgcggcgccgtgtgtaagaagagggctacggtgggcgaatgctacggcacgggggcgtatctcctggacgcggccgatgaggaggagatgaagaagctgctcaaattcatcactgtcggatccggcacttttgtctatgctgaaaagaacacatacatggtcctcctgctgaaggacttgtacggcaaacagatgaaggaggaggacaggaagaaggtgtgcgcttactacaaggcggagtacgtcactgtaaaggccgagccgaacaaagtgcaagaatatgtggacaaagtgttgtccaagcagaagcagatgtacgcggatgcgagcgaccacatgctgtgtaagttc

SEQ ID NO: 86435 - DNA, 695 bp, Heterodera glycines
tacatgtttgcttggcattttactcctcgacatttgctgtgttgccgaagaatattcaattgaactcagagtgaagccgagccttgggagaaagcaaccccatttttattatgctgaagtcaaatgctcctcagaagaagcatttgtgccaatcaatgcgttcttcgagcattctcctgacgatgggtacgacttggccaattttaatgttggcaataaaaagtgcccggggggcttccaaattggcattgcgatgttcaacggatcataccctgaagattttggctggtacacttggggggcaaaaaagccgcttttgttgaaaggcattaaattcaaggagaactcttttgccatggttcaaaacgttgaatttgcaaaccatttcaaattggacatttcgccaaaattggcggacacttcaaaccttgtctatcgggtgaatgttttgtgtatggacaatgaccagcagttggtgttcgaaacgttcacccaatcagaaacaattgtggtgttcaactccattgatgggccaaaatgtgggacatatgacgtgaaagtttggcccacttttttgaattggttggacaaaagtgaaaaagaaataaattcgtttcttgaaactgagttttcactccacggaattggcgttaagaatggcgagatgcatcacataaatttcccgactttggcat

SEQ ID NO: 86436 - DNA, 609 bp, Heterodera glycines
accttttttacggcaatggaaatggaaaaaacacttctgtcggaaaatcaggcgaatatcgttgtgatgaataactagcgccgacattgagttggacagattggtgtcattggtcgcaagtcaaaacactaccgaaagcagtgattcacagccattcacaagcaaaactcccgaaggaccgaataacaaatcaaacactttgtctaacgaacccgttttcgaacttccaaaattcactccaccggacagtccctcggaaaggccttcaactttaaataatttggccgccggagatgtcaacgaaactaaacactttgatttagcaataacagaacacaaaggaccattgaacagtttggaggaaacattcgaaagatacccttcgactgctgatgaaaatttggtattgattcccaaggatataaaaccagaaatattgatgacaagaagaaaagcgaacaaattgccaatttacaagcagaattccaattcattacagaacaaaaccagtcaatctcggtcggataatggccatcagagtcggaaacggaataacgatgcttattcgtttgaggacgatgaattgttggctgtgtcttcatattcagt

SEQ ID NO: 86437 - DNA, 459 bp, Heterodera glycines
aatttaaaagatccgaaaaaatgccaaacattttcaaaatccttctgattgtgcttttggccgtcgtctcattccgtctctcggcttctactggtgacaaaaaaactgctatgatgggagtggaaacactcatagctgggattggtacgaagatcaaaagaattgtcaccgctggactgctcttcacttccctggcgacgggtggggcggaagcgattgggcgaagcaatgctcagggaggaaatgccgccggattggtgccatcgcatgtgaccaatcgctcaatggctccaccacctcctcctgtgcaatttgaaatgggggcaaatcgattagaaaaaatgagggcacacctacgcgaacttgctgagaaaatgccggtcaatgaatcgaatcgtctgtcaccgactggacccgaccctcatcatcattagggccatggatggatctaacggagga

SEQ ID NO: 86438 - DNA, 457 bp, Heterodera glycines
ttaattgtgatcggccaagcactgacgaggcaactcagaaaatgctcaaagcgattcgtgcgaagtttcttcccatggcaacacttatttttatcgacaaggatcgccctgatcaatggattttgcggcaaaattcgcatttggcggattatgcgagtgcctacagacccggacagccctcagtgtttatgtgccgtgagatgtcttgtgaaatgccgatcgcaactctcgaggaactgcaaaagcgactggcagaactgtgagggagtctctgccggcgcatttgttaattattcactgccctatgggaattgaagccgctatttattattttcattgtttcgtttcgaaatttcccgatgggaacagtcacaatgtgaccattcgctatgcccgagggcatagtttaattgatgaataaactcatccggcaaaaaaaaaacaatttaaccaattc

SEQ ID NO: 86439 - DNA, 712 bp, Heterodera glycines
ctacccggcgaaataaatactttccttcctttgcatataaaaaataataatttgggcttcgccttcggcttcggcttcgagtgctaagccgagcttcgcccagccctgatcagggaggggaacggattctggaatttttttaggagaatttcaggggactttattagaagaaatagatatttctatataagagtgttttatgttcattcatttaacgaaaagagttataatttttagtcaatttttgtatgcctcttttatacaattctaatttcaacagattttcaaccaaaaagcaatagaaattgtcgtcaattgtttaatttttgatgactaattccatgccgaaaatcctcttcacaatcatcgctttcgtcaacatctcacaaattttattcgctactgctacgtataagggcaaagaaatttgcggtaaaaccgtggaagagtgtcaagcggcactgattgcttttatgaaggatagcggaagtaatcagaactatcacgcgagcggtaacacttaatatttacggaaataatgggcttaataagcattggattgatttctttatttgtgcgattggttgttttttggggcctttttctttggcttaggctccacacaaaacatcatatgagaacaaatgcatatgacaataataatacctaatatatgttttcagaaaacggtccaatacagcttgctaatgat

SEQ ID NO: 86440 - DNA, 646 bp, Heterodera glycines
attccgatgttgagcattgatcgtcccgctgcgagttgtggcagtgcatcttatccaaagaacagggataccataatgccgcaaccgcccgtcactcctagcaaccaaaatgaagaaccattgcccgagggatgggagacgcggatggaccaatacggacgccgttattacgtggaccatactacaaaaagcaccacatgggttcgcccgagctctatgccattgccacccggatgggagtcccgtcgtgacccgcgggggcgtgtttattatgtggaccacaacacgcggaccaccacttggcagagaccaacggcggacatgttggcggcgcatgagcaatgggagtcgaaccgttcacaggccatgcatcagtgggagcagcgttttctttacacgcatcacgatgatcctctgggaccattaccggagggatgggaacggcgtgaagacccaaacaccgggcgtcattactttgtcaaccatcagaataaaactacgcaatgggaggacccgaggactcaagggttaacggatgctccgctgccggaaggctgggaaatgcgtatcacagagcaaggtgtgccattctttatcgaccacaacaacaagacgaccacctacaaccacccgcggactggtcggc

SEQ ID NO: 86441 - DNA, 670 bp, Heterodera glycines
cgatgcttcttcttcgctctgtccctcttctgtccgcttgcctttccttctttggcttccttttgccgcctcccattgtcggcctgcaatgcaagcagtaccccgagctggagccggggacaaagttcagcaccgaaccaaaggaagtggactgtgaagggaaaaacgacatctgcacggtcacgaactgcaaggacgggtcgaatgtcgccatcccatggtacacccacggcgactgtgacattgagagtcgttttagctgcgacaaattgggcgcacaatgcacggccaaaggtggcactttttgttgccacacatgcaaagaagacctgtgcaatacggaggacatttgtcctaacaccgctgcgatgcgtgccggacagcaggtgatcgcacttgtggtgccgttgttggtcgctgtgtttgcgatccgtgccgccaaaatcggcttttgagaatagacattggacgacgcttttgctgcgcaagaacaaacagtgccaaaattttgagaaagtaccaaaaaaatgtgaccaatttttaagggtttaataattattacaatttatatatgtatcatttatgttatttattgattattatttttgtaaaaagtgtttattttttgcgtaccttaagaattgtaaattaaaagtttcactcatttgca

SEQ ID NO: 86442 - DNA, 646 bp, Heterodera glycines
cagatgctcggcctgattctgagcgagtacgtccccaacactttcttctggcacattttcaacgctcagctgggccatgtgactgtcagttattcccatcgccatatgccgcactttcttcgttccatcgccaaaatggcgtgtgccgattgtcgtctcgtcatcggtgccaatttgacggcttctccgcgcgctttggtcgatgtgaatggcgtcgttttggctttggagggcgatgtgagtgcggtgttccggcgcaagaacaaagtgcacaatttgttgtccgcccgaggacagcttcgtgtcgcgattaaaccccactttcggcattctcgcttgtacagtgacgtgctgttaacaggcgtggacttcaaggtgtacaagggcggtatggacggcattatggcgggtgccattcgaaaaatggtctcttttctcatcccacgcgctatttggcccaaaatccaacaaaggcttcgtttggtcgtcaattacaaaggtgtccaaatcccgcgtctctgctccgtcgagttcaatcacctccacttggattatattgcccacgcggcaattatcagcggggattttgacgtcgatttgcccctttttatccgttccttcaaggaatttatggacgagaagcaaa

SEQ ID NO: 86443 - DNA, 400 bp, Heterodera glycines
cattgtacggttcccgatctcactttttactgatgcaaacccaacagacagcagaacggcaagcagttcatcccaccactttctgcctcttttcgcattggaattaattcttcttttcatgggaatgtctttaattttaatttaattctattttttttgtgtttatttttatgttccctaattccataataaaattattgttcattcaattttcgttgcatttccaaaaaagtatttgcatttgaaatgatagaagataattctgtttgtttcttttttcttttataaaatccattgaatttaaaaaaaaaaaaaaaaaaaaaaaaaaaaaaaaaaaaaaaaaaaaaaaaaaaaaaaaaaaaaaaagggaaaaaaaaaaaaaaaaaaaaaaaaaaaattc

SEQ ID NO: 86444 - DNA, 525 bp, Heterodera glycines
ccaaatgcctcaagaaaacgccctattagcgggcgttgacatttgtgtggcctcccctggtcgtttaatggactgtatcaatgaccgcgttacgaacttgcacaactgtacttatcttgttcttgacgatttctaccgaatgctggacatgggattcgaaccgcagattcgatcattcttctgcaaatccggccggatcttcttactttgatgttctctgccacttggccagctgaagtgcgttctcttgcagccgatttcctttcttcaccagtcggactgaatgtcggctccctcgatctgtcggctaaccacaacatcaaacaaactgtcgaagtcgtcgaagactttgcaaagaaagaccgattatgggttgtactcaatgacattctgaaacagacagaatacaaaacgctgatgttcgcggaaactaatcgaaaagtggacgaactcaccagacagatgcgctacaaggggatgcccgccctttgcatccacggagacaaaagtcaaaaagaacgcgaa

SEQ ID NO: 86445 - DNA, 430 bp, Heterodera glycines
ttttttgctcttcccactccttcccctcgcaaaaggtctcttttctctgatcattccgtcccttttggtcaatctttccaaatcgcaggacaatccgtccacgaatggcactgtctctgccgccacgtcttcgtcggcacgcattctctgcttcgaccatatccgtttttgggttggcaatgccaaacaggcggcccattggtattgcgtcaacttcggcttcatccctttcgcctacaggggcctcgacacgggaagcagaaaaacggtggcatatgcagcgaaacaggacaaaatcgtttttgtgttcgagtcggcactgctgcctaacaacggggaaatgagcgcacatttggccaaacatggcgatggtgtcaaggatgttgcgttcgaagtggacaatttggactgggttttggacactgcgcgt

SEQ ID NO: 86446 - DNA, 622 bp, Heterodera glycines
tcgtctactttatttttaaaaatccattcccccgtcctttctaaaagcagaaaataaatattttattttgaaaaatgaatttccactaattttgctgctctcgttggcgttctgtgcgctgatcatcgaagcatacccgaaaaacgatgggccaattgtgcgccgagaggcagacaatgaaaaagcggcaaaagcgcaacccggcaaagaggataagcaagcggtgaaagcggaggagaaagaggaggaaaagccgaaggacaaaaaggaaaaacgcggtgcagaggcagaggagcagaaagaaggaggagaaaagaaaggagaagaaaagcccaagggaaagaaggagaagcgcgctgcagagaaagaggaaaagaagacggaaaacaaagaagcagagaaaaaagagaatgaggagcaaaagcctactggcaagaaggagaagcgcgccgcagagaaggaggaaaagaagtcagaaagcaaggaagcagagaaaaaggagaatgaggagcaaaagcctgctggtaagaaggagaagcgcgccgcagagaaagatgaaaagaagtcagaaagcaatgaagcagagaaaaaggagaatgaggagcaaaagcctgctggcaag

SEQ ID NO: 86447 - DNA, 572 bp, Heterodera glycines
caagttcggacccaattgtcagactcaacaagatccacgacggactccacgggggcatttatgtgcacgaaaaaggaaagggactcattgaggagaacgaaatctatgggaacactttggcgggcatttgggtgacgacaggttcttctccgattttgcgcaaaaatcgtattcattccggaaaacaagtcggcgtttacttttacgacaacggacacggccttttggaagagaatgacattttcaaccacctttactccggtgtccaaataaggaccggctccaatccgaaaataacgcgcaacaaaatttggggtggccaaaatggcggtgtcctcgtttacaacagcggaaatggcgttttggaggacaatgaaatatttgacaatgcaatggccggggtttggatcaaaacggacagcaacccgacacttcgcaggaacaagatttacgatgggcgggacggcggcgtttgcattttcaacagaggacgcggactgttggaggacaacgatatttaccgaaatgcacaggcgggcgtccttatttcgaccgagtcgagtccgatcctc

SEQ ID NO: 86448 - DNA, 690 bp, Heterodera glycines
gccctgtttggtgattgcatgaaaaactcagatcaaattggagtcaaaagaaaatcagcaggaataagaattgaggaaccaaatgatgtaaaaggcaaaggaaaagtcgtcgaaacaagcagaaaaggcaaagaaaaagtcggcgaaaaaaataagcgttatgaacacagctgaacgcattgaaaaaatggaccttgcccaagacaaagctaaaatggatatagacaccaatggcaaacccaaacaaaatgaggaaaatgctcctccaaaatatgttttcatttggagcggtaacaatgagaagaagaaccttgaggttgacctcagagtgatccgtcactccaaaaaaactcagcgaattattccatgccaaaagtgatcaatccgtcaatgcaaaacacggaaagcaggaagcattaccggttccgaaacaggaagctgaaaaaatactgaaggaagtggaagaatggtacgcacatcacaaaaatgataaacataaaaacgctccagtttttgtgttcaagtgtaaagacaatgtcagtctggtgataaatgttcatcttgatgcagtccggctttccaaggagttgtcaaatatgcttgaagatactgccgacgaatgatatccgaagccaatcccgagtccagttccgaatctcaaaagtgacatcatgctaaaactgattaaat

SEQ ID NO: 86449 - DNA, 499 bp, Heterodera glycines
acacgtgaactgctgctggagttttatccgcctaaccgttgtgctcatgtaaaaaaatgaatacttagggggcggacacctcgacacggccgggcattaatacataactcgaaaattcgtggcagtacccaaaaatactccccaaaaaatgccagttttaatgacccatcctccatttgtttcccaattaaatagctcgatgccatttgccactgccaacattgtcctgtcgcctgtgtatggcatgtggctggagctgctctcccgggacatgccaccaatgcttttcggtaaatttgtgccctatcaaaaaagaaattttaattaactgtaaaaatgccaattctcccccattcaatttttcagtgcgcggcaaccgcacatccgtgatcacacacacttcatgaaactcttaattattgtgtgtattattgttttttttgtctcccagtaattatgtataaacgaaaaagagaaaaaaaaaaaaaaaaaaaaaaaa

SEQ ID NO: 86450 - DNA, 726 bp, Heterodera glycines
ttctctctctctctcggacctcccatcctaaagtcgatcccatcaaaactgtcccctcaccgaaacccggaaaagtatccctaattcctataaaaacaaatggctaatatgaaatacttgccgcctgaacttttggacgaaatggctttttacgtatatcctaaccaacgtttttctaaaattctgacttcttcctggctactcttggaatttttgatgccccgtatcaaaagatggaaagaaatattgaaattaagccgttccgaggtcattaaaaagcacaaattggccaaagacgatctcccttggaccaattttgtcacggtggcaaaaaaaagacagtgtctgcactgattttcttaacacgttcaccgaactgtttaaagaggaagatttttataactcgatcgacggaagtatgttgaatttgttgctttcaaatctccgcgagctttacccccgtgttaaacaaacatgtgcgtggttggatcttttaatccaagccaaactttttccggcgactatgcttctgattgaagaactttgcaagttcatcgaatcgccgggtctttatttcggagctgttcccgagtcgacatcagaggaagatccttatcaaactgtcgcttgcgttggaccaacgaaaaatgcggctggtctccagtcgacttcgtcatctttggctcccattccaccaccgaagcaaaaaccgattgtgccatcgcg

SEQ ID NO: 86451 - DNA, 619 bp, Heterodera glycines
  unsure (1)..(619): unsure at all n locations
agcggaaaaaccgaacgacgaaacggcggaaatgaccaacgacgggtagatacaccggaggttcttgctttncaaaaggttgagacgagtagaaccgacacctcccaaacacttctttgccaacaacagagggcttttgccaactccgacccctccgaagccgccagagtctggtgtggccgaccaattcgacggagacggcaatacgtcccgcatccttccgagccacactgacccgagtactgcttctgctctgtctactccaacttaactcaaactatgtccacccttcacacatataacaggatggagcgccccaacgtggcgagcaaacgactaccgaagcgccgtttactatcacgcgtacttgtcccgccctaagccgctgtcctgcactcactactcatgcaacaggggtggcactcatgtgctgaagatggacaacgactcttcctccatcagaagtcaacacttgacgacttattccgcgtgcaccacagacacacgaagatcaggatgcacgagagcgataagaagaggaaatgaacgaactgaacgatcggtagggcactaacataaaaaaggtgcgctttctggaggcacaaaaccgaaaattggc

SEQ ID NO: 86452 - DNA, 305 bp, Heterodera glycines
gtgggagggaagacgaggaggaagagactgacgatgacgaaataattgtgattgagcgagtagagcacaggggaagagaagacgaaaagcggaagagaagaagcctttcagaagacacaagcaatgcagggggaaaaggaagaaaagcaaatcgatgagaaggaagaagagcaaatggaagatgaagaaaaggaggcagagcaaattggagaggaaatggaagaagggcaaatggaagatgaagaaaaggaggcagagcaaattgaagaggaaatggaagaagggcaaatggaagatgaagaaaa

SEQ ID NO: 86453 - DNA, 619 bp, Heterodera glycines
ttagtttcgatgctcacaatacgcgcctgttcgatcgtacgatctccgtccgcatggaccgttatccgaaggaagtggaacgccgcgagggaggactgccttttggtctgcgtgctgttggaatgggtttgggggcgaatggcgcgcctctaaccgatgtggccagcgtgatctccagtattagcccttcgcagacacaacccgggatgaatggcacagctggcgcaccgatcactccattccaatcgccgccaaatgttgcccaatttggccctgtagctgctcaacctgtggcagcggggcctccaagcggatttcaacagggcttgcctgatcatggcatcagtggacatttccagtctcctcaacccacctaccaaccacaagctaccagtggcttcttcaacccccctcagccctctccacagaaccgtccatccggcggaatggccttcggcggtggaggcgcaacgccacaatacgcaccgacaaagcaaatgggcgttgtcggaggagggacggcgagcgctgcagtttatggacacccaccacaacaacaaactcagaagtacgagcacaaagtggagccgaagtttgaaatgggcgcgtacccggggta

SEQ ID NO: 86454 - DNA, 665 bp, Heterodera glycines
acggaaatcgagggatggatagaaaagtgccattccatggagaaacgggataccgattcaaatacactctggcaggaaaaggtggacacacttcaaaaagccatcgtggcattggaacatgagaaggcggacatggtggagaaactgtcgcaagccaaacaggagggagtcaaattggtaaaagaaagcgaggagaaacggcatggcgaaattctaactgaacaattgaagaaaaaggatgaagaatggagtcgtcgcgttaaagaattggaggaacaaatgcaattggcggtggaagaaagtgaccttcaaagaaagacgagtgttactggccacgaaagggaactttcgaatttgagaggacgagttgcagaattggaaaaggaaaatacacaaattttacaacaattttgtggacaaaagggagaattagagcaaatgaagcgaaaagaattgacggaaacggaagagacaccgaaagaaagaggagaaacccaaggaaaggaaatagaagagagggaaaagatggagacaaaactggcagagacggagagggagtcgaacgaattgaaacggacaattgaaacgatggaaaaggaaatttctcgtcttgtccacctttctgattcacaaaaagtccaactatccgaacaatctgaaaagct

SEQ ID NO: 86455 - DNA, 493 bp, Heterodera glycines
taaattgtcccctcaccgaaacccggaaaattccctaaaactcctacaacaaataatacgaaatacttgccgccggaacttttggacgaaatgactttttacatatatcctaaccaaaattgttcgagaattctgacttcttcctggttactcatggaatttttgaggcctcatatcgaaaggtggaaaaaaatatttaaaatactgcttaacgagttgatcgatctgcacaaactctgtaaggaaggaatcccttggcgcacatttaccgccctggcagaaaaggacaaaaactgcaatgcctttgttgccgcgttactggaactggttaaagaggacgcttatgcatctatcgacggatctggctcgaatgcgttgctcatccgtctccgcgaactttacccaagtgttattgaaactcttgcgtggactggccttcaaacactcaatgccgaactttttccatcaacacagcgtatggtgcaagcacttc

SEQ ID NO: 86456 - DNA, 659 bp, Heterodera glycines
tatgcaattgaacaaggtggtggactttaacaaaacaatcgcatgcgccttaaggaacgacaaaccatggaaaagatgcaaagtgctgcaagatacatccaaatactgaaagtggaactgcgcaaatcatcggacaacgagcgcatagctttgaaagaacgtaaccaaatgaaagcggagatggaacgatacaaagagcaggcccaaaacttgaagacgaaactggctgaccgtgagaagcaactccatctccatgcgtgcaaattgcagctgcagccaagaaacccgaaccgggcctttgcaagtctaaatgggaacactccgttgttgggcctttcctttgattgtgtcaaaagtacgccgaatctcaacgatacaacgatgttccaagcgaataggaaggatgttggcaataatgtgctggagacgccggttttcaacgagagtgaaatcgccggaccgcttcgaatgcctgacacgcccgcaatgcttcgtaatcgtaattcctttgaaccgccgcgtttcttctgaattgtcgattccatggccatcgtcaatttcgttcattgcttataggatatttaatggaatatgtaaattattgtaacttttttagtatcgttgtgtttccgcttattcaatttgttcctttatgattg

SEQ ID NO: 86457 - DNA, 646 bp, Heterodera glycines
tttgtttaaaaaggcccacttttagtatagcgccaacttttgattgtttaatattaaatacccaactccgtagtgctatgcagcaagtcaccagtggcacagatcattctcaatctcaaccagttcattctcctgctgtccattgtctggtctgtcaatgtcgcttggaattgcaccattcattgtttgggcctattgaggacggcaccgactgtgcttcttccaccaaatcgtatgctttgcgcagtgacggggcttcctgctcgacaacaacagatgcgaagcccgactttgcttcaaccattgcattgacttgacctccactgttggcacgtctcaatctgcaaatttgttggatttagtggccgaatccaccagtccattggaagtgccgatgtgtaagaaatgtgccaatgcagtgactgcggagctgaacaagcaattgggtcatttggagaaggaatgcatccaatacaaaaagtcgttggaccatttgttgcaacggcgtgcggactgtccatttgacatggaggcatcgcgcatcaaattggacgctttaaaatcagaagagcgcgacctattggaacaactgacgctgttggaagacgaggaacggacactgcttcatgaattggatacaaaacag

SEQ ID NO: 86458 - DNA, 588 bp, Heterodera glycines
cacaaaaatgaatgacaatgttttgagtttattggcattggcattggtcgtatttttgttccgtcaaaagtcaaattccgtacttgcgtttgatttggaagaacatggccctgcttctgctccgtctgcaatttccccaccgatcccttcgcctcccactgaaatttcccaattttttgcccattcgaaaatcgtcgaattgtcacgcggttccaagctcgcaaattcatcagtttgctgcttcggcatatttctccaacattttccttttataatttaataccgcccgattcggcattgattcaattggccaaagacagcggaggaataattgtggggcctttcttaagagaaatgcattcaataaaaggccaaattggagaagcgctaattgcttttctgacaaaaatgtcagcaagaagcacaaaactattcgcggaaaatgaagggacaaaggaggaaaggaattcggcacgcaatttaatcaaagttggcattattttttcgatggcaaaaataattggtgagaagctgcatgactatgaaatcaattgggcaaaagaaatattagaaactcagcaaaaaagg

SEQ ID NO: 86459 - DNA, 514 bp, Heterodera glycines
ttggactgctgtagcctgacacatttggagatgtgccgtgcgctgatcgcccatggtgccaacatccacttggggacggactctggcgagtcgacgctgctctgcgcatgtttcgaaggcaattttgagattgtcactcttctcgtcgagaatggcgccaacgttaatctcgcggacagcgacggaatgacgccactaattgccacttgttactttaccggaaagattgacattgtgcacctgctgcttttacacggtgcaattgttggacagacggatttcacggggatgaaatttgctcttttgggagccgccagggcgggctatttggaagtgtgtcagctgctggtgaacggatgggcagcggatgtcaaccagcaaacaatccacggcaccacagctctgatacgcgcgagcggtcggggacacgtggacgttgtgacttttctcgtcgaatatggcgccgaccttgaccacaccgacattgacggatacaacgcgttgatgtgcgcag

SEQ ID NO: 86460 - DNA, 659 bp, Heterodera glycines
acattttattattttattttcttttggttactttatggcagcagtgatcaaccaaaacccttctgttactatgaccagcagtttgggtgaaaatgcaagaatggattgttgttactttttacccacagaattggcccagaaaatcgaaggtcagctcacgggacgcatcgccggcattcatttgttggagcgggaggacggactgctcgttgtaaatgaggacagaacgctaagagtgctgctcagacgcgagtcgggaatgttttggccttcaattatccatgacttgccgcacatccccacaaaactcagctgcagtgaacagaaaaacacgatttttgtcggttttgcaaatggacagatccacgaatattcaattgaaaacgatttcaacagcatttcattcaaacggcaatggaattcgcacaccaattccatcagtggactcggcttttcagaacgattagaacaaatggtcagttgctcaaaggacaaaacggtggtttggcattgcacgtcgaccactcgcaaaatcgcaagttactgtacgggttcgccttgtaccacacttcaattcgatggcgatgcttccttcgtttttgtgggcgattattccggaatatttcagtgcttcggctggtggttgggacgcaacagca

SEQ ID NO: 86461 - DNA, 605 bp, Heterodera glycines
gcgttcgattcgaaaccaaaacgcttttattggagaagaaagttgaagagtttccattttcggacaacgaatgctctccccagccaaaacattgtgtgggctccgccccaggaaaattggaatgcgtggaacgcttcaaatattgacaatcaaacattggcatttcgttccttggaatggataagcaacgatttgttaacgcgggaaaagatcaaaaagattcctgcccgtttgactgcttcacgtcaaaccctccccgtttttcagcatcgggatgaaatcatgcacaatgtgcagcaaaattccgtagtattggtcaaaggcgcaactggatgtggaaagcccacccaaatctgtcaatatttgttggaaagccatctcacccagggcaaaggtgcccatttcaattgcgttgtcacccaacccatgcgcatttcggccattactttggccgagagagtggccgaggagcgctgtgagtcggtcggcgagtccgtgggttattctgtgcgctttgaatggatgggtccgcgaccttatggggcaataatgttcatgactgtcggagtgttaatgcgaaaaatggaacatggccttcgcggaat

SEQ ID NO: 86462 - DNA, 614 bp, Heterodera glycines
aaattggactctctaatggcatttctcctgttgtcacttgcacccctcttcgttgcccttagcgggattgatgcaaataaagtgccactgcaattgtgctgtgctggtggccaaagcttggctggccttatctacgactattctgaccatttcagcgaagttttgcaacagtcgggaactgagatgtgcactagcctgaaaaaggacatgaccaaattgacaactgcaattgaaaaagctgaaggatgcaagtgcaatcttgttgaaaaaattgagaaggaattggatgatgttgaggatgattgcgcctacaatttgtcacttcattcgcgcactgttccacattgtggccatggcctcggaacatttgggcgaaagttggaactccgaagcggccgagttcaacgagcaaattgaagccattgatagcattggacatgatgaacttaagaagcttgagtttgaagcggaatcggaattgaaaacacatcctcgtgttggccgaaaaagaatgaacagatgctaattgggctgggcaaaatttgaagatgtcaatgtgtatttagacgaattaatttgacgatctttcattagtttaatgacacattatggca

SEQ ID NO: 86463 - DNA, 553 bp, Heterodera glycines
aaaatttcttccctccatttcgttcactcgttttaaaatgatgtggatgttcttcccactcaaataaggacacggttctattcaaatggtggaaagtcgaaactatcggaagtcttctgatcacttgtttggtcatgtattttggtgccatttgcttcgaagccatcaaatggcttaggcttatgcttgaacaaaagtcgcgtcagccgaactccgccaattccgccggactcaacatgacagaccaaaacaaaacagtgccaatgactaatcgccggtacgccgaatcgctcctctcccgggtccatcttctccagagtgttctgttcacggttcaactactgctctcctacctgctgatgctctgcttcatgactttctctgtttggattggaatggccatttgtgccggtgctgccaccggtttttggctttttgggaggagagtgccaatgttggcatttgcatcgagcggagcagcggggagcggacagggatatgcgagcaccggccgaacggaactccattaaaagccatgcattcattttcccca

SEQ ID NO: 86464 - DNA, 469 bp, Heterodera glycines
  unsure (1)..(469): unsure at all n locations
taagttttttatgcgatatgaattcgctcgccaatcgctgctctttttctaatcgtcgtccttttctcgttcggttcacattttggcgacggtgaaagagtttcaaaagttctatccgatgaaaatgccatccaactttaaaagtgtcgttggaggtcatcagctatgcaattccaaccgatttttttcacaagagccatcaaatttgagcccaggggaggcatttttgcagcgctcacgcgaagctaacaaagaacaacttaaaaaactggttgaggaacatgaaagggtcaaaagagaatgtgctgagaaaagaaaaaggctcattcgactcaggcgatactattatctttgtgtatatggctttgccttttttcatttcttcctttagtgcctgtttttggtacttcggcgcaccatcccaaaaatgaatttctctcnnaaaaaaaaaaaaaaaaaaaaaaacaaa

SEQ ID NO: 86465 - DNA, 462 bp, Heterodera glycines
ccgaaagtctcgactatcggacgtgtcgtcaaaatgtctttcagtgggcattgtttgtgttattcaacggactccggagcattttatgtgcaaaatctgcaggcaaagagtggcggagcactcaaactgttcgatggggcgaccgacggacacgcaatttgtacctttggaatggaagaattcgctcttagcggtgtccatgatttggttgtgttcgtcaatatgcacggcgtttcctcccggccgcccatttccgtgagtggtcggagtcgaattgtcgggctttctctgaaggatccgtttctgcatgtgttaatcgaagatggcaccgtgtctattttcagtaccgtcgatgcccatttggtccaatcgctcgcttttccaaccgacgaagttcaagatgtgcggcaaaacatttgcggtcgatcacctgcgccgatcacttgccaattggagaacatt

SEQ ID NO: 86466 - DNA, 590 bp, Heterodera glycines
ctctgttaaagcccttttttaatcggaaatgaatccaacggttttttctttgttttagcggtgctctttcttgtcaaagtcgactttttacagtgcaaatacaatgaaccaatggcacgacaggtgctgcaaaagcacgcttcacaatttcagcagcattgtaaaaatgcccgcagaggaagtgccgtggccaaatgttgcagtgccatcagaagcataatgggccgattcacaagccaaaaaaaggcaatgaaccaaatgctggccaagtgtaaagcgggcacaacgccaagcgaagcacagcaaatgcgaagaaaattggaaggatcgaataaactgaaggattgtggccagtttaaaagccaaattcagcacaagttcagcgagttgaagcagtactgcaacaatggggcagaaaatgaggaggaaaacgacgaatgatcagagagggagagagaagaggagagagtagagagagagaggaacagcaaaattctaatcactagtgatcactgataattgccgattgattgaccggtacgactcatttggctgattgaagttttttttatggcataaagagttgcgtc

SEQ ID NO: 86467 - DNA, 671 bp, Heterodera glycines
attgatacctcttcttgacccgtatttggctgtggggatgtgcatgtcattgtgtttacagttctaccaatttttatgcaaaatttgtcatttttgctgctttgcgatgtgccaaagtgtgatcgagaaggtgcactcaaaagcgaaattgagcaaacgtttcccagcctcaaatgccagcacattcactgctacaaaaaatggcctggccacaagttcgacacgttcatgcacgtcactgtagccggacagcaaaagcaacaacattccccaaaactatgtgctgcttctgagcatggaacaaacaaatcccactgcttttgtccaccattgacggatttggattcactgcacaaaatgttgcgggtgaaaggcgcacgccgagtaaccgtacagccttggctagcagtaaacggagaacaacacgaacaacagcaacaacagagtatcaggaacaattgcagctgttgcgtgagcgaaacatgccgagaaaagcaatgctgcgaagcagtggaagacgaggaggagaagaaatatgaaatttaacatacaattttccttttttaaattgtaataattgggaaacagtatgtctttttttatacagtatacctatggttatcgctctgttttttttcattttaaacgcaaattcattttgtttgattaat

SEQ ID NO: 86468 - DNA, 672 bp, Heterodera glycines
ccgcaaatctttccattcgaagccacatcttgaacaattggacggagtgaaggaaggggaccaaaaagagcaggagcttagtgaatttatgcgttccatttgcaactttcttagcactctgactaacgaaatgaccattatgcaacggataagtacggatactttgcgctcattcattgactcacttctttcgttggtcagcgatcagcgtcttaaaatacttaacaaacaggtattccgttctctcaacattattgtgattcgactgtgcgaattcacaaatccgaatgtgtgttttgtggcgctgatgaaattggtcatgaaataccaggcctctgatcctggcggtcaattgtcatcgttggtccgcaaatgtctcaccaaattcactgacgcaattgttgagccgaccaggattgaaaaagttgacattctgactgtgctgcacccaatccacgagtattattcgcgtttttatgttgccgatggacaaaccaaccaaatttccgacacagtgaaggacacgtccaaattgttgtgcatttttttgcagcgtttggtcatcaaccaaaaatatgcgatgctcaactatctgtatccgtttcccgaaagttcccaattggtgagttatgtgcggcgatgtatccgaacggtgggccgaaaagcgatgga

SEQ ID NO: 86469 - DNA, 590 bp, Heterodera glycines
taaaagatccgaaaaaatgccaaacattttcaaaatccttctgattgtgcttttggccgtcgtctcattccgtctctcggcttctactggtgacaaaaaaactgctaatgatgggagtggaaacaactcatcagctgggattggtacgaagatcaaaagaattgtcaccgctggactgctcttcacttccctggcgacgggtggggcggaagcgattgggcgaagcaatgctcagggaggaaatgccgccggattggtgccatcgcatgtgaccaatcgctcaatggctccaccacctcctcctgtgcaatttgaaatgggggcaaatcgattagaaaaaatgagggcacacctacgcgaacttgctgagaaaatgccggtcgatgaatcgaagcgtctgtcaccgagtggacccgacccacatcatcattagggccatggatggatctaacggaggaagaaagaatggatgcttagttttcagattttattctatcctcttttatttattagtttttcaaaacaaatttcttccacaactttttaaactatttgttgctttgaatctttttagataaatctaaacccct

SEQ ID NO: 86470 - DNA, 499 bp, Heterodera glycines
  unsure (1)..(499): unsure at all n locations
ttatgcgtgttctcccccttctcttttctgccctcctcctcctctctgttggcctttgctttgcccagtttgatcagtctccgtccgctgctctgaatcatgtgcgggccaaaagaggctacaagccgtggaagaagcaatccttctcctcttcttcaagcgaaatgtacagaaggagaagacccagtggtaacggtcattacagggattacaacggctacggtagcaatggatactatcgacgaaaacccggcattttagaacgggcgctgggaaaaattacgcggagctattaacggacgagcagaagaagagaagcaaaaagccaaacaatgggcgtaacacttttaattgatcaaacgatattacagtatccaacaccaaaattacagtaaccaaacatccaatggaacgaatgactcatttaattcagcaaatttgctggaattgccgataaagaaacttagcnganaaaaaaaaaaaaaaaaaaaaaaaaaaa

SEQ ID NO: 86471 - DNA, 624 bp, Heterodera glycines
cactttctcctcccttttcccattgcttttgcatttgccgaatctctccgcccccttttttgacttatggcctcgtcctttttgggtaaaagtccgaattcattcacaaacatcgctcatcatcatcagcttcttcagtcatcgcatcatcaaaatggcggcaccgaaattgaaaaacggtccccctcctcctcctccacggcacttaactccggcgatttgctgtcagacaacaacgaagcggcaatggcactttcctcactgatcgaattgggtaaaaatcggcaacaaactcagcgagacgaggctgaaaatggcattgacaatgacgattgccgtttcgatgggtccgtcgccgtttcgtcgccttcggtcatttcgtcgacttttgcggcaacaccagcgaactgttctgccgaaacattccaatcgcacgccaacggcacacacaatgtgacgacaatcaaaacggaggacaacgaatcgggcgacgaattgccaccgcaagatgattccgcgtcggatgcgcccgttcacgaaattcgctgtggtctgttgaacgcgcggctgcacatgcaacgctttacctgcccgggcattcatcggaagtgcgttgagttcgaa

SEQ ID NO: 86472 - DNA, 569 bp, Heterodera glycines
tagctgagtcgacaggaaaactgttggtgttgagctcaattgaaggaatggacagacataacgccagcacggaatcggggagtttttttgccttgataaaacgaacagtggtcgaagcccgtgtggacgctgaaattgagcagcactttcagtttggctggatggacgggacccaaattgccagtggcgttgtgatggactctcttcctctgccgaatttggtcgtgctcaattactccagctacgaattttacctcagcaaagatcacccagcgcaaatgacggccaagtcgttgcttttgttccttcacagtgttcggctgggggaagtgacagtccacgggggccgtgcgtggatcacacggctgcgaaggatggcctacgaaatcaccagcaatgtgtacgacatgttccaacaccaacccattctcaccgtttgcctttttggagtgccattggcattcttctccatcatcacttactcaatctgttcggctgatttttccgtggaaagggacgagttctacccggatgatgacgaagaggaaagtttacccttggaggaattg

SEQ ID NO: 86473 - DNA, 677 bp, Heterodera glycines
atacaaggaaaacgaaaacgacgaatgtgatgatgaacggagcatgccgagaagggcgtcggagagaacgctggacagatttgaggacgtgagaacgattgcctccagtgacattgaagttattcgccaaatggacgattggtcggtcacgagcagttatccgaacagctcccaccagcagagcaacacacagaaaattggacaaattcggtcaataggagaacttcagcaaagccaaacaccgccagagttaactaccaaattggacacttcagaacaatctcagcgagaaatggacgagaaaattgccgtattaatggccaaattggcgcatagggaccaaaagatagaagagttgggcagggccaacgaaaacctgcggacaacgaatgcaactttagtggcgaaaagcaaacaaaaaaatgcggcggaagcaaaacttcaaagtcaatttgctgagaaagaaaaacaactaaccgatttgctagacgaaggacggaaattatccgaatacagcggtcgtcaagcgaaagaagttcgaaagttgaagcaacagttggaacaattggacatcgtcacggctgcgagggacagcgcagttgaggaactgcaagaagcacgccaacagctgcaagagcaagagaacgcaatggaacagttgagggacgaactcgata

SEQ ID NO: 86474 - DNA, 599 bp, Heterodera glycines
taaaagatccgaaaaaatgccaaacattttcaaaatccttctgattgtgcttttggccgtcgtctcattccgtctctcggcttctattggtgacaaaaaaactgctaatgatgggagtggaaacaactcatcagctgggattggtacgaagatcaaaagaattgtcaccgctggactgctcttcacttccctggcgacgggtggggcggaagcgattgggcgaagcaatgctcagggaggaaatgccgccggattggtgccatcgcatgtgaccaatcgctcaatggctccaccacctcctcctgtgcaatttgaaatgggggcaaatcgattagaaaaaatgagggcacacctacgcgaacttgctgagaaaatgccggtcaatgaatcgaagcgtctgtcaccgagtggacccgacccacatcatcattagggccatggatggatctaacggaggaagaaagaatggatgcttagttttcagattttattctatcctcttttatttattagtttttcaaaacaaatttcttccacaactttttaaactatttgttgttttgaatctttttagataaatctaaacccctaaaaaaaaa

SEQ ID NO: 86475 - DNA, 362 bp, Heterodera glycines
cagcgagaccgtgaatcgtcatcgccagttaaaatggagccatcattatggaaggcattttggacagtttggaccggctttctggaaacaaaagttgatctgacggaacaggccaagtcggcctggatgtcattgggtgaggattttgccaggaagcgcttgcacatttgaaacgccttggcatcccgcattgattcaacaaattaatgaactccgaataatgtcccaccaattattaaacaatttaaaaaattgacatggctttttgactgtaatggattattatttggtgaataaaacaccacaaaaattaatactatcaaaaatcaaaaaacaaaaaaaaaaaaaaaaaaaaaaaaaaa

SEQ ID NO: 86476 - DNA, 654 bp, Heterodera glycines
ggcgaaaatattttattaaaaatgcatttaaaaatatttttattaattttatttgtgacaatttgctcggtttggtcactttcacccaaaatccaccacaactaccaccaacagcagcaacagcacaacattaagaataaattgccaccaaaaaatattgggacaaaacatttgaaaacggaaattaatgggcacaacaaacacaagcacaacccggcgagcagacacgggcatgctttgcttcaaaaagtgaaagaccaattgaataatgatggatgggccagtgaagatgcaaacaaaacatcggtattgctctcttcactgttggccatcgaatgccatatgaaaaaattggacaagaaaaggaccaacgactcggccgagatcaaacatttgacggagcaaatctgtgccgccgagaacaaagaacaaattggcattcataaactgataaatgaagttgcgaaaacatttgaaaaagatggaaagaaaatggtagaacaaatgaaaagggacgagcatacggtaaaggtgcatcttgacgggcactacggtacgttggccgagattttgccaagcgccaaaaagcacgcgaaggcaacaaggcttcgaacgtatcatgcagtgctccatttgttgcatttgatcactccg

SEQ ID NO: 86477 - DNA, 725 bp, Heterodera glycines
tccggaaggaatctgagagacgttgatgccatgtcgtcggcgatgtttccgagagaattcgacgaatttgaacaattcagacaaaagtatggaccggtggacaaactcaattccaaagtgttcttcgccggaatggatattgtggaggaaatccaagtggagattgagcgtggcaaagtgctgaacattcaaatgttggccgagggaaaattgaactcgaggggcgagcgagaagttttctttgagctgaatggacagggacggtcaatgtttatcccggacaatgaggcgtccaaaagtattgttgtaaggccaaaggcacttcccgggatgaaagggtcaattggagcaccgatgcctggagagattttggaagtcaaagtgaaagtcggtgatattgtgcaacccaaacaaacgctgttcattctttcggcaatgaaaatggaaatgaatgtcggctcgccaattgcgggcactgttaaggctattcacttgaacaagggcgagaaagtctcacccaacgatttggttgtcgaagtcgaacagtgagattaatattatacaaataggttgtgatattgatcatccattcccttcactttgttcccctatttatttgtgttttgtttggttagaccccatccctcccttaaattaggttttatctgtattgtgtcatcacttatgcgatattttccgtgatattcaccaaatggaattgattt

SEQ ID NO: 86478 - DNA, 523 bp, Heterodera glycines
  unsure (1)..(523): unsure at all n locations
cgttttccgtcgacccttccaagcaatgcccgactatgacacgttgaccaccgtctacgcgggcgacaaacacctgattgagctgaaagtgaaggcgaacacgcgcattggttggcaatacctcaccgaggaggaggacatcggttttgcggtgtacttcgacccctcgggcaatgccaacaatctgacggagatggactgcgtttttccttacattcgattggaatgttcccaagtgcccatttcgggttccctcctttgtgagcagtcgggccgatacataatcgaattcgacaactattactcgtggttctctgctaaacaattgcggtataacatcgaaatcgatgacaggggaatcggacaatgaaaaagcggacgaataagcgacagaagttgacagtgagaagcatagtaacacaaagaacaccataataataacaaggacgacgattatcaaattccagccaaatatttcattcgaataaattttatttngaaaaaaaaaaaaaaaaaaaaaaaa

SEQ ID NO: 86479 - DNA, 335 bp, Heterodera glycines
ttttttcgtgctgtccagcttcgtcatcgccgctgcctattgctccatcgactgcggtgggaatgcctccccctcctccgccgatggcaaatgcattgcgacgcccacccccgtgccctgagactcaattaattcttttttttttgaatttcacattttttgcgttgctttacttatttatttttgttctttttggtgctcattcattccttttttgattttctttcgatttcaacaaaacaccataaatatctcttgaatctcctctcttcgctttgatcttcttccaaattttacgacgatcattcacttttttctgcagaatattcatcatt

SEQ ID NO: 86480 - DNA, 668 bp, Heterodera glycines
acgcgcactccttgggccggttactacttacgtcatcgggtacgtgcaacaggacgacttgttcatgggcacgccaacggtgaaggagcatctgatggcgccggcacagctttggatggtcggacacacccaacggacgatgcgtagacgcgtcaatgagttggaagaagccatttcggatggtgaggcgcgtcgtttgccgttcgccttcgaaccgcggcacaacccgcaaatcatttttgccctccaaccgactaaggacctcgcctcgtcagtggtggacagcgcggtctcgcacattctgcgtaccctgaatttgttcggccggcgaatcgtcgtcacaattcaccgtccgtcagaaggaatgtgccagaaatttgagcgggaccgtcttttgaagttactcgaacggacgcaaaaggatgtccagcgcctgacgaccgccaaccaacagctcaccaccgccaaccaacagctcaccaccgccaaccaacagctcaccaccgccaaccaacagctcacgacaacaaaccaacaacagcagaacacaatcaaccaccagcagcaaaacatccaacaactccaaaacttattggccggtcagcaaccgcttgttccagcgtttgcccccggggtttttggtgaacaacagcagcatcatcatgcgc

SEQ ID NO: 86481 - DNA, 219 bp, Heterodera glycines
aattgccgcccttctcttcctcttcggctgctgtcgtgcggatggaaatgttgtgcatctgtcgagcctcaattgtgccacgaaggacggaggaatcgatggcttaaagctgtggacgacggtctgatcttggattcctcatctgtcaccgctgatacgtctgacctgcccctcatcggtttccagaagaacggaaaggaggacttgatcttcaaactc

SEQ ID NO: 86482 - DNA, 566 bp, Heterodera glycines
cggtggacaattgtcgatgaaatcaggcgatgtcgctgtgttcgcatccaaatgtcgtcaattactacacttcctttgtcgtcggggaggaactttgggtggtgatgcgtttgttgaactgtggttcgatgttggacatattgaagagaaaaataaaggcagttggcaaagaccaggcggcctacggagtgctcgacgaagtgataattgcgacagttcttaaggaagtcctccggggcctcgaatacttccataattctggccaaatacacagggacatcaaagcgggcaacattttgttggccaacgatgggaccgtgcaaatcgctgacttcggagtgtccggttggctggcggccagtgggggagacctttcccgacagaaagttcggcacactttcgtcggcactccctgttggatggcccccgaagtgatggagcaggtgtccggttacgatttcaaagcggacatttggagctttggcattctgtgcattgagctcgccacaggcaccgtcccttaccatcgctaccccccaatgaaagtgctgatgctgacccttcag

SEQ ID NO: 86483 - DNA, 711 bp, Heterodera glycines
gtaaatgttgaattgttttctggacaatgactaccatttaaattttgatcatttctccagttcatgagccccaattgttggcttctggtttgcccgaactgttctggaaatccttatacaaaaagatatccaatcagattttcgatgcaggaaaatattttgaggttatcatcgaagaaagcgaaccgaatgaaacaatttcatcgcaagtcaaagctatgagcgaattgaaaatggacgacccggaaaatgtttttctcattgaccatgcgtggactttccgtccgaatacagcacgttttgcacttcaacaagttgacggactgaggaagagattattggacatgttcaatatcaaagcttggtatgccaacaaagaatgtttaaaggacccttttgctgatgatagcgcagaccaacagcaaaagtgtgctgatgcagtggccactcattccgctgattgtgaggactcggaagtcgcatcgccatgcggccaaaatgtcgaagaaatatgggaaaagcattgcgaaatggacgacctaataattgacgaaatgtggaaatatgcaatgacatattcaattcgaatgctcaatttggaaatggacgaacaccaaattcctgtttggtatgtcatggacgaattcggtgttcgaattggccattctcttcaccaaacgtcaaaatggttccgtttctcgacttttctga

SEQ ID NO: 86484 - DNA, 640 bp, Heterodera glycines
ttgaatcgtcgaatccttcgtaaattctctctctctctccattggaattattcattgagatgggtttttaaaaactatcgctttcctttcgcttttggcacttttttgcgcaacaattgctgaagaaaatggggcgacagaaggcacagaagcggaggcgacgacagtgccaacactcaccgcagcggcggagggaggcaaagggggcgaagaggaagtgaccacggcgaagccgacggagacgagcgaaacggcacgggaggagggggaggagaagcacaaggcgaacgaggggaaagcgactgagggaagtggaaccagatcgttgtggcaaaaagtcacctgtatgttgttcggctttttcccatttcgcgccggctgtccgggcaaaaacgatataaaagcggggtcatcatcacatgtgagcagcacaattatgataattgaggaaaaagaggacagcgaatcggacgaacaaatggacggcgccggaggggacgaggagaaacggggaggagagaacggcagcgaagcgcagggcggcaaaggcgccgcaagggacaacgaaatggaagacgaagaattgaaagtgaaagccgtggtggaagagacgacgacaaatgaacagggcaaaactgag

SEQ ID NO: 86485 - DNA, 525 bp, Heterodera glycines
cactgcgtcggatggtacagcaatatccaatggctgttcttgcctcgtcctgacaatttgatgaaggagctgacaatatgcattgaggattcagcggtggagcagcaatggttggcagccgtggaacaaatcaaagcggcattttccaatgcttcttctcctgtttacttcgacattactgtttactttccgccgccgtcttcgctttctgccgttgtgccatttaaactgaccaacgaaatgactggagagaaattggaaatgtacaaagaagatgtagaagaagatttaagttgtttttccctcattcgttgtccaattgcgcccgatgataagagagagcggatgaagatgattaaggaattggacaaacgatggaatcgaattaacatttttctcatcggcgatggtcttctcgacggtttcccgggggcgagtggcgatcagaaagagcagaagaaatgaatcgatggttgattgattgatgtgattatgattacctatgcgatctaaatgttgggctta

SEQ ID NO: 86486 - DNA, 527 bp, Heterodera glycines
  unsure (1)..(527): unsure at all n locations
aaaaaaaaaaaaaaaaataaaaaaaaaaagggctgcgtttctaaaagcccnctttttttttcctgttgacgaccattctctggttggccccgatggcgattcgcctctgttcacccaccgaatcggcaaatcggcgccggagggccaaccgggcgaaaatggcgcggcagtgacactgacgggggaggaggcggctgaagggcgacgccaaatgagctactggttcatgaacgtcaaggcaagcgacaaattgtctctggaccgcgcattgccggacgtgcggccgaacgcctgtcgctcgctttcctacgatttggccaatctcccttccgcctcggtggtcattgtgttcactgatgagcccacttccgtccttttgcgcaccgtccattcggttttcaatcgttcgccaatgtctctgctgcgcgaagttgtcctcgtggacgacttcagtcatagagaggagctcaaagctccgcttgtcgcccatttgcgtcgcttcggttcgcgcgttcggctctttcgag

SEQ ID NO: 86487 - DNA, 414 bp, Heterodera glycines
tgtggaaaattgtgcaggctctcgacctcgacgactttgccaaacagaagattgacatcactaagaaggaattgttggccgagcgcgacgaagcactcgcagcatgcaagtaatggaaaaggagagacaaacgtagaggaaatgacaaagacgacagaaataaacattcagtgccgacctcaatttggtgggagtcggtaatgcgaattcacatttatgacttttaataaatcataataggcgagcaattaaattaaatagcaaaataaagtgaccttaaaacttggaatgtttgtccattttttcactttttgcaaataaattttgcttacaaaaaaaaaaaaaaaaaaaaaaaaaaaaaaaaaaaaaaaaaaaaaaaaaaaaaaaaaaaaaaaaaaaaaaaaaaaaaaaata

SEQ ID NO: 86488 - DNA, 631 bp, Heterodera glycines
atttttagtcggaagagtaaatttttcggataaattcatatataaaaggcacaaaaaattcatttggttgccattattttcatcattcattaattatcggcaattcatcttcatcaatcatcccttctctgtgtacaacgaaaacgacgacaattgagcaatgtcggaccatccaaatgttgcgctggccgacctcagctgcgtggcaaacgacgtttggctggacactctgttttggattgaccgcgtggaggtgggcacgaagtttgcactgatcgacgcacgtttcggcaagctggtggccacgcatttcaacctgcgcaagtggaggctgggcgagctgggcgttcatcgtgcaccaagcggatgggaccggggcggcacggcggctgtcaccgttatggacgacaacgcgttgatcaatcgactgccgctcgccacgtgtcctgcaccgggcggcgtgattggcttcagtgccatctacatttggtcttagcgaacaaaatttttttgcaaatttttaaaaattccctaattttccaggtacgtcgacctggaagtgatcgcatttctgcagtgcctgcaacgtgtcatcaatcgcggcatcgctgtgcagttcaccatccattcg

SEQ ID NO: 86489 - DNA, 527 bp, Heterodera glycines
ccattggttctgtcgtgaggagcaccttgtacatccctgctgagcttaagattccgatatggtggaggaacaacagccaataatttcgccggcacattgtggtagtggtgccgaagaattttcgccagacgcgcagtgcgcacagcaatggaaaaagcccaatgagtcgctgtttgtggtccaacaattggcccgccaagggcttggcccgcgtcaaattttggcaacgctttatcctcgctattgttccaccatttcggacgacatccccgatgagtggataatgcagttactccgtgaactgtgcgagcaccggacacgccaaaaattgtccaattacaacacatttgaggacgcagtggagttattcatgaagagcaagcgcattttggtgatcaccggtgccggtgtgtccgtcagctgtggcattcccgactttcgctccgagaatggggtttatgcacggctcaaaaaggactttcccgagttgccaacccccacggcgatgttcgacattgacttctttc

SEQ ID NO: 86490 - DNA, 508 bp, Heterodera glycines
aagatccaaaaaatgccaacattttaaaatccttctgattgtgcttttggccgtcgtctcattccgtctctcggcttctactggtgacaaaaaaactgctaatgatgggagtggaaacaactcatcagctgggattggtacgaagatcaaaagaattgtcaccgctggactgctcttcacttccctggcgacgggtggggcggaagcgattgggcgaagcaatgctcagggaggaaatgccgccggattggtgccatcgcatgtgaccaatcgctcaatggctccaccacctcctcctgtgcaatttgaaatgggggcaaatcgattagaaaaaatgagggcacacctacgcgaacttgctgagaaaatgccggtcaatgaatcgaagcgtctgtcaccgagtggacccgacccacatcatcattagggccatggatggatctaacggaggaagaaagaatggatgcttagttttcagattttattctatcctcttttatttattagt

SEQ ID NO: 86491 - DNA, 591 bp, Heterodera glycines
taaaagatccgaaaaaatgccaacattttaaaatccttctgattgtgcttttggccgtcgtctcattccgtctctcggcttctactggtgacaaaaaaactgctaatgatgggagtggaaacaactcatcagctgggattggtacgaagatcaaaagaattgtcaccgctggactgctcttcacttccctggcgacgggtggggcggaagcgattgggcgaagcaatgctcagggaggaaatgccgccggattggtgccatcgcatgtgaccaatcgctcaatggctccaccacctcctcctgtgcaatttgaaatgggggcaaatcgattagaaaaaatgagggcacacctacgcgaacttgctgagaaaatgccggtcaatgaatcgaagcgtctgtcaccgagtggacccgacccacatcatcattagggccatggatggatctaacggaggaagaaagaatggatgtttagttttcagattttattctatcctcttttatttattagtttttcaaaacaaatttcttccacaactttttaaactatttgttgttttgaatctttttagataaatctaaaccccgtaa

SEQ ID NO: 86492 - DNA, 663 bp, Heterodera glycines
cccaattggaaaagcggcggcggactgaccaaggcaattcgatgagtgccagtccatcagtttctgctgctctgtacgatttcccgcctgctgacacagaaactatggtgaaattgacaaatactactattccatcaccgaccgccactatcgaaccgtcatccgtgccattgtacgaattgccacccgacaatggtaaaatgccaccatcgaaagcgtcagttgctgacagtgtggtgttgtctgtgggtgtagcgttatatcagtggaaagcgcgcaatgaacaggaaatgacatttggacgaggcgatgtaatcgaagtgttggagcagagcgaaatgaggtggagaggacgacttcagaaaaacagacaaatcaccggatggttccctaaaagttacattaaaatttctgctccttcggagcagcaaaaggatgaaagcgcaacaacggacctttatcagacgggtcaaagtgcagcaaaaaatggaggcaaagcacgcgtgggtgaaagtggagaatggtttattgctctttaccaatttgatgctgtcgagtcaaccgatctctcattgaaacccggcgatcgaatttgggtgaccgaccaacgtgatcaatggtggcgagggacttgcgacgggaaaagtgggatttttccggcag

SEQ ID NO: 86493 - DNA, 425 bp, Heterodera glycines
cgcggcaccttttactgttcttttttatccgggcatttttgttggcattttggcggtcatcagtgtcatgtctcatcgctggtacacttatcatggcactggccgtgaacttcgccccgtgtcgaacgccttcgtccgctttgtcgccgctttcttcggttgttacagctattttccctacaacactgaccccgaccctgaaccaatcgctgtcgttgaaaaggaatgagtggtgaagaggaaatacgatttaggcaagcaaccacaacactttggtctttttattgttatttccctggcacataaacacagaccaaatgcaaaaaaaaaaaacaaaaaaaaaaaaaaaaaaaaaaaaaaaaaaaaaaaaaaaaaaaaaaaaaaaaaaaaaaaaaacccaaaaaaaaaaaaaaaaaaaaaaaagg

SEQ ID NO: 86494 - DNA, 691 bp, Heterodera glycines
gattttccatcgaaatacaatcttctctgtttctctctacatatcccaaaattgttccccaatgctgcaagctcatcagtaccaacttcggcaaggtcatcgtcgcgtttctgctcgcagcattttggcccatttcggtttcgaattctcgaacgactaccgacttggctgcggacattacagtaaagtgtacaaaggctatttcaaggaagcgcaacgcacttttgccatcaaagtcaccgacttggaaagcgtttccgagaagttcaagcaaaagtttctgccacgtgagctggaagtttggcgggaattggaccacccgaacctcgtctacttgtacaacgatttccagtggagcgactatcagttcgtagtgatggaattggctgttggtggtgacttgctttcgttcctccaaaaatgtggccccgtcagcgaaacgacctgtcacaattggatgctccaaattgttgctgctttggattatctccaccgtaagggaatcgctcatcgcgatctgaagctggaaaacgtccttctttgtgaaaacggcgtcatcaaagtcactgactacggattctctaagcagagttctgatttgtcttcaacattttgtgggtcgcgttcctattcgtcaccggagattttgcttggcatcgcttatgacatgttcaaatcggacatttggtca

SEQ ID NO: 86495 - DNA, 665 bp, Heterodera glycines
cagctgcgagtactggcatttgttttcattttattcctatcttcaattcccaaaaacaattgtaatgcaaatttttgaggcaccttggataacgcatgaaggtggcagcattttctctctcgacttccaccctagcggatgtaaactcgcaacagcaggacaggacccttctggtgctggtcttctgattgtgtgggatcttggctttctaaactgcccacccgattcgaaggagttcaattgcagtcaattaccattgacacgaattccccacacaagtaccataaactgcgttcgatggtcaaaacattctgctaccatcagtcgattggtctgtgctggggatgactcgatgatttgcgtttacgaatgcgtcggtgtctattcaagcgaaggatccttcagcaacagtttggaaatgcctacgtgtcaaaagcgaaatatcgaaagctatcgctgcactacacaaattgtatggccattccatcgatgtgttgcacattgactggtcttcggatggacgctttcttgcctcgtgctctttggacagcacaatcattgtttggaatgcactaaaattaccagaaaaggtaattgtcttaaaacaaacaaacgacggacatgtgcgtggagtaaaaggcctcgcctgggacccaattggtcgt

SEQ ID NO: 86496 - DNA, 480 bp, Heterodera glycines
ggtttcgactgtttagcaaacaacagggtctctgcgaagcagcaatgcgacgtatagggtctgacgcctgcccggtgcctgaaggttaaagggaggagtgaaagctccgaactgaagcccatgaaacggcggccgtaacaatacggtcctaatgtagcgaaattccttgtcgggtaagttccgacctgcacgaatggcgtaacgacttccccactgtctccatcacatgctcagtgaaattgaattccccgtgaagatgcggggttcccgcggtcagacggaaagaccctatgaacctttactatagcttcgccttggcgttagcgaccgtatgtgtacgataggtgggagactatgaaaccggggcgccagctctggtggagtcgtccttgaaataccacccttactgttgctgacgtctaaccgagggccgttatccggtcccgggacatggcgtggtgggtagtttgactggggcgt

SEQ ID NO: 86497 - DNA, 385 bp, Heterodera glycines
  unsure (1)..(385): unsure at all n locations
gccgatgggaaaagaaagtcttggggaggagcagcgaaaggttcttttggngcctttgctgaaggagggatgggaaacggcgcaggagagagatgcctcaaaaagagcttacttaaaattctttttcaagcgttcggttctatgacgcgaatcgcactaaaggcggtccctccgtactaccacccattttgtctctacgtctataacaaagtggacatcacactgagcagtcacgacgtgcaaggcatttccgagagggacgtcaaattggcatcgttcattgagaacgtgttcaaaacagtgaagtgaagatggcgttcgttgtgaatcaaacggatacaaattgtcattttgcaccctttttaaataaaatgataaaaaagtc

SEQ ID NO: 86498 - DNA, 580 bp, Heterodera glycines
  unsure (1)..(580): unsure at all n locations
taaaagatccgaaaaaatgccaacattttaaaatccttctgattgtgcttttggccgtcgtctcattccgtctctcggcttctactggtgacaaaaaaactgctaatgatgggagtggaaacaactcatcagctgggattggtacgaagatcaaaagaattgtcaccgctggactgctcttcacttccctggcgacgggtggggcggaagcgattgggcgaagcaatgctcagggaggaaatgccgccggattggtgccatcgcatgtgaccaatcgctcaatggctccaccacctcctcctgtgcaatttgaaatgggggcaaatcgattagaaaaaatgagggcacacctacgcgaacttgctgagaaaatgccggtcaatgaatcgaagcgtctgtcaccgagtggacccgacccacatcatcattagggccatggatggatctaacggaggaagaaagaatggatgcttagttttcagattttattctatcctcttttatttattagtttttcaaaacaaatntcttccacaactttttaaactatttgttgttttgaatctttttagataaatct

SEQ ID NO: 86499 - DNA, 324 bp, Heterodera glycines
ggagaaaaaggaagaaactgaagttaacagtccgattgagcccaatctggaagtgattgtactgcacacttagttgagcggactactagtggaagcgaaaatccaagcgagaaatttatcaagtcgagcagcagcaactgaatcaatatggcgaaaaacaatatcaacattaaccgtggcgttcaagaccctttttatcgttacaaaatgcctcgcattttggcaaaagttgaaggcaagggcaacggaataaagactgttattgcgaacatgcccgaaattgcaaaggcactgtcccgtccaccgacctatccgacaaaatat

SEQ ID NO: 86500 - DNA, 181 bp, Heterodera glycines
aacagcaacaaaaacaggctcaacaagtacaacaacaaccgccgaaaaatgccaaattgcaaattgtcacaatcggcggatggcacggctggcccacgctgacgacgaatcggccgaccaattggctgcccgggaggactgggcccattttgaaatggttgaccgtcagctggacgaactg

SEQ ID NO: 86501 - DNA, 282 bp, Heterodera glycines
tcatttgaggagggcttaagggacatgagtggcagcagaaggggcatcattcgcaatcagaagcactaaaccgagcaaaagtcagtattggtgcaaaacgccctctgacgggtgcttcgtcttcgtcggaggacgactctggggtgctcgtcacacgagagcatgtgccgcgtaagggccgtacgcttttccgtgccgtcgatgctatgcgttgcgacagtgttggttcggcagtctcggcacaacagcaccggagtcgttcacacaagccaaaacccggtg

SEQ ID NO: 86502 - DNA, 645 bp, Heterodera glycines
tcgtgcactgctttatttgagtggcattcgagcgctgtcggattgggcaggacaaacctccaccggtggaaaaacatcaaaagggcaaatctgttttggcacagaacgcacatcttcctcccctcggcttcttccgtgaacaacgttaccatttggagaagaagatgttgaaccaaaatggtgttctcaatgaaaataacttttttgcgattcgtcctgcaaatgagcctgaatttgttccgaaattgaaggatgtgatcggaaaagcgcttgataaaattggtacttatggcgatatggacaattctgatcaggtggtcgccgttattgatgatgacttatgcattaattgtggaaaatgctatatgacatgcaatgattcgggctaccaggcaatttcatttgacaaacagacacatttggccaaagttaatgaagagaattgtacgggttgcacgttgtgccacagcgtttgtccaatccctgattgcattaaaatggtgcctaaaacgataccgcacaaaataaatcgcggaattgcaccgcgtcaacaacaaaacggagacgacgcacaacaaacggcacagaatgccaatcgacggattatattggaaattaattagaaaattgatgatggagcgcgct

SEQ ID NO: 86503 - DNA, 654 bp, Heterodera glycines
tttcgccgcggggggacgggcgacctaagattttgctgtgccaggaaatttggtcattcgctgacaaaattcgggaactaaaaacggcattttgcgacgcctctgcccccgttagtttcatcattcgtttgtatttgagcagttttgctggtgaacagtttgaattgcgcaatgatcggaccggggaaatgttgagcatggaaatggtcgcgacagaggacgacgaagacggagaaggacaacaactacagcagatggaggaggaggacaacgacaatgccgacattctgacccactacatcaagccggagcgcaatttgtggttgttgaagcgtcgtccgaccgttgggggaggaaaatggcaaaaacagtgggcccaatgggaggcggaggcaatcggatggaattggaccaatgcatggaatgtgatcgaagttgcaaatgaagaggacgtggacgtgatcgaagatggcaatgaacacttggacatggacgaagtgacttatgagggagaggcgatggacgaggtagatgagatggatgacacggacggatgaacgctttaaacagacattggacgacatttaaatgatgtgcaaaatgacaaaatttctacaatttattcatttttttaaaataaagcatttgactaac

SEQ ID NO: 86504 - DNA, 653 bp, Heterodera glycines
caatcgtcgaatacttcgaaaattctctctctctctccattggaattattcattgagatgggtttttaaaaactatcgctttcctttcgcttttggcacttttttgcgcaacaattgctgaagaaaatggggcgacagaaggcacagaagcggaggcgacgacagtgccaacactcaccgcagcggcggagggaggcaaagggggcgaagaggaagtgaccacggcgaagccgacggagacgatcgaaacggcacgggaggagggggaggagaagcacaaggcgaacgaggggaaagcgattgagggaagtggaaccagatcgttgtggcaaaaagtcacctgtatgttgttcggctttttcccatttcgcgccggctgtccgggcaaaaacgatataaaagcggggtcatcatcacatgtgagcagcacaattatgataattgaggaaaaagaggacagcgaatcggacgaacaaatggacggcgccggaggggacgaggagaaacggggaggagaggacggcagcgaagcgcatggcggcaaaggcgccgcaagggacaacgaaatggaagacgaagaattgaaagtgaaagccgtggtggaagagacgacgacaaatgaacagggcaaaactgagacaaacgtcgaacag

SEQ ID NO: 86505 - DNA, 661 bp, Heterodera glycines
cgttggtttgctgatcctgagaatgaggaatcattcggcacaaagccaaactgatggcggagaagtgccaaaaagtggtggggaagaaaatggcaaaacggagcaaacgggaaaagctgccagagaggagggacgggaaagcattgatcaagttttggaagacaaaacgggtgccttagcagatgttccggaagaggagatggtgatcagtcaatgtcagatcagtggggaaaatcagagcgactcgaaaaaggaaggactgatcagtcagggagagccgagaaatctgtcaaatgctgggccgatcagtcaggaagggcagatcgattcggaaaagaacgacgaactgatcaatcagcaagaacagcaacaagtcactctgatcagtgaagaagggctgatcagtgagaaaaagcagcaaacggtcaccgaagcgacgacagacgaagaagcgttattgatcagtattcagctcaatgagttgacgatcagcccagcaaaagaattggatgccgatgatggaaaagatgctgttgtacagctccaaaagcttgtggccaatggcattgcttcaggggaagttggccaaattgttgcggatgttgtgcaaaatgttgttcaaactgacgctgctgcaacacctgccgtacaacatggacaa

SEQ ID NO: 86506 - DNA, 149 bp, Heterodera glycines
  unsure (1)..(149): unsure at all n locations
taaaagatccgaaaaatgccaacattttaaaatccttctgattgtgcttttggccgtcgtctattcccgtctctncgngnctttctacctggtgacaaaagaactgctaatgatgggagtggaaacaactcatcagctgggattggtac

SEQ ID NO: 86507 - DNA, 776 bp, Heterodera glycines
tacgtgaaactctcgaggcgatctttctctcaagccattgagcgtattacctgggaccataattttagcgattatactttgtttgtgtgagcgttcccgaggcccaatctcgacgactttatacggcggtcaaaaactcgttagaactacacactatttcaatccgagagtctttgctccgtttgtccggtgaccaattgctcagtgcgtacaacagcgaatgggaaaaatttcacaaaggcgccatttatttgcataatctttacggttatctgaacaaacaattggtcaaggaaaaaatggacgcggagtcgcagcatccttttgtggtggataatgacagcgatggtttataccctcatttgggagttggcgaccttgccttttcaatttggcgaaatgagttgctcatgccgttggctgctcagcttgtggcccatatcattgggctgctcggtcggattcgaaatggtatctctgcttcatttggcattcgaatttcggacctccggggcgccgtcctctcctttgtcgatgtcaatgaatccatccatcgggagcaaaaagcacagcttttgtgcatgtccattggtattccgacaacagagttctacgaagaaatattcgagaaacacttcttggaagcatctgaaaattactaccgaacacttacaagtgaaacatttgttcacctcgactgttgtccttacatggatgcggtaattcaaaaaataaacgacgaaagaagcatcgttcagcgcttcttacattacagc

SEQ ID NO: 86508 - DNA, 676 bp, Heterodera glycines
  unsure (1)..(676): unsure at all n locations
ccttgtttgaatggacgacgaaaacactcatcaagcgaatatggaacgagtgagagaggacgaagatgaaaaaattggtctgatggacattaaacgggaaataaaagccgaactcaatgaagcgattggtcgccaaacggaagatggcgaaacggagccaaaggcggagagagagcgcgagaggaaaagcgacagagagagggagcgcaagaagaagagcaagcggacttcgcgagaccgaagccggtcgaagtcgcgggaacgcaaacgatcacgcgaacgccgacgaagtcgctcgcggtcgaaggaacgccaccgcgagagagagcgaagccgggaaaaggaaaggggcgaaaagaggtcgaaagtgaagagcaacaaatattgggatgtgccacccgctggctacgaacacatgagcccgaaggagtacaaagaactccaagtagtggtcgtccattagaattgcgcaagggtgctgaatcgatggattttttagcatttagctaccggcgccatccctcgggccaccctccaatcgtctgttccggtggtgggcccttcggtcacttgtcaggcgcgacggctttacgtcgggaacattccattcggttcaaatgaagacgcaatgctggactnttttaaccaacagatgcatttgtgtggtttggcacag

SEQ ID NO: 86509 - DNA, 537 bp, Heterodera glycines
ttaagccttcgatgcttcgctcattcgtctttttgtgtcgtacttttccgtctttgagttttggtgcgcagttaacaaaaatctgttcgccgcttcacaaaaaaatgctgctctaacgaaacatttgcacgtctctcctttccgttacgccgattcttcggacgatggcaaagaaaaaaaagaaaacacaattaaaattgacgaaacaatccaaaaggataaagttgacgaaacactccaaaaggaagaaaaggcggcccaattgacgtcattagagccgcaaaggttgaggatgaagccggacaaccggcgagtgctcgtccgaatggccatcaaagcacacaaaataaatgcggccagcgaggagggcggcggaatgtccggcgcaaaaagccttctctccatgaacaccactgaaatcgaccgactgtccgcgtgatcattaagaaaatccgaagggtgtgacgccattgtgaattgtttttgcgctttttcttctgttctctcctcaacggatgaataaattgatgaatgcca

SEQ ID NO: 86510 - DNA, 579 bp, Heterodera glycines
aagcgaaaaaggaagaagcgacgaaggaggagccgaaaaaggaagaaacaaagaaaggagagggcaaaacggaagaagctaagaaagatgaagccaaaaaggaggagccgaaaacggaagaggccaaaaaggaagaagcaaagcccagtgccccggccgtcttaactgaagctgccgataatgtgaacaaagcggtcgatgacttaagcgttaaacaggcaaaagcattgaaaaacgcggccgaagcaacggcagagaaaacgccggaagagcaggaaaaagcattgaaagaagtggcagaaaaaggaggaaacgaacagctgaagacggctgtcaacaaaattttggaggcaaaagcgaaaaacgacgcggaattggaaagcgaagtgaaaacgaaaacggcaacactttctgaggacagcaaaaaggccagcgcagagttgactttgataattgaagacaaaaagacgactttggacgagaaggtgaagcggacggaggagctgacagccaaaatgtcggacaacacgaagaaggagctgaatctgaacaacagtgccgacgtcgtcgccttcgtca

SEQ ID NO: 86511 - DNA, 657 bp, Heterodera glycines
ccatcgagaatgtgaaggcgaagatccggacaaggagggcatccaccggaccacagcgtctcatcttcgctggaaagcagctggaggatggccgaaccctcgcggactacaacatccagaaggagtctactctccatcttgtcctgcgtcttcgtggaggaatgcagatctttgtgaagactctcaccggcaagacgatcaccctcgaagttgaggcgagcgacaccatcgagaatgtgaaggcgaagatccaggacaaggagggcatcccaccggaccaacagcgtctcatcttcgctggaaagcagctggaggatggccgaaccctcgcggactacaacatccagaaggagtctactctccatcttgtcctgcgtcttcgtggaggaatgcagatctttgtgaagactctcaccggcaagacgatcaccctcgaagttgaggcgagcgacaccatcgagaatgtgaaggcgaagatccaggacaaggagggcatcccaccggaccaacagcgtctcatcttcgctggaaagcagctggaggacggtcgaaccctcgcggactacaacatccagaaggagtctactctccatcttgtcctgcgtcttcgtggaggaaagaactgtattgatgaatgacacgatggacatatattgt

SEQ ID NO: 86512 - DNA, 431 bp, Heterodera glycines
cattctcctcgctattctgactacaccgattgtatccatcatattcgggccaatatggcaattacggtggctacaattacggcaattattacaatccatatgggggcaatagccgaggctactacggtatgtacgacagtccttcttacggtagcggatattcgccctcatattatggtggctattatgggaggaatggtggcctagggtatggtggaatgtacccgggctacggtggctattcgactgcgtcctactacggcggttggccctatacggctgggtacggtgctcagaacggatacacatcgccgtggagataagcagaagaattgcgaggaatttgcgaagggaccgatcagaaaggacggaaatggcaaactctctcataacaatggcataaatgatcaaaaaaaaaaaaaaaaaaaaaa

SEQ ID NO: 86513 - DNA, 586 bp, Heterodera glycines
acgcttagccgcgatgctcatgcagaaccctgctggcctcatggggacaatgtatgcgcctgccagcggtggatttttcctgcccaggccatccagaaccaacgtgctgcgccgttcatgcaaacaccgaatctgtccggggcacaaatgcgtggcgctgtccctcgctggaacaatatgggcggtttcaaccatccaatgcaaggctacatgatgggtccagctgttggcggtcagttcggcggtgctaatcaaattgctcgtggaggacctcgctccggtggtatgggtggtggcggtggaatgcgtcagtacgggggacaaccccgtcagcaacagaaccgcatgccgggcatgggcggaggtcatcagcagcaagggatgcgctaccagggacagccgaaaggaatgcagcaacaacaacaccagcaggctcagcaaccacaaattgcctattcgtcgtatccgcagcagcagactccgtggcatggcaccgcaaatgggcggcggatgcggtggaggagtcaaagctggccatgcgatcactgcaacacaccaggaaccgttgaatacacagatgcttacc

SEQ ID NO: 86514 - DNA, 653 bp, Heterodera glycines
cacatggaagaatcggtggaaagcaaacgaacgagcgaacaaaatcaaacacaacaggaagttgaacagctaaaacagctcgaaaatcgggaggagggagccaaaaatgggcaacagacgaacgaaactgttgccattgaggaggaatggacaccgacaagtgaatgggtggaatcgtggaagaagaagttgccactgcagacgatcatgcgagtcttgcagattttggtgccgcaagtggagaaaatttgcattgacaaagggctcaccgatgaaagtgaaattctgaaattcctccaacatggaacacttgtcggacttcttcccgtccctcatccaatactcatccgaaaatacattgcgaattctgcaactaacaattggttcagaacatacctttggggagtcgtttattgccgtaacatcgacccaccaatttggtttgacagcaacgtcactcttttcgaaattcagcgattgtgaaggaatgaaaatgaatggtttaggcactgaggaaaatgcatattaagaaaaaaaacctattgctgatcgagcagcttaatctttgtttttcttttttctaatgccatggtcaaccgacaaaatattaaacctttctttggctatttattggtacaattccttttcttgtg

SEQ ID NO: 86515 - DNA, 665 bp, Heterodera glycines
  unsure (1)..(665): unsure at all n locations
cngccgctcttttgacctttacctgcgttttcccgaattgaagccggtggaacgggcgcattttcgataccctcagacaattgatgacgccaaaaggcttggccgtgtgcttatccgttacaaagaccttcttttttacaccgttctttcgggcgtcgccgccatctataagatacgctcccccttcgcaatccctgttttcatctttttgaccattttgtccggttaccttttctcctttccgttggcgttggccctcgtctgtctctgttcggctgccggtgccaccgtttgttatttcctttcgcaaatgttcgggcggagtttggtgatgtattattttcccgagaagttgtcaaagtggcaaattgaggtccaaaaacaggcagacaatctgttcaattacattgtctttttgcgtgtcacccccattttgcccaattggttcattaacttggccagtcccattgtcgatgtccccattttgcccttcttcttcggcactttagccggagttgctccgccgagttttctgtttatccaggccggcaccacccttcaaatgatgtccaatgccaacgtcgtttggtcctggggctccatcgctcttctcgcctttttcgctgccctttctctggcgccaattctctntaaatatctaaaaa

SEQ ID NO: 86516 - DNA, 342 bp, Heterodera glycines
tcttcgtgttctgccgtcccatcggacccgcagcaaaaaagcttttatgaatgttcggccaaagacatggacggcaatgagacctgctttggcaaataccgtggcgaagtgctgggggtggtcaacgtagcgttgaactgcggcttcaccgacttcaactacagtcagctgaagcatgtgctggacaaatacaagtggaatggactcgaaatcgtggccttgccgcgcaaccaacttaacaaccaggaattgggctgtgccattgacataaaagactttgtgaccaaaaagtacaacttcgaacctgatctatacaacaaaattgacgtgaacgggcccaat

SEQ ID NO: 86517 - DNA, 533 bp, Heterodera glycines
tacgatttgtctggtttattccgataacgagcgagactctagcctactaaatagttggctcattgcttctgtgggcacaacttcttagagggattttcggtgttcagccgcacgaaattgagcaataacaggtctgtgatgcccttagatgtccggggctgcacgcgcgctacactggcaaaatcagcgtgcttgtccttccccgaaaggggttggtaaaccggtgaaaatttgccgtgattgggatcggaacaatcacacactgcgcatttgctgctcaaattgaacatcgcaccagtaattaacaaattcaatgttgacgacgtgcgtctgctcaaaacgataagccaagtcgtctcgaggccggaaacgatggcacgtgccaagaaagtcttggcgctgttcatggaccgcccggtgcccgcgattgaggaaggcgcttttgcggtggagcgactcgtccgccttcccccggggggccatgccaaatttatgcgccgcaagggaatggcatttgggtggacggaatttgc

SEQ ID NO: 86518 - DNA, 491 bp, Heterodera glycines
catcgatgtgttcgagatcacgaagcatttgctggccaagtattggccaatttgaaggcactcgattctgattggttctgtcagaattatatgaaacgcaaagcaaaatttgggcttttgccattggaaaaagtgaatatgtggggtggctctctctcattgggccatcccttcggcgctaccggcgtccgattgttggcacacgcggcgaaccgactgcagtccgaaggggggcgtttcgcagtgatcgcggcgtgtgctgcacgcggacatggcatgggaatgttggtggaaaattacgagtcgaaacagaagtaaaagagggagacggagggacggacggaattcactcgtcgccatttgtataattgatttacaaatagaaatatcggaatagtgaaaacactaattcaatgggaatgaatgagaaattgtaattataaaaattgtactgcttaaattcttattaaagattacgtgccggaaaaaaa

SEQ ID NO: 86519 - DNA, 582 bp, Heterodera glycines
catccgaaaaaatgccaaacatcttcaaaatccttctgattgtgcttttggccgtcgtctcattccgtctctcggcttctactggtgacaaaaaaactgctaatgatgggagtggaaacaactcatcatctgggattggtacgaagatcaaaagaattgtcaccgctggactgctctttacttccctggcgacgggtggggcggaggcgattgggcgaagcaatgctcagggaggaagtgccgccggattggtgccatcgcatgtgaccaatcgctcaatggctccaccacctcctcctgtgcaatttgaaatgggggcaaatcgattagaaaaaatgagggcacacctacgcgaacttgctgagaaaatgccggtcaatgaatcgaagcgtctgtcaccgagtggacccgacccacatcatcattagggccatggatggatctaacggaggaagaaagaatggatgcttagttttcagattttattctatcctcttttatttattagtttttcaaaacaaatttcttccacaactttttaaactatttgttgttttgaatctttttagataaatctaaacc

SEQ ID NO: 86520 - DNA, 621 bp, Heterodera glycines
ggctttatcgactcaatttgggagcattggaggcaaaacaaacagagtcggctccaacgcgagacggactttccgcgcaatgacgccgcgtgtgcgccgcggtggcacttctcagaagagttcatgccgatgctgcagccgttgtggaacatcgacgtgctctccaacaactacacggacaacatgtacgagtttatgccgaggccgagctgtgcgcgaaccggcaagtcggaggaatgcgggagcagcgattatttgtggtgcgactcgcgaacaaatggtggtcacgcggtttgtacgtcaaagataaagcccggggggaattgtgccggcttcgaatggagtgccgaagtgtgctacgggggcagtcaatgtgtcgaagggcggtgcacaaaggcaaaaacgatggacaaagagaatgacgagggaaaagcgaagaaaatggacgacgacggcacggcatttatgaggggcggcgccgaaaggggcgacggatggcattcgacgatcagttttatgaaaaaacgataaacaaattggccgagacaaaagccattctatctgatgctagtgtgtttaattgtgatggagaaattgatgaaatcccaatttttggcactc

SEQ ID NO: 86521 - DNA, 672 bp, Heterodera glycines
ctattgcggctgctgttctctgtccgtgccatcatcaaatcaaatcaacgaaagctgagccatcggaagtgtgcacaaatcgactaccaaacgaaactgggcaccacaaatcaacaaaatcatcattatcatcatcagtaaaagtggtgcagaaggaaacgcatggaccaaatcggctgttctttcagcgaccaaatttggctcgacacattggcgtggattggacgtggcgaggtcggatggcacttggcgctggtcaacgcccgcttcgccgccctggtgaacatgcagctgcagcagaggcggtggtgtttggaggagtttcacatcagtgagcggaagccgaaacggactggcgccgaagtgttgagcttggcaaacaacggctcctacttctcgttgccattggccacctcaccgttgccggacagtgtcatcggattcaacggcacattcaacatttggtatttggacgcagaagtgatcaattttctgcaacgatttcggcgcctcttcaacacgtacatctcgctgaagttcaccattccgataacagaatttcgcgcttggcaagccgtggcacctcacatttggcccttgctgaagaacgggctcggcacgttggtcaacgtgaagcggaagcaactggccttgatgcgcaaacacatttcg

SEQ ID NO: 86522 - DNA, 670 bp, Heterodera glycines
gatggtgaaaaccgtccttggtgggcgatgtgaattttgaggaggccaagcggtggccggctttctgacgcctgtgcccggcggcgttggcccaatgaccgtggcaatgctcgtccgcaacaccttcctccaggcggtgtgccaaaaactgaacggccgtgttgagcccgatgggaccgtgaaaagccgcgcagtgaacgcatggaagctttacccgttgaagctcgatctgtcttcgcccgtgcccactgacattgacatttcccgggcacaacagcccaaggcgatcggtcgtctggcggccgaagttggcattgcccagtccgagttggagctgtacgggcacagcaaagccaaagtgtcgttggcagtgctcaaccgtctcaaggagcgcccgaatggaatgtatgtcgtcgtggccggcatcaatccgactccgttgggcgaaggcaaatccaccaccaccgttggacttgcgcaaagcttgtgcgcccatttgggtcgcaacactttcgcgtgcatgcgccaaccgtcgcatgggccaacctttggcatcaaaggtggcgccgcgggcggcggctactcacaggtgatcccgatggaggagttcaatttgcacttgactggcgacatccatgccatttcggccgcgcataatttgatggccgct

SEQ ID NO: 86523 - DNA, 591 bp, Heterodera glycines
ggtagatgagccttcagcaccatcaatgcatagccatcgaaaaacagcaaaggagcgaacattttatgtccagtgtttttgaggagtgcgacgccctaaaacaggaatacgacaagtgctttttgaatttcttcaaaacttttgtaaaggaagacgaacgacacgaaaggacagtcaatccgtgccaacaattgcaaaacatttatcacaagtgtttggaaaagaatttaaagacacataagccatacgacatcgatttggacgagttgaagaaggaagtgtccatcagcatcgaggagaacatcgactggaaacaacgcgggaattgatggaggaaattgtgcaaagtgcggcgaacggcggcataagttcgacagcgccggaccaatccagcgaaagtcgtttcaaccaattggaacggaatttggagctgttccaggaaaatgcgcgtcatatgggagtgatcgccagtgacttcacttccaaaagtcaggagccgttgaatcagaaaattcacactctcatctcgggccttcaggttcttgaccaactcaaaagccaattcaccgatgttcgtgttcccattgaatt

SEQ ID NO: 86524 - DNA, 462 bp, Heterodera glycines
ggccgaaccgctctcgcgcggcagtcccccggagggtttcggtcccccaccgcccgtccccacccatcagcagtcatttggagaaagtgaggccgtgaaagagttggagcaaatgccgggagtaaggcgaatggatttgatcaaagtggagtcggacggaatacacaagggattgggcttcagcatcgccggaggaaccggaaaccagcactatccgggcgatgacggaatttttgtgacgcgaataatcaaaggaacgccagcttattacgacggccgactccaaaaaggggaccaaattttggcagtggacaataccatctttaaaaatgtttctcatcagtttgccgtggacactctgacgaacactggggaccgagtgaagattctgttcttgaaaaaccctcacccggacattgaatcgttcggcggaatggagggcaatacgttcgatctgaccgg

SEQ ID NO: 86525 - DNA, 551 bp, Heterodera glycines
attgtggaatgctttctgccgaagatgaaaaaacggagattgtaaacatttgggggacaaaaaagtcattttcttgcgtaaccacggctttgccgcctgcggcgcctccgtggaagaggcgctccacttggcctatcacacgctgatcgcctgtgagactcaagtgtccgcgatggcggcgggcgaaaaaatttgatatacccaaatgaaattgcgaagaagcgcgcttatgacatcgcacagcacggagccaacggaatgaatcgtacggcatcgggccaaaacggtacaatggcacacacttatgagaaaatgggagacatcgaatggggagtgggcgaattggagtgggaggcgtgggtgcgccaattggacggggcgggctaccaaaccggacacaaatatcagatgccatctctgctggaggctgtgatgaagggaaaataggacgaagccgatgattaatttcagaaaatggtttgattaatttcggaattaaattccaaaattctataaatctttttatttcaaaaaaaaaaaaaaaaaaaaaa

SEQ ID NO: 86526 - DNA, 563 bp, Heterodera glycines
cggcaccgtagccacacgcgcactttgggcgaatcgttgcgacgtacgcttctcccacatccagccaattccccgattatgtgttcatttggaaattggacgcagaatcggcagcaaatgagtcggaactgatcaaagccacgccaaatgtgcacactttcgaatgggtgccgcaaaatgccattttaaggcatccaaaattgcgcgcttttgtcactcattgcggccaaaacagtctggcggaggcagcaaaaatcggagtgccaattgtgggcattccgctgttcggtgatcagctttacaacgccgtgttggcaaagcaccgagggatggccgtccacgttggcattcgccagctaatcgcagacaaaacgggcaaagtgctgagaacagcgctcagtcgggttctccacgacgcctcttttcgtgccaatgccaaactcatccaaaagaaaattgctttgtcgccattcggtgcaaaagagcaattggtgcgttgggtggaattcgcagccgaatttccgcatctgaacgagcttaacatgccaaccgattattattca

SEQ ID NO: 86527 - DNA, 660 bp, Heterodera glycines
ttcgctggacgcggatgagctgagctttggctgcgatgaaccaccggatgtccacatgctcggcccgctctcgtgaacgcaattttgaatcggcacatagaaacggctattttcttgttggagaagggtgctgatccgcatcagaccatgattggccaactgaacggcttgaacatgaatgtgacaccgctttgggccgctgtcgtttttgtcaatttggagctgtgccgtgcgctgatcgcccatggtgccaacattgaaatgggcacggactctggccactcgccactgctgtgcgcatgtttcaatggcaatttggagatcgccacttttctcgtcgagaatggcgccaacgctaatctcgcggacactgacggaatgacgccattaattgtcacttccttttcgggacagatcgacattgtacgcttgctgctttcacatggtgccattgttgaacagacggatttcacggggatgaaatttgctcttttgggtgccgccattggtgcccgtttggaagtgtgccgtctgctggtggacgaatgggcagcggatgtcaaccaggaaacaatcgacggcaccactcctctgttaggcgctagcggtgagggacacgtggacgttggtgaggaaaaaatgaattttctcattgaacgt

SEQ ID NO: 86528 - DNA, 479 bp, Heterodera glycines
atcgatttgctagcgaaatgagttttgttgagcactttaacttggtgaacggacggaccaacgaaaggctgacattggaaaaggaaggaaattattgtctgttgaagcgatgtccaaatggcccaaatgttggggaaacggcggcggcggttcaatgggaaaacggcggaaattcggatgccaatttgaacaatgtcatcattattttggatggtgtcgaacgcatttggccattgtctgcgctagaagaagaagaagcgggtcaaagcagcgaaaaagggacgtcttctgacaaatgagtgacggacaaaagaacaacacaaacagtgatcagcagaagaaatgaatgaatgaatagggaaatgatcgatcataataaagcggtgataataatgcattttatgaagaaatcgcaattatatgtgggtatatttaaataaatttggtgtaacccaaaaaaaaaaaaaaaaaaaaaaaaa

SEQ ID NO: 86529 - DNA, 408 bp, Heterodera glycines
taattaaccctccgatgccttcccccatccgccttttctttcttttcctgtttctgcttcttctcctcccatttttgtccttcgccgctttgtccccccgagagaagcgccaattcagcttcaccgatggcttctcaagcggcacaattttgcagccgggcggcggcggacttttgagttggtggcggagatgagccaacggcggaagtgaagcaaaacaatgggaaagattttgggttgtgatttgatttatgacgaatgaatgacccaccgatcaaccgacttaccagaccataattcattcattcattcattcattcattatgccgtgccaatatccccccaacccatccttttattgtaaataaaaaatttaagcaaaaaaaaaaaaaaaaaaaaaaatcaaag

SEQ ID NO: 86530 - DNA, 590 bp, Heterodera glycines
ttaattaaggacctttcaagaacatgcatttcctactctggaaaaattgttcggagatgcaaaagctttgttcgtaacacaacgcctttattggattatgacattggcagtttgccaaaacgcgtcaaattcattggtggcattgatctgatgcagcccgatcacaaggatgctttaccgcaagtttttgggcaaccaaaaccggtgatcgtgttcagcatgagttctttactagaaccatccaaaatgccattggacaaatttgagacggttattcgaggacttggagtgtgtgaaaaggaagtgatttggaaatatgcgaaacaggaggatcatggtcggatgtcactcttgcaaaagcatgctcctaatgtgcatcttgtggagcattacgatcaagccacagttattggcaataaaaagacggaattggtgatcagcgaatgcgatattcgtatcgtaatggatgcgttaagcagtggaaaagcattgctttgtctgccgatgtttgccgaacagttttatgtgtcggaaaagctgcgacgcatgggcgctgcggttgtgcttgatccgcgcagtggcagtttcac

SEQ ID NO: 86531 - DNA, 779 bp, Heterodera glycines
attgagagggaagcgtccgaactttccaattacttgactccctatgcaatccgaacgcatttaagaggcgtcctgatgcactctttgctcccaaacgcattggaggaatggatgtcgcggctgtcagctttttggattcgttgaatctaaccgaggaaaacatttcgaaggaggccatctcgcgattcagcaaagaggtttacaaaatgtccgctattcaactttctcagctgttgaaagcgactagcaaccgcaaaattgagcaccccgtgttgatcaaccacatttgcaccgcactgaaagaccgtcctttgcctccgtctctccgccacatttgtcaaattgctttttacttgtccaaacattcgttcctcgataagccgcttctcaacagaatcaaagaggattttttggtttatgtccgaaatgaaatcatctcgaaaacatctttttcacacattgtgatcgccttcgctttttttcgtctgactgatcgacatttttggcaacaaataatccaaatcatcgaaacactggcgaatcgccctgaatattcaactgctctgattgaatgcgttaattcgttggctgtggtaaatgttcatccgaaattggtgtcttccgttgttgaaaagactaaaagtctggaaaaggacggactttttttgggaaaatggctgcaattggtccattctttggctatccttaactctttggattcgcaaatggccgaaagtgtactcaaccggaactttttttgaacgtttgtctgaaatgca

SEQ ID NO: 86532 - DNA, 733 bp, Heterodera glycines
cactctaagagattattatgaaaatttaagttacaaaaaatgcagacattggccggcttttcccgcggccgcggtaatcacgctaccgccgggctattatatacattcgcatttttattttttatctttttttaatgcaatttttttacaaatacgtaaataaggagaagcaactttgattaatccaatggaaaagagattgaatccatctgcacttcctacgcttatgttatcgaatttcggtggttattcggtggagacactttgcacgcttgggaaggagttcgtattggaacttatgactcggatgattagcattgtgagcactttaaaaatggatattaaaggagacaataaaaaagtaaattttaattttgatttaaaattcatttgcctttcaaggatctagacattgttcgaattcaacttgattattctcgtctcatttttctctgtcttactgaggttttctcattttgtacactgatatttctacattgaaaatcgtttttattaggtccgtcttcgcatcgatttaaaacttgctgagggaattggagagaatcagaatttgaaagatgttcgtccttctgatgaacggctgttggagctcctttcagagccgaatcaaccggaagataatgcgaaaaaggcaaatttggcagagagattcgaacaaaacagataggagttaattcgattgaattgtcatttaaaaaaattggattggttg

SEQ ID NO: 86533 - DNA, 655 bp, Heterodera glycines
  unsure (1)..(655): unsure at all n locations
tgtccaacttgtggaattattttcctaatgtgttctggaataccggaaggcacttatgaattgaaaattggcgctagttttctctgctaaacaaatcgcgcccacccgaattaacacattgcgttttgacttcaaaccagcttcaatttcctccgaggcctcggaagcgtacgtcgttcagtcgcagaatcaaaatgagaacaatttccaggtcgttgtgtttggagaggcgcagaaaaagaccattttcaaaggggcgaagaaggaaatcaaaggggacaaaatcaaatggaggaaagtgccaacggaacgacggaaagggaggagaaacaatcgccacaacagaaacatccgatggcggtgaagaagacgtcgtcattcgtacggaaaagcattttggcggaagatttgcagctgagcgagagcagttcggaggatgaggaggaaggagggagggacagcgaagacacggactgatcggaggagagaatgatcactgactgaccggagccttttaaatgtccataaaactgcactcacgggatgctcttaaacactttcataattgatgctgctgttataagccaaaatggatgcttaaattatatacggtataaatgatgaagatgcaaaaaaaaaaaaaaaaaanaaaaaa

SEQ ID NO: 86534 - DNA, 236 bp, Heterodera glycines
agtgtggcggactgcaatcgtgccggggtgaataatttagaactccagataaatttccgcttcctcaccgtgtgaattccaagcgacgcaatatgactcctttacgacacagcgttcgagaactcattttgtgtagagaaagaaatgatacgacttgtctttccgatttgttgataaaggtgttgtgttaaaaaaaaaaaaaaataaaaaaaaaaaaaaaaaaaaaaaagaaaaaa

SEQ ID NO: 86535 - DNA, 565 bp, Heterodera glycines
agcaaaattggcactctctaatggcatttctcctgttgtcacttgcacccctcttcgttgcccttagcgggattgatgcaaataaagtgccactgcaattgtgctgtgctggtggccaaagcttggctggccttatctacgactattctgaccatttcagcgaagttttgcaacagtcgggaactgagatgtgcactagcctgaaaaaggacatgaccaaattgacaactgcaattgaaaaagctgaaggatgcaagtgcaatcttgttgaaaaaattgagaaggaattggatgatgttgaggatgattgcgcctacaatttgtcattcattcgcgcactgttccacattgtggccatggcctcggaacatttgggcgaaagttggaactccgaagcggccgagttcaacgagcaaattgaagccattgatagcattggacatgaggaacttaagaagcttgagtttgaagcggaatcggaattgaaaacacatcctcgtgttggccgaaaaagaatgaacagaggctaattgggctgggcaaaatttgaagatgtcaatgtgta

SEQ ID NO: 86536 - DNA, 513 bp, Heterodera glycines
aagacgaagacttgaaaagtcagtttaaagaattccaagagcttcggattgacaagccccgttcgtacttcgccttcgacccttcgttggcgcccgaccattggtttgaaccgtcggtggtgtgggaagtgaaggcggccgacatgtccatttcgccacgtcatttggctgcgcggggattggtcgacgctgagaagggcatttcacttcgctttccgcgtttcattcgaaaccgagcggacaaaaaacccgaaaatgcaacatcatcagaacaaattgcagagatgtaccgaaatcaggaccacattaagaaccaaaaggacggaaaagtggattttgatgaagaggaagagggggaggagaaaaaggaagaagcggacgatgagaaggaggaagaggaggacgaacagtgaaaaaggaaacgacccggaaaaaggggctgcccacccattccctgactggccatcaaatttatttgattgtttttgagtaatttattcacacttccttaat

SEQ ID NO: 86537 - DNA, 626 bp, Heterodera glycines
tgatggcatggaatcgagctttgttgattaacggaattggcaaatttggagaaagaatttaagccgaatcaacgatggtgtggtttgaaacaccctcaaatcctcttctgaaagtgatcgacattgaagcagtgtgtcgtgcagttcggtcacgatcaaaagaatgcattattgtagtcgacaatacgttcatgacaccgtattttcaacgcccgttggaacttggcgctgatgttgtgatgcattcgttgaccaagtacatcaacgggcacaccgatgtgctgatgggtgccatggtgaccaacaatgaccaacttgatcagcatcttaaatcacagcaaattactgctggtgccgtcccgtcaccgtttgacgtctatttggtgatccgtggcatcaaaacgctccatttgcgaatgcgacagcacatggaaaatgcattggcagttgcacgatggcttgaaaaggacccacgagtggaaaaagtgctttatcccgagctcgagtcgcacccgcagcacaaaatccacaagaaacagagcagcggaatgtccggcatggtctctttttacatgcgcgccgatgccgacggggcacgcaaattcctcgccaatttgaagctgttc

SEQ ID NO: 86538 - DNA, 685 bp, Heterodera glycines
taaataaattattttttgcctgtcttctctgctgctctcatcttccaattgtgtttttggtctgttgcaatgcaatgccaaatttcccgtgctgcccgggcagtcagcaagtggttgctgtgatgtccaaatacattgacactttctcttctgctgctgacgagtctacagtatgctcaaccgctaaaagtactgtggatggaataaaaaatgaactgtcctatcgcgtgggatgcccaagcggaggagaagcacaaattgtgaatgaaattgatcgacagctgaagaacattgcgaaaatggaaatcaattatgaggacgagtgcccgtacaatttgggctttgcccgtgccatgttcgacttggccgctgctgctgctggccatgcggggaacggcacagaatggcaatacatgaaagtacaatttgagcaggaaagccaagcaatcaaagcaattggacaagaaaagaactttgaagttacggatgtgcattttggagtcccaagcaaaggggtttctgcacatcaaaatgtgccgagtccgagccatgtgattgccaaccctggccaacacagttcggttggccaaggaaagaaagaagaaccgttgtcatcggacttcgatttttgaggacaaacaaatcaggaggaaatagaatagaaaaccattttgtcgacatgtcg

SEQ ID NO: 86539 - DNA, 647 bp, Heterodera glycines
gtttttatattttattaaatataatggattttgctgttctcgttgtgagtgattcgtctgacaaggaccacaaaatggacaaaagtggtcctttgttggtcgaacttctgcagaattcgcttttaatcagaagagggcaaaaagtgaccgttgcaaattacacaatagtgccggacgagaaaagcaaaatcgttgaatatctacgtgaatattccaccaaagttgactgcattttgaccagcggtggaacagggttctcaaaaagggatgtgacgcccgaagcgaccaaagaagtcattgagagggaatgcccaggaatcgctgtggcacttctgaagaaagggcttgacattacgccattcgctgctctcacccgtctcaccgcgggaattgctgccaattgtctgattatcaatttgccgggaagcccaaaagcagtgagagagggatttgaagtgattgagccgattctgagccatgcgattgccattgtgaagggggatgagagcgaaacttcagttttgcacaagagaacggctttataagacagaagagactgtctgtcgataagcatttgatatcctatgtatgtgagaggcaattttaaactttacttcattactatgtaccattttgaaaaataaatt

SEQ ID NO: 86540 - DNA, 697 bp, Heterodera glycines
acacgacccctacaagaagaaatcgagagagccaccagcaacaaacaagaaagatgttaaaaaagataccacgaaaaatttggagcaagcgcagaaaacgaccaatgaaatgacaattaccccgaattacaaaaacgggaaggcggaggagaaggcggcggtttgcacaaatttggaggaagtgcaggaaaagacgaatgaattaagcctcaaggataaaagggagacgacacaagacataccaaagcagacagtgccaacagtttcggcggttgggccgagcaaaatgaattttgttggatgtttggcttccgtttatccgacaaactcatccgacatttaccaaggcaaaattatgtccgtcgatgtcaaagggcactcagtccgtctggaaaagccatttctaaacgggcgtcctatgtccgttccttttattgacatgtccggcaaaatgatgaaggatattagagttgtcaggggtccttcgcctgtgcgttttcattgtgtagaaaacagtccgattaatggtcgtcattcgactggatcagtgccatccattcgtcgtccttcaccagctgattctgtccgatctgagcacaccaaacgcaaacgcctttctccgcttattgttagtagcacatattctccaattgctgccacaccttctacccgctgtgcaccactgaatcaccaaact

SEQ ID NO: 86541 - DNA, 698 bp, Heterodera glycines
cgatcgcttccctccccaacagcttcgcgtcgatggcactcattttttgctcggcaatttggtcgctggagaaaactttgagttccaattcggaccgcgttggatgccgaacgcatttcgtcggcagctgccattgtggaaattgccattccatcagatagcgatttggtggaggtgggcaaactgatcgtgacttcgcgctttcgtccggacggaaacggagtggtgaacctcacttgggaagtgccgcagcatttgctgggaaagattcaatcctatgaaatgcgttatttggaagcggctcgggcgcaatcagtggcgatgccattttgggaaaggcttttctttcccggcacagcgccaaccgccgaaatttacaacatgaaaccggacactgagtacgttctgcgaattcggacgacgatggagtcgcgggtccaagtggaaagtgccgaatttcgcttcagaacgccaaaatcggccggtgccaatccgatcgcccgtttggacgtcctttactccagcgaaacccccgcagtgcgtctccaatggattctcgccccgcacataaacgccgtgttggtcggaggtttcgatgtgtttttcactgatcgctacgacctcgccgaaagcgaatggacccaccgacgaatccacgggaatgacccccaattgtcgttggactcgctcagcccttc

SEQ ID NO: 86542 - DNA, 741 bp, Heterodera glycines
  unsure (1)..(741): unsure at all n locations
cactttgaaatgccatggaagaagtcgaattaataaagaaataaaagaatggcacagcctttaaaagaatacaccaagttgctgctcatcttcatttagtattgataaactcatttttgtgccaattaatccgaatggaaacgaaaaacttgtgaaactaattgattttgaccgggcacaaattattcgcatttgcaacaacagcgaaccatgcaatgaaattgaagaagaaccagcaatcatggctgatacaacaaccataatacacagtacattggacatcgggaaatacagtagtcctgaaatatttgttggcaataaacaattgtctgtgaaagtggatatttggtcattcgggatttctgtttatgaggcaattctggtggcaaaggataaatacggcaaaaaagaggaaattccaaatgttttaaattccattgcaacgcttcaccgtggctttgcaattgaccaaaatggcctcaaatcggaagaaattaattttaacaataatgattggttacaattcagcagtggatttaaattggcagttaaagccattttgaaaatttggaaggaccaaccaaaaattgcgcttttaattatggtattttcagtttttcatttttaaatggaatttttgagggtttaaaactaatttttgccattttgagctttttcgtccatgtttcgggcttttttagtccatatatntatttataatcctattaaattaaatntcta

SEQ ID NO: 86543 - DNA, 743 bp, Heterodera glycines
tgtcgtttgtacgagtctgaaaaaagacgatgaacacgccgaaactgtgcttttcgaaatgcccgaactgaagcgagtgatttttgtccaaattggaggcacttccgatgatgctcctccaatgtgtttggaagtgctcaactgttgtttcggtagtgagtcgacctccaaattggctgcaatgtccgcggccaaaatcaaccaaatattttgggaattttttgtttcattcccagtagcatttctctcggccaatagtcgttggacggtgttcagttctttcgacgcacatttttacgtgctcagtactcaaactggacggcttcaatttgaactttgccttgacgaacctctttcagtccttgaactcgagcaaaatctctgtttgtcagttggaattgcgggttcatttgcactgtgggaccttttgaatggcaaagttcttgcgcgtcactctctgaaggaattacttggggatcaaaacaaacatcttctcgcctccgcgttttctcttcgcaaaaatgagaaggaaaccaattcgacttcgatatttttggaattgctctttagcgattttaattcatttgcgttttcctcaaaactcggcggatggaacaaagcgcaaacggtgttcgattttgtgaatgaagaaaaaatgtcgcccaatatttcttctatgcttcttcagatgcctaattcttctgattgactgatctcacaaatcaatgcatttttaaaaacaa

SEQ ID NO: 86544 - DNA, 591 bp, Heterodera glycines
acgaagaggggtccggagatgggcactccgcggaggggtcgggcagtgcgccgacggacgaatttggacgacagacgccaaacgaatcggtggccatcactgatacgcggtcccctgcccaatttggtgacagcgacagaagaccacagtacgccaacacaacaactaccgtaatccacctgcacaatttgagccccgtttctgtcctctccacaacgcgtgccactcctccaatatttgccaccacaacaacgacaattatgctggccaccacattgaggcctccgtcgatgaagccagcggcaacgacggcacggacaacgacgacactcccgagttcagtttcctcaagggcttcatcgccaaaaacggccacgaccaccgtgccgagaatgatcaagccgaaagacaaggacaaatggccgcaaccgctgccgaaaagcaccatgccgcctttcgctcccacgcgcaccacaaaaagacccttttcatttcggacccttccggcactttggaacaacttcggcccggcattttcgccttcattgtcggcggagttgtggttggactgcttctgctaattctgatcat

SEQ ID NO: 86545 - DNA, 613 bp, Heterodera glycines
  unsure (1)..(613): unsure at all n locations
ggtgcaaacgaatcgaatgccaaataaaatccgaatgtgaaaaaaagcgggaaaatgccttgaagatgcccttctccactttccctttgtactcgcccaattgctcgaccgtctccaagtccaacccgactcggccgtcgatttcaactcatatttgggctcaactgccatttatcgcgaaacagtcggttcccggctattggcgcacatttacgtccaccacactgccgaggaattatggcgtcccaatttggcatggttggagcgcgcgacgcatttggcgttgcctcggctgatgaagcgacaaaaagagatggacgaatgggcactaaaccgtaagcgttgtttcgtcggtttgccacccaatttgttgcgccattgcgttttgcatggaattcgtccgtccgatgtccaattgagacaacttttggacgaacagtccggaccgaacaccgtcgtcgatccgtgtccgccaaaagataatcgacgtcaaaggtacgaaccggcgaatttggatgatttgctgcaattgcacgggttaaatgtcgaggacagtccggcgatggatggcgcgctgcatggatntgtcggcactttcttgcgcactttgctt

SEQ ID NO: 86546 - DNA, 655 bp, Heterodera glycines
atcgcttcccgaagatgccgacggtccgatgcgctctaacttttggctctccttacggcgcttcgcttcccctgaacacagtttcccacgcgttcgcttacggttcgggtgcaatccctcaacgagaagaggacccaaatacgaaaatggtggattttctcattgtgtgcaacgattcattgctttttcaccagcaaaatttgcttcagtatgtgagcattgcattgttgggattgtcctcacttcaccaattcaatttgcaaagaaacccaagccattactctcttcccttccgatggttcgatgcgaattgggtaaaccaaatgcagcgactctccggcgcacggctttactacaacacacgaatatctacccaaggacgtttaatcaaatatggtattatccaagaggacgacttggagacggacttgctcgactggacatggctgtacgcggccggtcgactgcaaaaacccgtgttggaggtgtacaatgggaggggtgaaacttccgatgttcaaagaacgggacgaaacattggtagggcgctctttgacaattaccgagcggctgctcacgccgcactgctccaactcgacgggtggtttacgatggatcaatttctcaacaaagttgtgtcaatttcatatggtgg

SEQ ID NO: 86547 - DNA, 720 bp, Heterodera glycines
  unsure (1)..(720): unsure at all n locations
atgcttgtacgcgatgcggcggtaatacctggaactcggactgccgtttccaagggaagtgatttgcaataaatgcggcagaaaagggcatattgcgaaaatttgccgtaatcagaacaacactccccaacattcaggctttaaatattcccgcacaggctcaaataagcaaaatgccaacatcatcgactgcctgcacatcatgccatccgattggaagacggaaaatgaaccgtacattgagcggcatgttcggctcaatggaaaagtgcacaaaatggtagtcgactccggctcaaaattgacaatcgtgagaaagctcatttgggtcaaattgggccaaccgtttctcacagaaacaaagctcaagggtcgttcattcacagggaacattttcacatttatggggaagttcaaggtccaagcagcattggacgatggaatgcccctcgatttggaatgttttgttatcgattcgagggacacactcgatttgatgggacttccatggataagagcatttgaacgcgcctacaaccaagtggtggcgacaactttgtcaatcgaaaatgttgccgacagtcgttggtgcaaccgatcaaacagcacgtcgacgcaatttgagatggatttacagaacacatttccaaaaatttttgaggaaacattgngactntgcaccaaaatcagggcccatctcaaaattaaagaaaattcatc

SEQ ID NO: 86548 - DNA, 658 bp, Heterodera glycines
catcttctgtagtccttaagatttttttgtgtgagtaaatggcagaaaaaagcacaacgaaagcggcggtgaagcagcggcggcaattcgtgtgctcgtgacgggtggcaccggactggtcgggtcggcaattcgacaggtggtgacggaggaggagcagcaacggaagccccagcggttgcaggagcagtggtttttcgtgggcagcagcgagtgcgacctgaccgacttggagcagacgcgggtgcttttccgccgcgttcggccgacgcacgtggtcaatttggcggcaatggtcggcggactgttccacaacttgcgccacaacctccaattctttgtcaagaatttggcgatctgtcaaaatgttctccaatgctgccatgagactgacgtggaacggtgcgtttcgtgcctttccacgtgcattttccccgacaaaacgccgtacccaattgacgagacaatggtacataacggaccgccgcatgacagcaattttggctattcgtacgccaaacgaatgaccgatgtactcaaccgcggatatgctcaggatcacaatcgaaagtacacttcggcagtgccgtgcaatgtgtttggaccgcatgacaatttcaatttggagaacgcccacgtggtcccggcactgatccac

SEQ ID NO: 86549 - DNA, 281 bp, Heterodera glycines
gtagtgtggcggactgaagcgtgccggggtgaagcaatttcagaactccaagatcaaatttccgcttcctcaccgtgtgaattccaagcgacgcaatatgactcctttcacgacacagcgtccgagaactcattttgtgtagagaaagaaatgagacgacttgtatttccgatttgttgattaaagttgttgtgttaaaaaaaaaaaaaaaaaaaaaaaaaaaaaaaaaaaaaaaaaaaaaaaaaaaaaaagtaaaaaaaaaaaaaaaaaaaaaaaaaagg

SEQ ID NO: 86550 - DNA, 627 bp, Heterodera glycines
tggggggcaaaacgcagactgcggaagggacagacgcggcgagtggccaccacaaaagctcactctcagccgtcgtttccccgcgccttggccccgctccaatcgatcgccggcaatttgacgtttgaatcagcaagcgaacgaagcacaaggaatttcactcgtcatattttgacacacattgttttgtccatccatcttagcattccaacagcagaaaaacagcaatggcatatgcaacaaaatattacgactatcagattgccgttgtttttgccattttactcggcggtcttttactcctcgcgttggtagtcacagccatttattacatttgtgtggtcaatatgcggggcaaaaagggcggcattacgcgcgttccttccggcagaagtacagtaaggacgaggatgaatccgcaacagtactcgccgtctgctcaaccgcaaatattccatcaacagtacccacggtattcgccgtacggtgggatggaagggatgagcagccaacaaacgcagcagcagcaacaacaacaacacccattccaagcgcaaaattatgagcaggcgggggtcagagtgagggaaatgcaaccggagtatttccaacagcagggtccaatca

SEQ ID NO: 86551 - DNA, 657 bp, Heterodera glycines
tacggcacccttcacttttatgataaagcattaatggacaaactgagcgtcaaaaaccccctgcatttggagaaattcccgcgtctttttattcgctgaccaccactgaagacccggtgttcagaaagctgtcctgcaacaatgtcggcaatgtattcgccacagatatcattttgaccacaattatggcggctaatcgttcagtgaatagttgggatatcatcgcatatcgaattggcgataaacttttcttcgacaaacgttcaacttcaggagtttctccaattgatgctttttgggttagtgaaacagcgcccgatccgccgagtggcgacgcgcaagggataaacaatgccaatgacttggcttccgaggctctgtacgtcaatcaaaattttcggcgtcaagtgctaaagagagacgggaaagttttcaaattcgaagaggagcgaattcccttcgaagacgaacagttaggccggacagattgtgcgtataaataccgcacttggaacttggggacaatggcaaacggaactgcgataacattggtggcacgaacggaacacgacgcggtgatgctggcggggaccagcacgaaagaagtacaaaaactgaccgtgaaggcattcaatgaatgggacagttcgctaagcg

SEQ ID NO: 86552 - DNA, 483 bp, Heterodera glycines
ggacataacagagaaaaaagacggaggaggaaaatggggatgaaatgacaagaagtgtgtgcattggccaaattaacggaaatgatcaattgcttctcatctctgccgctgggcattgttccgtcgcggagtatttaaacgcgtcgtccgccgccgcttcgctctctccgcccgcccttcccccgaaaccgccgcgcttccgctcgtttgccaatttctccgattggccttccccctccgcgcccagcgccagcccaacggacactttgagccaaccgaaatttggacagcatattcaatcaccaattaaccttcccgatcaaacgcatcctcctgaaccgattcatcacaactcaaaaccaactgaagaagaaaggaaacggaaaaagtcaaaggaaacagaggaggacagagggaggaaaagcgacgaagaagcagagaaaagaggaaagagcccattacattaaaaaaaacaaaaacaaa

SEQ ID NO: 86553 - DNA, 680 bp, Heterodera glycines
  unsure (1)..(680): unsure at all n locations
caccaaattggcacattgttctagatgcaaaatatcttggaaaatggtgagaatgatgtccgacgaatgaccatccagtgatcggtcgtcagcggtgtcggctcgttcgttggccgcttcaacggcaccaaattcacagtgaggaccattcagtggtcatttgcgaccaaatcgacgtggtcgtcctcgatgaaaaggttcttccacagtcgcttttcccattgaacgaatgctgctcatttggcagactgaaagctgatcagaggttcaaattaaacgctgcgctcagtgcccacagtgaattttcgctgaaacaatgttcaacggacaaaactgtacaaatgctcgtcctttggctccttttttggttcaaacaacgtcagattgaactgattcttcagcaaggccttacgccattcagtttttgggtggctgcgaacattccgatgagtttggagatgaaattggcccttctcgacgaagactccaccgaccgacgactgcgcaccgcgtggagaattgtgtctcagatggactcaattgtctgttcaaactgtgcccaatccctttgcaatgtgtcggacattgtcaatttgtccactggcagcaattccaccctttttacaaactcacatggctntgttcatgaccttttcaccatcaaaaaagtgagcggaatt

SEQ ID NO: 86554 - DNA, 668 bp, Heterodera glycines
cgtacgctatgcgtggggtgaaaatgaattacggccgatcgccaaaatcggtcattctggctcagtctttggacgtgcaccagtgggggcgactattatcgatgcacttgacacgctgtatattatgggtatgaacaaggaattcgaccaggcacgcgattgggtggcacaaaatttcaatttgaaagagtctcttagtgatttgtccgttttcgaaacaaatattcgcttcgttggtggtctgccgagtgcttatgctctcactaaagatcagatgtttttgaataaagctcgcgatgttgctgacctgctcatgccgtcatttaatgccggccctttcgggattccgatgtctttaatcaatttgaggaccggtcgaacagggaattacggttgggcaagcggtggttgctcaattctgtccgagtttggctctttggaattggagttcaactatctgtccagactgaccggcaatctgacgtacatgtcaaaatgtgctcgagttcgggagtatgtcattgaactccaaaaaccggatggactttatccgaattatctcaaccctcaaactgggaaatggtgtcaaaaacatgtttcggtcggagcgcttggcgactctttctatgaatatttgctcaaaatttggattttcaatgggaaaagag

SEQ ID NO: 86555 - DNA, 599 bp, Heterodera glycines
aagaggtggaacaaccgccttgtccacagtcaccccgccacagtacaaaaaaacaacatactctctgataaactggcggcggcacaaacaatcatcggtggacttcaacctggacagtcggacggtgcacctcaatgggccaactccctccttggcttctgtgctgagatggtgggaatctgccgcgagcttctctccatggtcaaagagcagcagaatgacaacatggacacacgagagactttggaggaagaacgccgactccactctgtcgtggtcgagaacctgccggaaagtgaagaaactgtgccctctgctcgtgtcaactccgattttgtggatgctcaatcaatgctcgacacctgtgagatcgaatgccggccatgtcagaaaaagaccgaagcgccgccgctttctccacccaaatcgacgcaaggaaaagctgacgagcctccgtcagatgttttttcttcagacaacaacatggactatggaacattgaaggattttgaccccaaccgattttgatcaccggcactgaaaacgcagcaaaacattgaaaagaatgcaccgccgctcaaagtgccagagaaacgtgc

SEQ ID NO: 86556 - DNA, 734 bp, Heterodera glycines
ttcttccttggcgcacacttgtcgggaaatgaacgaattgttgtcgcaggaggagcgaaagtaatcgaaataatgtgttgcgccaattggtggaggaaattgcgcacaaaaaggtgacaatcggtccgctcgagttggacgcctctttcccgccggcgctgcgacgggcgttgccgcccattttacgccaaaatgtcgcaccaccgcaatacaaaacgttggcggagaaaactctggccagcaaattgaccatggccaacatgttcggtgccaaattggcccgctgccttctctgcggtctgacagtgtacgacaaacatttgcctacccatcgggcgattcaccgcggcgatcggccggtggacgggcacagcgttggcggcgcgttcttctgcgatctgtgcgggttggcattccgcactcggaccaatctgatcagacattggcggactggctgcagcaccatccacgcaaatttgccaccaaattccgactttgcattggatgacgctggccttaaacaaatggtcgttaacttgctgaaaaagttgacggcagaacgcaaagactccgagtcgtttagtgaaagtttggacgatgaaattggacagccgagcacatctcacaagcaccaaatcttccacactgaagcacgggaccgaactcaaattggtgtcccggcaaaagctgcgtccaaacgatgccatgacgatcaacaacagtaccagcagact

SEQ ID NO: 86557 - DNA, 375 bp, Heterodera glycines
ctacaaaactgctgtaacaaagtgtacaagagtccgcgtgccaatgtcggataagggatggcgtgccatgactacaaggcgatgtgccggttgacattggagcgccaaagaaacgtgccgacggctgtttagaggcatccgtgcaagaggggtacaaatgtgttgcttatgataagaatgacaagaagggattctgctggaaagagccgcgcaaaaaggaggcattagcggcgctaattgcggtggccggtctctttattatatttttgtgatcattgaaagcgaatcggataaatttgatgtttcatttcgggatttttgggatttccacaaattgtccgataaacgcacaaaaaaaaaaaaaaaaaaaaaaaa

SEQ ID NO: 86558 - DNA, 619 bp, Heterodera glycines
actggaagagcgggcaataaggatgggcctacacctttattttgcccgttgggcaggagaaaattgctggcgaagtttgtcgagcattcgaaacggcagacgcaacaccgccggaagatttgaaaaaattgtgggacgattacaaagcacgaatggcagccgaaggagtcgaagtgtactcgggaggaggtggctattccggctcaggctatcgttacgacgacatggaggacgaaatcgagttgaacaatgcggaaaatgaccaaattggtctatggattggaaagcggcatggaagacgatgttgcgaacatcgactcgcaattggaaagtgtgatgaaaagcagcaagcgcattgtccattgtcgtgccggtgcaacattccgtgggggcagagccgacccatcgacggaaaagaaagtggaggcggcgcgggcgatggccgaacggatcgcctacgaaaaacttgcacaaccgaccaatcaaatggaaaaagacgcgacgcatttgacagccgacgcgataatgatacgcacagaggcgactacgctcactctttccggaatctctctcgcaaaacaaaaagccaccgaactgaacgaaaaactcaattatttgc

SEQ ID NO: 86559 - DNA, 682 bp, Heterodera glycines
gtgatccgctaattattattttgaattgagatttattaaaacctaattaattttttttctactcgaatttcttttatggcatttgccatttcaagtttaagcgctttaatttcgctcgctttattggcagcaccacaaaactcgtaccaacagaaacctaacgatgaaccgaaggtctttaatgatatccaaaacgggtgtgatttgataaattgtaccgatggtcgaacctgcggcattcgagttgggctcgcaaaattcggcaacagaaattttgagaaatttgcttttccaaaatgtataacaaatgaaacggaactaaacatgaacacggacaacgatggaaatgcgcacattgttcctaatggaccagggtgccaaatgatacaatgttctgttggctaccaatgtcaagttcgaatttcaatttccaagcttggcaatttgccatatgctcagtcaattggaaccttcccgcaatgcgtggggcctaatgtaagcttcaactcatcaagttcaactatcgagaatggcccagggtgtgaccaacttccgacgaaatgtgacgaaggcacaaaatgcgtaactgccgtcggaattgcgaaatatggcaatttgccatggtcgcaatttttctggcccttttgtacatgaaacgatgaaaagcgctgcaactgtttta

SEQ ID NO: 86560 - DNA, 466 bp, Heterodera glycines
gtgaggcaatccgtaactgaaaacggtggacgagttcccttagtggcgggcgccaaacagcgaaaggcaatgccaagtgaaataggccaacagcaaaagagtcaaacgaacggaaaacaaaaaggacaccattttgaaacggctcccttagtacggtcaaattcgcaagaatgcgtagtcatgcataagtcggagtctttggaagtgatggactctgatcagttagctgaatgtttctgtttcacaaccagccatttcttcttttgcttttgagaattgtcggccaattgtcgcaatgtctactccggccacttgaagcagctcgagcagtgcctctgtccttaactcgcttactccgtccttctcttctgctgtgccgtccctctccccatcaaatgacttggacattgtacttctctctccgtcttcctccgttgccaaaccttcgctgctgctgagccattcg

SEQ ID NO: 86561 - DNA, 718 bp, Heterodera glycines
  unsure (1)..(718): unsure at all n locations
actcggttctgctgcatttattttactcgtcttcacacacagtgctcaggctttctaacaacaaacgactgtaatcgttccttcgacttctcataatatcctcctaaaacattgttctcagaacattattccaaaaaaacaaccacggacaaatcacagcaacttgatcatcgtccgcaacacgaaacgcggaagttttcaactttgggtcgaagcagcgctgcaaacgcttcaactacgcctctggctggacttagttcaccgagtaacacaatggctaatgctagagggccgagttcatcgacctcaacctcaactaatgcatcggttggcgttcttatggtcgggccaaatttcaaggttggcaaaaaaattggttgtggtaattttggcgagctccgacttggcaaaaatctttacaacaacgaacatgtggccataaaattggagcctatgaaaagcaaggcgccacagcttcatctggaatatcgtttctacaaattgcttggccaaacagaggggctaccgcaagtgcattattttggtccctgcggcaagtacaatgcgcttgtgatggaattgcttggccattcgttggaggatcttttcgatctttgtgacagaaaatttacgctgaanaccgtttgtatgaccgcaatgcaattgttgagaagaatagaatacgtccactcaaaacacttgatttatcgtgatgtga

SEQ ID NO: 86562 - DNA, 660 bp, Heterodera glycines
ttggacgatgctgcggattacgagggcgaagagcaggaccgaaatgaggcagggatcgacgaaatggaaagggatgaggacaacgaggaggagacgacagcgccggagggggcggaagagacgacggaattggacgaaactgaagaggcgccgacggagggacggggcagtgaagtcaacgccgatcggataaaatctgtgctggaaagtcacgcaatcatcggagggtacgagtacgacgtgcacaatgagcagtggtgcaccttcaaaatccatatgcctttcctcaacaaaactcgcatcgatgtgttggccattgtcgagagggaaattgagtcttttgtgcttacgcaagtgcgtggcattgagaagtgcaacgtgagggaggagcagcgaaacgggcgaatggtgcgcgtgctgcagacgcagggcataaatttgggggcattctatgcacatgccgactttttggacatcaacaccatttattccaacgacattgattttatgttgcggaatttcggaattgagggggccgctcgcacaatctctcgagaaatgaacaacgtttttggggtgtatggaattgaagtcaatcctcggcatttgtcgttgaccgctgattacatgacttttacgggcgaagttcagccgtttagc

SEQ ID NO: 86563 - DNA, 647 bp, Heterodera glycines
agagcttgggctgacaataaagcgcaacaatgtcttctgacgaatcgacgacttcttctgccagtgttgtgagcgttcagctgcgtgaagtgcccatcaaagacttcaaggacgtgcttccggtgctgcagaaaacgctcaacgaattggaacatccgttcatcaagaaggccgaagaaataagcggaatggaacgtgagaagctcttctacatcacttcctctcttgtgctgctcgtgttgatgctctgccctggcaatatgcttctctctactcttatcactgtggcctacccaatgtacgcgagcttgttgaccctcaacactcaaaacacatcggaatacacccagtggctcgtttattggtgcgtgttcgccgagttttgccagttcgactatctctttggctctatcaatggccttctgctgctgtacgtgcctctgaagaccgtctttctgctctacttggcccttccgcaaacttatggcgctcacaacttgtacgtgaagcatatccgcaaagtgcttgccgtgacgaacgtattggacaagatgaagaagatgttctgatcgagcagataatgtatcactgtgtaatgtctaggatgattctttgttgtgattcctatattatgtgttatgtattgt

SEQ ID NO: 86564 - DNA, 405 bp, Heterodera glycines
ttttgggacaacggcgaaagcgaatcatttgggaagtgcggggggaaacggcgcggagagagagtcactgacaaacggaggagccaatcaaattggcgacgctctcattcacccgacgcccctttccatgggtaaaaacggcggccccggcactgctccgttgtccttcggccgttcttcgattccgcaacagtcggcccattctttcgccgttggtgcgcacgaacagtcggccatctgggtctgattcgactgaccgtccgaccttccaatgccctgaccattgccaactcggcctttctccaatttgccacattcgtcttttttctgtctccataatgagcttttcctcctttctctcttttgtttttgtctgtttttctgcctgatttagtttatacatac

SEQ ID NO: 86565 - DNA, 737 bp, Heterodera glycines
cagtccttaagatacgtattttagggcaagcaatgaattaccaacaatcagtccagcagcaattaggaggtggtatgagcgcacaacagcagcagcaacaagcagtgagacacatgcagcgaccacaaaatcctgcatcagctgcagtgccacaaaatatgtcgccgaatgtggcgccctctccacaacaacaacaacaacaaatgtaccagatgcctatgtacaaccacacgaacgcaggcggaactccattcagtccccacaacgtttacaaccagcagatgatgacgccacaaatggcctcgcagcagcaattccctccaaacgcacctgcaacaccagcgacaccccaaatgtcgcagtcaattgggacgccattgtccgtgcacaacattcaacaacccggttctgttcaacctcaacagcccggttctgttggtatggttgccacccctgcggctccgtattctgttggtgcgtcgactaccggtggtccggcctcaaatcaaccgattgccggcccacattccaaccctccggcggcacaacaagcgacacagacgcagccaatcggcggagcttccacccaaacggaattcgacccaattgggacggccaaattgttaattctgaaggaccttcgcagagcaattgtgaatctcaatcaatttgctgagaaagccctcgacagttgctctaatccgactcattgtctgcagtcgctacaatcggtcgct

SEQ ID NO: 86566 - DNA, 525 bp, Heterodera glycines
gagacgcgggcccaaaatgatggaagcttttgttacgcgtcggaaagaattggaggatgagtttcagaagagaaaggatcaatacagcaaggaaatgcaacaacgtgtgagcaaaaaggaagcggaattaaagcatcacgaagagattttgaacatccgtcacaccgagattgacaatacataccagaatgagcttaagctggtcgaggcacagatcaacggactgattgaggaaaaagccaaattggaaataaagctgaagaagcaacaacgctcgaaataaatgaagccgaggcgaatttttcaatcgaagccattaaaaaaacattccattttttgtaagcatctcttattgactaatctttgcacagccttcgcttattttgattcaatgctaattaggtgtctaaccgaatttcagacaccaatgattaagaaagattgtcctaaatagatgaaaaactattttcgcattccgtgttattgtttgttatttatcgaatataaagtatgcgactaatcaaa

SEQ ID NO: 86567 - DNA, 640 bp, Heterodera glycines
gtggatgcgcatattcattagacactgcccgccttggggcacatttggccgactccttcgggagtcactctcccttcggacgaagaactccatctcgtcaacaccacgggcatcccaaggccgaattcacaaagccatgccaaacattgagcaaacagcagtacccaaccaaatgcattggacagcctacacaaaattgtagtggaaaaaaacgaccggcggaagcctacaaattgtgctcaaatccattctgtgtgcgatggcaccgctgcttcgaattgggctgtttgcagttgatatttttgccatcatcggatctcatttttatgcccatctttcgtctgactcaagcctatctgttatcaccaagtccccagactttaacgacgccgctgaatttgtcgcaacattcaaatccatgacggatgcaagtgccgacgttcttgataagatttccaacattggaaacggcgcctttactctcctcaagtttgcgggcccaataggccaaatggtacacattggtctatccatcggattgaagcagcaagactcgcccgagctccgtgcaatacaggccttacagagacaaatcaccgaacagttcgaagcactctcccgtaaaatcgatgactctatt

SEQ ID NO: 86568 - DNA, 625 bp, Heterodera glycines
attcttctctgtttctctctacatatcccaaaattgttccccaatgctgcaagctcatcagtaccaacttcggcaaggtcatcgtcgcgtttctgctcgcagcattttggcccatttcggtttcgaattctcgaacgactaccgacttggctgcggacattacagtaaagtgtacagaggctatttcaaggaagcgcaacgcacttttgccatcaaagtcaccgacttggaaagcgtttccgagaagttcaagcaaaagtttctgccacgtgagctggaagtttggcgggaattggaccacccgaacctcgtctacttgtacaacgatttccagtggagcgactatcagttcgtagtgatggaattggctgttggtggtgacttgctttcgttcctccaaaaatgtggccccgtcagcgaaacgacctgtcacaattggatgctccaaattgttgctgctttggattatctccaccgtaagggaatcgctcatcgcgatctgaagctggaaaacgtccttctttgtgaaaacggcgtcatcaaagtcactgactacggattctctaagcagagttctgatttgtcttcaacattttgcgggtcgcgttcctattcgtcaccggag

SEQ ID NO: 86569 - DNA, 697 bp, Heterodera glycines
tagtctgttcccgtgcagacaactcgtggcattctgtgtcagaggtgctcagtgaacagaaacagcgcctttcccttaacggatggttccattacgctccggggacggcgaatgttgcacagacagggccaaattgcgctgtggaagagccgatttgtcgggtggagccatcgatgaatatcacgttggcagaagtcaacgaatggctgagtccaaattacattcgtccgggacaacatcggcaaatcaaacggatttttgcatacaaatccgagctgtccctccaacaatttctcaataatgaacgttataacaaagctttggatgagttggaaaaggcgcaatttgaaagtgttggcccaccgcacaaaagaaatgtatggcgtctcgtcgagtcatccttggaacagaacagcgttctccaaagtctattgcgtttgtttcgctccgaggccatcacccttttgttgacccaatggactggcctccatctgtacgatttgaagacaaaacgtggcacggcacattctccgaatggcgcaaaaagggcggcggaaccgccaaagaaacggaagagagcggacgaagaggaggaagggacgacgagcggaggactgaagcagggggggaaagccgacagatgcggagaaagcgaagatacaaatgttcgaatcgcttctttcatccatcgtttcga

SEQ ID NO: 86570 - DNA, 432 bp, Heterodera glycines
tttttccatggccgacctttcccttcgcttacaactttctgttttgctttgttttggggccatccttcgcaatttgtgtctttaacttttgctctctccgcccgtccgttttccccatttgttcccattgtttaacgtactgttcagcttcggcatattcacagtcttttggctacatttaaattttgtgatagttcgccaaaatttggccgtgttcaccgagcagagaaatcgagaggcagtgaaaaggaacagtgcaaagcgcaaacaacaataaatgtgttgcgatggactcgcgtttttggatttctaaataacaacaacagtcgctccttttccgctttcattttggtctcaattttcatctgttatttcatttcttttcacctctataaatttctgttgggacgaaaaaaaaaaaaaaaaaaaaaa

SEQ ID NO: 86571 - DNA, 335 bp, Heterodera glycines
tctgtgatgcccttagacgtccggggctgcacgcgcgctacactggcaaaatcagcgcgcttgtccttccccgaaaggggttggtaaaccggtgaaaatttgccgtgattgggatcggacattgcaattattgtccgcgaacgatgaattccttgtaggggcgagtcatcaactcgctctgaatacgtccctgccctttgcacacaccgcccgtcgctgcccgggactgagccatttcgagaaattccgggacggttagtgcctccggcttcggtcggtatgcagactggaaccgatttaatcgcagtggcttgaaccgggcaaaagtcgtaaca

SEQ ID NO: 86572 - DNA, 349 bp, Heterodera glycines
gaatagttccgttccttcgaatgactgctcatctgctggggacgttacaatcagttgatgctatttaatttcttcagtctccgtaatgggacgacgcaatcgacgacaaatcacaggacacaaaacggaggatggacaacggacgcggtggtggaggacggggggaaaagcatcaaacggaaataaaacggcagagaatcgaccaatgacaatcagtgggacacgacagacggaacatgatacaccagcttaacaacaacgatggggatgatgaaaagcaaggagagaatccggatggactaacggctcaacccgtctataacagcatcaacaacaatgttcaagcatt

SEQ ID NO: 86573 - DNA, 604 bp, Heterodera glycines
  unsure (1)..(604): unsure at all n locations
cacgacagtgctggatgatatgcaatatttggtcaatttgcgaccatcaggaacaccagtcattgaaagcatgagcatggacttcgaaacatggctggtcagcttcatctctgacgatcaaccgtttgaatattttctctacaaaagaagcaaaaaacgtgctgattacctgttcaccactcgtcctgagttggctggacgacctctaagcaaaatgattgggtttgattattcggcacgggatggcttacgcattcaagcatatttaagcttaccaccacagaccccgttgttgtcgccggcacaagtgcgtggggacaagctggagttggcacgccagggcatgttgccacgacggccccaaaaattgattgtgctcgtccacgggggcccaaaatcgcgcgatttcttggcttcccgcctnatcaacgcgtggctgaccagccgaggatacgctgtgctccagatcaacttccgtggctctgtgggctttggcaaaaatcttacaaacgctggcacatgatggggcggcagaacaaaacaccaanaatttgttggacggtgttgacttcttggtgagcaacaacattgcggaccgacgcca

SEQ ID NO: 86574 - DNA, 527 bp, Heterodera glycines
aataaaaaatttttctctaaagtagcatgtctcctatgaggagcgtgtataagttatttaataattaacaattaaacatattaaggattatgcaacattcagatttaaaaaaggtattcagatttaaaaaaggtatagcgcttttattattgctttctacaacaatgctcgcacgtaatgcttctaaagaacgctgccgaccagaaaaacagcaaggatatatgcagaaaaataaaataaaaatacaaaaaacaagtaaagcagcacaagaaagaaaagaagcagcaaaagcaaaagcagcggaaagaagaaaagaagaagtaaaaagaaaaaaagaagaaaaagaaataataaaagaagcagaaagaagaaaagaagcagtagcaatagcagaagtagaaagaaaagaagcagaaataaaagaagaagtagaaagaaaagaagcagtagcaatagcagaagtagaaagaaaagaagcagtagcaatagcagaagtagaaagaaaagaagcagtagcaatagcagaa

SEQ ID NO: 86575 - DNA, 183 bp, Heterodera glycines
cactttccctgacgcatcgcttcattttgccgagactttcgaccgcgccatttctttgcttcgcgcagactgtcgtacttcggagaaacacgtcacttttctgcacattctccgacaattgggcgcgagtgaagagaatggtggactccttggcaatttgaacgggctcattcgaaacctgag

SEQ ID NO: 86576 - DNA, 582 bp, Heterodera glycines
caaaatgcgcaccattctcttatagccatggtttgcttggtgatggctgtcctaatggaaatggcaaattcaaaggctgtcaaaaaatacaacaaaaaaggagcagtggcggcatcaccagcaaaaggaaaagcatcgccaaaaggaggcaaaagcccagcaaaaggaaaagcggcaaaaaaattgaaacctaaaaaggatgctaaaggcattaaagctaaaaaagcaaagccagcaaagaaaagcaaagcggcaaaagcagtaaagggagcgcctaagacagtcaaaaaactcgcatttgccaaaacagcagcgcaagtgaaagaaataaagtcaccagccaagccaatggttctaaaagcagtgccgccccaccaaatgcatttaatgaatgagaaagttcaaactgctgtgtctccacccgcccatgctcgttcgcttgcgaccgttccttacagtacaccggtggcagccgaccgtaactcactgccatcgtacacttcggatggcaccaatttggacatggcccatgagaatgatgattatcagaattattactacggaacggaagacagcagcaga

SEQ ID NO: 86577 - DNA, 601 bp, Heterodera glycines
gtattggtttttgcccttgctgtagcaggctcgtttcatactgaaacattcactcatttgcggcccggcctttacttcaccggcctttggggtgacctgaaacagagcaaacgcattgaacgctttaacaagttcaacgctgtcgatggtggtgcggcgatggtgtgcacggacgtggccagccgcggcttggacttccgggggatggattgggtgctgcagatggactgtccttccacggtcgacgattacattcacagagttgggagaacggcacggatgaaccgaaaaggagaagcgatgcttatgcttacgccgtcccaagaaccttttgttgctttgctcaggcaaaggaatgtccccgtcacaaaagtgacagtcgactccaacaaagtgtttgatgttcgtaataaaatcaccaatttgatggttcctttcccatcagtgaagcaatttgctcagcagagtttaatcgcttatgcaaaagctctctatttttcggaattgaaggaagtgtttgatgtgcaaagcattgatttcgatgcactttccaggtcttatgggttggtagttacgcctcggatcagatttctcagaaaaa

SEQ ID NO: 86578 - DNA, 665 bp, Heterodera glycines
cagaatgaaatgtatttgaaagaccgcttgactgggcttatttcgacgggatggcaaaggtattcccacactacgcctttgtgtgaacttctccccgccggcattccatcgttggcacggcaagcgatttttgtttcgcaatggatgaacaaaagagaagaacggaccgaccaattcatgcaggagtttctgaactgttccgtacgtcactcgacttcggccaccaaatttgtccgcaaaggattcacttttccattcgtttttgaattcaaattctgcgattgtcaattccccggtgttgaactttacagtgagattgaagaactgaatttgttgcgatggaaagcggcgattgagcgatatataagcagtaatgaaaccgaaaaagagacacaaaatgaactggaaaaaatggaggaagaattcagaaaactccgaaagacgatcgcttctcttctcggccatttcttttacgaggacacagtcgacgaatggttggctcagcacgaccatttgaatcgctttaatgatgatgacctcggtttgcctcctccaaaccgactgtgagatcgtaagtccatttgaagcgccttttttgatcatgtgaatttttatatttgaaaatctccctttttattgtatttaacttttgtccattttaatgc

SEQ ID NO: 86579 - DNA, 689 bp, Heterodera glycines
aataattttgctttattttcccaatgcttttctcctcgtccactgttctgctattgcttctgatcgtcctccctttctctctttctttcattttaatccctcaaaatgtccgccaaatttcccccgccctttcgtcgcgtcccttccgccgatttggccatttttctgtcattgccaaacgaaacccaattgttctcatccccggcgacgggggaagtcggctaaaggcgaatttgacgggcaaaccgtcggtggtccattacttttgccagcgacagaccaacgatttcttcgcgctttggctcgatttgcaacaatttggcccttttgtcatcgattgttgggccgacaatatgcgcctcaacttcaacagaacgagcggaagggcgcaggatttggagggagtgaaagtgcgagtgcccggctttggacacacgcgaaccgtggaatggattgactcctccaaacggtcgccgagccgttacttcgcgcccatcgtcgcctccctcgccaaattgggctaccaacgcggcatcgatgtcatcggtgcaccgtacgactggcgaagagcgcccgaggaactccttcattattttgttaaattgcgttcactgattgagcaactttaccacgcaaatggcaaccgcaaagtgatcgttttggcgcatagtatgggaaatccaatggcc

SEQ ID NO: 86580 - DNA, 485 bp, Heterodera glycines
cagtgtgaagaaggctgttgaccagtgttcgtcgccaggaccgggcggacatcgctttggagacgtacttgaggagccacgctgacaccttctccaggaggcgcgaaaggccaacgaccagatgctgttcgtgatgaaggacaagaagctcaactcggaggacaaagtgcgcaaattggaggagtgggccaacactttgccggagaatgtgcgcggagagctgcgcgtgcgcgacttgcgcgagctgaagcagctggtgcacctgtacaacggactgacgcccgtcctgcaccagggcatccaaggcggcatctgaacggaggaagagaaagggaggaaggggggcgatcggactgatcggacggaccgaaagtgatcggtgatctgtgtcattgtgaacgaaaatgccgcattccattcctaatttatttaagtgggtattaaacacattaaaatgcgaaaaaaaaaaaaaaaaaataaaaaaa

SEQ ID NO: 86581 - DNA, 648 bp, Heterodera glycines
gcacctccgcttccgtcgtccgcagcagtcgtcctcttccgccccgttcggcgcgcccttccacagtcgtcgatggcatccgccggttggcttcccccgggcgccaccgttggctgtggtggaccaccacagcagcagcagcagcagacgatatcaatgatgatgatgcatcaacaacaacagaacggcatcatggtcaacgggaacggcactgtggtcggcattggccacctgcaacagcaacagcagtaccaccaattcatcgccgccaacccggggatggttggcgccacttcgttgccccaggacctggagaatgtgaacgcgatgccgtttgaccagagcctgttggacctgaacgactacgaaattgcgccggacggacagttcgatttcccgtgaacgcgggccacgacgacggcggcggcgaacgcgcgcggattttggatggacgggagagataatgaattaattattaattacccactgatatgtgtgtctcttctgttctccccgttttttgttttgttttgtttcatttttgtggagaaacacggcgcagcacaacaacaaatggccattcgacaggaaaccgcagaaaactatctacctacctaccgtatattcatttgtgttcgccccctctct

SEQ ID NO: 86582 - DNA, 561 bp, Heterodera glycines
tgtccaaaattgccgaccgtgttcgacacatggtcacgcaacagaaagtgccggagccggtgttcgcattttggcttaaccgtgacccgacctctgaatttggtggtgagatcaccattggcggcactgatcagcgacgatttgtggccccaatcacttacacaccggtcacacacaaagcccactggcaattcaagatggattcgatcagtggaggtaatggcaaacttgcgtgccaaaatgggtgccaagccattgcggacaccggcacttccctgcttgctgggcccaaaaatgacattgaaaagattcagaaatacattggggcaattccgctcttccatggcgagtatatgatatcatgtgaacgtattcccacactgcccgatgtgacgatcaacatcggtggcaaggcgtacacgttgaagggcaaggactatgtgctgaaaatgaccagcatgggcaaaagcatatgcctttccggttttaggggcattgatttgccggaacgtgtcggagaactttggattcttggcgatgtgtttattggtcgttactaca

SEQ ID NO: 86583 - DNA, 501 bp, Heterodera glycines
atccgcagcatcgttctgcttcatcggtaatcgtcacgcaccatgaggaagttcgcctacttcaaactgtgccaagccgtgctcacttctgtttttctgtggcaaattctctcaacgcaccaattctgtggcgagtttgacgagcctacggccttcttcaactctgcagtctcctccagccattgcgaacagttcacgctcatcggaatggactccaccactggcgaatacggggccatgcccgacaagcagaagtggcacatgcaactcatggcgagcagcggcagtggccaaccaattgatgaacagcaacagaatcacatggacgagttttcgtcaaaattgccgactgttggccgtcactgtattccgattgcgttttctctcgtcaagccctgggttcgcgacaacaaaagtcatctgcataaggtcgctgatttgtttgccattcaattgctctgcggattgctgtctctgtttgtcattgccatgcacgttttg

SEQ ID NO: 86584 - DNA, 529 bp, Heterodera glycines
taaattgcgatggttcgaacttacaattactaatccgtccacccaatcgtccctctccacttcgcttcccgcgttgccctccgccgctgtctttgcccattccgcgtcccttcggcgtcgtgctgctgccgttcctcctccccaaaatcggcaccattttttgcctccgcccgaccctccgccgttactcaatggcaatgcctcaaaggtcttttcctcttcttcgtccgatacttttttgccggcggccgatgtttctggcggagaccgtcgccaagtgatgttcgaggaggagccaaccactttcatcagcatccgttccgttctcataaatggccaacgcttcttccaaccgctcagtgtccccgccgctctctgtccgtccgcgtcggcgccgccggtcgacccaatgggccctttgttggcactttcggctgccgacaatgaccaaagccatccgaagcagcaaaaggatgctccgctcgctcctcgcgtccctttcatttaccagcaatctctcgccgccgcc

SEQ ID NO: 86585 - DNA, 599 bp, Heterodera glycines
ccccagttaattacacatataattaactccttttatcgcgcattcctccgccgttctttcgtcctttccctttcccttttttctctctttttcactctctcttctgtccctttcccttccccaatcattcaattgcctgccattcttctcacattcattcattgttttttgactgatgaaggtcatcttttcgtcacacagtagaagtgggaaaaaaatttgccacccctcctttgtcggcacatgccattggctgctgcacggcaccgaaacggtgccaaagacggcggagcagcgcacctttacactccgttgtaggcacgtcgtgttggcatgcggacgacaacagcccaaactgttaggggtgcccggcgagtcggccgccgctgctgacggtcgcgtggtgtacagtctcagctcgttgaagcagcgattggaggagacagatggcggcgattcgggcgcgacagagacggcaacgacaatggcaccggcgaccgaagcgacggcgaccacaatggcacgagcgactattgccgccactgcggagacggaagaagtgtccggcgactgtcccgtggtggtggtcggcgacggca

SEQ ID NO: 86586 - DNA, 554 bp, Heterodera glycines
tggatgaaacgtgttcaggagaagaagaagaacgcgtccaaattgaaagggacggctccgtttttgacttgtccaaaattgacgagcccaaattcggaaagatcgatccgaataatgtgccacatgtcggcggaaacacttgggcgggtggcaccggggggtacaacaccgccggacttggaggagtcggtggtccgtttcgtttggatgccggccatgcggttcatcaattgccggatagtgccaaggagcaagtgccagaacacattcgaaaaagggcgagggaaatcgccagagaggaatatgcgaagcgactaaaagaaattgacatgggcgaatacgacgcggcggcatacgaagaattggccactcgcgtgggccgacaagtgcgggtgctgcgcattgtgatcgactcgttagagcatcggaagcacggaagacagtgggccaagcaccagacgagcggagacttggacgatgccaaactgatcgaatggatggccggcgaaagaaacatttaccggaagcgaattgagcaaccgcccgatccctca

SEQ ID NO: 86587 - DNA, 718 bp, Heterodera glycines
gcggtaaccgggagttgcaccagcggtcaaccgggagttgcaccaagcggtcaaccgggagttgcaaccggtgaaccgatacccgaaccgaccggtgaaccgataaaagagctgccgattccggataaatttgacctgacactgccagaggtggacccgtcgaattcatcggccaacgcaacgagatatgttacacaaatcgaagggcgaaaaaatgtctccgatgccaaatttgacggaaagacagcagcgtgtactccagcaggggtcgaagttttctctgagaagatgacgggcacattaaaagcgaaaaatgcgattgccgatgccaacataacatgcggactgaattcaaacttctactttggatggtccagctgcatgaaaattgcattctacggggatgacggctataaaaagcatgcccaaaaatacggtctcgacaaaacagaagggccggaggaaaacttcaagaacatgaccgagttcgacaaatacggcttcatgcacgacatggtgttgctgctttttgagggttgcgtcgtttgcaaaaacgctaaaatgactgcatcgctgtcacttcgccaatacatgccacagggactgttgaacgagacgtgtgcagcatttgttaaacggccgaccaaagcactggtgggagtgacggctgacagctttgcttacggtattacgctgatggaacgtctctgtgctgaga

SEQ ID NO: 86588 - DNA, 411 bp, Heterodera glycines
gatggagcagaaaacgtttaaacaaaacggcgaaagaaagagaaagacacagaaaatggaggaacaaagtcgggaaaagccaaaggacagtgaaaaggaaaatttggatggacgcatttcgaagagaaacaaaatgcaatcggaggaggcgacggtggacgccgaatgtgccgaattgcgggggaatgccaaagtgttcgtcgatgggaagggccgttgctacgacgtaatgctcagccaaacgaacattcagcagaacaacaacaaattctatctgatccaattgctgtgcaaccaaacggcggccaacaaattttgggtttggtttcggtggggccgcgtcggattcaaaggacagacgaatttggtgccttttgggacggactttgacggagcgttggaattatttca

SEQ ID NO: 86589 - DNA, 518 bp, Heterodera glycines
atttccttcttttcttttcttaattatcattcctgttgctaatggtgtgatcactcgatcactaacacctcgacgtggtgctgctggtgaaatggcccgagaatttgttgaactctcaaccaattcgcgtgagtccacttcgagaagaccaagtcgtgtcaacattctggatgatgactatgttgagcctagtcttggtgttaggcgatattcagcggggtcgtcatcacggactcgtacagtcaaagttatgactgaattcaaattacttggacaaatttggcccgaagacgtctacatcatttatttggatacatcaaaatttgacaaggacgatcaaaaacggataattggccatgatgaaccagatgtgttaaaaacagcgagtgacggaagtttttcatggaaatttttggtaaagcacaacgagtcggacgaagacattgcggtggacgtacatatgcacatttttgggactgttccgaatgaaaatcttcaccgcaacattgtgatagcag

SEQ ID NO: 86590 - DNA, 556 bp, Heterodera glycines
tgttgctatgtttgttgctagatcttttaattgccttacttcaattatcacttccattcaccttatccgagccgtctgtcgagaaacaaataaatggcgaaaaccaaatcaatttgatgagtcggctcaatgctcatgatttttgttcaacaaattccgattttttattggaatatagcgacgagaaagcgctttcagcagtggaaaatggattttttatgcgatgttccgatttggacgagcattggtttgattgtcagagtgtcaccgaatcggtcaatgccactgacatcaatcaaatggaactgctttgtccttatttcggcatttcgaagggtccacttctttttgccaatataagctgccgagttttgccatgcattgaatgctatgggacaagaaactttgcgaaagaatttccctgtaaaaagtatactggtcattactttctctcggcacttctttattccattttccttggaccttttgcggttgatcgcttctatttgggttattcggcgattgcggtgggcaaattgatgacattggaggattg

SEQ ID NO: 86591 - DNA, 601 bp, Heterodera glycines
gtaatgcacggcgacgggggcagtccaattgcagcgcaacaacgccactctccgacgacgctttcccgtcgttcgtccagtgctcgccctacaccgtcgttgtcgcccgtttacatttgtccggtccgcgaggcgatcactgccgagcacgcagaccaacagtcggcatcgctaccacatgggagcgccgctggcggtggcacgctgctgtacccgttgcgcaagggtgagcgcgtgcgagtgttggccatccgtggcgagtacacgcgttgcagtcgcttgcctgctgctgaacatcgccagcaacaactacgacaacagcggttggcgttgcagaacggcctggtgccgaccaggacgctccagtttggcgccaataatggcactacggcattaaacgacgagcggatgacggaactgtgactgatgattgacttgctgatcagtgtggtggatcggagtttgctgtgtgccatgaacggacaaagaaaagtgaacgaaacgatggaaacacgtacaaaaaaggacaattaaataaagagacacgaaacaacaacacttttcatatgattaattattaaattgatatgaatctctagcc

SEQ ID NO: 86592 - DNA, 626 bp, Heterodera glycines
  unsure (1)..(626): unsure at all n locations
acaaacctggtcgactgttcgtccaagtacggtaacgagggctgtgacggtggactgatggacagcgcatttgaatatgtgcgagacaacaacgggttggacacggaggagtcgtacccgtacgaggccgtaacgggcaaatgccaattcaaaaatgagaccgtgggcggcactgtcgttagcttcaaagacttgaaggaaggcgacgaagagcagctgaagattgccgtcgccacaattgggcccatttccgttgcgctcgatgccagcaatttgtccttccaattttacaaaaccggcgtttattacgagcggtggtgcagcaaccgatacttggaccacggcgttctcctcgtcggctacggtaccgacgaaacgcacggtgactattggctggtgaagaacagttggggcccgcattggggagagaacggttacattcgaattgcgcgcaacaaacaaaaccattgtggcattgcgacgatggcatcgtaccccgtggtctgagaaagtgtgggaatgaatgggacaagaagggatcagaagaagaagcaggcataccaaatagaagcaattcacaatcattatcattgttatgctttttggtaataaataaaattgcttng

SEQ ID NO: 86593 - DNA, 603 bp, Heterodera glycines
ggtttttgatctcgcggatatcgtgagctggcgaaagaactcgttgaaggactccaaaaacaagaccaagaagtgccggattggcttaagctggtggctgaggggaaaatgccacttgacgagtcggaagcagccagcggtgcaaattcggtgccgatcgctgttcgcgttccgtcggaaactgttcctgacaccaattctttgccaactgctgtaactgttccgactgataatgtggctgcaaccggtgctaattcggtgccgcttggaacccgcgttcaagacgacggaaccccgaatggagaagcaaaggacccagccatccagaacaattctgctccattgccttctgaagacgccaacgatgagtggtgatttgagtagggtttattcggctccggactttcattgttttgttgttcagccttatttattgacgatctctttcatcattcttaaatcacaacgtacttagacattcgtatagctgccccatttgattacttacggatatctagcaacaaatttttgatcagtgtcttatctatttttgagagttgtttctggttttgttttattactttgataaaactttttattgca

SEQ ID NO: 86594 - DNA, 568 bp, Heterodera glycines
  unsure (1)..(568): unsure at all n locations
aacttgctgttggttcaaaaagtggtgggtttgacgaatattttggaaccattgggaagaagtttctgaaaaaaatatagagaagcaaacaagttacaaagctgtcagacaacaacgtcgatcatgaattcagacaaccatttgattcaaacaatgaatcgtggcgatgaaaggtccgctgacatatatttgcaagagcaaacgctgatgatcacctcaagccaccaacccgtgcaattgttatatgatggagccaatggacaatactttatacctgttcagaatgggaatgacggttctgtttgtcatattgctctgaccccaacacagtcaaaagtggctggctactacagtatcatcataattttttgtaacattggtactttctcatttaaatttccgaacaacaaagcggattatttatccattggcgaattacaaaaagatgtacatgaaacttttttaaattatgtactaaaacgttagatttattgtttcaaagaatttccccagtaaccgcattattagtataaacaatttactnnnnnaaaaaaaaaaaaaaaaaaaa

SEQ ID NO: 86595 - DNA, 703 bp, Heterodera glycines
  unsure (1)..(703): unsure at all n locations
gntttcctgatttcttacaaaaaaagggaacacacagattggtgggtggacgactttgtgcgtttcctcaatgaagtacaatttgatggaatttggattgatatgaacgaaccctccgtctttggcacaaatgagaaacatccatggtactttgacacgcaacctgcatttgccggcaagccaccaattgcgccgctgatgtgcccagagccgaacaacaaattggactacccaccgtatcgcacatggaatgcatacaaatgggactcgattttttctaagagaacgctgaacgaaaaaacattatgcatgattggaaaaagtgggcgccgcaactggacaatgtacgatacgcactctctctacggctggtcagaaatggtcgccacacaaaaagcgttgcgcgtctcaactggcaaacgcggcccgctcacttctcgttcaacatttccatcatctggccattacggtggccattggcttggtgacaaccaatcccgatggcctgatctccggctgtcaataatcggggtcatggagttcaacatgtttggcatcccacaagttggcgccgatgtttgcgggctcatcggagactcaaatgaagaactttgtcttcgatggcaacagcttggagctttccattcttattaccgcaatcacaatgatgttaattcaaaagttagccaagatccggcacagt

SEQ ID NO: 86596 - DNA, 627 bp, Heterodera glycines
attgaacattttgttgttaatgagaaatatagagaggcagttacaatgtcgttatatgcgattgagccctcgtataaaaacattactgatccactcaaacaacgttatcaatacaaagaagaattcattgccatgtgtagaaatgcttctgcatcaccgtttgatgttttgcttagaatggagcaaagtctaaaggacgattgccaattgccatcacaagaacaggcggaaaattatgccgcaattcttgaactttttcagaaaattgaacagcgtcatcatatgctaaatctaaatgatgccattcctatggataaatacaaatctataaaaagctcaattttggccaaatcagcaagggaagctctacaagaaaaactgaatacaatcctaaacagtgcaaacagtgctgaggaggtcttgcaagccttgaacaaattgaactcggatctgcattattacccatgttggttgcaagcaatggctgatggcaacgaatggaaacgagaaccgctttttcatttcgctcaaattgtgcgtttggatttgatgaaagcttctctcatcgcattacactgtgcctatatttccaacgaggatgacgaatttgctattgatatcaacttt

SEQ ID NO: 86597 - DNA, 529 bp, Heterodera glycines
tgggtgcggagttgattcctgaagagcgcaacctgttgtcggttgcatacaaaaatgtggtcggtgcgcgtcgttcctcgtggcgcgttatctcgtccattgaacagaagactgagggctcggagaagaagcagcagatggccaaggagtatcgggagaaggtggagcaggagttgcgagagatctgtcacgacgtgctggatttgctcgacaaatatctgatcccgaaggctggcaacccggaatcaaaggtgttctacctgaagatgaagggtgactactaccgctacctggctgaggttgccaccggtgacgaccgaaacgctgttgtcgagaagtcgcagcagccgtaccaggaagcgtttgacattgccaaggacaaaatgcagcccacccatcccattcgtcttggtctggcgctgaacttctctgtgttctactatgaaattctgaactcaccggacaaggcgtgccaactcgccaaacaggcgttcgatgatgcgattgctgagctggacacgctcaacga

SEQ ID NO: 86598 - DNA, 719 bp, Heterodera glycines
gatgccgtggctaatgcgatcgtttgccctgtttgttttgcaaaatttgagccttttcccaatctgcatgcccatgtcttacggcacttggacaaaaaatgcatggccgagtttttcagctgtaaattgtgcaaagattcgaattgcgtccttttcctttctgtcacggcaattcgtgagcacattcgaactgcccacggcgttgccactgattcgtaccttctgaccaacatttaccctggaaataatatacacaaagggaccacgcgaattatggtccaggaagtattgaagcgtttcgcgcggattcgttttgaacaatggagaaatgttagacaaatcaaaacgaagttggggtcgatgaaacggaactgttcctttcctcctgttgacgaccactcgtggaaacgaaaaaaagtgggaaacgaaggcggaaaggtggcggaggaggacgttatcgacagaattttgttttctccgtcacaaattcctcaaaaccttagcgagcgtttgcaccgtctgaaaaagatggaccgcatttcgcggcatcaaatgatcgtgccaatttgcgggatgtcgtcgttcgtcggtttgtccaatgtgcgcattgccaaaatggccaagagttgcagcacccacaaatgatgctttttattcggatattttacacattaaatcttttgcctttcttttcttacaattaatttgattaaattaac

SEQ ID NO: 86599 - DNA, 714 bp, Heterodera glycines
cgacgctcttcttcaaaaaaggatatattccagccgcttttcgactacatgacgacgaattgctgtgcaaatgcaatcattttgcgacctgcggtaaggaaggtgtggcgagttatgttggtgaacagtacatggacgtgtgccggcctggtcgaggcggatactgtagtcgggtagtgtttttgaacgcggatggcacaattcgggaagtcatcacatcctgtttgaaacgggaacaactcgtgcccagggaattgccattcgtctgccaaaattcgaccactccgcaatggaacaaattggtgaactgttgcaagtctgaatcattttgcaacgacatccaatttcccattgaacttggtcttcgcaatggctttttgcccgaatccttcgatggtttgccatccgtttttctgacccttctcatttcgcttgtccttgtgctgttgtttgcattgagcatttgtgttgccatttcctgttgctgttttcctcgaaaaagggctgttgttgaccgatgcattggttggttggtgcagtgccgttccccaacattgaacagttctaaggctgattgtgaaatggacagtgaaagtttatgtggcgcaccgatgggccaattggcggaggcggcaacattctcaaccggatcgggctccggcgttccaatgttggcaccgcgcacaatctcttaccaaatttcgctgcaaacag

SEQ ID NO: 86600 - DNA, 663 bp, Heterodera glycines
  unsure (1)..(663): unsure at all n locations
cagtgaccacatcattctcgaaattgttttcgaaatattcgaaaacattaaggaagacgtcnaatgggaattggttttcgtgggcactgatggccgagaagaacacgaccaagtgctcgactcagttctcatcggaccgattcaggagggacgacacaaatttttgtttgaggcgccacctccacaaattcacaaccttcgacccgaagattttatggatgtctctcttttgctgctcaagtgcaaatatcgtgaacagcttttcatgaaaatcggttggttcgtcacccacacttacactgacccggaactcgtcgaaaaccctccttctcagcctgtcatcgaaaagctcaagcgaacgattgtcagcgaggatgtgcgcgtgacgagttacccgatcaaatgggacgaggagacggaacagccgatggatgacgatgaagagccaaacgccgggaatgaggtttcctacggagtggcggccattgaattgacatcgaacggcaacagtcaacaaatgaatatgtcacaacaggaacagacgccgatggcggctgttaactaagcggatgaaagttgcgagcgttaaaaaggacagaacggactcgatgttttatgggtacaaaaaacggatttgatcttcaaatttgcatttatcacttt

SEQ ID NO: 86601 - DNA, 386 bp, Heterodera glycines
gaactgtgcttttttcacggcctaccaacgctttgcccaattggccaatcattcggacaaccaagcgacgctcactcttcggcctggcactgtgcttttcatcgacaatttccgagtgatgcacggacgaaaagcatttcaaggtgaacgagtgatgtgcggttgtttatttgaatagagacgtgtttctggcaaaggcaaggccaaaactgtcgccagaattctaccgaaatgtgtgaagaattgggcggtgtgtgtttaatttaacttatatttactggcattgtaatatttttgttcaatttacataatttgtattgctcatgatcgaaacggttaacaatagacgaaatgtaatgaaaaaaaaaaaaaaaaaaaaaaaaaaa

SEQ ID NO: 86602 - DNA, 399 bp, Heterodera glycines
aaacggccattatgaatgggttggaggcctcccctcgtaatcattcgccggtaaagtctctgatcggcggaggatgggtagagcgttgatgagaggccaagagaggtgtcccccactttcttacaatcaaatcattctccataataactttcgctcttcggtcgtaccaaatggccatccctgaatggaatttctttcatttactgtcgccgcctccgctcatctttgaattcgtcatcttttccttttcccgcctttttccttttcacaaatttttctttcctatcggttttccttcttttcaattcgttttctctttttccgaagttaatacatattacatagttgattaattaggtaggtaatctttagccaaaaaaatttccctgaaaaaaagaa

SEQ ID NO: 86603 - DNA, 564 bp, Heterodera glycines
tgggctctcgtggtgcgtcatccgctgctgttgttgcttctgcagcagcattgtgcctattttcggcaatggcagtggtggtgtacggtgccgaaagcgctgggcctaaagcagaccaggccatggctgccaagcagttcaacccgtccgcatttccggccatgccaccagagcttgagaaaatcctgccagccgatgttgtgcaaaagttgaaagctgtccatgccgatatgtcgttgaacatcatgcagaaacaagacaagattgaccgtatcatgagctccttgccgggagaggttttggaccaaatcccggccccgcccggctttgaacgtctccccgacgatgtgaagaaccgtctgaagcagatcaatcgccaaaccaacaaagcatgggccgacaagcaaaaggaactgcaggagtatgtcaagacattgccgcaggaacaacgtgccattctgatgatgggcccaatgggaggtccgccgccgccaccgcccagctttggccggcgccgatgaagcagtgtttatgtgcatatatgttgtgtcttttgattaatgg

SEQ ID NO: 86604 - DNA, 641 bp, Heterodera glycines
agaggcagaagagaaaaggaaacgaaggctgtgacccgggggagaaggagcgcaaggaacgtgagagtttgatcgaggaagcgtacgctttgtcacaagaggccaacatcagcttagagcaaatcatcaaacggtacaccaaatgccgtaatcagttccttgaacgtgtcgccgaccaaatcagcgaccaactacaacaggatcattctgacagcactgacgacatcagcaccaacaaacatgagcggaagaagcgtccgattgtgttcatttcgccacagttgcgcaaacgggtcaaaatacaacaacaattggcggaagcggactcggccaacgacggcgacgacgacagtgaacaaaagcaacaaaaagaaaaaagtccatttaccattcccggcggtgctgaagacgacgaaatgacagatgtccattctcaactggagcagaaacaacaacagcagaagcagcagcaggaaacagaagcaaaaaaaagtgatgggacaacaaaaacggaggacattccaagcggcccatttgtcaacaaatccaacgtggaggaagtgaccagcagcactttgaacggcaatgtgccagaagagaccaacaaatgcaacagcagcagtgaaattggacagctcaat

SEQ ID NO: 86605 - DNA, 689 bp, Heterodera glycines
aatggactgggcccacttagtcccgaagctgtgaagcaagcgcatgaaaatgacgccggaaaattgaagccatggcagcaacggtatctcgactggatgatcctccaagctcgactctgtggctatttgacggtgaaaaagaacgacaaaaaggcacaactccaacaggaagtgaatttctcgtggaattccgctacaaaccaattctgcttccgatttctgtaatttgcccattcgttccgttttacctctttttcagggccaatcacatgcaggacaatggcgtcattgtccctatcgaacatcgctatttgctcaaaagtgcccctccgcgtgctctcgcgttactctccaaaggaaatgacccggagaatggtccgtgggaagtgacaagcaaaaaacacgacgctcttttcgctgccttaaattattgcagtgcgcgggagattcggcaagggttgtggcagagttacgtcacaagatccgcattcagttcgcaaatgttgaacaactcacaaaacatcgaggaattgcggcataacactgagggctttgccaaagcgcttggcttttcgtcgactgcgcaccaccgaatttcttccaaaatggccgggagtccccaaactgtccgcgtctttgtcgacgaactttccaggcgctttcgtcccgtgtttttctcccgactcgaa

SEQ ID NO: 86606 - DNA, 496 bp, Heterodera glycines
aagaaaatcgttgaatatctacgtgaatattccaccaaagttgactgcattttgaccagcggtggaacagggttctcaaaaagggatgtgacgcccgaagcgaccaaagaagtcattgagagggaatgcccaggaatcgctgtggcacttctgaagaaagggcttgacattacgccattcgctgctctcacccgtctcaccgcgggaattgctgccaattgtctgattatcaatttgccgggaagcccaaaagcagtgagagagggatttgaagtgattgagccgattctgagccatgcgattgccattgtgaagggggatgagagcgaaacttcagttttgcacaagagaacggcttaataagacagaagagactgtctgtcgataagcatttgatatcctatgtatgtgagaggcaattttaaactttacttcattactatgtaccattttgaaaaataaatttttaaggtgaaaaaaaaaaaaaaaaaaaaaa

SEQ ID NO: 86607 - DNA, 652 bp, Heterodera glycines
gattcaaagtgccagtgcgacggtttcgttcaatgctaatcagctaatttgctcactaattaccccaaataacaaaactgccccctgcatctcccaacaatggccaccaaatgccttccgctcgaacttctgtacgaaattgtgcctctcatccctgccgaaaatgccacaccgaatgcgctctcgtcctgtcggctgctgcacaaacttttgctgccacgtgtcatcaaatggaaagagataatgagtgaaaataccggcttccaaaagcaacttcttgaaatggtaaaggccctccatgaaaaagtcgccgtcattgaaaaaagcgtcgccatcattgaaaaaaacgtcgccgtcattgaaaaaaaagccaccgtcattgaaaaaaatgtcaccgtcattgaaaaagaagtcaccgtcattgaaaaaaatgtcaccgtcattgaaaaagaagtcaccgtcattaaaaaaacaatcggcataaagggagaaacgacgggcgttgtggaacaacaatttcacatccgggagacggtgccgacgaagacaaggaagcgggaaacggaggaaacgggcgcaagagatcgctcagcgaaagctgcagcgggactttgaaggatctcgaacagacgctgcatatggccaaaactca

SEQ ID NO: 86608 - DNA, 628 bp, Heterodera glycines
tattctcgactcaatgcctcatacaaacattcaatggttttccattatgaactcactcgtcattgtcattttcctttccgggatggttggaatgattctcctcaggactctccatcgtgatattgctcgctacaaccgtcttgacgaagaggaggatgcgcaagaagaatttggatggaagcttgttcatggcgatgtgttccgcccgcctcgccatgcgttgcttctttcagtgttcgttggtacgggcagtcaagtgttgctttgtgcttttatcactcttgcatttgcttgtctgggatttctttcgccagctaaccgtggctctttgatgacctttgcactcgtttttttatgttttgttcggagttattgctggatacgtttcctcaaggatttataaaacgatggagggcctcgcatggaaatcaaacatccttctcacgagttttcttattccgggaattatctttggagtatttttcgtctcgaatttgatgttatggtctaaaggctcatctgcagccgttccttttggcactctgtgcgctctgctttttctctggctgttcatttccatccctttaacttttgtcggcgcttactttggattcagagccaaacgaat

SEQ ID NO: 86609 - DNA, 552 bp, Heterodera glycines
atccttctgattgtgcttttggccgtcgtctcattccgtctctcggcttctactggtgacaaaaaaactgctaatgatgggagtggaaacaactcatcagctgggattggtacgaagatcaaaagaattgtcaccgctggactgctcttcacttccctggcgacgggtggggcggaagcgattgggcgaagcaatgctcagggaggaaatgccgccggattggtgccatcgcatgtgaccaatcgctcaatggctccaccacctcctcctgtgcaatttgaaatgggggcaaatcgattagaaaaaatgagggcacacctacgcgaacttgctgagaaaatgccggtcaatgaatcgaagcgtctgtcaccgagtggacccgaccctcatcatcattagggccatggatggatctaacggaggaagaaagaatggatgcttagttttcagattttattctatcctcttttatttattagtttttcaaaacaaatttcttccacaactttttaaactatttgttgttttgaatctttttagataaatctaaac

SEQ ID NO: 86610 - DNA, 606 bp, Heterodera glycines
gatgcgaattgcactgatttccttgatgacggagagaatgaaattgagttgttgcaagaagctaccgacaaaacggaccaattagatttgaaattgaaaaacaaaaagtcaaagtccgttgggtccgaccactttttcgatgtccgttcaaatcaagttgctgcatcagcaaattgtgctcatctctctttcaccgatctgaatttgagccgacctctactcaaatccatttctgaggccggttttcaaaacccgaccccaattcaaacggcttgtattccggtcgccttagctggtcgtgatatttgcgcaagttctgcgacgggcaccggtaaaacagccgcttttatgctgccaattctcgagcgtctgcttttccgtccctcacggcgaacttctgtcactcgtgtgctcgtgcttgtacccacacgggaattggcaattcaagtcttccaagtcagccgacaacttgcaaaatacactcaagtggaaatttgtcttgctgcagggggactggaccttaaggcccaggaggcggctcttcgccttggcctggacattgtcatcgcaacgccagggcgactgattgaccatcttcacaattct

SEQ ID NO: 86611 - DNA, 723 bp, Heterodera glycines
gcgtgccctggcccactctttcgcaattcgtatattcatttatttttccatattttgattttccattgcttctgggcgtagtttcattagattatttgcataaacttttcgttaacaattttaatgctacttaagttaatttttcaaagaaattttaggaaggaagggactgatgctgcgaaaaattgtcaacaccaataaattttttgtccaaaaaacaattttttgcttattatttttcaaattttaaaaattttggtacttgttgattatttatgcggagattttaaaaaaatatttttttttgtaatattaatcgggttttcaaagggtttttcttattagttgagaatttgtttagacttatttatcagcaaaacatttaaaaaagagagcaaaattataagataaaactgataaaaacaactgaaaaagcataatggtcagagacgaaaattaacgccccaattgtgtgtaaatgtttatttattgagctgatccgttccgctgcatttccttttatggactgaaagtgaattgctgctacttgagctgcttgaatatgtacgtctcaactcttcttcctgatacggctgttgttctccgtttttcatggccgtaaaaataaatttttttaaatataatttaattaatttttattaccttccaacgagtgccgagtatcttcgaaatgttgctgttttccatgtccggacactcagc

SEQ ID NO: 86612 - DNA, 638 bp, Heterodera glycines
  unsure (1)..(638): unsure at all n locations
ggcttctcccccctcnccaaaagcctcnctcattttggaggcacaggccgattttgcgttgaaattgctgcgcgaagtgtccacggacgaccgttcgtgcattgtttcgccgttttctgccgccgtcactttgtccatggtttacgcgggcgccaaggaaaagaccggcgaagaaatgggccaactgctggcaaatggtgcgcccgagtcggaggtgcacaaatacttcggtgctttgctcaaatcgatcacaagtggaacgaacagcagcaacactttggagacggccaacaaattgtacgtggggaagggcagcaaagtgaaggacgcgttcaaagagcaaattgagggaaattacgggggacagtttgagacggtggactttttggacggcaaagggacggcggagaaaatcaacaagttcgtgaaagaagcgactcataagaaaatccgcgatttggtcacgcccgacaattttgacgggaacactcgtttggtgctgatcaacgcgctttacttcaaaggcacatgggcggacaaattcgactcaaaattcaccgaaaaagcgaaatttcatgtggacgcgaaaaacttcaaagagctggaaatgatgcatttgacagccaatttcatttatt

SEQ ID NO: 86613 - DNA, 585 bp, Heterodera glycines
ctggaaaaagtggtgacttatccgatgcatgcgcagccagtcccagcggagagtcagttggcttcgggctttgaattcggcggatcgcggctcagtgccgggagcaatcagtttgggggaatttcaaacatgggcaacaattcggaagcaatgcatgggaaatcatttggagggccttccttcaaattcaatcccctccaggggacgggaaacaacgagctgttgacttttctcgacaatttgcagtccactttgcgctcttccggattcaacgaccaatcggtgtcagaggtgatgcaggcgatgcaagtgctggccaaatacaacataatgggtcttggcctgggcctcggtgttgcggcgatggcccaaatgcgtaacactgagagtgcgatggcccagcagaatgtgctgcttggtgctgccgcatcgaatacgccgttgcaacagcaacagcagcgctacgatatcatgtcacagtcgaacatcaccgggtcactgttggactcgtcgcagaacattgaccagtcaatcgttggaggatcgggcggtgttctgatcgatgtgatgagccaaaagaagtcg

SEQ ID NO: 86614 - DNA, 658 bp, Heterodera glycines
taacttcctcccgggttcaaaatgggcccgaccctttcgttcgtctcttgcatttctgcaacagcgaagaaggcgaaaccatcgaattgcccgaattccgaatttttgtgccggacacttatgacttgggcatcctcgtgttggaccagaagactttgcccaattccaccgttaatttccccgtgcccgagaacccccgtcgacgcctgcagcaggcaaaaagaccgacggaagtcggcactttggacgaaagcaatggcaaaaagggggcggaagatgggtttgtgactgtcgacgcgccaaaaagtcacaacgccaaaggcctggacgaccttttgccgcccggcaaaacggtgaccaaaacgaacggcgatttgttgtgggagacgcaatcggtggagatggaggaagtgccggccgaatacgacacgtcgatacggcaaagtcagcagcacaattgggaggaagagtccaacgatggaaatgaaaggaaaaattggacgaagaaaaagcaaccgacgaaggaagagaaaaagaggaaatgatcagacagactcactctgctgtgatggcatttcctataaatatcctaattaccctccctaattacccctccccgcttttctatggaatgccctcaaccgaccgacactttgtg

SEQ ID NO: 86615 - DNA, 562 bp, Heterodera glycines
ggaggaaagaaatgcaacagaaagagtgaagagaagtcggacggaagcggcggaggaggagaaaagggaacgattggacgacgaggaggacggaggaccagccgaaacggcggaaggaatgaagacaaaacggacgaagaaacacacgttggactcggacgaggaggacgaaacggagggctaccaacggctggacatggacaaggtggagggtcaggaggagtcgaccctcgaatatgagggacacgtgaagatcatgcctttcaacatgaaagacgatttggaggaggggcatttcgacgcgaacggcacattcatttttgacaagaagcaaagtgtgatcaaagacgcgtggttggacaacatcgagtgggacaatgtgaagaatgcggccggcaaacattggggcaaattggatgacgaggatgacaaaaaggcggacgatgagaaggaagtggagccgaaggaagtgtatcgacgacttatcgaattgctaaacgaaaaagagacaattggcgctgcgctgaagagactgaacaacgaaaaaaagtcaaacgcagcg

SEQ ID NO: 86616 - DNA, 675 bp, Heterodera glycines
tttcgctcttccgaaagtctctgaccaattaccaaatcactcaaaatgccctcctcaaaaatcgcttcttttacgaatttctgctcgcaaatgaccggcaagtggcgcgagaagtcaaagacgaatatgtggacaccaccagcaaaatgttcttttcttatttcaaggcgtacgtttcccggctgtttaaatttcaaatggtcgactctgcgacaaagtccgatttgctcggggccgaggacgtggtcaaacatcccacgacaatctccgcattgccgagtcttttcacttccggcaaaacccaccaaacgcgaagtcgagcgacggttttttcattgggtcatcgccaaaatttgctgctcgatgatttgttggctccgctcattgtgccccacgtggcgcaggaaaataacgaaacgttccaattcgaaagtctttttcggagtgttcagtacgctttggtcgaccattgcagtcatgagtttctgttcatttgtgattttttcatggtcaatggtcagtcggccgtcgatttatttacttcagtgatgggtcggtccatcagccttttattgaaaacgttggaagaaaaaattgctgccaatttcgatgcgatttcgctttttctgtgcatttgtttctgcgcgaaatttcgcgaaatgatgggcgaccgtg

SEQ ID NO: 86617 - DNA, 753 bp, Heterodera glycines
tcctcttcactggcgtcaacagtcactcttccgtcgttgctgtcagtgcgccgaaaggaattcttctttatggaccaaatggttgtgggaaaactctgattgcgcgtgccattgccaaagaggtggatgcgtacttcatcaattttggaacttcgctcgtcgattttgtcaacggatcatccgttactatgaagtctctgttcactttggcagagaaaattcagccgtgtgtcattttcatcgatgaaattgatttgctgttccatcgcaatcggaatgactttcagctgctgaagacgcaattcctcgcgcaatgggatgagtttctgcgctgcaattccaactgcaacgtgatcatcatcggtgccaccaatcgtgtgctcgacttggttctctgccgcttctcactcaaagttcacattcccttgcccgatgaagaagcacgcgagaagctcctgcgcaagattttggctaacgagaatttggaggcggactttaactacgccgaagttgttgaagcgacgcaaaagatgagcagttccgagctgaaggaggtcatccgtttcgcgttccttctgcgctaccagcaagtcgtccaaactcagatcagtgttcttcagcagtcgtcttcggtggccaacgagggaagcgaaaatgaagcggagaaaatccaaatcaaattgtcgcacaacgacatcatccgagcgttccacgacttgaagaatgtatcgatggcgccattttccgagtcag

SEQ ID NO: 86618 - DNA, 215 bp, Heterodera glycines
ggcataatcgaccgcggtaccgaatgatcaacatatttggaaccgaagctcctacgcctgtcggaacactggacgagcctcgactcatagcaagaagacatccacaatcaaatcgaatgtctcactattgtatagctctactgaagtgcgtttaatttattctgggaatgacgacgacctaattggcgccagcagcaccggaaagagtggcggct

SEQ ID NO: 86619 - DNA, 402 bp, Heterodera glycines
gaaccgcttcagtgcccaacgcaacgcaatggccacttacctattcctcgctgcagctgccttcggagcgggaatttactgttggaagacgtaccttggcccgatgcttgaccaaccgaagagcgacgacgaggagaagcccaagccggaaggaggcgaagaagcgacgaccgccggcgaggaggagaagaaggctggcagcaagggcgacaagcacaagaagaaggacaagaagggcgaaggcgcagcagcagcaccagcggcggacaaaaaggaggagaagcgcaaggacaaacacaaatccaaggagtcggggaagagcgacgacagcaaagcgggcaagaaggacaagcacgggaagaaggacaagaagggcaagaagaaggacaccaccgatgcatc

SEQ ID NO: 86620 - DNA, 576 bp, Heterodera glycines
ttgttttgatggtaacgcgtaaaagttccctaaaaatgctgagaaattcgtgaaatgatcaaagagactgccattccgcccaccgttttgcgagtgcacaacgaacgggtgaaggagtcgcttcagttggtcaacaacgaatacttgacgaaagcgtccgttcattttgacacaacgccactccatgtcgattaccgtgttcttggtccgccagcaactctctatcggaacaaccatcgtgtcactcctgccacgtcaaactgtgaatggcgtccgggtgacgctttggtgaatgcacaaattggcacctgggtagcctatgcgtttgggaaccctgtgggtgactcggtgcgacgattaggcctaaccgaaacgatgtggagaaatttcgtggacaagtatgcaagtgaaatgcgtaacaagggcattgtttgtgtgcctccggtgcgtgtctctatttgctggtatacgtccgtgaacgaggtcttgaatattttgcacaaggaagctctgaacgggggcgttgagttctgtctcattggtcatgcgaaaggctctgagggtgatgatgtgcat

SEQ ID NO: 86621 - DNA, 532 bp, Heterodera glycines
cccggctctcgagttgtgctccaatggagcattgtgcaaagggtggaaagccaaaaatcctggacaactgtacacttccgttgaccggcaaaaatgttgttcgtcgtatcatcaccgaaatggctgtgtttgatgttcacccaacggacgggttgagcttggtggaggtgtacgaaacgttctcagtggaagatgttgtgcgggccaccggctgccaatttaagatttccgaaaatttgaaaccgatgttacaggcttgattgatcacatgaaaattttttgttcggattattaaagaaaattacagtaattcacttaatgattttttaattgtgatatttttctcttgccaaaccgttgtgttgttccatattacttatacttaacatattcaatcatacatatcatatttgtatatgattttttttttatcacttgtgttgcttttctgtataatctttcgattcttttttccaattatcattaattgcataaactgtatttaacaaactcattaataaagtctttaaca

SEQ ID NO: 86622 - DNA, 459 bp, Heterodera glycines
cgatagaatttattcactttcctaatataagtttttttgtaaaaatgagcaactttatatttgtcgcctttttaactgcagcgttttttagctcaggcctcgctctaccggctccttatgatgctgaatcggtggtatcttctgaattaaatgttccactactttcagctgacgcaaatgttgaagcagcaattaccaatgaaagtgattctgctgctgagatacaagctccatcaattccggtaccaattgaacaacaaactgctgctgcatcatcatcatccacgccgaaaagtgagcagacgccaaaaaaagtaatgaacatgaaaagcgcgatggaaggcgcggcggccaacgtgtacggggggcttccgttagaccagcagcccaagacgatcgctgaagcggcggcaaaagcaaagcagacgcccgccaaacttccggctgactacgacgtga

SEQ ID NO: 86623 - DNA, 574 bp, Heterodera glycines
caactgttgcgaattgtgctcagtttggctttcgtgtggcaacttctttcacttcaccaattctgcggcacatttgtctgtccaaaggccttcctccatgacatctctgttggccactgcaaacgctttacgctgatcggaaaggactcaaagacgggcgaattcggcgctgtgttggacgagcgcaaatggcacaaccaactgttcatgagcagcaccaacggcctcccaatcaaagaacagcagcagcaattcatggacgaattggccgccaaattgccgtgccctggacgccactgtattccgattacgacgccttcgttttttttctggactgagaagaacagaaatctcctcgacactgttgtggactccttttccggccaactgttgctcgcattgtgctcgcttctcaccattggcattggcttcgcccggatgttacgctctgcggcagaatacgaatgcttcgactattgcatggccctctattctgtcttttgctggtgttgctctgcttgggcctcatcgtatttgctgctctattggacaccttattggtcttgcatgaact

SEQ ID NO: 86624 - DNA, 276 bp, Heterodera glycines
  unsure (1)..(276): unsure at all n locations
aattaaaatgcgaggaaaggcgtgcaaatggtccaaatgttcccataaaatccgtcctccccttttgttcgcatcccttcgcccgtcncattcatccgctgctgcactcttacgattagtgccaaacattcctctacacaatgctttatctcaaatccttatccccccttcagaccaaatgcgcggcatttgctggttgatctgccctaccaaattgacttttttttgtacttcactaatcagacaaacgaacaatatttatttaacagctgagag

SEQ ID NO: 86625 - DNA, 559 bp, Heterodera glycines
ctattcccaattcgtcaatgccttttctggtccacaaattctttctcattttctccaaatggaaatggccaatgcccgtccaattgactccaattgatcacaaattcttcggcacttttttgagttggtctccgttcggcgattggatcggccgcagagatttggcatgggaaaaagcgcggagaaagcatcgaacgaaaaaagagcagcaaaatgaaattgaaaaggcaatgaaaagcattcggaaggaattggcaatggcagtgataatgccgacaattgggggacgaaatttggccgaaaaagtgaacatttcgagcgcaaaagtggtggagaatgagctgaagcgagcatgtgacaaattgagaagcaaaatggaaacaaaagatgaagcgatagcattcactgagaagtacgaacattttattgtcatcgaatgcaaaggctcaagtcacaacgtggacaaattctgcgattttgtcggaaaaaggctgcgctacgaactgcttgaatttgtggagaaccctttggccatttgggtggacttttgccacgtccg

SEQ ID NO: 86626 - DNA, 683 bp, Heterodera glycines
atacttcggaccttccaattttgccgtgccgaaaatccattttttcttgaaattcacaataaaaaggcgcgaaattcgcttaattggacgggaaaacttatcgcagatgaattaggacaattcgttcgtgccattcgcttggctatgggtgtatttaaagatggaacacaaatggctcgttttgaggaccaattgccccccgccaaaatgataagtcctgactccacgtcactttatatggcccacattcgactcgaaagattttgcgcttccgagcatttccatgttggaaagtttggtttagccactcgtcagatcgccaatttgttgcgggcgttcactcagagagtgtctggcatttacagcttggagcgttgttccttcttagccgattctttgttccgtttgttcaccaaattttatgaatgtatcaaatggcatttccgacaaagcccaaataaaagcgaaatcgaaaagtttggagcagcaattctcaaatttggccgttttgtttgtgggacgctgagagagggcgacaacgcgggttccttttgtctcccgagctcgactacgataggcaccgaattgctgttaccatccactcttcgaaaaataaaacagaagacaaaaggaagaaaagagcaaaaaacaatcaccgggagaataaaagtttcgacagagaa

SEQ ID NO: 86627 - DNA, 302 bp, Heterodera glycines
agcctttttgggggataggcgcatttccacacgtgaccgttcacatggggtgtgttcaaatttcttatatttaaatgtcaacaaaacgccgcctgcttgccaaaaaatttccattttttggctgtgatgctaatcagctgcttctcccccccccaacccccggtgttaattcccatgacattgggctaagctttggtgtgattcacacattcatcagcccttgaatacgaatgttgtatacataaaatttcttctcatatttacataaaaatctgtccccaccccccaaaaaaaaaaaaagc

SEQ ID NO: 86628 - DNA, 659 bp, Heterodera glycines
gagtccttagtgagtgactcctccggatatttatgcggttcgccatgctgaacgtcttgacgacagtgaaaagcgcaaggtgtggcattacaacagtcgctttgccaaggacaatccgccgctgtccccgcgcggtgtacaacaggcggaggaactgtcggtcgaatttcggaacatttccatcgactactgcttcacctcgccgtatgaacgttgcgtccaaacggcgtcaaaaattttggagggtcgttcaacactgatcaatgttgaaccggggcttattgagtcatttaatctgatctgcgatcgttccggtgtacagaaaatttcgtttcagacgggcaaagaattggcacaacgatataccaacatcaaccggcagtacgaaccgatgtacttggcacctccggaaatcgaaaaaagcaaaggcgtccatggatgtttcccccgagttgaggacaccttccgtaaaattgtggccaaatgctacggcgacattttgatcgtgtcccatcaaggcccagtggccgccctgcaacggatgttgaccggaagcatggaattcggggggagcgcaacagtgagcaagtatgttgaagtgcccggcatggctggtcgatttgaagcggaatatatttacgactcctctcacttatccg

SEQ ID NO: 86629 - DNA, 579 bp, Heterodera glycines
tgcatcgtccagcgagttgccaaagggtaatggacgcaatggcgttcgtggcgaggaagaagtgaagggaggaaaagaaattgctagcaagacacttaatattcaatcgaagcgtttttatttggacgtcaagcaaaatgatcgtggacgtttcgtcaaattggctgaggttgctatgaatggtcgaaagaatcgtttgttcatgtcaatgcgaatttgcaagaatattaaggaattgttggggaagtttgaggggcacgtgccagcgtcggaggaagtgaatgggaaagcggagaatgtgaccattcaatctgaatctatcgtgaccgagagacgtcgatattacatcgaccttcgcgaaaatcggcgtggttcctttttgcggattactcagctcgagacgcattccgggattcgcaactcagtggcattgccatttgaggggatcggccaattgcacgatgcactggactcaattctggaggaatatggcgaagggttcattgaggaggaagccgaacttccccattctcagatgattcgtactgatgggaaaagctttttttttgatcctggcca

SEQ ID NO: 86630 - DNA, 556 bp, Heterodera glycines
catttgatgacgacttcaaacccaacctttcaactgcagttgatgtgaatgtccaacaaaaacctgtagacaaaacatcagcagttggtgacatcgaagtgaaaaataatgaaattgttcaaaatggcaaccaattgagcaaagagagcgtttcaactgtaccatatgaacagcagcatggtcaggtgatcggacaagtgaagacggtcaaatacaaagcgctcttcgaattcaacgctcgctccggcgacgaattgagcatacaaccgggcgacttgatcctcgtattcgagggacaccaatccgagccgggttggcttgctggccaaattcgcgacaaagtcggctggttccctgcctcttttgcggagcccctttccgccgctgctgctggcccattactgaagaggggcggcagtttggccggctctccttccggcgaacctttggccatcattcgcgaggagtgtgagccgccgccgaccgggcaaattcaccccacggaacaaaggcgtggaaatgctttcgacaccgacttcactgctgcatttacgag

SEQ ID NO: 86631 - DNA, 543 bp, Heterodera glycines
cctgttttgttccacacggcggttccgttgtcgcgaaatgtgccaccaaaaattgcgcttgacatgctgctgactggacgtttcttggaagctaacagtgagttttatttattgttaatttttgtatttaatcaaatgttttcggtccattttttggatttttttttgccaaaattcttttatttttttcattaattttttttttgctttgtccattttcagttttccatgggttcaatcttcattaattttggtattcttaacattttctgtatattcttccacaattaagaaaaacagtttttttgaaataaattcttttacaaaaaaacaaaaaattcaggaaaaatttgctgaattttccagaaaaaaacgtacaattaaaatttttttttttcatttccttgaatttcattattacttaatttttatttatttttggaattaagcaagaggtaactaaaaattttttcatttttttggcgatgttttattcggctccgccgcctttccccgttcgaaaaaaaaaaaaaaaaaaaaaaa

SEQ ID NO: 86632 - DNA, 711 bp, Heterodera glycines
tccgaaatgatggaggcgtgaatgttggcagctcgtctgctgaattggcattgaatgacgagaagagttgggccaattacagacgaagattggcaacctttgatgtggccagtcgaattgcgaaaccgaaggaaatttcgcctgttgtgtgcgcacgtcatggatggaaaatgtgggggaggagtttttgcaatgcgacgactgtggcaaagtgttatacatcaaattgccggcgacgaagtgtccaatcgcgtgctgaaccattgcattcgacacattcaacgcaaattggtcgaagcgcacaccgtcatttgcccatggcgcattagcccggggctgaacacttccgcaacctatgacatcactgcgcgttatcaccaactggtggacagcggccagcccgaacttccgttggcggacaatgtactcgacgaagcgttggccgacaaatttggcgtgcagagccgatttttcttggctttggccatttttggatggcttccaatatcaaaacaagcgacaaatgacgtggagatgaacaaaccgcagccgaactttcactgtcccctctgtggacgacatctttgcgcatcggtgttttccagtaacaatccgctggacccacgcgaacaacaccagcattattgcccggtggtggaggacagtgtcagcccattgtggcgcgaatgtcttcaaatgtgcaccaactga

SEQ ID NO: 86633 - DNA, 538 bp, Heterodera glycines
acgactttctctttttgattgaaaaaattcgagcaaagatggagggaaatatgtggaacaaataacaattatgttgattttatcgtccccaactccgaggtccatttggcaaattttggcgctattgagaacgcccatttgagtattttaatacagaatttaatcgatgtgatcaggtcgagaaatgcacgacaattagtgaaagagtttggcgacaaatatttagaggaagtgatgaagtttctcgacgaagcaatggcagcgtcaaatgagtctctcccgcttgccaaaattgtgcctgttttatgcgacgcctttgccaaaattggcaccgtttctttcggctccattttccattctttgctcagctcaacggaattgcacagattcactctttttgtatcggaatgcagcaaacgcgatgatttgttcgatgcaaatttaaaatgaatgatcaaaaattggtcacttttgaactgtccaatttataaaacaagtataactttttatgtacaaaaaaaaaaaaaaaaaaaaaaaa

SEQ ID NO: 86634 - DNA, 318 bp, Heterodera glycines
  unsure (1)..(318): unsure at all n locations
gcaacctgnaattgtgccaagggcggagnnctggcatctccggaggatggaccaatttgagtcggccagttggggggaccaaatcggtgctgcataattgagaagactgcgagcgatggctttgtaggtggtcaagagtacttcttttgattgtccccaggttgttcctgccaaancccggaggatgttgttgcgtttttggatttttgatcggagtttctctgaatgggcattgaatgtgaggagtgggtcgaaggtaattccnaggagttttgggttgcgcaggaagggatagggccgtcaatggtgtgaatacgc

SEQ ID NO: 86635 - DNA, 735 bp, Heterodera glycines
acgaaggcgaaaaatgcgcttccgattgatccatgccggctttcggcacccattggtggtgcacattgagcagcaccaaatggaagtgatcgccatggatggaaatgaagtcaaaccattccgaaccgacgcattgatcatttacccgggagaaagattcgatgtccgagtcactgcccttggccacccccgttggcccattcaccgaatggtggtcggattggccgagcagtttctggcagaaacagaagaacccatttacgggttggccaacttagactatcattggcacggagaaactgccgacccaaattgggacggtggcgaaaaagttgattttctgctgaatcgatgcactgctcgccaatgtgtgctgctgggctgtcccttcagaacagaaaatggcacattcgccgcattcgacggacgcaaatttaaatgccattccatagacgaactgagaaacaatggcaaattgaacaattatccctccgggcatgggtatgattaataaaagcgaatttgattgattatcacttccaaatgctcacacacaaaaagaaatgatgatgatgaagtgattgaaagccatcacattttgttggactccgaccagaaaactgtcgatggtttccgtttcaaaatgcccgcggcggttgggcccttttccacacgaaacggcgtggaaatcgcagaagcattgcgacgggacaactgctcgcgctgcgaaagcaa

SEQ ID NO: 86636 - DNA, 359 bp, Heterodera glycines
ctgtcgctttgaattttgctgcatgtgcctcggtccttgggccccgcatgtttcaggctccggttggtactcctgcaaccgctttgacgatgacgcggctaagagggctcgagattcacaggagagatccagggcggcacttaaacgatatttgcactactattcacgcttcactaaccaccagaactctctcaaactggagagaaagctttttgaaaaagtgagcgaaaaaatggaacaaatgcaggtgctcggcttttcgtggattgaaacgcagtttttgcagaaggcggttgaaattcttgtcgaatgccggcgtactttgatgtacacttacgtgttcgccttttaccttgtcc

SEQ ID NO: 86637 - DNA, 612 bp, Heterodera glycines
tgccggagccggtgttcgcattttggcttaaccgtgacccgacctctgaatttggtggtgagatcaccattgggggcactgatcagcgacgatttgtggccccaatcacttacacaccggtcacacacaaagcctactggcaattcaagatggattcgatcagtggaggtaatggcaaacttgcgtgccaaaatgggtgccaagccattgcggacaccggcacttccctgcttgctgggcccaaaaatgacattgaaaagattcagaaacacattggagcaattccgctcttccatggcgagtatatgatatcatgtgaacgtattcccacactgcccgatgtgacgatcaacatcggtggcaaggcgtacacgttgaagggcaaggactatgtgctgaaaatgaccagcatgggcaaaagcatatgcctttccggttttatgggcattgatttgccggaacgtgtcggagaactttggattcttggcgatgtgtttattggtcgttactacacggtgtttgatgtgggccaaagtcgtgttggttttgcgcaggccaaagacggaaatgaaattccaattgagcctcaagtgcgcgattgcgtaaggggag

SEQ ID NO: 86638 - DNA, 294 bp, Heterodera glycines
atcctgacgatgggtcgttgagtccagagagaggatggagcgaattgactcgatcatttgcactctgccggagaatgtcattgaccaaattccggacccgccagaagttgcgcaactcccggctgatgtgcgccagcgcgtcaaacaaattgaacgccagcagggaaagtcattcagcactaaatttgaagagatcatgaaatatgtggacactttgcctgaaggcacaaaatcggctgccaaaaacattttccattgaatttttcatggaaaaggaggagaggaaagaagtgg

SEQ ID NO: 86639 - DNA, 550 bp, Heterodera glycines
cgacctccgtccgcacccgactacttcggtcgtgtttccttcgctctcagcccctcccaaccgcctttgactgtcaattcgaccgtcgtcggcgttccctcctcccccgtcaacattccgccatgcgtcggccattgcgacatttgctcggggcgcatccctccggatgagcatttcccattccattggcaagccaactttacccatgtcatttgctgtgttattccgtgcgtttcgccattcactccctatggtcttgcgccatacaccgggcttaatgacggcaccatggatttggcattgatccccaaagtctcccgtttcaccaacttacaaattataagaaaggtggccatgtacggcgctcgtttcattcccgatgagtaccccgacgtcaaagtgtaccgggtgtcccgttggaagttcacgcccgaggcgctcatcgttccgtcaggggaggacacggacaaagccgcggagcaggggcagcactcgggtgcttggaatttggatggggaaattctgcttcagccatcggaccgaccattgc

SEQ ID NO: 86640 - DNA, 689 bp, Heterodera glycines
tttttgtttctcgctgatttcaaagaaggcggcctattcaaccgtttatttcgctaagagcgccaaaccagtcgaaaatttgcagtgaaaatgtgtctcaagaagaaaatcatcaaagaaaaaaaggtgcagcaaattttccgtgaacgtgacattctccgacttttgtccacgcccgcaaatgcgtgcccatttgttgtccatttgttttgcacatttcaagacgatgagtcgctgttttttgtgctttcctatgcgcccaaaaaagatcttatggcccggctgaaaaagctccaacggttcagcgttggccagtgccaatttgcgatggccgaacttttcttggcactcgagcacatccatgccctggacgtcatccaccgtgatgtaaagccggaaaacattttgttgcgcgaggacgggcacattttgttgtcggactttggctgtgccaagcaaatcattgcaaagcgggaaaatgtggcggaggaaaatggtgacaaaaccgacggacaaagagcagatgatggccagaaagcagagaaaagtgctgacagcaaaagcagcaaaaaacgggaggaggaggaggcgacaaagctggcactgagacggcggtgctcatttgttggcagtggcgcctatgtgagcccggaggttctgaatggcaaggaagtgacgggtgcatgtga

SEQ ID NO: 86641 - DNA, 770 bp, Heterodera glycines
tggaatcgtacgctgccggactcgttcaaagatggctcaccaaactgcaaatttcaaatcactacagtaacacagtgaagggaatatgccgagacaataagggatactgtagaaaactttaccgctatttgaatgccaatttggaatggatcagtgcacagattgatgccaacccaggcgatttgtactggcgccaagtcaatttgacattcaatcagctgaccggaatttttgacggctatgcgatggacagcggaaaaagcttctctccacgggttaatttcaccattacgcccatttacatgatccaaatatcgggcgaactcattgatctgagcattttgttcaaaaaagtgcccagaagcaaaggagaagccgttgaattggccgaggcggggcattgttcggggctggtcaaagtggcggcgggaaacagcgatttactaatgtcccatgttgcgatgagcggcttcaacacaatgaatcgcattgtcaaattgtacaaatttgcttatgacccaaaggatgtccctggcttcgccgtttccttttcgggttatccggcggcgcttgcctcggccgatgactttacgctgacaagtgccggattgctttcaatcgaaacgaccatttcggtgttcgacaaatccctgtacagtcaatttgtccatccccaaggccaactccattgttggctgcgatcgtacatttccaaccaattgacttccaccgcgcacgattgggtcaaaatttttgcgcgtttcaattca

SEQ ID NO: 86642 - DNA, 758 bp, Heterodera glycines
  unsure (1)..(758): unsure at all n locations
atgtattaatttttttttaatgcgaattccttcctacaatagagtttancaaattctgctgtaactcaaaaagctttattccttcctggatatagcatatattttgaacaaacggaattcgtataacacgacagaggagcagtgctcgcattaattggctgaccgaactcaccacgcgcgattcaactccagttacaaccacccaaacttcaaaggatttttctgaaatcagcaaacatttagcgctcgttgaggacgaagacaatattaaaaggattcaagcaaaacgagaaaaagaagcccacgaacgcgcgttggcttttgtcaagaatcagttattgaactcgcggaaagacgactggctccatcaaccaatcgaagaattgcttggctacgcaccgaaatactaacggaatggcgaagcaatgctttgttactgttggcagtacgcgttttgacgctttggtcgaatctctgttccgtagcgatgttctcgatgctttaaagaaactgaaagttgaatgtgtgacaattcagaatggcaatggtgtaattcctaagcaaatacaatccgccatattaaatcaaacgcaatgcatcattgacggaataacgtttcatttgttcgattacaaagccagcataagggagtatttacaaagtgcagaattaatagtgggacatgcaggggccggcacctgcttggaagcacttgagtgtggaaagccttttatcacagttgtcaatgattcactgat

SEQ ID NO: 86643 - DNA, 387 bp, Heterodera glycines
ttaagaagatctttcttctaaaacgggagatttttccaaatgtttccgttccgttttctcttcgttttcgttttcgctttgctcactttgtgcggcttttctcacatgacattggcacagcccggaagcaatgggccaattggcgaacctaacaaaatgttgcgcatccgccgggaaaatgaacgcaaggaaaattgacgttttccatggaacgaaccaaagaggatgaagatgaccgaagaacaaaaaacactattagcaattaaatgccgttttcattgttactttttagggtggtgttttggtataaaatcaaaagcttgaaaaaaaaaaaaaaaaaaaaaaaaaaaaaaaaaaaaaaaaaaaaaaaaaaaaaaaaaaaaaaaa

SEQ ID NO: 86644 - DNA, 702 bp, Heterodera glycines
ttctctagtctgaacaagtccaaaacgtgacattcgtctacaatttatccatttcattggcattgtacggcctgtttttgttttacacggccactcgcgaccttttacatccctacaatccggtcctgaaattcttgacagttaaatcagtcattttcctgtccttttggcaaggtatattaaaatagatagatccaatgcaagtgtacacttctcctaggtttccttctcgccgttttgggtgccacttcagccattgaccccatttacgacttggatggcaatgaaatcattggcaggggcaccgttgccgcgggatatcagaatttcttcatttgcatcgaaatgttttttgccgccattgcccttcgtttcgcgttcagtgtttctgcttacatcgatgcgcatactggtgaaccattcgaattataagcattgaatcaaaagtcttcagtaaccgccggaagtgatgtcaggcctatgactctgcagagcatttccagttcgctgaaggagacgatgaaccctcgagacattatgcaagatgccattcacaatttccatccacaataccagcagtacacacaggtcattataaaaattagttgcttcatcagtttgattttttagcattccaatccttgtcgatcggtaagcttttttggcgctatttgaaaaatggtcatattgcatttataaata

SEQ ID NO: 86645 - DNA, 540 bp, Heterodera glycines
tggggaaatttgccccttatttccttattttcttttttccactttcattcctgttgctaatggtgtgatcactcgatcactaacacctcgacgtggtgctgctggtgaaatggcccagaatttgttgaactctaaccattcgcgtgagtcccttcagaagacaagtcgtgtaacattctggatgatgactatgttgagcctagtcttggtgttaggcgatattcagcggggtcgtcatcacggactcgtacagtcaaagttatgactgaattcaaattacttggacaaatttggcccgaagacgtctacatcatttatttggatacatcaaaatttgacaaggacgatcaaaaacggataattggccatgatgaaccagatgtgttaaaaacagcgagtgacggaagtttttcatggaaatttttggtaaagcacaacgagtcggacgaagacattgcggtggacgtacatatgcacatttttgggactgttccgaatgaaaatcttcaccgcaacattgtgatagcagaagccaactcg

SEQ ID NO: 86646 - DNA, 558 bp, Heterodera glycines
tatgtttgtgcttgttcttttaattgccttacttcaattatcacttccattcaccttatccgagccgtctgtcgagaaacaaataaatggcgaaaaccaaatcaatttgatgagtcggctcaatgctcatgatttttgttaacaaattccgattttttattggaatatagcgacgagaaagcgctttcagcagtggaaaatggattttttatgcgatgttccgatttggacgagcattggtttgattgtcagagtgtcaccgaatcggtcaatgccactgacatcaatcaaatggaactgctttgtccttatttcggcatttcgaagggtccacttctttttgccaatataagctgccgagttttgccatgcattgaatgctatgggacaagaaactttgcgaaagaatttccctgtaaaaagtatactggtcattactttctctcggcacttctttattccattttccttggaccttttgcggttgatcgcttctatttgggttattcggcgattgcggtgggcaaattgatgacattgggaggattgggtgttttg

SEQ ID NO: 86647 - DNA, 584 bp, Heterodera glycines
gttcgtcaataatgcacggcgacgggggcagtccaattgcagcgcaacaacgccactctccgacgacgctttcccgtcgttcgtccagtgctcgccctacaccgtcgttgtcgcccgtttacatttgtccggtccgcgaggcgatcactgccgagcacgcagaccaacagtcggcatcgctaccacatgggagcgccgctggcggtggcacgctgctgtacccgttgcgcaagggtgagcgcgtgcgagtgttggccatccgtggcgagtacacgcgttgcagtcgcttgcctgctgctgaacatcgccagcaacaactacgacaacagcggttggcgttgcagaacggcctggtgccgaccaggacgctccagtttggcgccaataatggcactacggcattaaacgacgagcggatgacggaactgtgactgatgattgacttgctgatcagtgtggtgatcggagtttgctgtgtgccatgaacggacaaagaaaagtgaacgaaacgatggaaacacgtacaaaaaaggacaattaaataaagagacacaaaacaacaacacttttcatatgattaatta

SEQ ID NO: 86648 - DNA, 659 bp, Heterodera glycines
acagcgtcgaaaattatttacttgtccgaacaaacctggtcgactgttcgtccaagtacggtaacgagggctgtgacggtggactgatggacagcgcatttgaatatgtgcgagacaacaacgggttggacacggaggagtcgtacccgtacgaggccgtaacgggcaaatgccaattcaaaaatgagaccgtgggcggcactgtcgttagcttcaaagacttgaaggaaggcgacgaagagcagctgaagattgccgtcgccacaattgggcccatttccgttgcgctcgatgccagcaatttgtccttccaattttacaaaaccggcgtttattacgagcggtggtgcagcaaccgatacttggaccacggcgttctcctcgtcggctacggtaccgacgaaacgcacggtgactattggctggtgaagaacagttggggcccgcattggggagagaacggttacattcgaattgcgcgcaacaaacaaaaccattgtggcattgcgacgatggcatcgtaccccgtggtctgagaaagtgtgggaatgaatgggacaagaagggatcagaagaagaagcaggcataccaaatagaagcaattcacaatcattatcattgctatgctttttggtaataaataaaattgcttagcaaa

SEQ ID NO: 86649 - DNA, 648 bp, Heterodera glycines
gttggatcgggcgcctggtcggatcaagaaggagcatctacatcgttttttgatctcgcggaagatgttgagctggcgaaagaactcgttgaaggactccaaaaacaagaccaagaagtgccggattggcttaagctggtggctgaggggaaaatgccacttgacgagtcggaagcagccagcggtgcaaattcggtgccgatcgctgttcgcgttccgtcggaaactgttcctgacaccaattctttgccaactgctgtaactgttccgactgataatgtggctgcaaccggtgctaattcggtgccgcttggaacccgcgttcaagacgacggaaccccgaatggagaagcaaaggacccagccatccagaacaattctgctccattgccttctgaagacgccaacgatgagtggtgatttgagtagggtttattcggctccggactttcattgttttgttgttcagccttatttattgacgatctctttcatcattcttaaatcacaacgtacttagacattcgtatagctgccccatttgattacttacggatatctagcaacaaatttttgatcagtgtcttatctatttttgagagttgtttctggttttgttttattactttgataaaactttttattgca

SEQ ID NO: 86650 - DNA, 574 bp, Heterodera glycines
  unsure (1)..(574): unsure at all n locations
agcggtgaagacttgctgttggcattccgaactttgggttttgacgaatatttggaaccattggaagagtttctgaaaaaaatatagagaagcaaacaagttacaaagctgtcagacaacaacgtcgatcatgaattcagacaaccatttgattcaaacaatgaatcgtggcgatgaaaggtccgctgacatatatttgcaagagcaaacgctgatgatcacctcaagccaccaacccgtgcaattgttatatgatggagccaatggacaatactttatacctgttcagaatgggaatgacggttctgtttgtcatattgctctgaccccaacacagtcaaaagtggctggctactacagtatcatcataattttttgtaacattggtactttctcatttaaatttccgaacaacaaagcggattatttatccattggcgaattacaaaaagatgtacatgaaacttttttaaattatgtactaaaacgttagatttattgtttcaaagaatttccccagtaaccgcattattagtataaacaatttactnnnnaaaaaaaaaaanaaaaaaaa

SEQ ID NO: 86651 - DNA, 716 bp, Heterodera glycines
accaaagatctgcttggccaatgtggcctgataccattgtggctttcctgatttcttggaccctttgccgaacaccacagattggtgggtggacgaatttgtgcgtttccacaatgaagtacaatttgatggaatttggattgatatgaacgaaccctccgtctttggcacaaatgagaaacatccatggtactttgacacgcaacctgcatttgccggcaagccaccaattgcgccgctgatgtgcccagagccgaacaacaaattggactacccaccgtatcgcacatggaatgcatacaaatgggactcgaagaatacgaagagaacgctgaacgaaaaaacattatgcatgattggaaaaagtgggcgccgcaactggacaatgtacgatacgcactctctctacggctggtcagaaatggtcgccacacaaaaagcgttgcgcgtctcaactggcaaacgcggcccgctcacttctcgttcaacatttccatcatctggccattacggtggccattggcttggtgacaaccaatcccgatggcctgatctccggctgtcaataatcggggtcatggagttcaacatgtttggcatcccacaagttggcgccgatgtttgcgggctcatcggagactcaaatgaagaactttgtcttcgatggcaacagcttggagctttccattcttattaccgcaatcacaatgatgtta

SEQ ID NO: 86652 - DNA, 600 bp, Heterodera glycines
gtttgaagctctctaacgattgtacatatgaagggcaaaacattgaacattttgttgttaatgagaaatatagagaggcagttacaatgtcgttatatgcgattgagccctcgtataaaaacattactgatccactcaaacaacgttatcaatacaaagaagaattcattgccatgtgtagaaatgcttctgcatcaccgtttgatgttttgcttagaatggagcaaagtctaaaggacgattgccaattgccatcacaagaacaggcggaaaattatgccgcaattcttgaactttttcagaaaattgaacagcgtcatcatatgctaaatctaaatgatgccattcctatggataaatacaaatctataaaaagctcaattttggccaaatcagcaagggaagctctacaagaaaaactgaatacaatcctaaacagtgcaaacagtgctgaggaggtcttgcaagccttgaacaaattgaactcggatctgcattattacccatgttggttgcaagcaatggctgatggcaacgaatggaaacgagaaccgctttttcatttcgctcaaattgtgcgtttggatttgatgaaagctt

SEQ ID NO: 86653 - DNA, 485 bp, Heterodera glycines
agcccatcccaaaaactgataaaaaaaatggcgttcctctcccgtctctccatccttccaaattcgccaatttcgctgcttgcagtttctttggccgttttggctttcgtcgctttggcatcggccaatccgccgacggcacgcgaaacggcgccaaatgcacagcaaaacaatgccaattcagtggcaactggggaaattgcgaaaaatattgcggaaaagatggagcggatgaatgagttcattaaggcgaagaagttcatcgatgcacataatttggcatttgagaagggcgaagtgtcgttcaaagttgcgccaaaccatctgatgcattttacacctgcccaatataatcgaattcgcggcttgcaaatgcgcagcaaccgacaacggcacaacatggcaactctggcgggaaacagcagtactttgccggaaaagttggactggcgcgagaaaggggcggtgaccgaggtcaaagatca

SEQ ID NO: 86654 - DNA, 423 bp, Heterodera glycines
tttcaaatccctctgattgtgcttttggccgtcgtctcattccgtctctcggcttctactggtgacaaaaaaactgctaatgatgggagtggaaacaactcatcagctgggattggtacgaagatcaaaagaattgtcaccgctggactgctcttcacttccctggcgacgggtggggcggaagcgattgggcgaagcaatgctcagggaggaaatgccgccggattggtgccatcgcatgtgaccaatcgctcaatggctccaccacctcctcctgtgcaatctgaaatgggggcaaatcgatcagaaaaaatgagggcacacctacgcgaacttgctgagaaaatgccggtcaacgaatcgaagcgtctgtcaccgagtggacccgacccacatcatcattagggccatggatggatctca

SEQ ID NO: 86655 - DNA, 642 bp, Heterodera glycines
  unsure (1)..(642): unsure at all n locations
gaatgtggntctcccggatttatttccccgagaatagaccgatgaaaactgccgtggctaatgcgattgtttgccctgtttgttttgcaaaatttgagccttttcccaatctgcatgcccatgtcttacggcacttggacaaaaaatgcatggccgagtttttcagctgtaaattgtgcaaagattcgaattgcgtccttttcctttctgtcacggcaattcgtgagcacattcgaactgcccacggcgttgccactgattcgtaccttctgaccaacatttaccctggaaataatatacacaaagggaccacgcgaattatggtccaggaagtattgaagcgtttcgcgcggattcgttttgaacaatggagaaatgttagacaaatcaaaacgaagttggggtcgatgaaacggaactgttcctttcctcctgttgacgaccactcgtggaaacgaaaaaaagtgggaaacgaaggcggaaaggtggcggaggaggacgttatcgacagaattttgttttctccgtcacaaattcctcaaaaccttagcgagcgtttgcaccgtctgaaaaagatggaccgcatttcgcggcatcaaatgatcgtgccaatntgcgggatgtcgtcgttcgtcggtttgt

SEQ ID NO: 86656 - DNA, 636 bp, Heterodera glycines
  unsure (1)..(636): unsure at all n locations
aaggaattggataccgaaatccgtacgctcttaacgaaacaaagatatattccagccgcttttcgactcatgacgacgaattgctgtgcaaatgcaatcattttgcgacctgcggtaaggaaggtgtggcgagttatgttggtgaacagtacatggacgtgtgccggcctggtcgaggcggatactgtagtcgggtagtgtttttgaacgcggatggcacaattcgggaagtcatcacatcctgtttgaaacgggaacaactcgtgcccagggaattgccattcgtctgccaaaattcgaccactccgcaatggaacaaattggtgaactgttgcaagtctgaatcattttgcaacgacatccaatttcccattgaacttggtcttcgcaatggctttttgcccgaatccttcgatggtttgccatccgtttttctgacccttctcatttcgcttgtccttgtgctgttgtttgcattgagcatttgtgttgccatttcctgttgctgttttcctcgaaaaagggctgttgttgaccgatgcattggttggttggtgcagtgccgttccccaacattgaacagttctaaggctgattgtgaaatggacagtgaaagtntatgtggcgcaccgatgg

SEQ ID NO: 86657 - DNA, 469 bp, Heterodera glycines
aatgagttcaggattaacgtcgtcagtgtgcagttgttggagaacccggccactccgagtgaccacataaactcgaaattgttttcgaaatattcgaaaacattaaggaagacgtcgaatgggaattggttttcgtgggcactgatggccgagaagaacacgaccaagtgctcgactcagttctcatcggaccgattcaggagggacgacacaaatttttgtttgaggcgccacctccacaaattcacaaccttcgacccgaagattctatggatgtcactcttttgctgctcaagtgcaaatatcgcgaacagcttttcatgaaaatcggttggttcgtcacccacacttacactgacccggaactcgtcgaaaaccctccttctcagcctgtcattgaaaagctcaagcgaacgattgtcagcgaggatgtgcgcgtgacgagttacccgatcaaatgggacgagga

SEQ ID NO: 86658 - DNA, 629 bp, Heterodera glycines
ggtaatgactgcacttgcattgccatgttgttaaatcttctttggggcccgttggattggacaaaatgcttgtggatgatgtcggcgatgttacggtgactaatgatggcgcgactattttgaaattactggaagttgaacatcccgcaggaaaaatactcgttgatcttgctcaactccaagatgaagaggttggcgatggaacaaccacagtcgtcattattgccgctgaattgctaaaagcagctgatgaattggtccggaagaagatccacccaacgaacatcattaacggatatcgcttggcctgcaaagaagctgtccgctacatgaccgagaacctttccttccctgttgaagagcttgaccgtgccagtcttattcgtgctgctaagacatcgatgtcttcaaagttgattggatcggagtcagacttttttgccgaactttgtgtcgatgcaacagtggcagttaaacggactgacaaggcaggcagagtgagctatccaatcaattcggtaaatgtgttgaaagctcatgggaaatcgagcaaagaaagtcaattgatcagtggatatgcattgaactgctcggcagtgctgacgaagtcgtacagactcgcatttcag

SEQ ID NO: 86659 - DNA, 442 bp, Heterodera glycines
agcctttgaaccttgatggactcgctgaaaggccgctctcttcgtctcgtgctgaaaaatgtgcgcgtctacgcgcggatgtccccaaaacagaaggaacgtgcaataaacgcgttgaaagccatgggtttgacgacactgatgtgtggcgatgggaccaacgatgtcggggcgttgaaacacgccgaagttggcgttgcgctgctgacccatccgctgaagcccgaagaggcgacggctgccacctccgcgggcagtggaacaccgacgcaaagcaccttcggcaccagtggcagacagcaccaaaatgagggcggcggcggtgagcagactcggcgttacaacaaccgcgagccgacctcagcggatgccaatggacagcgacaacaacagcagcagttggccatgaccacggcgggcggtggtggcacgtcttcacgac

SEQ ID NO: 86660 - DNA, 224 bp, Heterodera glycines
cactcttcggcctggcactgtgcttttcatcgacaatttccgagtgatgcacggacgaaaagcatttcaaggtgaacgagtgatgtgcggttgtttatttgaatagagacgtgtttctggcaaaggcaaggccaaaactgtcgccagaattctaccgaaatgtgtgaagaattgggcggtgtgtgtttaatttaacttatatttactggcattgtaatattttc

SEQ ID NO: 86661 - DNA, 294 bp, Heterodera glycines
aacgattaactggcttggctggctgattaaacggtccaatatgaatgggttggaggcctcccctcgtaatcattcgccggtaaagtctctgatcggcggaggatgggtagagcgttgatgagaggccaatagaggtgtcccccactttcttacaatctaatcattctccataataactttcactcttcggtcgtaccaaatggccatccctgaatggaatttctttcatttactgtcgccgcctccgctcatctatgaattcctcatcttttacttttcccgcctttttccttt

SEQ ID NO: 86662 - DNA, 386 bp, Heterodera glycines
agttccaatcgtacgacgacagccatcaaatggcgaatgatgggcgtaaaccacgtccgccattcgaccaaagccaaaaaagtgttggggaagacgcgctttttggacttggatttgcccgaatctttcgacgcccgccagcgatggaatttctgtccgtccatttccctcatccgcgaccagtccagctgcggctcgtgttgggccttcggcgcggtggaggccatgtccgaccgaacatgcattgcgtcaggcggaaacattcggatcgctctgtccgctgactatttgctgagctgtcgccataagtgtggctttggctgcgacggcggcgatcctctgcaagcgtggcgctattgggtgaatgagggcattgtgacgggctc

SEQ ID NO: 86663 - DNA, 482 bp, Heterodera glycines
gcctgggctctcgtggtgcgtcatccgctgctgttgttgcttctgcgcagcattgtgcctattttcggcaatggcagtggtggtgtacggtgccgaaagcgctgggcctaaagcagaccaggccatggctgccaagcagttcaacccgtccgcatttccggccatgccaccagagcttgagaaaatcctgccagccgatgttgtgcaaaagttgaaagctgtccatgccgatatgtcgttgaacatcatgcagaaacaagacaagattgaccgtatcatgagctccttgccgggagaggttttggaccaaatcccggccccgcccggctttgaacgtctccccgacgatgtgaagaaccgtctgaagcagatcaatcgccaaaccaacaaagcatgggccgactagcaaaaggaactgcaggagtatgtcaagacattgccgcaggaacaacgtgccattctgatgatgggcccaatgggag

SEQ ID NO: 86664 - DNA, 516 bp, Heterodera glycines
cagcaggcagaagagcaaaaggcaaacgaaggctgtgacccgggggagaaggagcgcaaggaacgtgagagtttgatcgaggaagcgtacgctttgtcacaagaggccaacatcagcttagagcaaatcatcaaacggtacaccaaatgccgtaatcagttccttgaacgtgtcgccgaccaaatcagcgaccaactacaacaggatcattctgacagcactgacgacatcagcaccaacaaacatgagcggaagaagcgtccgattgtgttcatttcgccacagttgcgcaaacgggtcaaaatacaacaacaattggcggaagcggactcggtcaacgacggcgacgacgacagtgaacaaaagcaacaaaaagaaaaaagtccatttaccattcccggcggtgctgaagacgacgaaatgacagatgtccattctcaactggagcagaaacaacaacagcagaagcagcagcaggaaacagaagcaaaaaaaagtgatgggacaacaaaaacg

SEQ ID NO: 86665 - DNA, 663 bp, Heterodera glycines
tggaattgagtgaacgatggactgggccccttgggtcgaagctgtaaagcaagcgcatgaaaatgacgccggaaaattgaagccatggcagcaacggtatctcgactggatgatcctccaagctcgactctgtggctatttgacggtgaaaaagaacgacaaaaaggcacaactccaacaggaagtgaatttctcgtggaattccgctacaaaccaattctgcttccgatttctgtaatttgcccattcgttccgttttacctctttttcagggccaatcacatgcaggacaatggcgtcattgtccctatcgaacatcgctatttgctcaaaagtgcccctccgcgtgctctcgcgttactctccaaaggaaatgacccggagaatggtccgtgggaagtgacaagcaaaaaacacgacgctcttttcgctgccttaaattattgcagtgcgcgggagattcggcaagggttgtggcagagttacgtcacaagatccgcattcagttcgcaaatgttgaacaactcacaaaacatcgaggaattgcggcataacactgagggctttgccaaagcgcttggcttttcgtcgactgcgcaccaccgaatttcttccaaaatggccgggagtccccaaactgtccgcgtctttgtcgacgaactt

SEQ ID NO: 86666 - DNA, 382 bp, Heterodera glycines
aaaagcaaatcgttgaatatctgcgtgaatattccaccaaagttgactgcattttgaccagcggtggaacagggttctcaaaaagggatgtgacgcccgaagcgaccaaagaagtcattgagagggaatgcccacgaatcgctgtggcacttctgaagaaagggcttgacattacgccattcgctgctctcacccgtctcaccgcgggaattgctgccaattgtctgattatcaatttgccgggaagcccaaaagcagcgagagagggatttgaagtgattgagccgattctgagccatgcgattgccatcgtgaagggggatgagagcgaaacttcagttctgcacaagagaacggcttaataagacagaagagactgtct

SEQ ID NO: 86667 - DNA, 392 bp, Heterodera glycines
tgctgtcgggacaaacgggccaaccaattaaagtgccgtgcacggttcgttaatgctatagctatttgctactaataccccaatacaaactgccccctgatctccaacatggccaccaatgccttccgctcaacttctgtcgaaattgtgcctctatccctgcaaaatgcccaccgaatgcgctctcgtcctgtcggctgctgcacaaacttttgctgccacgtgtcatcaaatggaaagagatatgagtgaaaataccggcttccaaagcaacttcttgaaatggtaaaggccctccatgaaaaagttgccgtcattgaaaaaagcgtcgccatcattgaaaaaaacgtcgccgttattgaaaaaaaagccaccgtcattgaaaaaaatgt

SEQ ID NO: 86668 - DNA, 275 bp, Heterodera glycines
taaaaaaaatgaaaaagtggacctttctaatccttttctttctggggattgatctgcagaaattcgtgaattcagcttttacccaagacaccgaagagaaatattgtgtggaaaacattgaaagcgacgaaaaagttttaatggaacgaattcgcgacgcgaaagattgggcactgactaatgggctgacttttccggtgccaagaaggaaactgaaatgtgacgcatgtgacaaaatcaatgataatgttgttttggacgacatggcacagttt

SEQ ID NO: 86669 - DNA, 400 bp, Heterodera glycines
gtttgggaacaccctgatgtgaaatggtcttcccgtcgggacattattctcgactcatgcctctacaaacattcaatggttttccattatgaactcactcgtcattgtcattttcctttccgggatggttggaatgattctcctcaggactctccatcgtgatattgctcgctacaaccgtcttgacgaagaggaggatgcgcaagaagaatttggatggaagcttgttcatggcgatgtgttccgcccgcctcgccatgcgttgcttctttcagtgttcgttggtacgggcagccaagtgttgctttgtgcttttatcactcttgcatttgctcgtctgggatttctttcgccagctaaccgtggctctttgatgacctttgcactcgtttttttatgt

SEQ ID NO: 86670 - DNA, 454 bp, Heterodera glycines
aaacatccgaaaaaatgccaaacattttcaaaatccttctgattgtgcttttggccgtcgtctcattccgtctctcggcttctactggtgacaaaaaaactgctaatgatgggagtggaaacaactcatcagctgggattggtacgaagatcaaaagaattgtcaccgctggactgctcttcacttccctggcgacgggtggggcggaagcgattgggcgaagcaatgctcagggaggaaatgccgccggattggtgccatcgcatgtgaccaatcgctcaatggctccaccaccttctcctgtgcaatttgaaatgggggcaaatcgattagaaaaaatgagggcacacctacgcgaacttgctgagaaaatgccggtcaatgaatcgaagcgtctgtcaccgagtggacccgaccctcatcatcattagggccatggatggatctaacggag

SEQ ID NO: 86671 - DNA, 613 bp, Heterodera glycines
  unsure (1)..(613): unsure at all n locations
taaatcccgcaattctgatgcgaattgcactgatttgtttgatgacggagagaatgaaattgagttgttgcaagaagctaccgacaaaacggaccaattagatttgaaattgaaaaacaaaaagtcaaagtccgttgggtccgaccactttttcgatgtccgttcaaatcaagttgctgcatcagcaaattgtgctcatctctctttcaccgatctgaatttgagccgacctctactcaaatccatttctgaggccggttttcaaaacccgaccccaattcaaacggcttgtattccggtcgccttagctggtcgtgatatttgcgcaagttctgcgacgggcaccggtaaaacagccgcttttatgctgccaattctcgagcgtctgcttttccgtccctcacggcgaacttctgtcactcgtgtgctcgtgcttgtacccacacgggaattggcaattcaagtcttccaagtcagccgacaaccttgcaaaatacactcaagtggaaatttgtcttgctgcagggggactggaccttaatgcccaggaggcggctcttcgccttggcctgnacattgtcatcgcaacgccaggccgactgattgaccatct

SEQ ID NO: 86672 - DNA, 628 bp, Heterodera glycines
tggatttcgtttccctattttgaagaacatgttcttcccgcgtgcccctggcccaactctttcgcaattcgtatattcatttatttttcctattttgattttccattgctttgggcgtagtttcattagattatttgcataaacttttcgttaacaattttaatgctacttaagttaatttttcaaagaaattttaggaaggaagggactgatgctgcgaaaaattgtcaacaccaataaattttttgtccaaaaaacaattttttgcttattatttttcaaattttaaaaattttggtacttgttgattatttatgcggagattttaaaaaaatatttttttttgtaatattaatcgggttttcaaagggtttttcttattagttgagaatttgtttagacttatttatcagcaaaacatttaaaaaagagagcaaaattataagataaaactgataaaaacaactgaaaaagcataatggtcagagacgaaaattaacgccccaattgtgtgtaaatgtttatttattgagctgatccgttccgctgcatttccttttatggactgaaagtgaattgctgctacttgagctgcttgaatatgtacgtctcaactcttcttcctgat

SEQ ID NO: 86673 - DNA, 566 bp, Heterodera glycines
caagaaattgtcctttaagcttttgtctacttttcgctttaatctcttctatttcctccttcaaattgccccattatccgccattaattaatgtcttctcccccctcgccaaaagcctcgctcattttggaggcacaggccgattttgcgttgaaattgctgcgcgaagtgtccacggacgaccgttcgtgcattgtttcgccgttttctgccgccgtcactttgtccatggtttacgcgggcgccaaggaaaagaccggcgaagaaatgggccaactgctggcaaatggtgcgcccgagtcggaggtgcacaaatacttcggcgctttgctcaaatcgatcacaagtggaacgaacagcagcaacactttggagacggccaacaaattgtacgtggggaagggcagcaaagtgaaggacgcgttcaaagagcaaattgagggaaattacgggggacagtttgagacggtggactttttggacggcaaagggacggcggagaaaatcaacaagttcgtgaaagaagcgactcataagaaaatccgcgatttggtcacgcccgacaa

SEQ ID NO: 86674 - DNA, 727 bp, Heterodera glycines
accgaagttttactgagcgcagtgcaacgcgttctggaaaaagtggtgactgatccgatgcatgcgcagccagtcccagcggagagtcagttggcttcgggctttgaattcggcggatcgcggctcagtgccgggagcaatcagtttgggggaatttcaaacatgggcaacaattcggaagcaatgcatgggaaatcatttggagggccttccttcaaattcaatcccctccaggggacgggaaacaacgagctgttgacttttctcgacaatttgcagtccactttgcgctcttccggattcaacgaccaatcggtgtcagaggtgatgcaggcgatgcaagtgctggccaaatacaacataatgggtcttggcctgggcctcggtgttgcggcgatggcccaaatgcgtaacactgagagtgcgatggcccagcagaatgtgctgcttggtgctgccgcatcgaatacgccgttgcaacagcaacagcagcgctacgatatcatgtcacagtcgaacatcaccgggtcactgttggactcgtcgcagaacattgaccagtcaatcgttggaggatcgggcggtgttctgatcgatgtgatgagccaaaagaagtcgggcacaaatggaacgaatactttcgccaactccgtgatcaaagaacgcgttgtggatgatggacacactgaacttgatgttcccgataacattgtcggcgccgttttgg

SEQ ID NO: 86675 - DNA, 424 bp, Heterodera glycines
cctgaacttcctcccgggcgtgcccaatttgcccgaccctttcgttcgcattttgcatttctgcaacagcgaagaaggcgaaaccatcgaattgcccgaattccgaatttttgtgccggacacttatgacttgggcatcctcgtgttggaccagaagactttgcccaattccaccgttaatttccccgtgcccgagaacccccgtcgacgcctgcagcaggcaaaaagaccgacggaagtcggcactttggacgaaagcaatggcaaaaagggggcggaagatgggtttgtgactgtcgacgcgccaaaaagtcacaacgccaaaggcctgcacgaccttttgctcgcccggctaaacggtgaccaaaacgaacggcgatttgttgtgggagacgcaatcggtggagatggaggaagtgccggc

SEQ ID NO: 86676 - DNA, 422 bp, Heterodera glycines
tgtcttaaaaagagttcgctttaccgaggaaagaaatgcaacagaaagagtgaagagaagtcggacggaagcggcggaggaggagaaaagggaacgattggacgacgaggaggacggaggaccagccgaaacggcggaaggaatgaagacaaaacggacgaagaaacacacgttggactcggacgaggaggacgaaacggagggctaccaacggctggacatggacaaggtggagggtcaggaggagtcgaccctcgaatatgagggacacgtgaagatcatgcctttcaacatgaaagacgatttggaggaggggcatttcgacgcgaacggcacattcatttttgacaagaagcaaagtgtgatcaaagacgcgtggttggacaacatcgagtgggacaatgtgaagaatgcggtcggca

SEQ ID NO: 86677 - DNA, 528 bp, Heterodera glycines
cgatttcgctcttccgaaagcctttcacacattaccaaatcactcaaaatgccctcctaaaaatcgcttcttttacgaatttctgctcgcaaatgaccggcaagtggcgcgagaagtcaaagacgaatatgtggacaccaccagcaaaatgttcttttcttatttcaaggcgtacgtttcccggctgtttaaatttcaaatggtcgactctgcgacaaagtccgatttgctcggggccgaggacgtggtcaaacatcccacgacaatctccgcattgccgagtcttttcacttccggcaaaacccaccaaacgcgaagtcgagcgacggttttttcattgggtcatcgccaaaatttgctgctcgatgatttgttggctccgctcattgtgccccacgtggcgcaggaaaataacgaaacgttccaattcgaaagtctttttcggagtgttcagtacgctttggtcgaccattgcagtcatgagtttctgttcatttgtgattttttcatggtcaatggtcagtcggc

SEQ ID NO: 86678 - DNA, 602 bp, Heterodera glycines
caattacttattgaattgtccttcgactacacatttaatctcacgaacggacgtgccctggtgcaacaatggcaaaggaggaatactgtttcgatgcaaaggcggcggcagcggcggggcaatctcgtcgtccttcgacaacggcatcagtacttgtgcaaggagatggccagtcaagcagatttgtggatgcgatcatcagaaaagtcacgcagccgcctcttcaacgcttcacggatgagatcaccgacgaggaactcaaacaactctgcaaggcggccacggacgtcttccggatgcagccgacgctcgtcaggatccgcccgccggtcgtcgtcgtcggagacatccacggacaattctcggatctgcagaggatcttcacaacgcatggccccccgccggagcagcagtacatgttcttgggcgactacgtcgacagaggagcacactcgatggagacaatcatccttctcttctgctacaagatcaagtacccatcgaacttcatgctgctgcgcgggaaccacgaatgctccaacatcaacaaagcttatggcttctacgaggagatcgaccgccgttacccgcgaccgggcgct

SEQ ID NO: 86679 - DNA, 503 bp, Heterodera glycines
ctcttccgtcgttgctgtacagtgcgccgaaaggaattcttctttatggaccaaatggttgtgggaaaactctgattgcgcgtgccattgccaaagaggtggatgcgtacttcatcaattttggaacttcgctcgtcgattttgtcaacggatcatccgttactatgaagtctctgttcactttggcagagaaaattcagccgtgtgtcattttcatcgatgaaattgatttgctgttccatcgcaatcggaatgactttcagctgctgaagacgcaattcctcgcgcaatgggatgagtttctgcgctgcaattccaactgcaacgtgatcatcatcggtgccaccaatcgtgtgctcgacttggttctctgccgcttctcactcaaagttcacattcccttgcccgatgaagaagcacgcgagaagctcctgcgcaagattttggctaacgagaatttggaggcggactttaactacgccgaagttgttgaagcgacgcaa

SEQ ID NO: 86680 - DNA, 687 bp, Heterodera glycines
ccccgaaccgcttcagtgcccaacgcaacgcaatggccacttacctattcctcgctgcagctgccttcggagcgggaatttactgttggaagacgtaccttggcccgatgcttgaccaaccgaagagcgacgacgaggagaagcccaagccggaaggaggcgaagaagcgacgaccgccggcgaggaggagaagaaggctggcagcaagggcgacaagcacaagaagaaggacaagaagggcgaaggcgcagcagcagcaccagcggcggacaaaaaggaggagaagcgcaaggacaaacacaaatccaaggagtcggggaagagcgacgacagcaaagcgggcaagaaggacaagcacgggaagaaggacaagaagggcaagaagaaggacaccaccgatgcatccaccgtggacgaagccctgggagaacagggcgcagcggagacgagccaagcagagcaatagccaggccgtgatgcgtgcaaatgacagtgttcgacgacgatgtctcgcgacacccacacatatcccttcgatcattcccgtcccttccgattgctgtgttttgtctgttccaatgcttcctaaatgttccccttgtgaacagtgatccttccttatgtgatctgaacatatatatgttgtatgcccattaatatattatgcttcgcttgttcgatatttg

SEQ ID NO: 86681 - DNA, 150 bp, Heterodera glycines
cattttaattcttaaatcctgcgcaagatcgtctacttcaaactgttgcgaattgtgctcagttcggctttcgtgtggaacttctctacttcccaattctgcggacatttgtctgtccaaggccttcctccatgacatctctgtcggcca

SEQ ID NO: 86682 - DNA, 657 bp, Heterodera glycines
ggtttctctcctcttattattactttctccgccggtccctggcaaaattaaaatgcgaggaaaggcgtgcaaatggtccaaatgttcccataaaatccgtcctccccttttgttcgcatcccttcgcccgtccattcatccgctgctgcactcttacgattagtgccaaacattcctctacacaatgctttatctcaaatccttatccccccttcagaccaaatgcgcggcatttgctggttgatctgccctaccaaattgacttttttttgtacttcactaatcagacaaacgaacaatatttatttaacagctgagaaaaatataattaaattcggcagattatccttttttctatttttagaataccgaaaagactatcccttagggttaaaggaactgaaaatccgaaagttttcttgactaagagataggttcttgagaagccttcccttttatggcacagtacccgagtatcaccaacgtttgtgtcaaggaactgtttgtcttggccattcgtccgttcgaatttcgcttcttcccattcccttggcctttgccaatggcttctcatctgtctgtcactgttcttacgtcaataattgctctttttgttcttcttctggcactccacggaactgctcccaatcagctcaa

SEQ ID NO: 86683 - DNA, 535 bp, Heterodera glycines
tattttctgcgaacctttgggcattttgagtgaacaactcttctgcaatgctacaaaagtgtttcttctattcccaaattcgtcaatgccttttctggtcccaaattctttctcattttctccaaatggaaatggccaatgcccgtccaattgactccattgatccaaattcttcggcacttttttgagttggtctccgttcggcgattggatcggccgcagatatttggcatgggaaaaagcgcggagaaagcatcgaacgaaaaaagagcagcaaaatgaaattgaaaaggcaatgaaaagcattcggaaggaattggcaatggcagtgataatgccgacaattgggggacgaaatttggccgaaaaagtgaacatttcgagcgcaaaagtggtggagaatgagctgaagcgagcatgtgacaaattgagaagcaaaatggaaacataagatgaagcgatagcattcactgagaagtacgaacattttattgtcatcgaatgcaaaggctcaagtcacaacgtggacaaattc

SEQ ID NO: 86684 - DNA, 596 bp, Heterodera glycines
tcttcggaccttaacaattttgccgtgccgaaaatccattttcttgaaattacaataaaaaggcgcgaaattcgcttaattggacgggaaaacttatcgcagatgaattaggacaattcgttcgtgccattcgcttggctatgggtgtatttaaagatggaacacaaatggctcgttttgaggaccaattgtttcccgccaaaatgataagtcctgactccacgtcactttatatggcccacattcgactcgaaagattttgcgcttccgagcatttccatgttggaaagtttggtttagccactcgtcagatcgccaatttgttgcgggcgttcactcatagagtgtctggcatttacagcttggagcgttgttccttcttagccgattctttgttccgtttgttcaccaaattttatgaatgtatcaaatggcatttccgacaaagcccaaataaaagcgaaatcgaaaagtttggagcagcaattctcaaatttggccgttttgtttgtgggacgctgagagagggcgacaacgcgggttccttttgtctcccgagctcgactacgataggcaccgaattgctgttaccatcc

SEQ ID NO: 86685 - DNA, 657 bp, Heterodera glycines
  unsure (1)..(657): unsure at all n locations
tggtggacggcgcccgaacttttgcgagaaaacaatcggcacgggcacaaaagagggcgatgtgttcagttttacgattatttatgtggagatggtgaacagagagacggtttggaatgggacggagagggacgacgacgtggacgaaatcctttatcggctcaaacgcaccaacaacacaatccctcaccgtcctcagctccgcccccgcgaagacaccaatcaaagtttggtccatttgatcagagactattgggctgaagtgccggccgaacgcccgcgcatggatatggtgcggacgatgcttaagcagatggtccaggacggaaaccaaaacctgatggactacgtgttcggcatgctcgagcagtacgccagttcactggagcaggaggtggaggagcgcaccaaagagttggtggaggagcgcaccaaagagttggtggaggagaagcgcaagagcgacattctgcttaatcggatgctgccgcggcaggtggcggacaaactgaagctgggcgaggcggtggagcccgagtccttccaaatggccaccattttcttctcggacgtcgtctccttcaccactntggccggcaaatgcacgccattacaggtggtgaatttgctgaacggactgtacaccgcctttgacgg

SEQ ID NO: 86686 - DNA, 293 bp, Heterodera glycines
accgtgaagccctttttgggggcatggcgcaattcacgcgtaaccgttacatgggtgtgttaaatttcttatattaaatgtaacaaaacgccgcctgcttgccaaaaaatttccattttttggctgtgatgctaatcagctgcttctccccccccccccccccgctgttaattcccatgacattgggctaagctttggtgtgattcacacattcatcagcccttgaatacgaatgttgtctacataaaatttcttctcatatttacataaaaatctgtccccaccccccaata

SEQ ID NO: 86687 - DNA, 587 bp, Heterodera glycines
  unsure (1)..(587): unsure at all n locations
cttaagtgatgtgncactccccggcatatttatgcggttcgccatgctgaacgtcttgacgacagtgaaaagcgcaaggtgtggcattcaacagtcgctttgccaaggacaatccgccgctgtccccgcgcggtgtacaacaggcggaggaactgtcggtcgaatttcggaacatttccatcgactactgcttcacctcgccgtatgaacgttgcgtccaaacggcgtcaaaaattttggagggtcgttcaacactgatcaatgttgaaccggggcttattgagtcatttaatctgatctgcgatcgttccggtgtacagaaaatttcgtttcagacgggcaaagaattggcacaacgatataccaacatcaaccggcagtacgaaccgatgtacttggcacctccggaaatcgaaaaaagcaaaggcgtccatggatgtttcccccgagttgaggacaccttccgtaaaattgtggccaaatgctacggcgacattttgatcgtgtcccatcaaggcccagtggccgccctgcaacggatgttgaccggaagcatggaattcggggggagcgcaacagtgagcaag

SEQ ID NO: 86688 - DNA, 199 bp, Heterodera glycines
ggacgcaatggcgttcgtggcgaggaagaagtgaagggaggaaaagaaattgctagcaagacacttaatattcaatcgaaccgtttttatttggacgtcaagtcaaaatgatcgtggacgttttgtcaaattggctgaggttgctatgaatggtcgaaagaatcctttgttcatgtcaatgcgaatttgcaagaatatt

SEQ ID NO: 86689 - DNA, 494 bp, Heterodera glycines
aaccgaaacgaacattcggcacttcatttgatgacgacttcaaacccaacctttcaactgcagttgatgtgaatgtccaacaaaaacctgtagacaaaacatcagcagttggtgacatcgaagtgaaaaataatgaaattgttcaaaatggcaaccaattgagcaaagagagcgtttcaactgtaccatatgaacagcagcatggtcaggtgatcggacaagtgaagacggtcaaatacaaagcgctcttcgaattcaacgctcgctccggcgacgaattgagcatacaaccgggcgacttgatcctcgtattcgagggacaccaatccgagccgggttggcttgctggccaaattcgcgacaaagtcggctggttccctgcctcttttgcggagcccctttccgccgctgctgctggcccattactgaagaggggcggtagtttggccggctctccttccggcgaacctttggccatcattcgcgaggagtgt

SEQ ID NO: 86690 - DNA, 499 bp, Heterodera glycines
tggcctgttttgtgcacccccggcggttccgttgtcgcgaaatgtgccaccaaaaattgcgcttgacatgctgctgactggacgtttcttggaagctaacagtgagttttatttattgttaatttttgtatttaatcaaatgttttcggtccattttttggatttttttttgccaaaattcttttatttttttcattaattttttttttgctttgtccattttcagttttccatgggttcaatcttcattaattttggtattcttaacattctctgtatattcttccacaattaataaaaacagtttttttgaaataaattcttttacaaaaaaacaaaaaattcatgaaaaatttgctgaattttccagaaaaaaacgtacaattaaaatttttttttttcatttccttgaatttcattattacttaatttttatttatctttggaattaagcaagaggtaactaaaaattttttcatttttttggcgatgttttatt

SEQ ID NO: 86691 - DNA, 640 bp, Heterodera glycines
tatttccgattttctggcattaaacgacgcagtcaacggaaatgatggaggcgtgaatgttggcagctcgtctgctgaattggcattgaatgacgagaagagttgggccaattacagacgaagattggcaacctttgatgtggccagtcgaattgcgaaaccgaaggaaatttcgcctgttgtgtgcgcacgtcatggatggaaaaatgtgggggaggagtttttgcaatgcgacgactgtggcaaagtgttatacatcaaattgccggcgacgaagtgtccaatcgcgtgctgaaccattgcattcgacacattcaacgcaaattggtcgaagcgcacaccgtcatttgcccatggcgcattagcccggggctgaacacttccgcaacctatgacatcactgcgcgttatcaccaactggtggacagcggccagcccgaacttccgttggcggacaatgtactcgacgaagcgttggccgacaaatttggcgtgcagagccgatttttcttggctttggccatttttggatggcttccaatatcaaaacaagcgacaaatgacgtggagatgaacaaaccgcagccgaactttcactgtcccctctgtggacgacatctttgcgcatcggtgttttcca

SEQ ID NO: 86692 - DNA, 513 bp, Heterodera glycines
atgactttctctttttgattgaaaaaattcgagcaaagatggaggaaatatgtggaacaaataacaattatgttgattttatcgtccccaactccgaggtccatttggcaaattttggcgctattgagaacgcccatttgagtattttaatacagaatttaatcgatgtgatcaggtcgataaatgcacgacaattagtgaaagagtttggcgacaaatatttagaggaagtgatgaagtttctcgacgaagcaatggcagcgtcaaatgagtctctcccgcttgccaaaattgtgcctgttttatgcgacgcctttgccaaaattggcaccgtttctttcggctccattttccattctttgctcagctcaacggaattgcacagattcactctttttgtatcggaatgcagcaaacgcgatgatttgttcgatgcaaatttaaaatgaatgatcaaaaattggtcacttttgaactgtccaatttataaaacaagtataactttttatgtcc

SEQ ID NO: 86693 - DNA, 328 bp, Heterodera glycines
taattgtcgagagaggaccaaattgtggtcctttaccgggagaattgatgtttcagcatggaggtggtcggttggggtgatggagacgcaacctgtaattgtgcgaagggcggagttctggcatctccggaggatggaccaatttgagtcggccagttggggggaccaaatcggtgctgcataatcgagaagactgcgatcgatggctttgtaggtggtcaagagcacttcttttgattgtccccaggttgttcctgccaaagcccggatgatgttgttgcgtttttggatttttgatcggagtcccacggaatgggcatcgaatgtg

SEQ ID NO: 86694 - DNA, 655 bp, Heterodera glycines
tcgacggaagcccccatattgcagtggacaccttctcgagttgacgaaggcgacaaaatgcgcttccgattgatccatgccggctttcggcacccattggtggtgcacattgagcagcaccaaatggaagtgatcgccatggatggaaatgaagtcaaaccattccgaaccgacgcattgatcatttacccgggagaaagattcgatgtccgagtcactgcccttggccacccccgttggcccattcaccgaatggtggtcggattggccgagcagtttctggcagaaacagaagaacccatttacgggttggccaacttagactatcattggcacggagaaactgccgacccaaattgggacggtggcgaaaaagttgattttctgctgaatcgatgcactgctcgccaatgtgtgctgctgggctgtcccttcagaacagaaaatggcacattcgccgcattcgacggacgcaaatttaaatgccattccatagacgaactgagaaacaatggcaaattgaacaattatccctccgggcatgggtatgattaataaaagcgaatttgattgattatcacttccaaatgctcacacacaaaaagaaatgatgatgatgaagtgattgaaagccatcacattttgttggactccg

SEQ ID NO: 86695 - DNA, 249 bp, Heterodera glycines
cacatgacctgcaaaaacttatcctgtcgctttgaattttgctggatgtgccttggcccttgggccccgcatgtttcacgctccggttggtactcctgcaaccgctttgaccatgacgcggctcatagggctcgagattccaggagagatccagggcggcacttaaacgatatttgcactactattcacgctttactaaccaccagaactctctcaaactggagagaaagctttttgaaaaagtgagct

SEQ ID NO: 86696 - DNA, 557 bp, Heterodera glycines
cagaaagtgccggagccggtgttcgcattttggcttaaccgtgacccgacctctgaatttggtggtgagatcaccattgggggcactgatcagcgacgatttgtggccccaatcacttacacaccggtcacacacaaagcctactggcaattcaagatggattcgatcagtggaggtaatggcaaacttgcgtgccaaaatgggtgccaagccattgcggacaccggcacttccctgcttgctgggcccaaaaatgacattgaaaagattcagaaacacattggagcaattccgctcttccatggcgagtatatgatatcatgtgaacgtattcccacactgcccgatgtgacgatcaacatcggtggcaaggcgtacacgttgaagggcaaggactatgtgctgaaaatgaccagcatgggcaaaagcatatgcctttccggttttatgggcattgatttgccggaacgtgtcggagaactttggattcttggcgatgtgtttattggtcgttactacacggtgtttgatgtgggccaaagtcgtgttggttttgc

SEQ ID NO: 86697 - DNA, 425 bp, Heterodera glycines
tcctgacgatgggtcgttgagcgcggagcaaaaaatggagcgaattgactcgatcatttgcactctgccggagaatgtcattgaccaaattccggacccgccagaagttgcgcaactcccggctgatgtgcgccagcgcgtcaaacaaattgaacgccagcagggaaagtcattcagcactaaatttgaagagatcatgaaatatgtggacactttgcctgaaggcacaaaatcggctgccaaaaacattttccattgaatttttcatggaaaaggaggagaggaaagaagtggaaaaagcagcatggattaatgaaagcaaggctaaacaatatttattaaatattttattttttggtaaaatatttccaatttttcatttccaataaatatttttgctttgttgaaaaaaaaacccccatatc

SEQ ID NO: 86698 - DNA, 213 bp, Heterodera glycines
cccgttccgctacgtatattccgcactgcgcacctccgtccgcaacccgacatacttcggtcgtgttttcttcgctctcagcccctcccaaccgcctttgactgtcaattcgaccgtcgtcggcgttccctcctcccccgtcaacattccgccatgcgtcggccattgcgacattcgctcggggcgcatccctccggatgagcatttcccatt

SEQ ID NO: 86699 - DNA, 578 bp, Heterodera glycines
ccttttttgtttctcgctgagttgggcgaaggctcctattcaaccgtttatttggcttcagagcgccaaaccagtcgaaaatttgcagtgaaaatgtgtctcaagaagaaaatcatcaaagaaaaaaaggtgcagcaaattttccgtgaacgtgacattctccgacttttgtccacgcccgcaaatgcgtgcccatttgttgtccatttgttttgcacatttcaagacgatgagtcgctgttttttgtgctttcctatgcgcccaaaaaagatcttatggcccggctgaaaaagctccaacggttcagcgttggccagtgccaatttgcgatggccgaacttttcttggcactcgagcacatccatgccctggacgtcatccaccgtgatgtaaagccggaaaacattttgttgcgcgaggacgggcacattttgttgtcggactttggctgtgccaagcaaatcattgcaaagcgggaaaatgtggcggaggaaaatggtgacaaaaccgacggacaaagagcagatgatggccagaaagcagagaaaagtgctgacagcaaaagcagcaaaaaacg

SEQ ID NO: 86700 - DNA, 640 bp, Heterodera glycines
gtccgaatggcactcgtacgctgccggactcgcagaaggctctctcaccaaactgcaaatttcaaatcactacagtaacacagtgaagggaatatgccgagacaataagggatactgtagaaaactttaccgctatttgaatgccaatttggaatggatcagtgcacagattgatgccaacccaggcgatttgtactggcgccaagtcaatttgacattcaatcagctgaccggaatttttgacggctatgcgatggacagcggaaaaagcttctctccacgggttaatttcaccattacgcccatttacatgatccaaatatcgggcgaactcattgatctgagcattttgttcaaaaaagtgcccagaagcaaaggagaagccgttgaattggccgaggcggggcattgttcggggctggtcaaagtggcggcgggaaacagcgatttactaatgtcccatgttgcgatgagcggcttcaacacaatgaatcgcattgtcaaattgtacaaatttgcttatgacccaaaggatgtccctggcttcgccgtttccttttcgggttatccggcggcgcttgcctcggccgatgactttacgctgacaagtgccggattgctttcaatcgaaacgaccatt

SEQ ID NO: 86701 - DNA, 672 bp, Heterodera glycines
  unsure (1)..(672): unsure at all n locations
tttttaatgcgaattccttctttcgctaaaattacaaattctgctgtaactcaaaaagctttattccttcctggatatagcatatattttgaacaaacggaattcgtataacacgacagaggagcagtgctcgcattaattggctgaccgaactcaccacgcgcgattcaactccagttacaaccacccaaacttcaaaggatttttctgaaatcagcaaacatttagcgctcgttgaggacgaagacaatattaaaaggattcaagcaaaacgagaaaaagaagcccacgaacgcgcgttggcttttgtcaagaatcagttattgaactcgcggaaagacgactggctccatcaaccaatcgaagaattgcttggctacgcaccgaaatactaacggaatggcgaagcaatgctttgttactgttggcagtacgcgttttgacgctttggtcgaatctctgttccgtagcgatgttctcgatgctttaaagaaactgaaagttgaatgtgtgacaattcagaatggcaatggtgtaattcctaagcaaatacaatccgccatattaaatcaaacgcaatgcatcattgacggaataacgtttcatttgttcgattacaaagccagcataagggagtatntacaaagtgcagaattaatagtgggacatgca

SEQ ID NO: 86702 - DNA, 676 bp, Heterodera glycines
aacattcgtctacaatttatccatttcattggcattgtacggcctgtttttgttttacacggccactcgcgaccttttacatccctacaatccggtcctgaaattcttgacagttaaatcattcattttcctgtccttttggcaaggtatattaaaatagatagatccaatgtatgtgtacacttctcctatgtttccttctcgccgttttgggtgccacttcagccattgaccccatttacgacttggatggcaatgaaatcattggcaggggcaccgttgccgcgggatatcagaatttcttcatttgcatcgaaatgttttttgccgccattgcccttcgtttcgcgttcagtgtttctgcttacatcgatgcgcatactggtgaaccattcgaattataagcattgaatcaaaagtcttcagtaaccgccggaagtgatgtcaggcctatgactctgcagagcatttccagttcgctgaaggagacgatgaaccctcgagacattatgcaagatgccattcacaatttccatccacaataccagcagtacacacaggtcattataaaaattagttgcttcatcagtttgattttttagcattccaatccttgtcgatcggtaagcttttttggcgctatttgaaaaatggtcatattgcatttataaataaa

SEQ ID NO: 86703 - DNA, 570 bp, Heterodera glycines
cgaacaattggaaactgaaatttgtggaatgtgccgaagagattgccgaagaccaatggcacggtctgatcattgccaagcaccaagacggagtgatcagctacgaatcgagccatggattcgacgacatttttggcacagaacaaataaaagaaacggaaaaatatttggaaattaatttgtccaaaaatgctgaaccacttggaaatgaacttcaagaagcgctttcttctgcagcattttttgacgattttatgccatttgttttggcatttgaatttggcgccacattttgcgcagaaaacggcggtaccaccaaattgtgcaaagagaaatgcctttcccaatcattggtcgccccaaaaacaaaggcaccgtttgttggcccaaccaaattccatcggacaacgccacgcgcagtgccaaaaaccacttttggcattgtgccaaaaactgaagaaacctttggctttgtgccatttgcacgaaatgtggaccattttggcacaaattgtacgaacattttcttcccggcggaagtggacaaattcttgctgaatatcaccgcga

SEQ ID NO: 86704 - DNA, 646 bp, Heterodera glycines
aaaatatgactctggacttcaaatatccaaacaccgataaagcgcagtggttgaccggagaacagctcgccgatatgtacaagtccttcatcaacgactatcccgttgtgtccattgaagatgccttcgaccaagacgactgggaaaattggagcaagttgcaggctgccataggcattcaacttgtcggcgacgatttgacagtcaccaacccgaaacggattcagaaggcggtgcagaaaaaggcatgcaactgcttgttgcttaaggtcaaccaaattggcacggtcactgagtcaatcgaagcttcaaaactggcacgaaaaagcggatggggagttatggtttctcaccgttctggcgaaacggaagacaccttcattgctgatttggttgttggactcgccactggacaaatcaagactggcgcgccgtgccgttctgagcgtttggccaaatacaatcgtattatgcgcattgaggaggaattgggcactgacgctgtctacgccgggaaaagtttccgtagcccgcaaaactaagagcgtgtggaaacgaagaaaaataggactgttcgttgactattcgctggatgtttagtttcctgacattgattatttgttttcgaaaatcacttgaatgctat

SEQ ID NO: 86705 - DNA, 642 bp, Heterodera glycines
aattaaattattctatttttgtgcatgtcttctctgctgctctccatcttcccaattgtgtttttggtctgttgcaatgcaatgccaaatttcccgtgctgcccgggcagtcagcaagtggttgctgtgatgtccaaatacattgacactttctcttctgctgctgacgagtctacagtatgctcaaccgctaaaagtactgtggatggaataaaaaatgaactgtcctatcgcgtgggatgcccaagcggaggagaagcacaaattgtgaatgaaattgatcaacagctgaagaacattgcgaaaatggaaatcaattatgaggacgagtgcccgtacaatttgggctttgcccgtgccatgttcgacttggccgctgctgctgctggccatgcggggaacggcacagaatggcaatacatgaaagtacaatttgagcaggaaagccaagcaatcaaagcaattggacaagaaaagaactttgaagttacggatgtgcattttggagtcccaagcaaaggggtttctgcacatcaaaatgtgccgagtccgagccatgtgattgccaaccctggccaacacagttcggttggccaaggaaagaaagaagaaccgttgtcatcggacttcgatttttgaggg

SEQ ID NO: 86706 - DNA, 637 bp, Heterodera glycines
aaagctaaaagggaatattaatggctttcgagtttatttgcataatcactgcttcaagttgcttcttccctgcccccttcgattctctctcttctcatgcaaaattcgctggccgatgtcgctggctctgctccccaaaatgtccaagtcggaagtgccgttccttcccttcctctgacggctaattcgtttgccaattttcccactaccacacacaatcagcagcagcaaagaatggtgcccttcttctcctcaaaatcactcgtcatcgtcaacaaatgcgacgaatcagcaacatccctcacaacagcaccaaatgcatctccaacagcaacaagttcaaaatgctgtcgcccaattgttgcgccaacaatttcccaccagcgcgcctggaattatgggaatgaacgctcttttgaacgcggccggaataagcggcggacaagcttttcctaacattggcacttttcctgtacatcagcaccaatttgacttacaatctctcgccgcggctgctcagccacatcatcaccaacagcagcagcagttgtcctccgctttgaacttgcaggcgttggttggggctggagcagtgcaccaaccgccgactcccatcacttccgccgcggcacccaat

SEQ ID NO: 86707 - DNA, 555 bp, Heterodera glycines
  unsure (1)..(555): unsure at all n locations
ggngcctatttggnggntggggttctcaatgacgaanaaatttgtaaagcacaaaggccccccggttttcaacaagaaagaacggtaccgaatggtccgcggcatcaaatgggtcgacaaaattgtggaagcagctccatatgtgaccaccttgaaaactttggatgacaataattgtgacttttgtgtgcatggcgatgacataactttgaccgccgatggaaaggacacttatgccgaagtgaaggttttttggcgttacagagaatgcagccgaaccccgggggtttcaacaacggatttggtgggtcggatgcttctcctcacgaaaacgcatcacaaaagcaacgaacgcgagttggacgacgtggagcgtgaccatgcacttaaattgagcacggaccaagaggaccgctccccttggacatgcatttcacattttctgccttcaactcagacaattatgcaattttctgagggccgagctccaacccccgaatatcgaattgtttacgtctgtggctcttttgaccttttccacattggccacctttg

SEQ ID NO: 86708 - DNA, 346 bp, Heterodera glycines
tctcggcttaagcaaaaagggaaaagccgaacgcaccgatggaaagggagaaaaagaagaaaagcggcggagaggagacaaatgctttaccttttccttgctcaattgtgtacaaatccctccccttttccccatttcgctattccccgactctccaatttcttttggctgttagcttttgctttccgagtgatccttccgatgaattcgccgtgccttttcttccgtcaatgactcatccccaaaaggcaattaattcattaatttttcttctcccttaaatatatttgtgccaattgaggagtttaataaatgttgtggtgcaaaacaaaaaaagaaaaaaaaa

SEQ ID NO: 86709 - DNA, 711 bp, Heterodera glycines
ttggcttaaatcattccaccttgggtattttgcgcaaccgttcgatcaatagaattccaattcgaattgaagaatgtgctgagaatgaaaatggatttgccgatgattatgcaaactatctcttcgattccgaccaatccgacagcgacaatgccgaagaggaaaacgaagtgtcggtccaaattcaaagccaacccatcggaggccaccgacgcaaaaagacgaaaagctatcggccgattgaaattgtggacggatttccgttgaagcgaaacatgggggcgcagaagtggcgtcgtgtggaaaacactaggcttttgacgagttttgccgacactcaggacatttgctttgatggttccgatttaatccccgagacgatttctgcgttctcacgccttttgcgagatgaggcaaaaatgaaggtttggaatgacttcctggagaaagacgaatcaggacagaaaaagaggcttttgcaattcgaatacgaaattctcatggcacgcgacgcttcgaaggcgcagcattcgcaacaatcggtcaaaaatacggacatcaaaaagtcggagagtcagccgcacaataaaaatggtcagccttcgtcgggtggtggcaaatcgtcgtccgattgttttcagcgactcgacaaaaaattccggcgactgtttgctcaaacgacggaacgtccaatttgattgcctctacaga

SEQ ID NO: 86710 - DNA, 545 bp, Heterodera glycines
tctttactcactttgtttctgcttcagccatttttctcgcgatgactcatcggcaagagttgagctgaaagtgacgtcttcaaacggaatgcctttgtaatggaggataagacggatctgcgcatttggatgaacaaatatggaaatgtgttcgaatttgctcttacgggttccgcaattcctctcgacgaaaaataagcaacatccaccagtccatctgccttggagacaagacaaaaagccgaagttgaagtaaatgaatatttgcgggatccaaaaattaaatccagggccgatccatcattatactgggaagtcaattcacaaaaatggccaatgattggtgacgttgtacggaaatttctttctccacctgcaacaagttcagaaagtgagaggcttttctcaacggccggtctaatttcagatgacttgcgaaagagtttattaccagaaaatcttgcaaaacttttgtttcttcatcacaatttgcttttaaccggtttctcaattgaatgattttgcttttacaaatttgctttcaa

SEQ ID NO: 86711 - DNA, 359 bp, Heterodera glycines
gtgtgagaaacattttattttggcttgaaaattgtggtgttaaagaaaaatgcaattcttaggccgcgatttctggctatttttaattattccgcttttatgtgctctcattgcacaatattaaattcctaattgtaagtccgactacgaatatctgagaactctcctctctctgcgatttctttttatttgacattttgacccttactcattttggtctaatgttaaaatactgtgcttctttctgtttcagcttcttaagcaatttgtggtctggtgatgaatgaatgatttgtctatttaatcaacagaataaatgtttttgacgaaaaaaaaaaaaaaaaaaaaaaaaaaaaaaa

SEQ ID NO: 86712 - DNA, 585 bp, Heterodera glycines
ggctccggcatgtgcaaggctggtttcgctggcgatgacgtgccccgtgcggtgttcccgtcaattgtgggtcgtccccgtcaccagggcgtcatggtcggcatgggacagaaggactcgtacgtgggagacgaggcgcagtccaagcgtggtattctgacgctgaagtacccgattgagcacggcatcgtcaccaactgggacgacatggagaagatctggcaccacaccttctacaacgagctgcgtgtcgcacccgaggagcatccggtgttgctcacagaggctccgctgaacccgaaggctaacagagagaagatgacccaaattatgttcgagacgttcaacacgccggccatgtacgtggccattcaggccgtgctgtcgctgtacgcctctggccgtaccaccggtatcgtgttggactccggcgacggtgtcacccacaccgagccaatctacgagggttacgcgctgccccatgctattctccgcttggacttggccggccgtgacctcactgactacctgatgaagatcctcactgagcgtggttactccttcacgaccaccgccgagcgtgag

SEQ ID NO: 86713 - DNA, 251 bp, Heterodera glycines
gtggatctctagttgcaacgcgactattccagaagttgcgtttcgccgaaaagggcgggcgtctggcctgggccttcatgggagccatcgccaccggagcgaccatctggtgcacccatttcgtggccatgatcgcctatcagccgggcgtggacgtcacctatgaacccggtctgaccggcgtgtccctaggcatcgccatctgcggaagcgccctggccctgtggttcggttcgcgccagatgcggttc

SEQ ID NO: 86714 - DNA, 629 bp, Heterodera glycines
gacttttttgttatttccttggatccatcagtgacaaatgccatgcaaagttccgttagctcgaatgagatgatatttggtggaaattcgaccgtttgttctgaggagtctcatgcgatgtctgaaaaggtgcagacaattgcttcttccatttacagagaatttgaaacgatgatacaaaaacatggacaggaaagcataaaagatttgatgtcgctagttgtaaatgttttggagagcttagacacggcataccaagaaaaggatgaactgattgtcgacctcgaaatgcttaaggatgaaaatggacagttgctgaaccaatacgaaagggaaaggcaaatgcgcaagaaccaagaccagaaaagtttggaaagggaggaattcatgtcggagacaatccgcgaattggagagcaaagtgcagagtatggccagcattgtcagaatgctcgaattgaaggccaaaaatgccaacgatcatgcaatgcgactggaggaaagggaggccgatcagaaaattgaatatgaaaagctgcacgaacgttacaacgaattgttgcggacacatattgagcatgtcgagcggaccaaattcctgatgggttccgaaatgttcgacatggccca

SEQ ID NO: 86715 - DNA, 594 bp, Heterodera glycines
  unsure (1)..(594): unsure at all n locations
gtggattatttgcntattttctgaagccgaaaaagatgatttggaaaaatggtttggaagaaatcgatggccttttttaactcaaattagcgcgacaaatattcggaaaatagctgagtcgacaggaaaactgttggtgttgagctcaattgaaggaatggacagacacaacgccagcacggaatcggggagtttttttgccttgataaaacgaacagtggtcgaagcccgtgtggacgctgaaattgagcagcactttcagtttggctggttggacgggacccaaattgccagtggcgttgtgatggactctcttcttctgccgaatttggtcgtgctcaattactccagctacgaattttacctcagcaaagatcacccagcgcaaatgacggccaagtcgttgcttttgttccttcacagtgttcggctgggggaagtgacagtccacgggggccgcgcgtggatcacacggctgcgaaggatggcctacgaaatcaccagcaatgtgtacgacatgttccaacaccaacccattctcaccgtttgcctttttggagtgccattggcattcttctccatcatcacttactc

SEQ ID NO: 86716 - DNA, 293 bp, Heterodera glycines
ttctttgggatggacacttcgatgagaatgactccgaccgaatggcaggcaaagccctcgaatggctttcataccatttgaaattggcaaaaaatgacgaaacgaattacgacgagacactgaccagagtgatcagacttttggggttgagcatacagcggaaatggacggaagcgaagtcattggcggaagagatgtttatcacagttgctccatcggacaatgcgcggcaaatgatttattcctccatggaacaaatgcagcaatttttgaattttgacgaacacattgaa

SEQ ID NO: 86717 - DNA, 340 bp, Heterodera glycines
gggggggggggggaggcggggcgggaaggcaaaggcgggaggcgcacgagaacaagggaaatccggccgcgcacgctcacttcactaaagagggaagctggcgtttgattctctcctggctcgacatcgacttggtgtcgggcgtcttcattttcgtgcccatgctgcgtccggcggcggtcccacctgtgggcggccgcaccatccgtctgcgttcttgaagcttttcgtcttcactcatcgttcccacatagccccaacacgcgttgcgggctatgtcccgcctcaaatcaactcccaaaaggaccaccgaaatggccgaaaccctgaccttcaccct

SEQ ID NO: 86718 - DNA, 580 bp, Heterodera glycines
gctttccctccgttctttctccaactgctgccactttcaattgcccttcacggcaatggctgatgacattcctcctcctcctgctgttgctgctgatggtggtgatgtcgtcgttgatttggagcaacatgttcgccaactcatcatgtccatcggccagggaagcgaggacgcagtgcacgagctttccattctgatcgagtcattcaaccaggagcagctcgtcgactttctggagattatggcaagaatgtacgtcgagagcggagtcagcgttgacatgccgggtggccaaggaatcaacatgttgatggtcgctgcgtcctctggaagggtggactttgcgcgctacttgctcgcccacggtgcaaccgttggacacttggacgccaccggaagcgtcttcccactaatgctagctgccgaatctggtgagttggaggtgtgccgtctgctggtcgaggaatgggcagctgaagtcaaccagcaagcaattgatggcacgacacctttgatgagcgcgagcagtgagggacgactggacgttgtgatttatctcatcgatcatggcgtcgaaatc

SEQ ID NO: 86719 - DNA, 751 bp, Heterodera glycines
ccgacgactggtctgacacctgctgaatctgttcggcgttcgcagatctctgcattggtggaaccgaaacaaccacaacaacagcaacaagacatcaacaacggcgccggcgacgaacatggcggagtgcttcgcaggtcaatttcggtgctcagtgataattggtacgattgggttgaaggcaatcagacggacaaagctggtttaagcaatcaacaacaaaatgtcatcgtccatcagtcagtcaacagcaccatcgacgcggatgagcatggcatatctgatgaagccagcccggtcgcctcactgtccacaatcgaccttggccgtgtgtacaccactgttggcactgtgatggaatcgctgctggttaactttgcgcacctgtggcaatatcggttttttcgcgttgccttcgtccttctttccatctacttctgcctgggcttcttggaacggtgtgctgtagcgatgaccgccgcatgcgtccgctgggcttggccaccggtgcacttcatgctcggctcgtcacggggaacgctgttctatttgactgactggttcgcgtggatggacgacttcttgtcaagttgggtatgcgacatggccaacagatactgtcaccaatacgatgtgatgtgcgattgtcagtgctcctttgtcagccgaacgcagcgggcagctttgctcggtggccgtcgcttctgatggatgtaaagaatttgatagcgatttgacatatatggatgat

SEQ ID NO: 86720 - DNA, 582 bp, Heterodera glycines
cacgcgggtgacgacggttggatggtggtgaagaaggagtcgttcaagaagttgtgcgacttctacgaggagcgtcgtcgcgtggagtgcggcggtggcaccgtcgccgctgacccattcgcggaacaattggagcgcgaatttcgcgaggcaacgatggctgacaacaacagcaacaaccgcaccgatgaacgcgtggatgagaaattgacggcggagagtgaaccgaaaaaggcagacgaattcgtgaaggaagttggacaagaaccggctgccgaggtttatgtggcacaaattgtggatttgaccaccgaaaaagatggaaagtcagaaaaatcggagaagaccattccctgtgtccattcggttgtgatgcgcggcgtatgtgccggatgtggacaggattttcgtcagccaaatgaatttatcgggaactcggctgccattttcaactttgaacaacagcagcaaaagatgaaccagaccgtgcccatttctggttccttcggtgttgatgaccaccagaaaactgcaaaaaacatctatccgtctttggaactattggaaaaagaaccacgcgga

SEQ ID NO: 86721 - DNA, 262 bp, Heterodera glycines
ttttgtctcttttgcttctttttgccgacttttcatggctcgccgtttcttctcccactgacccatcttatcgtacgaaggcacaaattgatcattcgggcaccaaaaaagtcgttaattctcgccactctcccgcgccggcgccgcacagccaacggaaggagaagcagggcaaaaaagagaaggccaaaagcagcagcagcagttcatcggcggaggaggaagaaaaaaaacacaaaaaaaaaaaaaaataaaaaaaaaa

SEQ ID NO: 86722 - DNA, 668 bp, Heterodera glycines
gagaaatggcttcatctttccgctcctcaatcatttccatcgtcgcaattgtctgtttgctgtgcaaatgctgcttttcggcaccccatccatgctgtcctggcagccaacatgtcgtttcgatgatgaaagatcacaccggcacattctccgcttcgatgccaaagtcttcgctttgtatgagtgccgaaagagtcgccgctgcggtggaaaaccaactgaaaacaatttggtgccctggcaatggtagtcaaacactcatcaacgagatcaacgcaactcaatcatcatcagatgagtgtgctcgcagtctcggcttcgtccgtgccatgttcgaaattgccgcttccgccgcttcccatgccggtgccaacgccgatttggctgtccagttccgagaacaagttggcacaattgacagcaattgtgccgcgttgggcattcatgttgggcaaatcagcttggatgcccccaagggagaccatccgcaagtgcatgactctgagagtgtgcttagtaaccctggcaccagcgggtctcacaagcgcttttaagtgaatttcgtagattcgatgatgtcatcatttgttgattgatatgcaatagaaattattttattcgaaaataattattcatcttttttattaatgaattttggtgagtcggtg

SEQ ID NO: 86723 - DNA, 566 bp, Heterodera glycines
agtttcgccggcacattgttgctagaaggtggcgaagaattttcgccagatgcccagtgcgcacagcaatggaaaaagcccaatgagtcgctgtttgtggtccaacaattggcccgccaagggcttggcccgcgtcaaattttggcaacgctttatcctcgctattgttccaccatttcggacgacatccccgatgagtggataatgcagttactccgtgaactgtgcgagcaccggacacgccaaaaattgtccaattacaacacatttgaggacgcagtggagttattcaggaagagcaagcgcattttggtgatcaccggtgccggtgtgtccgtcagctgtggcattcccgactttcgctccgagaatggggtttatgcacggctcaaaaaggactttcccgagttgccaacccccacggcgatgttcgacattgacttctttcggcagaatccgaggcccttctacaactttgccagggaaattttccccggccaatttcgaccctctctgtcgcacatgttcatcaagtttttggacgatgaaaagaaactgttgcgcga

SEQ ID NO: 86724 - DNA, 518 bp, Heterodera glycines
gagaatcggctgtcaattcgtttgtattttgccaaaattatggcaatttttacgaaaattttcaattttattaaaacgagtacagaaaaagaaaacaagcaaaaatatttgcttgtatttgttgaaatttggaacaaaatttgtccgcgtattcatgcagaactccaacagaatgacatttcatcgactgttggcatactgtacaacatttggcggggaattgcatcccgatacaatcaaattccgcttggaatttttcaaggttatgagccaattagggtattatcgtcagataatggcttactgttactggatgaaaaaggcacctacagttctaatgtgatccgtgctgaactttttgaggaccatgtggtgaatatgttgcgactgtatgagcaacagagcgaaggaaattcgttcggccttttgttgcgccgttgcaaattggatggcattgcgtataagcatttggacaaatttgcaaatggaaacgaattcgaaaaattacgagcgaaata

SEQ ID NO: 86725 - DNA, 421 bp, Heterodera glycines
  unsure (1)..(421): unsure at all n locations
aagaagaagaggggtaccataaggaagggngaggaagaggaatnngacgagatcttcagnaatgggaccagnaagcgcgacaacagaccggacaccgaccacgactacgcaggcacgcgccaattggcgacggcgaagggagcgaccggcaaacaccaacggcagaagggcggcggagggacggcgaaagagccgaaaaagaaaacggcacttgtcaatgggaccgattcggtggtccgttcatcggcacggccgcaccgtccgaccaaacgttttgtttttgaaacaaacgaatcattcattcgtgggacttcgaaagtgcgcccaacatcgccacgcaaacatggcaagaaatcgactgcggagggaggaagcgaaggggaagaatcggaggatgacgggaaggaggacagcgtggaaa

SEQ ID NO: 86726 - DNA, 379 bp, Heterodera glycines
ttctaaaaatcgtcgactttcaagcggtgtgccgtatggttcgagcacgctcaaaacattgtgtcgtcgttgttgataatacgttcatgacaccgtacttgcaacgcccgttggaacttggcgccgatgttgcggtgcaatcgctcaccaaatacatcaacggacacgccgatgtgctgatgggcaccgtagttaccaacaaggagcagcttgatcagcacatatacgcccagcaaatttatgctggcgccgttccgtccgcctttgatgcctttttggtgcttcatggcatcaaaacgctcccattgcgaatgcgccagcacgtggaaaatgcgctggcaattggacgatggcttgagaaggacccgcgtgtggaaaa

SEQ ID NO: 86727 - DNA, 631 bp, Heterodera glycines
cgctgaaattatcagttatctgtcgccctctgatctcgctttgtctgctgccggtgtctctcgcctttggagaagtttgtccgaggataaactgctttgggcaggaaaatgtcgtcaacattcgataaatgaaatgtttcctccgaacatttgtcgcaaggaaaattgggcgagaagtgacacagggggcgaaagcagctccgaattagccaacatttataatgacagttcgcgtgcgaagtctgtcgcttttcctcccccaaatccatctccaatgcccttgtgtctccaccgctctcgatggaaggccgtttttctgaggagtcttcgtgtgtcaaacaattggaagctgagaagaccgactgctgtctgtcaattgaggggacatgacgaacatgtgatcacgtgtctgaagctgcgaggtgacctcattgtcactgggtctgacgactgcactttgcgcgtttggtctgctgcgacgggaacgtgtgtccacgtccttaacggacacattggcggtgtttgggcacttcagctctcacaggatggcaaaattgctgtcagtggttccacggataggacagttcgcgtatgggacactgaaaagggaactctgattcattgtcttaac

SEQ ID NO: 86728 - DNA, 240 bp, Heterodera glycines
gtgcaaacagtgcactttgccatgtttgctgtgggagagggaaagccacgcgacgaaacgggcgattgacggagtgttgcgcgaggccgagcaaatggggattgcccttgaccctttggagtgaattccttttgctgatgcattggcttttgccttttctgcctgatcaaaccggctgttttctgtttgagtgttccttttgcccatctccccccccacgatgactcgcattttatccat

SEQ ID NO: 86729 - DNA, 485 bp, Heterodera glycines
caatcgcaggggctgtccagtcgattgcggattcggtaacaaaggcaaagtttgtcggaactacgaaattgggcatcgatgaatgtgtgctcttccagattctacagtcccttcgttctttggtcctttcgcccggcgggcgccacctaaccaatgaaacattatgcgaaattttgcagtgctgttttcgcattggtctcgagtcttcactacccgaactgcttcgaatggccgcggagaacgctttggcggaaatgtgccgttatctcttcgcctccatccaaacgtttgagcaggacatccgacccgggctcaaagaattgatgaagtaatttagacagacacaaaagaattaattgatttgttcttttcgtacattattcccaaggttttttaaaatcagcataacggctttggaattcaaaaatttcttgcatgaggaataaagggtcagtgccaaaaaaaaaaaaaaaaaaaaaaaaaaa

SEQ ID NO: 86730 - DNA, 656 bp, Heterodera glycines
gcacttcttcgccagacattccgcttatttttcagtcagttgaccgcgatcggtccggtcaaatcagtgccgatgagcttcaacaggcgctgtccaatggcacatggaagccgttcaacccggagacgtgccgaatgatgatttcaatgttcgactcaaacaacgatgggggcatcaattttcaggaattcggcgcactttgggagtacatcaacgattggacgcgcacttttcgcactttcgaccgcgacaacagcggaaacatcgaccgcgacgaattggtcaatgcgttgacacaattcggttatcgtctgtccggcactttttacgatatgttaatgcgcaaatttgaccgaactcaaagcggtcgcataaacttcgacgacttcatccaactttgcgttgtgctccaaacactgactaccgcttttcgagaaaaggacaccgaccgggacggatggattcgaatttattatgaggaattcctcgccatggttttctcgctgaagatgtcaatgatggctaaacaatgagcaaaagaagggggaattattgactgatgaggatttgctaatacagtaacccacttatttttgtatgttttctgttaaacattatttacatatcactttcaattttacgacatttttgtttga

SEQ ID NO: 86731 - DNA, 561 bp, Heterodera glycines
ctaatccttctgattgtgcttttggccgtcgtctcattccgtctctcggcttctactggtgacaaaaaaaactgctaatgatgggagtggaaacaactcatcagctgggattggtacgaagatcaaaagaattgtcaccgctggactgctcttcacttccctggcgacgggtggggcggaagcgattgggcgaagcaatgctcagggaggaaatgccgccggattggtgccatcgcatgtgaccaatcgctcaatggctccaccacctcctcctgtgcaatttgaaatgggggcaaatcgattagagaaaatgagggcacacctacgcgaacttgctgagaaaatgccggtcaatgaatcgaagcgtctgtcaccgagtggacccgaccctcatcatcattagggccatggatggatctaacggaggaagaaagaatggatgcttagttttcagattttattctatcctcttttatttattagtttttcaaaacaaatttcttccacaactttttaaactatttgttgttttgaatctttttagataaatctaaaccccta

SEQ ID NO: 86732 - DNA, 587 bp, Heterodera glycines
  unsure (1)..(587): unsure at all n locations
acgtgtgcgaatttggtgagaaagccgttgaaagcggaggagggcggacaaggcgaagagatgagctacgacatcgaaatgcgcatcatggccaccgccggtttggttggcattccaaatgtgggcaagtccacacttttgcgtgcgatttcgagggcaaagcctaaagttgccgcttatccgttcacaactctcagcccaagcgttggaatggttcagtacggcgacttcttccaattggcagttgccgacattcccggattggtgcaaggcgcacatcgcaacgagggactcggcttcagtttcctccggcacattgtgcgctgcgaatcatgaaatgactttgtacgacgacgaactaagcaaaaaagaagcggcgattgtcataaacaaaacggacttattggacggagaaatggttaagtcagcgatcgtttcgatgtttccggagcaaagtgtgtttttcgtttcgggaaggcatcgtttgggaatcgaaccactgctaatgtttttgcgggaaaaacacgagcggttcttgaaagagagagaagcgaaaatggagatagagagagagcagttgatgatng

SEQ ID NO: 86733 - DNA, 517 bp, Heterodera glycines
acaagtgtcccctccttcccctacactttgtcttcttcgtccgtcccttctcttctgaattgccattttgcggtgctcagttggcggatgtccaagctctccaaacccattggctgcagcagcacgtggcgcagttggcccgtccgcacgtttgcgtcgactgcgacgccggcttcaccaccgcggaagcgttgcgtgcccacagggaaatgcaacacgcggaaaaaacggcgcggaaggaacagcgaatttcgagcagaaacgaagtgaaatgaggccaaagattagtacaaaataatatttattgaacttctgtgaaagttgccgccaaatcgaattttaattttcattttttgtactgagttcggccaaaaaacgtgtaattcccccccccccctccgctcacatttatcattttccaccgcactttttattttattttatttgtcccccctttcactgaatgccattccttccttttccttttcctccctttttttcccatttttcgcacttc

SEQ ID NO: 86734 - DNA, 434 bp, Heterodera glycines
tggactctctatttattggtacacatctcgttttttgaaacggtgtgtgtatgtgacattcgtggtgagtcgaagtgataaataggcaaatgtctggtgatcagaaggggacccacgcgtttgggcgctggcatttgtggcgccaaaaaatataaaaattaaaatacttgagcagtgaaccctctcggagtggtaaatccattttaaaatgaattttgggccaagtttttttcaggtcggtgtcatcagtgcgttcaatttccctgccgccgtttacggttggaatgccgcgttggctctcgtctgtggcaattccgtgctttggaagccgtctcccagcactccgttgacgtccattgccatcactcgactcgttggcgaagtgttgtccaaaaacggactgtcgcccgacatttgctcattgatttgtggcg

SEQ ID NO: 86735 - DNA, 103 bp, Heterodera glycines
  unsure (1)..(103): unsure at all n locations
aggtgctgtcccctgtcaattggcgaatgccgatcaaggnagncatcggaaggatgaaatgtccccgcatnggaagagcaaccggacgaaattagacaacagg

SEQ ID NO: 86736 - DNA, 588 bp, Heterodera glycines
ccatttgctatttttattgaacgatggaagaaggacaatggaaaccggagaaaatgctgcagttaaactcgtggatcaaaagaagtcggctaaaaagaaagtttatgtgccgggaattagccgaattttgaaggcgagcgaagaattggtatacgatgagaaggcgtatttgttgtttcacacattcgaaacgaactatccgtgtttaagttttgatgttttgtccgactctttgggcgacaatcgctccgattttccaatgaccgcttggcttgctgctggctgaccgagcaaaggacaacgaattgctggtgcttagactgtcgaatttgcacgcaaatgaaaagacattggaaaatgcaaagaaaatggcccaaggaaagggcgacgagtcggagagcagcagcagcgaagacgacgaggaggaggaggagacggagggcggcacaaagagtgcgcggatgcacgcggcagtgatccctcaccacgggggcatcaatcggatgaagtgccaaacaattggggctagcaatgtgtgcgccgtgtggaatgaccagcagaaagtgcagttgtggaacttggacccgg

SEQ ID NO: 86737 - DNA, 715 bp, Heterodera glycines
ttttgcttattcactttctttctcccgctaattcgtggacaaaatgtgcgacgaagaagttgcggctctcgtggtggacaacggctccggcatgtgcaaggctggtttcgcgggcgatgacgcgccccgtgcggtgttcccgtcaattgtgggtcgtccccgtcaccagggcgtcatggtcggcatgggacagaaggactcgtacgtgggagacgaggcgcagtccaagcgtggtattctgacgctgaagtacccgattgagcacggcatcgtcaccaactgggacgacatggagaagatctggcaccacaccttctacaacgagctgcgtgtcgcacccgaggagcatccggtgttgctcacagaggctccgctgaacccgaaggctaacagagagaagatgacccaaattatgttcgagacgttcaacacgccggccatgtacgtggccattcaggccgtgctgtcgctgtacgcctctggccgtaccaccggtatcgtgttggactccggcgacggtgtcacccacaccgtgccaatctacgagggttacgcgctgccccatgctattctccgcttggacttggccggccgtgacctcactgactacctgatgaagatcctcactgagcgtggttactccttcacgaccaccgccgagcgtgagattgtccgtgacatcaaggagaagctgtgctacgtggccctcgacttc

SEQ ID NO: 86738 - DNA, 583 bp, Heterodera glycines
cagcaacatcgcacaaaaatggcacgccgacgaagaaagaaggagccgcgaaagcagtcgtacaagctgtacgttcgacgtgtgctgaaggaagttcatccgggcaaggaaatctcaatgcgtgcgttgaacatcatgaactccttcgtcatcgacgccttggaccgcattgcaacggaggcgacgcgaatggcccacaacgaccggcgcaaaaccatcacgcttcgcgacatggagttttctgtccgactgtgcctgcctgacgtcatggccaaagatgcgaaccagaaggctcagaaaacggtgaccaagttctatgctgcaaaagtgcgggatcggatgagaaggacggagatgcgtcgtggcgaatttgcgatgatgcagatggcagcgctgtgagcacactcaacttttggacgaccggcggatgaagccacctgtatattgttgatgattggccccgtatcccccattactgtatgtgtatgtattatacaatgtatctaccattcttgtgtgtgtatgtattattcactatgtgctttatatgtatacctggtcaataaaatataaccccaaaaaa

SEQ ID NO: 86739 - DNA, 196 bp, Heterodera glycines
tgttatcagctgctcgtgcaacttctgctgctaatatcggtttcgcaatcggtgattttcaaattcacgtgcagccagaaatgcccgagattattaactttgtcgttccggagctcattccgctcttaaaacacacaatgaaatcgctgaatagaatttttgtctttttcgaagaacttttgtcatgccgatttcc

SEQ ID NO: 86740 - DNA, 821 bp, Heterodera glycines
ctcctggcttttttgattggcccttccattggcgcctttttctcgatcggtgcccgcggaaagtggcgagttcgacccgtccccggctctactggcaattgcactcacactggcagaattggcacttttggtgttctttttgccggagacattggccaaggcaaagaatgacgattgccataaacaaagtgggcatagccttcggcatttgttgtcccctcgggcgctgttttccttcgacttcttgtctccggcatcggcttcctccccgccggtttcggtgccattgctccaaaagtattcccgcgtctactttctgttcatgctgctgttctccgccatggaatttactctcggctttctcacccatttgcgcttcaattacagctcaatgcaacagggccggctttacctgttctccggcttttgtatgctggtcattcagggattcgttgtgcgacgcattccgtcaacactcaaagcacaaagtcacggagcgctagttggactggtctcaattgtgccagcttattttgtcatcgcttttgcacattgccaaaatggcattgaacagcccttttcatgggacttcttctgttctcagtcgcatcagccactgttgtgccctttctgactacgctattttccaatcagtgtgatcagtcggcgaagggtgcttgtcttggcactttccgttcagttggtgcattggccagagcttgtggcccattagttggagcacttttattttggttgttggggccaactctgagctattgccttggtgccatcggactcattgcgccgggcatcattttcta

SEQ ID NO: 86741 - DNA, 484 bp, Heterodera glycines
tatttcttttgccgcccatttacttaatctcccaatttttcattttttcatggccctctctgcccttctgcttcttctccccctgcttctcaatgttcaaaatatcccagatgagtcagtccaatcggatatgaaggctgtttattcggctatttcatcgccggaacaatggaagaactcacaaaattcattggcttcactcgaatcacaactgacagagccccaaagagcactggcaaaaatgcattgggaattggagaccatccaaaaggaaaagccggaggcaccgccacaattcgacttgggacttttctcggaagctttggaagtgatggtcgaaatggacgaagaagcgaaagaagtgaagctgaggaaggacaaactgattgaatgggcaggaggagaggaagcaaaaaaaaattgaaggaaaagatgacggaggaggacacagtgccggaagtgagggtgaacgagaatggtaagg

SEQ ID NO: 86742 - DNA, 540 bp, Heterodera glycines
aatggagggaacgacgtcgccgccttattttttgcgtagtcggacgaggaaggaaggaccggccgtgctggaactcattgagaagcttcaacaagccaacgacaaagttgaccaacaaatcgcagaggaacaccaattgcgaaatgaagtccttcagatggcaccgcgcgcgatgaagaaatacctcggcacacgctttgaacgactgatgaatgccaaattggaattcccccaaatggcggacagtgaacgcaaatccgaggccgagttggccaaggcgaaagaagaacttcgccagttgaaactccaagcagtcaaagaggcggaggaacagaaaagggagttggaggaggcgcagcgaatggagagggaattgaaagagcgagtgaatcggaaattggccaagctgagggcattggaagaaatgtgatggcaaatgtcagtcgttcttcagtttgtgcgggttttctctgttgtgttagtcatgtaattatttgaccgtatgtttaacaataaataggatttatttgcaaaaaaaga

SEQ ID NO: 86743 - DNA, 272 bp, Heterodera glycines
  unsure (1)..(272): unsure at all n locations
gtgggcatcggcacaanttccaacnnccgagaatctcatcgcattnnntggaagggtacttcgcgcaacatcgnactgggggaaccagcnntgatgtctnnttgccggccccgactattggcacgaagggacgcgaagggaagtnngcgcaaatttctcgagggaacaggtntggcaccngatttgcncggaacaaattctgtccngagttggaactagcaagaaaagcgtatcatggcantctatgagggatggacagttgatgngagatg

SEQ ID NO: 86744 - DNA, 717 bp, Heterodera glycines
tcaagtgtcacaacaattggcgggagaagctgcgctcgttgcaggaatacggcgacttcaagcagttcctccgcttgtgccatttggagcccggctacggctacgaattgttggcgccggtgcactccgatttcccggccgagggcagcatttgtgagttgcaagttgggcgcagacagctcgtgctcatctatccggacgacgaggggtgcactgtccgcttcgcattgccttccaaacggatccgtgtgtggcgcgtttcccattccgaacaccaactgttggcccagatgagcttccaattggagtatttgcgacagccggacgagttcgggctgatcactctgcgcactgatcagtccgtccttttgtcgctgttcctccaatcaattgctgacgaaatcttgcaggatcaacaatataaaactgaatctccgttcaaatttgttgacgacgccatttcgctgaaagcagcgtccgacgggtcgtccgcggtggcaagcagttcaattgttgctggagtcggcgatgaccaaaagagtgtgaagtcctgctccaacaactcgtcctcatccaaccatgccaacagtagcagctgcgcactggacgcattggtgaacggcgccggtggcgatggcactgaatatcgcattaaactgatttcgtaccaaatgccatttttggaccatgaaaattttgaggatgtgttggacgcgg

SEQ ID NO: 86745 - DNA, 728 bp, Heterodera glycines
actggctggtgctttgtgtcccaccggtttgaactgcccaacagtttgcggaacgtttgggtcgcatgggcaacgaaaagggcattccgattgcggagccggagattgtggctttcaacagcccggataactcggaccgagaatggatgacgatgttcgagcgatgcgtcaacaagcacatccaattcatcatgctggtggatgaaaagcgcaaggacacccacggactgctcaagctgtcggaggcaatgcacaaagtcaccacgcagcatgtgacgctggagaaagcgaatgacgttgtgcggaagaaccagcgccaaacgctggagaacatcctgaacaagctgaacatgaagaactttggcctcaactacgtgccggtgatggagccgtcggcgtgccgtcgcttttcgctcgaaaacggaaatgtgcttgtgatcggctacgatgtcaaccatcctgctcccatgccgcaacagacccgtcgtttgttggcatcgcagggcgaatcgcaattgagctcgcttgacccgtcatgtgtcgggatttgtgccaacatggctcctgattttaatgcctttgttggggattatttcttccaggaatcgcgccgagaagccattgaccaaatgcagttggttgatcgcatgaagtggattttgcaaaatgtggaaaagcatcgtcctggcaaaagtcgtcccgagtacatcttcatcttccgagacggt

SEQ ID NO: 86746 - DNA, 766 bp, Heterodera glycines
  unsure (1)..(766): unsure at all n locations
gtaaaattctctcgtaaatacaattcgtgcagtgcccccggtaccgtttcgtttggcatggagccgcttcaccagcagagtttccagcgaaagttctcaatttcggcctgccgacgacagtcgtcaattgattntggaggacaatcactttctgttgacaattgtgataagcaacgcgacgaaccacgagagcatttcgtacaaacaggacggaggacgattcgactcgtcacagttcacgctgaagttccacgcgaacactttgtacaaaatttacgtgaagacgaagccggcacagcagtttttaagtttgaacatcgccgggaacgtgctcagtttggctccgattgagggcggcagcggagaatacgtggccatttggaacaccgctgacaaagagccgaccaaaaaagggacacggcaggacattgaatttgtgctttcggccaaggacaaaacattgagcaaaaatttgcaagtcaaattttacccccacaacgacacacacgcgggatggggacagaagttggaccaaatcacttggcgctgctccaccaacgacattggccatgtgtttgtgttggaagagcaagccctttaaagcgaaagacgacaattgcattttaaaaagcgatgggcggagatcaaacggtgacggccaaaattaattttcaattcccatttcaatgcattcattcatttctattttctttaatattttgcaacaaaaagttcaattagcaaaattgtttgcccattccttttt

SEQ ID NO: 86747 - DNA, 485 bp, Heterodera glycines
ggggggggggggggatgcgtgggggtggggaggggggtgggattttcctttctgtaattgttagattatccaaaaaagggggtttccaaatgcttttttccccgaacagtgttctgctattgcttctgatcgtcctccctttctctctttctttcattttaatccctcaaaatgtccgccaaatttcccccgccctttcgtcgcgtcccttccgccgatttggccatttttctgtcattgccaaacgaaacccaattgttctcatccccggcgacgggggaagtcggctaaaggcgaatttgacgggcaaaccgtcggtggtccattacttttgccagcgacagaccaacgatttcttcgcgctttggctcgatttgcaacaatttggcccttttgtcatcgattgttgggccgacaatatgcgcctcaacttcaacagaacgagcggaagggcgcaggatttggagggagtgaaagtgcgagtg

SEQ ID NO: 86748 - DNA, 572 bp, Heterodera glycines
tccccttcctttatctgcacaaataacaatttgttcgccgttaattctgtgaatccgaacgcacattcgcagcaaatggccatggaaacattgggaggcggcgaagaacggaacaaaatggagactgaaatggacgtgtcagttggagaagaatcgcctcatcagcaacggtttctggaagaatgtctgaatttgagtcagaaatttctgaaggagatgagtaaagacgaagagcagcaacagaatgtaataaatggcgaggcgaatgatggcaaatcggacgtggcaaaagagttgctgatttgccattcttcctctcccactgcatcgcctcaaccgagcggatgtttcttaacgtccgccaatgtcgtagcggaatcggacggaatccttcgggaacagaacagaagcggagaagcggacggacaaagcaccgccgcaacgacaccgaacgcatcgcgaaggccgagcaattcatccgctgccgcggtcagtggaagcgttgaagacgaattggccaaaatcaaagtggtcttacgacagcacgagaggaggatccgattgcttgagga

SEQ ID NO: 86749 - DNA, 648 bp, Heterodera glycines
aaaatcggcaaacgttttggggtgggcaaaggaacaattggcaaactgaaatttgtggaatgtgccgaagagattgccgaagaccaatggcacggtctgatcattgccaagcaccaagacggagtgatcagctacgaatcgagccatggattcgacgacatttttggcacagaacaaataaaagaaacggaaaaatatttggaaattaatttgtccaaaaatgctgaaccacttggaaatgaacttcaagaagcgctttcttctgcagcattttttgacgattttatgccatttgttttggcatttgaatttggcgccacattttgcgcagaaaacggcggtaccaccaaattgtgcaaagagaaatgcctttcccaatcattggtcgccccaaaaacaaaggcaccgtttgttggcccaaccaaattccatcggacaacgccacgcgcagtgccaaaaaccacttttggcattgtgccaaaaactgaagaaacctttggctttgtgccatttgcacgaaatgtggaccattttggcacaaattgtacgaacattttcttcccggcggaagtggacaaattcttgctgaatatcaccgcgaggccatacgaaattgcatgcaatgactatgaaaaacgtgccaaaatt

SEQ ID NO: 86750 - DNA, 639 bp, Heterodera glycines
ttactcgaaccggcgccgtcgtcagtcgattatttcttttggcaatcggacgaagcgtcgtcatcttctgtttgtgcagaagaaagacgacagatgtatgaacaatacggcggacaaaagcaaatgagacggaccgaaaatgacaaaaacacggaacaatgccaacggaacgcccagcggaacatcggcgaaagaatgccaacgatggacgacaacaacgaccaacagccgtcgatgctgcgaagaatgcctttgcaatcgatggaaaacgcatcgctactgaagtcgtccgaattttcctcttccgaacatttttctgcttgcaaaaaagaacccatcgaacagagcgaagtcattgcgccaaagaatcggttgggtccaccagcgcattggcgagtggaagaaacggagaagagacagaaacggagtgcgaaaagggcaccacttcccagacaaacgacctaccaaatcgacgagcacggcagacaggtggtcgttgtgaggaacgatgattcatatcggtcaaatgacgaagacgacgagcggacggaaaacgcagagcgcggagtgccacccatcgcgcgcaacggatttgtgaagccggcgtattcctactcgtgtcttatcggactttcgctg

SEQ ID NO: 86751 - DNA, 690 bp, Heterodera glycines
  unsure (1)..(690): unsure at all n locations
tattggtatggatcttgcggcagcgaattcttaaagagggaaaattgacttggacttcaaaaatccaaacaccgataaagcgcagtggttgaccggagaacagctcgccgatatgtacaagtccttcatcaacgactatcccgttgtgtccattgaagatgccttcgaccaagacgactgggaaaattggagcaagttgcaggctgccataggcattcaacttgtcggcgacgatttgacagtcaccaacccgaaacggattcagaaggcggtgcagaaaaaggcatgcaactgcttgttgcttaaggtcaaccaaattggcacggtcactgagtcaatcgaagcttcaaaactggcacgaaaaagcggatggggagttatggtttctcaccgttctggcgaaacggaagacaccttcattgctgatttggttgttggactcgccactggacaaatcaagactggcgcgccgtgccgttctgagcgtttggccaaatacaatcgtattatgcgcattgaggaggaattgggcactgacgctgtctacgccgggaaaagtttccgtagcccgcaaaactaagagcgtgtggaaacgaagaaaaataggactgttcgttgactattcgctggatgtttagtttcctgacattgattatntgttttcgaaaatcacttgaatgctatgagtat

SEQ ID NO: 86752 - DNA, 364 bp, Heterodera glycines
  unsure (1)..(364): unsure at all n locations
catgtcttctctgctgctctcatcttccaattgtgtttttggtctgttgcaatgcaatgccaaatttcccgtgctgcccgggcagtcagcaagtggttgctgtgatgtccaaatacattgacactttctcttctgctgctgacgagtctacagtatgctcaaccgctaaaagtactgtggatggaataaaaaatgaactgtcctatcgcgtgggatgcccaagcggaggagaagcacaaattgtgaatgaaattgatcaacagctgaagaacattgcgaaaatggaaatcaattatgaggacgagtgcccgtacaatttgggctntgcccgtgccatgttcgacttggccgctgctgctgctgg

SEQ ID NO: 86753 - DNA, 658 bp, Heterodera glycines
caccggcggtgggcggacattcgcgtgagttctccgaaaaaaagaattaaaacaagctaaaagggaatattaatggttttcgagtttatttgcataatcactgcttcaagttgcttcttccctgcccccttcgattctctctcttctcatgcaaaattcgctggccgatgtcgctggctctgctccccaaaatgtccaagtcggaagtgccgttccttcccttcctctgacggctaattcgtttgccaattttcccactaccacacacaatcagcagcagcaaagaatggtgcccgctcctcctcaaaatcactcgtcatcgtcaacaaatgcgacgaatcagcaacatccctcacaacagcaccaaatgcatctccaacagcaacaagttcaaaatgctgtcgcccaattgttgcgccaacaatttcccaccagcgcgcctggaattatgggaatgaacgctcttttgaacgcggccggaataagcggcggacaagcttttcctaacattggcacttttcctgtacatcagcaccaatttgacttacaatctctcgccgcggctgctcagccacatcatcaccaacagcagcagcagttgtcctccgctttgaacttgcaggcgttggttggggctggagcagtgcaccaaccgccg

SEQ ID NO: 86754 - DNA, 653 bp, Heterodera glycines
gatcgagtgtggccgatggatgtacgactggtccatttcgcctgctaataacttcgtaagccaacaatgggcgcctatttggtggttggggttacaatgacgaagaaattggaaagcacaaaggccccccggttttcaacgagaaagaacggtaccgaatggtccgcggcatcaaatgggtcgacgaaattgtggaagcagctccatatgtgaccaccttgaaaactttggatgagaataattgtgacttttgtgtgcatggcgatgacataactttgaccgccgatggaaaggacacttatgccgaagtgaaggaagcagggcgttacagagaatgcagccgaaccccgggggtttcaacaacggatttggtgggtcggatgcttctcctcacgaaaacgcatcacaaaagcaacgaacgcgagttggacgacgtggagcgtgaccatgcacgtaaattgagcacggaccaagaggcccgctccccttggacatgcatttcacgttttctgccttcaactcagacaattatgcaattttctgagggccgagctccaacccccgaagatcgaattgtttacgtctgtggctcttttgaccttttccacattggccacctttgcttcttggaagaagctcgtcgtcttggcgat

SEQ ID NO: 86755 - DNA, 162 bp, Heterodera glycines
  unsure (1)..(162): unsure at all n locations
ttttttttttttnnnnnnnntcnntttttcttcccccgtcttttgtttttaaaaaccgcggttttggttctgaaacgaacgccacccttgtacttacttgctactctatatcactctaacgagactgccggtgacaaaccggaggaaggcggggatgacgtt

SEQ ID NO: 86756 - DNA, 547 bp, Heterodera glycines
ttactcgttggacacgcgtggtgctggtgggctttccccgccctgggctggcgtcggaatggattttggcccatatctgaaattgaccgccatgctcatcgtcctgtctacttttgggctcggcttatcattggcccacatgaaaaaaatgctgcaaatcggcaaagaattggccaaacaaaacgaaacgacaaaaacagcgtcggccacttttgttggacaggacaatttgcgaacacttcgggcattcaccgggtgtcaggccggcctttccgtactttccatttatgtggccgcctcattagcatttatgaaattttggtatgtgcgtactcatctcgtccaggagttctcctgctctttgatggccattactttggccgttgtccaattttttgtgcttcgaatggccaatggcggcggattacttctgatcaaaggaattgttttggccaatgcgtgccaaattgtccaggaattgaacatgtctctgtccgccttttacacctttttttacgcgggtcggatttacgacgcggttgaggag

SEQ ID NO: 86757 - DNA, 405 bp, Heterodera glycines
cgcccgcacctgaagaggcgcccccggcggaaggcgcgccggcggaggcgtctgatgtgccctcggcttaagcaaaaagggaaaagccgaacgcaccgatggaaagggagaaaaagaagaaaagcggcggagaggagacaaatgctttaccttttccttgctcaattgtgtacaaatccctccccttttccccatttcgctattccccgactctccaatttcttttggctgttagcttttgctttccgagtgatccttccgatgaattcgccgtgccttttcttccgtcaatgactcatccccaaaaggcaattaattcattaatttttcttctcccttaaatatatttgtgccaattgaggagtttaataaatgttgtggtgcaaaaaaaaaaaaaaaaaaaaa

SEQ ID NO: 86758 - DNA, 672 bp, Heterodera glycines
taaagtttgagttcctattttgcattggcttaaatcattccacatgggtattttgcgcaaccgttcgatcaatagaattccaattcgaattgaagaatgtgctgagaatgaaaatggatttgccgatgattatgcaaactatctcttcgattccgaccaatccgacagcgacaatgccgaagaggaaaacgaagtgtcggtccaaattcaaagccaacccatcggaggccaccgacgcaaaaagacgaaaagctatcggccgattgaaattgtggacggatttccgttgaagcgaaacatgggggcgcagaagtggcgtcgtgtggaaaacactaggcttttgacgagttttgccgacactcaggacatttgctttgatggttccgatttaatccccgagacgatttctgcgttctcacgccttttgcgagatgaggcaaaaatgaaggtttggaatgacttcctggagaaagacgaatcaggacagaaaaagaggcttttgcaattcgaatacgaaattctcatggcacgcgacgcttcgaaggcgcagcattcgcaacaatcggtcaaaaatacggacatcaaaaagtcggagagtcagccgcacaataaaaatggtcagccttcgtcgggtggtggcaaatcgtcgtccgattgttttcagcgactcga

SEQ ID NO: 86759 - DNA, 558 bp, Heterodera glycines
tattgaatgttttgcttctttactcactttgtttctgcttagccatttttctcgcgatgactcatcggcaagagttgagctgaaagtgacgtcttcaaacggaatgcctttgtaatggaggataagacggatctgcgcatttggatgaacaaatatggaaatgtgttcgaatttgctcttacgggttccgcaattcctctcgacgaaaaataagcaacatccaccagtccatctgccttggagacaagacaaaaagccgaagttgaagtaaatgaatatttgcgggatccaaaaattaaatccagggccgatccatcattatactgggaagtcaattcacaaaaatggccaatgattggtgacgttgtacggaaatttctttctccacctgcaacaagttcagaaagtgagaggcttttctcaacggccggtctaatttcagatgacttgcgaaagagtttattaccagaaaatcttgcaaaacttttgtttcttcatcacaatttgcttttaaccggtttctcaattgaatgattttgcttttacaaatttgctttc

SEQ ID NO: 86760 - DNA, 402 bp, Heterodera glycines
ttacagcaaagatcacggcgcaggaagttgtcaggattccccacgtgtgagaaacattttatttggcttgaaaattgtggtgttaaagaaaaatgcaattcttaggccgcgatttctggctatttttaattattccgcttttatgtgctctcattgcacaatattaaattcctaattgtaagtccgactacgaatatctgagaactctcctctctctgcgatttctttttatttgacattttgacccttactcattttggtctaatgttaaaatactgtgcttctttctgtttcagcttcttaagcaatttgtggtctggtgatgaatgaatgatttgtctatttaatcaacagaataaatgtttttgacgaaaaaaaaaaaaaaaaaaaaaaaaaaaaaaa

SEQ ID NO: 86761 - DNA, 288 bp, Heterodera glycines
cctccggttggtctttatcgcggctattctctgtcttcttggatctctagttgaacgcgactattccagaagttgcgtttcgccgaaaagggcgggcgtctggcctgggccttcatgggagccatcgccaccggagcgaccatctggtgcacccatttcgtggccatgatcgcctatcagccgggcgtggacgtcacctatgaacccggtctgaccggcgtgtccctaggcatcgccatctgcggaagcgccctggccctgtggttcggttcgcgccagatgcggttc

SEQ ID NO: 86762 - DNA, 648 bp, Heterodera glycines
cattttctgacattttttgtttctttttggctccatcagtgacaaatgccatgcaaagttccgttagctcgaatgagatgatatttggtggaaattcgaccgtttgttctgaggagtctcatgctatgtctgaaaaggtgcagacaattgcttcttccatttacagagaattttaaactatgatacaaaaacatggacaggaaagcataaaagatttgatgtcgctagttgtaaatgttttggagagcttagacacggcataccaagaaaaggatgaactgattgtcgacctcgaaatgcttaaggatgaaaatggacagttgctgaaccaatacgaaagggaaaggcaaatgcgcaagaaccaagaccagaaaagtttggaaagggaggaattcatgtcggagacaatccgcgaattggagagcaaagtgcagagtatggccagcattgtcagaatgctcgaattgaaggccaaaaatgccaacgatcatgcaatgcgactggaggaaagggaggccgatcagaaaattgaatatgaaaagctgcacgaacgttacaacgaattgttgcggacacatattgagcatgtcgagcggaccaaattcctgatgggttccgaaatgttcgacatggcccaatcccttccga

SEQ ID NO: 86763 - DNA, 381 bp, Heterodera glycines
ggcgccgcaagggacaacgaaatggaagacgaagaattgaaagtgaaagccgtggtggaagagacgacgacaaatgaacagggcaaaactgagacaaacgtcgaacagagcgaaaaggaggggccgatgaactgaccgaaagggaccgactgatcggcaggaacgtcatccctgacggggatttgtcacggagaatagaaacaaaaaaagccacttgcatttgcgttgttttattttgttgctacagtaatcacatagttcacctttgtagatgctttactgtactcttttcatttttctctctttctgtccctctctttcttttctttccgcttttggcttataaattcctttttctccaaaaaaaaaaaaaaaaaaaaa

SEQ ID NO: 86764 - DNA, 651 bp, Heterodera glycines
ttaggaggaattgccagggaatgagacacgaatacttgcagttaaggatgtggattatttgcagatttttgaagccgaaaaagatgatttggaaaaatggtttggaagaaatcgatggccttttttaactcaaattagcgcgacaaatattcggaaaatagctgagtcgacaggaaaactgttggtgttgagctcaattgaaggaatggacagacacaacgccagcacggaatcggggagtttttttgccttgataaaacgaacagtggtcgaagcccgtgtggacgctgaaattgagcagcactttcagtttggctggttggacgggacccaaattgccagtggcgttgtgatggactctcttcttctgccgaatttggtcgtgctcaattactccagctacgaattttacctcagcaaagatcacccagcgcaaatgacggccaagtcgttgcttttgttccttcacagtgttcggctgggggaagtgacagtccacgggggccgcgcgtggatcacacggctgcgaaggatggcctacgaaatcaccagcaatgtgtacgacatgttccaacaccaacccattctcaccgtttgcctttttggagtgccattggcattcttctccatcatcacttactcaatctgttc

SEQ ID NO: 86765 - DNA, 548 bp, Heterodera glycines
  unsure (1)..(548): unsure at all n locations
tccttaatgaggagaacgtgcgcctttttcgctacccttttctgaagaaccctttttgggatggacacttcgatgagaatgactccgaccgaatggcaggcaaagccctcgaatggctttcataccatttgaaattggcaaaaaatgacgaaacgaattacgacgagacactgaccagagtgatcagacttttggggttgagcatacagcggaaatggacggaagcgaagtcattggcggaagagatgtttatcacagttgctccatcggacaatgcgcggcaaatgatttattcctccatggaacaaatgcagcaatttttgaattttgacgaacagattgaagcggcggagaagcaaacggaaagagaaaaagacgaccaaaattcggaggaatcggagaaaatggcactgaaaaaattatttgagcaaaaaaagtgccgaatttgaaattaacaaagcaaaagcaaccgaaaaactttccgagatgttggcagtacgattngagccaattttgcagaaggaggaggaacgaatgatggaagtgta

SEQ ID NO: 86766 - DNA, 617 bp, Heterodera glycines
tcgtccgattacacatttcctttccctccgttctgtcgtccaactgctgccactttcaattgcccttcacggcaatggctgatgacattcctcctcctcctgctgttgctgctgatggtggtgatgtcgtcgttgatttggagcaacatgttcgccaactcatcatgtccatcggccagggaagcgaggacgcagtgcacgagctttccattctgatcgagtcattcaaccaggagcagctcgtcgactttctggagattatggcaagaatgtacgtcgagagcggagtcagcgttgacatgccgggtggccaaggaatcaacatgttgatggtcgctgcgtcctctggaagggtggactttgcgcgctacttgctcgcccacggtgcaaccgttggacacttggacgccaccggaagcgtcttcccactaatgctagctgccgaatctggtgagttggaggtgtgccgtctgctggtcgaggaatgggcagctgaagtcaaccagcaagcaattgatggcacgacacctttgatgagcgcgagcagtgagggacgactggacgttgtgatttatctcatcgatcatggcgtcgaaatccaacatgcgaacgccgaa

SEQ ID NO: 86767 - DNA, 687 bp, Heterodera glycines
aacgaacaaaacgaagtacaatcgacgactggtctgacacctgctgaagctgttcggcgttcgcagatctctgcattggtggaaccgaaacaaccacaacaacagcaacaagacatcaacaacggcgccggcgacgaacatggcggagtgcttcgcaggtcaatttcggtgctcagtgataattggtacgattgggttgaaggcaatcagacggacaaagctggtttaagcaatcaacaacaaaatgtcatcgtccatcagtcagtcaacagcaccatcgacgcggatgagcatggcatatctgatgaagccagcccggtcgcctcactgtccacaatcgaccttggccgtgtgtacaccactgttggcactgtgatggaatcgctgctggttaactttgcgcacctgtggcaatatcggttttttcgcgttgccttcgtccttctttccatctacttctgcctgggcttcttggaacggtgtgctgtagcgatgaccgccgcatgcgtccgctgggcttggccaccggtgcacttcatgctcggctcgtcacggggaacgctgttctatttgactgactggttcgcgtggatggacgacttcttgtcaagttgggtatgcgacatggccaacagatactgtcaccaatacgatgtgatgtgcgattgtcagtgctcctttgtcagc

SEQ ID NO: 86768 - DNA, 650 bp, Heterodera glycines
aatgtcttccgttgcggacgaggaggacagtggcaccaacgcgggtgacgacggttggatggtggtgaagaaggagtcgttcaagaagttgtgcgacttctacgaggagcgtcgtcgcgtggagtgcggcggtggcaccgtcgccgctgacccattcgcggaacaattggagcgcgaatttcgcgaggcaacgatggctgacaacaacagcaacaaccgcaccgatgaacgcgtggatgagaaattgacggcggagagtgaaccgaaaaaggcagacgaattcgtgaaggaagttggacaagaaccggctgccgaggtttatgtggcacaaattgtggatttgaccaccgaaaaagatggaaagtcagaaaaatcggagaagaccattccctgtgtccattcggttgtgatgcgcggcgtatgtgccggatgtggacaggattttcgtcagccaaatgaatttatcgggaactcggctgccattttcaactttgaacaacagcagcaaaagatgaaccagaccgtgcccatttctggttccttcggtgttgatgaccaccagaaaactgcaaaaaacatctatccgtctttggaactattggaaaaagaaccacgcggagggacactgatggactgcgtggatggagagg

SEQ ID NO: 86769 - DNA, 305 bp, Heterodera glycines
tccgttctttctttgccatgaatttcccctcgattttctccgttttgtctcttttgcttctttttgcggacttttcatggctcgccgtttcttctcccactgacccatcttatcgtacgaaggcacaaattgatcattcgggcaccaaaaaagtcgttaattctcgccactctcccgcgccggcgccgcacagccaacggaaggagaagcagggcaaaaaagagaaggccaaaagcagcagcagcagttcatcggcggaggaggaagaaaaaaaacacaaaaaaaaaaaaaaaaaaaaaaaaaaa

SEQ ID NO: 86770 - DNA, 461 bp, Heterodera glycines
actcctctaaaaattaccatcctctcagaaatggcttcatctttctgctcctcaatcatttccatcgtcgcaattgtctgtttgctgtgcaaatgctgcttttcggcaccccatccatgctgtcctggcagccaacatgtcgtttcgatgatgaaagatcacaccggcacattctccgcttcgatgccaaagtcttcgctttgtatgagtgccgaaagagtcgccgctgcggtggaaaaccaactgaaaacaatttggtgccctggcaatggtagtcaaacactcatcaacgagatcaacgcaactcaatcatcatcagatgagtgtgctcgcagtctcggcttcgtccgtgccatgttcgaaattgccgcttccgccgcttcccatgccggtgccaacgccgatttggctgtccagttccgagaacaagttggcacaattgacagcaattgtgccgcgtt

SEQ ID NO: 86771 - DNA, 654 bp, Heterodera glycines
actatttcgccggccattgtggtagtggtgccgaagaattttcgccagacgcgcagtgcgcacagcaatggaaaaagcccaatgagtcgctgtttgtggtccacaattggcccgccaagggcttggcccgcgtcaaattttggcaacgctttatcctcgctattgttccaccatttcggacgacatccccgatgagtggataatgcagttactccgtgaactgtgcgagcaccggacacgccaaaaattgtccaattacaacacatttgaggacgcagtggagttattcaggaagagcaagcgcattttggtgatcaccggtgccggtgtgtccgtcagctgtggcattcccgactttcgctccgagaatggggtttatgcacggctcaaaaaggactttcccgagttgccaacccccacggcgatgttcgacattgacttctttcggcagaatccgaggcccttctacaactttgccagggaaattttccccggccaatttcgaccctctctgtcgcacatgttcatcaagtttttggacgatgaaaagaaactgttgcgcaactatacacaaaacattgacacattggaacgcattgcgggaatttcaaatttggtggaatgtcatggctcatttgcgcgtgcaacatgttt

SEQ ID NO: 86772 - DNA, 567 bp, Heterodera glycines
atccaccgttccgtccgatgctgagaatcggctgtcaattcgtttgtattttgccaaaattatggcaatttttacgaaaattttcaattttattaaaacgagtacagaaaaagaaaacaagcaaaaatatttgcttgtatttgttgaaatttggaacaaaatttgtccgcgtattcatgcagaactccaacagaatgacatttcatcgactgttggcatactgtacaacatttggcggggaattgcatcccgatacaatcaaattccgcttggaatttttcaaggttatgagccaattagggtattatcgtcagataatggcttactgttactggatgaaaaaggcacctacagttctaatgtgatccgtgctgaactttttgaggaccatgtggtgaatatgttgcgactgtatgagcaacagagcgaaggaaattcgttcggccttttgttgcgccgttgcaaattggatggcattgcgtataagcatttggacaaatttgcaaatggaaacgaattcgaaaaattacgagcgaaatatcccaagcttaaagaattgtttcgttt

SEQ ID NO: 86773 - DNA, 590 bp, Heterodera glycines
acaactgaagaaattcccgtcacttacggatgcgtttaagaagaagaggggcaacatactcaatttcgaggaagaggaatttgacgagatcatcagcaatggcaccagcaagcgcgacaacagtccgtacaccgaccacgactacgcaggcacgcgccaattggcgacggcgaagggagcgaccggcaaacaccaacggcagaagggcggcggagggacggcgaaagagccgaaaaagaaaacggcacttgtcaatgggaccgattcggtggtccgttcatcggcacggccgcaccgtccgaccaaacgttttgtagaggaaacaaacgaatcattcattcgtgggacttcgaaagtgcgccgaacatcgccacgcaaacatggcaagaaatcgactgcggagggaggaagcgaaggggaagaatcggaggatgacgggaaggagtacagcgtggaaaaagtgttcaagaagcgtgtgaagggtggaaaaatggaatactttgtcaaatgggctgggtatgacgacggttggaacacttgggaaccgcgtgagagcttgaaacatttggaagtgctcaagcagtacgaga

SEQ ID NO: 86774 - DNA, 509 bp, Heterodera glycines
acaatggtcttgtttgaaacaccctcaatccgcttctaaaaatcgtcgacattgaagcggtgtgccgtatggttcgagcacgctcaaaagattgtgtcgtcgttgttgataatacgttcatgacaccgtactttcaacgcccgttggaacttggcgccgatgttacggtgcaatcgctcaccaaatacatcaacggacacaccgatgtgctgatgggcaccgtagttaccaacaaggagcaccttgatcagcacatatacgcccagcaaatttatgctggcgccgttccgtccgcctttgatgcctttttggtgcttcatggtatcaaaacgctcccattgcgaatgcgccaacacatggaaaatgcgctggcaattggacgatggcttgagaaggacccgcgtgtggaaaaggtgctttatcccgatctcgagtcgtatccgcaacaccaaatccacaagaaacagagcatcggaatgtccggcatgctctccttttacattcgcaca

SEQ ID NO: 86775 - DNA, 633 bp, Heterodera glycines
gtatttggacgtaacgcaaatgatcgtggacgtttcgtcaattggctgaggttgctatgaatggtcgaaagaatcgtttgttcatgtcaatgcgaatttgcaagaatattaaggaattgttggggaagtttgaggggcacgtgccagcgtcggaggaagtgaatgggaaagcggagaatgtgaccattcaatctgaatctatcgtgaccgagagacgtcgatattacatcgaccttcgcgaaaatcggcgtggttcctttttgcggattactcagctcgagacgcattccgggattcgcaactcagtggcattgccatttgaggggatcggccaattgcacgatgcactggactcaattctggaggaatatggcgaagggttcattgaggaggaagccgaacttccccattctcagatgattcgtactgatgggaaaagctttttttttgatcctggccacaattctcgcggggactttctgaaaatcaccgagttgaagtcattcatgggagtgcgcaattccgtcgtcctttcaatcagagcaattccgcaattcactcaagtcctctccaagctctacgatgactctcaggagctcagagccgtagaggaagtgaacgtgaacaatgtgc

SEQ ID NO: 86776 - DNA, 627 bp, Heterodera glycines
tggacgcaagcggccgatctcctgctttaactgtaccgacaagcagagccgcggcatatttcggcatgttcgctgtccatccctttttccagcgtccggacttggcaagcgattgttgactgttgctgaacgctatgcccgtattgtgtggggcagtgacgagatgcatttggatgttggctggagtttggccgaattaaagttgggcatgggacgactgcagagatactacaagcggcgcgggttcctatcaaccggcattcttcgccccttcaatggggctgtggcgcgcttcatcacggtagaccgaaacgatctgtggattgagctgatggtcaaggacatacgtggagcattggatgacatcggcggagatccagagaaacggatgaaaagagtgaacagtcgggggagattggccagagaagcagacaaagacgacggcggcagagatccacaaaaaaggatggaaagagtgcgaagctttgggagattaaccatagaagcagacagggacgacatcggcagagacgcgcaaaaaaggatggagagagtgcgcagtttatggagattggcaagagaagcagacaaatcggatgagagtaaaggcaaagatggggaggaaaa

SEQ ID NO: 86777 - DNA, 603 bp, Heterodera glycines
agtctttcttggttcctgctgccgccgccgccgccgccgcttcgctcgttgccgcctcggaccgtgtgtctgtcaagggctacactgctgacgccaagggctccctggactgcaagttcggcagcggcgacattctgaagaagtgcggcacctgtgcccagagcatcaccgagtgcgctagctcgaaccccaacaaaacggaggaaatttgcattagtgagattgcctcgttcgctggcgactgcggtggctgcgctgttgacatcctcgagtgcctctaaaggccaagatccacatcgcataactgtgactatggtgctgcctaatagactacgtctttgtagcgcccagacttattaaatttacatatgtattcttccgcctccattatacaaattgactaattgggcctctagacatgggaaaatgtggcgagtactgttgatggtcttgatgctcaattccaaatgtacgttcgatgtggaataggttgcacagcattagagacctgagatacacatttcctctttcacaccagacctcaagtatggagagaatctgcgagtagaatttgattgcatctgttgcacgactgaagaaaga

SEQ ID NO: 86778 - DNA, 636 bp, Heterodera glycines
aaagagctttcgctgaaaattatcgttatttgtcgccctctgatctcgctttgtctgctgccggtgtctctcgcctttggagaagtttgtccgaggataaactgctttgggcaggaaaatgtcgtcaacattcgataaatgaaatgtttcctccgaacatttgtcgcaaggaaaattgggcgagaagtgacacagggggcgaaagcagctccgaattagccaacatttataatgacagttcgcgtgcgaagtctgtcgcttttcctcccccaaatccatctccaatgcccttgtgtctccaccgctctcgatggaaggccgtttttctgaggagtcttcgtgtgtcaaacaattggaagctgagaagaccgactgctgtctgtcaattgaggggacatgacgaacatgtgatcacgtgtctgaagctgcgaggtgacctcattgtcactgggtctgacgactgcactttgcgcgtttggtctgctgcgacgggaacgtgtgtccacgtccttaacggacacattggcggtgtttgggcacttcagctctcacaggatggcaaaattgctgtcagtggttccacggataggacagttcgcgtatgggacactgaaaagggaactctgattcattgtc

SEQ ID NO: 86779 - DNA, 588 bp, Heterodera glycines
ctggtcggaaaatgacaccctccgatgacgagaaagccgcgccaaaacgacgacgaaaaccatggcaaacggatggtacaatcggagcccagaaagccgttccaaagacagtatcagcaacaccaaactccggcctcggccataaaatcgattctcaagacgccaaacggtggtgacataaattcgaattcggcatctgcggcaacaggtggtcgttatcagagaaaacatttcggcccgggacagaagcgccgtgtcagttttggctcacaatcagagagcaatgacagtgcgattagaaagcacaaaatgccgaaagtggaagtgtcgacagagcaaatgacgacgccgaaagtcgggcagcaaaaatttcagacaaaaatgaacggaagcgcgtcatccggcaaagtcataaatggaccgcaaaagaaacttgccgaagaacaaaacagtgtgtcgccagtgcgttcgaacatgccgaaaagtgggggcaatgccaatattggcggcggtgccgccccaacaccgattccatcgcccaaaaatcagaagcaaaaccagcaaaaacaaccttcaaaagctggacaa

SEQ ID NO: 86780 - DNA, 586 bp, Heterodera glycines
ttatcggaacccgggccaagtgaagtgcaaacagtgcactttgccatgtttgctgcgggagagggaaagccacgcgacgaaacgggcgattgacggagtgttgcgcgaggcacgagcaaatgggcattgcccttgaccctttggagtgaattccttttagcttgatgcatgggcttttgccttttctgcctgatcaaaccggctgttttctgtacgattgctccttttgcccatatccccccccgcgatgactcccattgtgtgcatgctgatgtggaggagactggccgtgagaacattcaacgggctatctgcaacatgggcttataggatcgtaaggctcgcttctactcactgaaaacagtgtcactgacgatgcaacgtgacaatgccaagctgatccacgtttgctgtgagctgactctggtcaaagcggctgtgcaaaaacagcagcctgttcttccacgacgctttgtccaaaccatcattttggcccaccaaacgcccaccgttttgtacgtgaagagcgatgtgtttcagtggttggataccgcctttctggttaccgttagtgaaaaatacaacg

SEQ ID NO: 86781 - DNA, 558 bp, Heterodera glycines
cattcggaagaaagcgaaggtacggcggaaggccagcggccaattgaaaaaccgaacgacaaaaacggagatgcatttgaagacggaagtgaagagaaagacatggcgattccgttgttgggcgagggatcggtcggatcggcaaaaagttcgccgagaaaggcaaaggcggcggagggcggcggcactttgtggcgaaagcattcgccggcgatggttctccgtcgtcgcaaaacttcttccgcctctttacgcacttcagcttcgacggatgtgttacaaatcagccaaatgcaaaaggaattggacgagtccgaagttcgtccctcttcaattggcaagattttccgcttcaacaccggcaattggcacttggctttcgtcggtctcatcggctgttccatcagcggattggccgtccctttctttgcgcttgtttatgcccaaattttctccgtgttcagtgaaccgttggaccaattgcagtccgatgcccttttctgggctgccatgttccttctcgtcggctttttgaatgcctttggctttttcatttcg

SEQ ID NO: 86782 - DNA, 486 bp, Heterodera glycines
tcgaatcgaggggctgtccagtcgattgcggattcggtaacaaaggcaaagtttgtcggaactacgaaattgggcatcgatgaatgtgtgctcttccagattctacagtcccttcgttctttggtcctttcgcccggcgggcgccacctaaccaatgaaacattatgcgaaattttgcagtgctgttttcgcattggtctcgagtcttcactacccgaactgcttcgaatggccgcggagaacgctttggcggaaatgtgccgttatctcttcgcctccatccaaacgtttgagcaggacatccgacccgggctcaaagaattgatgaagtaatttagacagacacaaaagaattaattgatttgttcttttcgtacattattcccaaggttttttaaaatcagcataacggctttggaattcaaaaatttcttgcatgaggaataaagggtcagtgccaaaaaaaaaaaaaaaaaaaaaaaaaaa

SEQ ID NO: 86783 - DNA, 630 bp, Heterodera glycines
gaatcccgatttccatttctctactcactataaaatgctccaaacggccttaccattctgcttctgatcagtgttgtgatcggccattccttggccaaccttggcccaaccatcaaacataatcctcattttaaagccgtacaaactgcgcatcatttgcatgatgccattgcgaagaagcacgaggccgaagttacgcagatcatttgctccattagcaacgaacagcgtcaagcattggctttggagttcaaaaaacaattcggcactgatctgattgccatgctgaaaaaggagttcaaaagcgactttgaagaactgatcatttctttgatgcaaacgcccgccgtttacgatgccaaccaaatgcgtgccgcattgtccggctccaatgaggcggtgctaatcgaaattttggcgacgcgcacaaaccgacaaattacggcgctgaagcaggcgtatgagcggttggacagaaggcatcagcacaatcagttggaggaggacatcaaagcgaagacgaagggacccttccaaaatctgttggtgtctttgctcagctgctctcgcgaagaaagtgcgcccgcaagcattgtattggcacacgacgaggccatgaaactgttcaga

SEQ ID NO: 86784 - DNA, 700 bp, Heterodera glycines
acccaagtttgacagtttcccaaaaacattctgcccatatggtcacttcttcgccagacattcagcttatttttcagtcagttgaccgcgatcggtccggtcaaatcagtgccgatgagcttaacaggcgctgtccaatggcacatggaagccgttcaacccggagacgtgccgaatgatgatttcaatgttcgactcaaacaacgatgggggcatcaattttcaggaattcggcgcactttgggagtacatcaacgattggacgcgcacttttcgcactttcgaccgcgacaacagcggaaacatcgaccgcgacgaattggtcaatgcgttcacacaattcggttatcgtctgtccggcactttttacgatatgttaatgcgcaaatttgaccgaactcaaagcggtcgcataaacttcgacgacttcatccaactttgcgttgtgctccaaacactgactaccgcttttcgagaaaaggacaccgaccgggacggatggattcgaatttattatgaggaattcctcgccatggttttctcgctgaagatgtcaatgatggctaaacaatgagcaaaagaagggggaattattgactgatgaggatttgctaatacagtaacccacttatttttgtatgttttctgttaaacattatttacatatcactttcaattttacgacatttttgtttgaata

SEQ ID NO: 86785 - DNA, 600 bp, Heterodera glycines
taaaagatccgaaaaaatgccaaacattttcaaaatccttctgattgtgcttttggccgtcgtctcattccgtctctcggcttctactggtgacaaaaaaaactgctaatgatgggagtggaaacaactcatcagctgggattggtacgaagatcaaaagaattgtcaccgctggactgctcttcacttccctggcgacgggtggggcggaagcgattgggcgaagcaatgctcagggaggaaatgccgccggattggtgccatcgcatgtgaccaatcgctcaatggctccaccacctcctcctgtgcaatttgaaatgggggcaaatcgattagagaaaatgagggcacacctacgcgaacttgctgagaaaatgccggtcaatgaatcgaagcgtctgtcaccgagtggacccgaccctcatcatcattagggccatggatggatctaacggaggaagaaagaatggatgcttagttttcagattttattctatcctcttttatttattagtttttcaaaacaaatttcttccacaactttttaaactatttgttgttttgaatctttttagataaatctaaacccctaaaaaaaaa

SEQ ID NO: 86786 - DNA, 590 bp, Heterodera glycines
gcacgtggaggcgcgggggggcacggaaacgcattttacgtgtcgaatttggtgagaaagccgttgaaagcggaggagggcggacaaggcgaagagatgagctacgacatcgaaatgcgcatcatggccaccgccggtttggttggcattccaaatgtgggcaagtccacacttttgcgtgcgatttcgagggcaaagcctaaagttgccgcttatccgttcacaactctcagcccaagcgttggaatggttcagtacggcgacttcttccaattggcagttgccgacattcccggattggtgcaaggcgcacatcgcaacgagggactcggcttcagtttcctccggcacattgtgcgctgcgaatcatgaaatgactttgtacgacgacgaactaagcaaaaaagaagcggcgattgtcataaacaaaacggacttattggacggagaaatggttaagtcagcgatcgtttcgatgtttccggagcaaagtgtgtttttcgtttcgggaaggcatcgtttgggaatcgaaccactgctaatgtttttgcgggaaaaacacgagcggttcttgaaagagagagaagcga

SEQ ID NO: 86787 - DNA, 493 bp, Heterodera glycines
gccgctgacaagtgtcccctccttccgctacactttgtcttcttcgtccgtcccttctcttctgaattgccaattttgcggtgctcagttggcggatgtccaagctctccaaacccattggctgcagcagcacgtggcgcagttggcccgtccgcacgtttgcgtcgactgcgacgccggcttcaccaccgcggaagcgttgcgtgcccacagggaaatgcaacacgcggaaaaaacggcgcggaaggaacagcgaatttcgagcagaaacgaagtgaaatgaggccaaagattagtacaaaataatatttattgaacttctgtgaaagttgccgccaaatcgaattttaattttcattttttgtactgagttcggccaaaaaacgtgtaattcccccccccccctccgctcacatttatcattttccaccgcactttttattttattttatttgtcccccctttcactgaatgccattccttccttttcctt

SEQ ID NO: 86788 - DNA, 623 bp, Heterodera glycines
gaaaaggagacacaaatagagaaaaaagatatgtttttctctggcactctctatttattggtaccatctcgttttttgaaacggtgtgtgtatgtgacattcgtggtgagtcgaagtgataaataggcaaatgtctggtgatcagaaggggacccacgcgtttgggcgctggcattttggcgccaaaaaatataaaaattaaaatacttgagcagtgaaccctctcggagtggtaaatccattttaaaatgaattttgggccaagtttttttcaggtcggtgtcatcagtgcgttcaatttccctgccgccgtttacggttggaatgccgcgttggctctcgtctgtggcaattccgtgctttggaagccgtctcccagcactccgttgacgtccattgccatcactcgactcgttggcgaagtgttgtccaaaaacggactgtcgcccgacatttgctcattgatttgtggcggaggggacgtcggaatgtgccttgttaaggaccctcgggtcaatttgctctcatttaccggctcaaccgaggttggccgtgtggttggtcagcatgtccaagcacggtttggcaagttactgctcgaactcggcggtaacaatgccatc

SEQ ID NO: 86789 - DNA, 449 bp, Heterodera glycines
ccctggaaatttgcgaatgacgtaaggagatcggaaggatgaaatgtcgccgcatggaagagcaaccggacgaaattagacaacaggccatcacagaattcattggagggtgtccgccggaattcacccagatacttgcgcatattgatggactccagttggaagaccggcccaattacgagatgattgagacgatgctgcgtgagcacctcacccgaagccgtgttccggagcacccgtacgactgggaagtgggaaggcgcaacgcgatggcacaagcgcagagtgaggcagcgaggaggaagaaggataacacgaaagaaggcggaggaggaaaaaacaacacgcaagggatgagtccggccctggtctgatcgtatttgctcgccattgtacatattactgtgcctgtctgatcataattgctcgtcattatacataatatgctg

SEQ ID NO: 86790 - DNA, 319 bp, Heterodera glycines
tgccgtagaattcgctttctgatgttgcacacgcaaaaaaatgaagacggaatcaacaattcttccaggaaatttatgagatgtacatcaaattctcgatgaaccctttctatcgacaagacactccgatcagatcgccaagttttgagcaaaaagcggcgatgtatggacggaagtttttaggggtttaaaaaagaccttggaaatttaagtttttgttgccatcagatttgtgtattttttgcattacattattttatacgggtttaaatcttaaataaaagaattcgcttttagaaaaaaaaaaaataaaaaaaaa

SEQ ID NO: 86791 - DNA, 619 bp, Heterodera glycines
gccgaaaacggaagaggccaaaaaggaagaagcaaagcccagtgccccggccgtcttaactgaagctgccgataatgtgaacaaagcggtcgatgacttaagcgttaaacaggcaaaagcattgaaaaacgcggccgaagcaacggcagagaaaacgccggaagaacaggaaaaagcattgaaagaagtggcagaaaaaggaggaaacgaacagctgaagacggctgtcaacaaaattttggaggcaaaagcgaaaaacgacgcggaattggaaagcgaagtgaaaacgaaaacggcaacactttctgaggacagcaaaaaggccagcgcagagttgactttgataattgaagacaaaaagacgactttggacgagaaggtgaagcggacggaagagctgacagccaaaatgtcggacaacacgaagaaggagctgaatctgaacaacagtgccgacgtcgtcgccttcgtcaagtcgtactccgccgtcgccgtgccggcggtggccacggagggcaaagcatgatcaatcagtctgatcggaggattcggcattgttgtgtgatgaaatgtagccaataatgaaattcattgattaaattaattttcgctaaaaaaa

SEQ ID NO: 86792 - DNA, 596 bp, Heterodera glycines
ggaatcctactttgctggggtttatttttttgttttgtctttgctatttttattgaacgatggaagaaggacaaatggaaaccggagaaaatgctgcagttaaactcgtggatcaaaagaagtcggctaaaaagaaagtttatgtgccgggaattagccgaattttgaaggcgagcgaagaattggtatacgatgagaaggcgtatttgttgtttacacattcgaaacgaactatccgtgtttaagttttgatgttttgtccgactctttgggcgacaatcgctccgattttccaatgaccgcttggcttgctgctggctgaccgagcaaaggacaacgaattgctggtgcttagactgtcgaatttgcacgcaaatgaaaagacattggaaaatgcaaagaaaatggcccaaggaaagggcgacgagtcggagagcagcagcagcgaagacgacgaggaggaggaggagacggagggcggcacaaagagtgcgcggatgcacgcggcagtgatccctcaccacgggggcatcaatcggatgaagtgccaaacaattggggctagcaatgtgtgcgccgtgtggaatgaccagcag

SEQ ID NO: 86793 - DNA, 615 bp, Heterodera glycines
tacagttttgctccgttaacaacagcgccattctcagcacatcgcacaaaaatggcacgccgacgaagaaagaaggagccgcgaaagcagtcgtacaagctgtacgttcgacgtgtgctgaaggaagttcatccgggcaaggaaatctcaatgcgtgcgttgaacatcatgaactccttcgtcatcgacgccttggaccgcattgcaacggaggcgacgcgaatggcccacaacgaccggcgcaaaaccatcacgcttcgcgacatggagttttctgtccgactgtgcctgcctgacgtcatggccaaagatgcgaaccagaaggctcagaaaacggtgaccaagttctatgctgcaaaagtgcgggatcggatgagaaggacggagatgcgtcgtggcgaatttgcgatgatgcagatggcagcgctgtgagcacactcaacttttggacgaccggcggatgaagccacctgtatattgttgatgattggccccgtatcccccattactgtatgtgtatgtattatacaatgtatctaccattcttgtgtgtgtatgtattattcactatgtgctttatatgtatacctggtcaataaaatataaccccaaaaa

SEQ ID NO: 86794 - DNA, 509 bp, Heterodera glycines
tctcgtccgcttctattcattgccgcccttctcttcctcttcggctgctgtcgtgcggatggaaatgttgtgcatctgtcgagcctcaattgtgccacgaaggacggaggaatcgatggcttcaaagctgtggacgacggtctgatcttggattcctcatctgtcaccgctgatacgtctgacctgcccctcatcggtttccagaagaacggaaaggaggacttgatcttcaaactctttgtgcgcgatggaggatgcgtctcaaaggccaatttcttcaccaacggtcaaccgtgtacactcggagagtcggaggacgtgactgagtcggataagtgtccgggcgagggcggcacctccagctgcacatcccacgaagtcacctgtacgggcatcggaatggcgaacgtcgcggaggagtccaatggtcacgccttcaaagccaacctggccaatctcaccaaacttaccaatccgtgcgcgcaatggaaggcacattttggcggtgt

SEQ ID NO: 86795 - DNA, 592 bp, Heterodera glycines
agaacaagaaatttcgcgcagcgaaatcaacgaaatcaaagagattccgcgcaacgaattcaaaacggcgccaatcactgagagccgtgaaagaccgttcattaaaagcgaaatcatccgcgacatcagctccgcaatgaacttcttgaacgagcaaatccgggagtactcggaacgaaccaaggacagagaggaattcaagggcatcattgaggccagaaacaaactcgagacggccatcaaaccattgcacggagtgatggagtccgacatggcttcttcgagcctggagacgtcgatgaccaactcggccaacatcgcccgacaagccctggaggagttgcccgtgaaacaggtccgacaaatggaacaaattgcggaggagggaaagagcaaaacggtggaggagcaggagagggcactgcgcgagtacgcggagaagaacagcgaaagtgtgaagaaggctgttgaccaagtgtccgtcgccaaggaccgggcggacatcgctttggagacgtacttgaggagccacgctgacaccttctcccaggaggcgcgaaaggccaacgaccagatgctgttcgtgatgaag

SEQ ID NO: 86796 - DNA, 228 bp, Heterodera glycines
aaactccgacgatgattcattgaagacgctttgttatcagctgctcgtgccaacttctgctgctaatatcggtttcgcaatcggtgattttcaaattcacgtgcagccagaaatgcccgagattattaactttgtcgttccggagctcattccgctcttaaaacacacaatgaaatcgctgaatagaatttttgtctttttcgaagaacttttgtcatgccgatttcc

SEQ ID NO: 86797 - DNA, 642 bp, Heterodera glycines
ccggcgcctttttctcgatcggtgtccgggaaagtggcgagtacaacccctccccggctctactggcaattgcactcacactggcagaattggcacttttggtgttctttttgccggagacattggttcatgcaaagaatgacgattgccataaacaaagtgggcatagccttctttttcttttgtcccctcgggcgctgttttccttcgacttcttgtctccggcatcggcttcctccccgccggtttcggtgccattgctccaaaagtattcccgcgtctactttctgttcatgctgctgttctccgccatggaatttactctcggctttctcacccatttgcgcttcaattacagctcaatgcaacagggccggctttacctgttctccggcttttgtatgctggtcattcagggattcgttgtgcgacgcattccgtcaacactcaaagcacaaagtcacggagcgctagttggactggtctcaattgtgccagcttattttgtcatcgcttttgcacattgccaaaatggcattgaacagcccttttcatgggacttcttctgttctcagtcgcatcagccactgttgtgccctttctgactacgctattttccaatcagtgtgatcagtcggcgaa

SEQ ID NO: 86798 - DNA, 588 bp, Heterodera glycines
atatttcttttgccgccattaataatctccaatttttattttttatggccctctctgcccttctgcttcttctccccctgcttctcaatgttcaaaatatcccagatgagtcagtccaatcggatatgaaggctgtttattcggctatttcatcgccggaacaatggaagaactcacaaaattcattggcttcactcgaatcacaactgacagagccccaaagagcactggcaaaaatgcattgggaattggagaccatccaaaaggaaaagccggaggcaccgccacaattcgacttgggacttttctcggaagctttggaagtgatggtcgaaatggacgaagaagcgaaagaagtgaagctgaggaaggacaaactgattgaatgggcaggaggagaggaagcaaaaaaaaattgaaggaaaagatgacggaggaggacacagtgccggaagtgagggtgaacgagaatggtaaggttgaagtgaaggacggcgccggaggggaaggacggttggaagtcagacgaacaaaggacgagaaaggcagagagcaggtggtgatcacccttatgaagaatggcggaac

SEQ ID NO: 86799 - DNA, 354 bp, Heterodera glycines
ttttgcttgcacagcagtgcccgatgattactacgcgctccgtttgctgtacaatttgcccgtcggatttgcaattgcgctgctcatttaccacttggcttggtaccggatcaacttcgccgactccattctgatcaacccgttctggaaggagttcgtcaaatggctgatgatcgtttctgccgccctgtcctattcgcttaatcccttggtccgtgcttctctcggctgtgccctgttcgccggactgggcagcaccgcgcatggattactgtccgtttctgtggtctaaaacttaaacaagggacccattgcgaatgtcatccaaaacttcaacatttccacgatgataac

SEQ ID NO: 86800 - DNA, 550 bp, Heterodera glycines
taaggatttgacatataataatggagggaacgacgtcgccgccttattttttgcgtagtcggacgaggaaggaaggaccggccgtgctggaactcattgagaagcttcaacaagccaacgacaaagttgaccaacaaatcgcagaggaacaccaattgcgaaatgaagtccttcagatggcaccgcgcgcgatgaagaaatacctcggcacacgctttgaacgactgatgaatgccaaattggaattcccccaaatggcggacagtgaacgcaaatccgaggccgagttggccaaggcgaaagaagaacttcgccagttgaaactccaagcagtcaaagaggcggaggaacagaaaagggagttggaggaggcgcagcgaatggagagggaattgaaagagcgagtgaatcggaaattggccaagctgagggcattggaagaaatgtgatggcaaatgtcagtcgttcttcagtttgtgcgggttttctctgttgtgttagtcatgtaattatttgaccgtatgtttaacaataaataggatttatttgc

SEQ ID NO: 86801 - DNA, 327 bp, Heterodera glycines
gtgtttggacccaccggatcaattgggcttatggcatgagtcctgaaattaattccagtgccgaaccaccaggaaagcaaagtggctgaagagtgtttggaatatcagaaaaaattcgacaaaaagataaaccaaatcgcaagtcattggcacggcgtccgcgtgagcgcgccgaaagcatttggcggcataatgatcgaattgtcaatttcaaaaggaaagtacaatctgagcgacacccaaaattttaacattgaatttggaaatccgaaagatttgatgacaaaaataacggacaaaaaaaaaaaaaaaaaaaaaaaaaaaaaa

SEQ ID NO: 86802 - DNA, 543 bp, Heterodera glycines
  unsure (1)..(543): unsure at all n locations
cattgactggattgtgcgccgtttggacacacagcgaacattggcattgaatctgccatcggcacaattccaacccgagaatcgatgcatttggaaggacttggcaacatcgactgggaccagctgatgtctttgccggccgactattggcacgaggacgcgaaggaagtgcgcaaatttctcgaggaacaggttggcaccgatttgccggaacaaattctgtccgagttggaacagcaagaaaagcgtatcatggcattatgagggatggacagttgatggagatgagaaatagagaaaattgactggaaattcgcattttaattacctaattatttatttattttacatggacatttcgtttcttaattttgtggggacacttcccccccccccccgaaatgtttaaaaaaaaataaattttccgttataaaattttttcttgtaaaatattatgatttctttcaaaactatgtatttgtttccgctttctttggttttttaataaataaaaaaagcnnnnnaaaaaaaaaaaaaaaaaaa

SEQ ID NO: 86803 - DNA, 655 bp, Heterodera glycines
aacaattgcgggagaagctgcgctcgttgcaggaatacggcgacttcaagcagttcctccgcttgtgccatttggagcccggctacggctacgaattgttggcgccggtgcactccgatttcccggccgagggcagcatttgtgagttgcaagttgggcgcagacagctcgtgctcatctatccggacgacgaggggtgcactgtccgcttcgcattgccttccaaacggatccgtgtgtggcgcgtttcccattccgaacaccaactgttggcccagatgagcttccaattggagtatttgcgacagccggacgagttcgggctgatcactctgcgcactgatcagtccgtccttttgtcgctgttcctccaatcaattgctgacgaaatcttgcaggatcaacaatataaaactgaatctccgttcaaatttgttgacgacgccatttcgctgaaagcagcgtccgacgggtcgtccgcggtggcaagcagttcaattgttgctggagtcggcgatgaccaaaagagtgtgaagtcctgctccaacaactcgtcctcatccaaccatgccaacagtagcagctgcgcactggacgcattggtgaacggcgccggtggcgatggcactgaatatcgcattaaactgatttcgta

SEQ ID NO: 86804 - DNA, 705 bp, Heterodera glycines
gtggaagaattggccactggctggtgctttgtgcacgcaccgttttgcactgccaacagtttgtggaacgtttgggtcgcatgggcaacgaaaagggcattccgattgcggagccggagattgtggctttaacagcccggataactcggaccgagaatggatgacgatgttcgagcgatgcgtcaacaagcacatccaattcatcatgctggtggatgaaaagcgcaaggacacccacggactgctcaagctgtcggaggcaatgcacaaagtcaccacgcagcatgtgacgctggagaaagcgaatgacgttgtgcggaagaaccagcgccaaacgctggagaacatcctgaacaagctgaacatgaagaactttggcctcaactacgtgccggtgatggagccgtcggcgtgccgtcgcttttcgctcgaaaacggaaatgtgcttgtgatcggctacgatgtcaaccatcctgctcccatgccgcaacagacccgtcgtttgttggcatcgcagggcgaatcgcaattgagctcgcttgacccgtcatgtgtcgggatttgtgccaacatggctcctgattttaatgcctttgttggggattatttcttccaggaatcgcgccgagaagccattgaccaaatgcagttggttgatcgcatgaagtggattttgcaaaatgtggaaaagcatcgtcctggcat

SEQ ID NO: 86805 - DNA, 702 bp, Heterodera glycines
taaaattctctcgtaaagaaaattcgttcagtgcccccggtaccgttttgtttggcatggagccgcttcaccagcagagtttccagcgaaagttctcaatttcggcctgccgacgacagtcgtcaattgatttggaggacaatcactttctgttgacaattgtgataagcaacgcgacgaaccacgagagcatttcgtacaaacaggacggaggacgattcgactcgtcacagttcacgctgaagttccacgcgaacactttgtacaaaatttacgtgaagacgaagccggcacagcagtttttaagtttgaacatcgccgggaacgtgctcagtttggctccgattgagggcggcagcggagaatacgtggccatttggaacaccgctgacaaagagccgaccaaaaaagggacacggcaggacattgaatttgtgctttcggccaaggacaaaacattgagcaaaaatttgcaagtcaaattttacccccacaacgacacacacgcgggatggggacagaagttggaccaaatcacttggcgctgctccaccaacgacattggccatgtgtttgtgttggaagagcaagccctttaaagcgaaagacgacaattgcattttaaaaagcgatgggcggagatcaaacggtgacggccaaaattaattttcaattcccatttcaatgcattcattcatttct

SEQ ID NO: 86806 - DNA, 646 bp, Heterodera glycines
  unsure (1)..(646): unsure at all n locations
aattcccgtcgagccgaccgttgaagtgcttttggcccatttgcgccacgaccgaatggaaacgcggatggccacgctgaattggattcggcaccttcactccgtccaaccaaataatatgtttcgctacatggaccgcttcttccccattctgctggaacttttgtcggacccggcggacgacgtgctaatgttggacattatgctgatcacggaaatttgtggccaaccaaaacagcagcaacagttggacattcgcactttgagacttggcgaggaacttaaccaagaactgaagtccgtgtctccttacttggtcaaattcagcgtggccttgcttaagatgttcaaagacgatgacaaattaatcgacgagcgcggcattcacattgtccgacaggtctgcttgttgcttgagccgacggatgtgtttcgttcgttggcattacttctcggcacaatggtgaacatcgacggatttgtccttccgactgcgggacaacagcagccacaactgacaacggccccctcaggcaccaaagacccctttttcgaccttcaatntgttgccgaaatggtcaaaatcctcaaccagattctgatgactaccagtgagctgtttcctctccgtcagcgactccgttgc

SEQ ID NO: 86807 - DNA, 354 bp, Heterodera glycines
  unsure (1)..(354): unsure at all n locations
accgaatgggaacaacacgagggtacgcaattcttgacacttaccagcaattgcgcatgattttccataagaaattgacaaattttagcggtcgatgctttggtcaaccagaacgttttccatgtcaatccaccggcaccgaatggggacaacgatggcgatgatctgcaaatgttttttgaggacgatgttgttgatgcttatcttcagaatatggacccgaactaaaagaaattcatccgccgatgatctttcactcatttatcgtgtttcattttaaaaatgtttaatgtgtgtctgtctgacaatgagaataaaatcacgactcanaaaaaaaaaaaaaaaaaaaaaaaa

SEQ ID NO: 86808 - DNA, 658 bp, Heterodera glycines
ggtccctccggcggttgtccagtgcccactgttaacggttttcgtgcctcattttcgggcgtaattgacatgcgcaaaaagtcaatggcggatgaaattgtgccctcaatttttgtgccccgcaaacggtcggcctgcgactttggcacgttcagcgcattacgaggaatgtcgcgccaaaacaccgctccaattaaaatacgcgcgaccaccgtccgtgatgacagcagtaaacggccagagactgaaattgtccatcgttcgcagcttttggcgcccgaaagtgtcgcgtgggcggtgccgacgacgcgccaaaattcagcggaagtgccaaaagagaaaagcaatgcgcaaccgctaaaacatcaacgtaattgccaacggcacgcgccggcaagccgaggcaccctttcgtttccgctggtcaaacgaattgcccttggcagggaaattcgcgtgaatcattatttgctgaatgacggggaggacttgaccgatttaattgtgccggacaacgaagacggacaaaaggggacgaaggagcggcaaaatgagcaacaacaaaggccgaggaacggcacagaagtgccaaaaacgcccaacggcacccttttcggctccgcgtcctttcgcggtccgtcgcttaacattccttcgg

SEQ ID NO: 86809 - DNA, 622 bp, Heterodera glycines
cgagaagtgagggcaagatccggacaggagggcatcccccggaccacagcgtctcatcttcgctggaaagcagctggaggatggccgaaccctcgcggactacaacatccagaaggagtctactctccatcttgtcctgcgtcttcgtggaggaatgcagatctttgtgaagactctcaccggcaagacgatcaccctcgaagttgaggcgagcgacaccatcgagaatgtgaaggcgaagatccaggacaaggagggcatcccaccggaccaacagcgtctcatcttcgctggaaagcagctggaggacggtcgaaccctcgcggactacaacatccagaaggagtctactctccatcttgtcctgcgtcttcgtggaggaatgcagatctttgtgaagactctcaccggcaagacgatcaccctcgaagttgaggcgagcgacaccatcgagaatgtgaaggcgaagatccaggacaaggagggcatcccaccggaccaacagcgtctcatcttcgctggaaagcagctggaggatggccgaaccctcgcggactacaacatccagaaggagtctactctccatcttgtcctgcgtcttcgtggaggaatgcagatcttt

SEQ ID NO: 86810 - DNA, 713 bp, Heterodera glycines
caggattcggtaacgtcggcttgcactcccaccgttatttgcacagagatggtgcaatttgcatcggagtacaggaatatgactgcgcaatttacaatccgaatggaatccatcccaaagagcttgaggattggaaaatcgcaaatggttcaattcgcggctttcctggagccaaggctttcgagccattcaccgacttgattttcgagaagtgcgacatccttgtcccggccgcttgcgagaaagctattcacttggggaatgcacatcgtattcaagcaaaggtcattgctgaggcggccaacggaccgacaactccggctgctgatgcagttttgatgaacagaggcgactgtcttattgtgcccgacatgtttatcaacagcggaggtgttactgtgtcgtacttcgagtggcttaagaatctcaaccatgtctcttttgggcgtctgacttttaaatatgagcgtgactccaactaccatcttttggagtcggtgcagaagtcactcgagcgcaccttcgaccgtgccgttccggtggatcccagcgaggagttccaattgcgcattgccggtgccagcgagaaggacattgtccattctggccttgagtacacgatgaaccgttcggccaagcaaatcattgccaccacgaacaaatacaacttgggcttagacttgcgtactgctgcctatgccaacgccatcgaa

SEQ ID NO: 86811 - DNA, 650 bp, Heterodera glycines
tctgttaaaaaagcaaagcaacggttgacatgcaaaaaaaaaattcaaaattcagcgcaaagttcgggaacactcgcggaagcttaagaaaatgaccaaagaatttggccggaaaaagagcgaaaagtcaattgcagtgccaaacaaatgtcccttcaaagctgaaatgttgatggaggcggaacagaaacgggcggaggcaaagaaaatggaacaggagagaaaggcacgtcagaaaatggccaaaaagggcggtgccaatgccaaatcggtgcgttcatttgcggccgaagttcgacggaccatcgaaaatgcggacattgtcattgaggcttcgggaagtgagcacaacatttgtcgtcagagagcagtcaaaaagaagggcgcaaaacagcggaagacaaagaagaagaataccgattggaccgatgagtccccgccaccaattgtgtcattgttgggggaggaggaagacaatgccgtggcatcgccgccgtcagttcccatcagcagccgtgccattcggaaggcggtgaagcgtcacaaaaaaaaaccaacagaaaattgccaaatctgctgacaagcttgctcttcaactggatgaaaagatggaattttgaaggaaaaaagtgtttttaaatttttgttgt

SEQ ID NO: 86812 - DNA, 669 bp, Heterodera glycines
  unsure (1)..(669): unsure at all n locations
gaaaaggggtggcggcactgactttggacgaggactaccaacnngacggcgaatgcaagtccctgcagcagccgaccagcatcggcgaaggaatgttccgcggggtgcgcggtttgggcacaagcgttgtggaaggagtcaccggtgtcgtctccaaacctgtcgagggcgttaagcagggcggcctactcggtgggatcaaaggcatcggcaagggaatggtcggtgcaattgctcgtcccgtgtcgggggtggtcgatttggtcacaacgacggcggacaatgtcagaaatgccatcatcaatgttgaggacgtaaagccaattcgcccgccacgtgtcatttcccacgacaaaatcatccgtccgtacgtttttgaggaggccgtcggatacaaaatatttcgggagacggaccgtggtcaatttgcgaaaactgatcactacctgacttatgggggcatcacaaaacgtttggtcatcattgtgacggacaagcacgtaattgaggctcggcaacacaaactaacgggtaattggaatgcaacttggaacccgaaatacgccgaactcaaaaggccgactcgagtgggctcaaatgggaaatttggcattaagctcaggctgaagaaggagaaaaggggattttcgtttttctcttcgaaagatg

SEQ ID NO: 86813 - DNA, 660 bp, Heterodera glycines
tgaagcgcaattgatttggccgagctttacgcggagacactcaaacaaagtgaggccacactgaacacagaaaatctccaaattttgctgacgatattttccatttgccttcaacatttaactctgatagtccatcgtcggaccgtcgcattccatttttgaacaaaacgctcgactgggccctcaaatcggcgaagggaaagcccgaaatgttgagggcatgcgcacttctgcagaggaaatttggcgatgttttcttcagcgaaggacaggaagaacaagcggaacgttatgctcgctctgctgaatatttgcttgacgaagtaattcttatgctaatcgggcaattattaattgttctttaggccgaccgaatcgaagggattccaattggtggagaagggagcagtggcgaaaaccgcgaaacagacaatgccgacgacgcggcgcagaaaatcgactccgaactcgaattggactaatttccatgacgcagacatatcgaaaacggtggttttgtcatcgcaaaggatttacatgattagtttcgattatttttgtgatgtccaatctctctccccacggttttcccaatgattggccggtcataatcacctctaattcccatcctattccaaattaacttgtttatttgatttg

SEQ ID NO: 86814 - DNA, 483 bp, Heterodera glycines
gatttttgtccactcttttaaatattccccaaatgcgtgttctcccccttctcttttctgccctcctcctcctctctgttggcctttgctttgcccagtttgatcagtctccgtccgctgctctgaatcatgtgcgggccaaaagaggctacaagccgtggaagaagcaatccttctcctcttcttcaagcgaaatgtacagaaggagaagacccagtggtaacggtcattacagggattacaacggctacgaacgggcgctgggaaaaattacgcggagctattaacggacgagcagaagaagagaagcaaaaagccaaacaatgggcgtaacacttttaattgatcaaacgatattacagtatccaacaccaaaattacagtaaccaaacatccaatggaacgaatgactcatttaattcagcaaatttgctggaattgccgataaagaaacttaacaaaaaaaaaaaaaaaaaaaaaaaa

SEQ ID NO: 86815 - DNA, 497 bp, Heterodera glycines
caaaaaaactgctaatgatgggagtggaaacaactcatcagctgggattggtacgaagatcaaaagaattgtcaccgctggactgctcttcacttccctggcgacgggtggggcggaagcgattgggcgaagcaatgctcagggaggaaatgccgccggattggtgccatcgcatgtgaccaatcgctcaatggctccaccacctcctcctgtgcaatttgaaatgggggcaaatcgattagaaaaaatgagggcacacctacgcgaacttgctgagaaaatgccggtcaatgaatcgaggcgtctgtcaccgagtggacccgacccacatcatcattagggccatggatggatctaacggaggaagaaagaatggatgcttagttttcagattttattctatcctcttttatttattagtttttcaaaacaaatttcttccacaactttttaaactatttgttgttttgaatctttttagataaatctaaacccct

SEQ ID NO: 86816 - DNA, 414 bp, Heterodera glycines
ggttgcagcccgcctggtagagcaggcccgagacggcgtggacatgcccttggcgtcctggcaggacagggtcagaacgaattcttgcgaggtcttcatgatggacccgattgtagggtcgtcatctgacagccgcgcgaaaccgccagtggcggccggtctcagtgaccgtggccgatgtgctcgccttccttgaccttgtagaccgtgccgcagtaggggcacatgccttcgccggtcttggccacgtcgatgaagacacgggggtggttgctccacagcggcatcttcgggttggggcagaagaccacgccggggccttgtacgtcggcggcggtcacttccaccacggacttgggtttgcttgcggtgttgctcatggcgatgtgctcccggtcagaccttggtcagcca

SEQ ID NO: 86817 - DNA, 339 bp, Heterodera glycines
ttgtattcgttttatttctctacttcggtggtattcctcgattcgtctttacacgcattttaagcatcatcaaatccaattcaaccgcagcttacctcaaacaatgtcctcctcttctggtcacccgcaaacatcaagcgcatccgcaatacgggcattgcaaatggagttgcgctcattgcaatcacaaccgttggagggtttcactgtcacctgtgatgatgacaacatgttcaagtggacagtcggcatttttggaccacccggcacattgtaccagggtggctacttcaaagcacatttgaaattcccaacaaattacccatactcacctccaac

SEQ ID NO: 86818 - DNA, 695 bp, Heterodera glycines
cattgacccggctatgttcgacgcctttttacgcgatcatttgaacgttactgcaccgagaacatggcagttctcgagccgcttagacttcgcattaccaattatcgagagttgggttttataccagcgaaaagcaccttacgggtcaaacaattcccatcctcaattaatgaaagtacggacgaatgggaaatttcatttgacgagtttgtctacattgagcaggctgattttagagaggttgccgaaaaaagttatcgtcgactgacattggaacagccggtgggactgcgtcatgtcaatttggcagtcaaaattgacaaactggagcgggatgagcacggaaatcccatcgaattggtggtaactgcgaatccggtgagtagtgagtgtaagccgaaagcattcattcattgggtggcgagaccggtgctttgtgaggtgcgtctctacgacaaactatttgtacacaaaaatcctgaggaccctgccgaagtccctgggggttttttgactgacataaacccgaactcgctccatgttctttcaaatgcaatggttgacggaagtattattcgcactattcgtccgttggatcgctttcaatttgaacggaacggctttttctgtttggatccgaatgattcgtggtcaagtgagaaaaaattcgtcttcaatcgcatcgtttctctgcg

SEQ ID NO: 86819 - DNA, 670 bp, Heterodera glycines
attgggttgcggaggaaccgtgtccgtggcgaggagtacgaccaactgatcgacaatttcatgaatgcgtgcaggaaaaaatacggacagaatgtgctggtccaattcgaggattttggcaataaaaacgcctaccgattgctcgagcgataccaggacgaatattgcatgttcaacgacgacatccaaggcaccgcctcagtggtcgtcgccggactgctcgcgtgcacacgagtgaccaagctgagaatgcgcgacaccaaatacgttttcttcggtgccggcggagccgcgttgggcgtggcggaaatgtgcgttcgccagatgcaaagtgagggactgtcctttgaggaggcgtgtggccaaatttacatgatggacatcgacagactgatcaccacacagcgcaaaaacattgagccaaggcatttgccgttcgccaagaatttgcccgactcgcagtctctgcttgaggtcgttctgtcggttcggcccggcgcgctcatcggcgcttcgacggtccgtggcgcattcaccgacgacgtcattcgcacaatggccgagcacaacgcacgaccgatcattttcgcgctgtccaacccgaccagcaaggcggaatgcacggcggatgacgcctaccgagtgaccaatggcaccgcgctgttcgcct

SEQ ID NO: 86820 - DNA, 727 bp, Heterodera glycines
  unsure (1)..(727): unsure at all n locations
cccataacggactgtactttttgaagacaatggcctttgtcgcgtggagattcgcaaacagtcggagccttttcgtctggcaattcgcgtctttaaattgctcgaccccgcggtgggctcttttgggatgcttaccaaagtgcggtacgaagccgagctcagcactttccatatggccccccaatctttggcggactgcccaccgcccgttggctccgtcaacggcgtccgatcttttccgcctccaatttaaattgtggccgcgaggatggacaaaacgagaacttcgaggagtgtttgtgggccgacttcgccaaaacgccggggaccaacacggcccactgggccattggagagcacacgcaacactgggaacagatcatgcgcacgacgccctcctcacggcccaaaggccaattctacttccaatacgtggaccccgtggccgaatttcctctgccgcagctccgttccgtgctcatcccctgcacccaaacgccctcctctctttctttcaaattttggttgagtttgggcctccaggcgcagatttgcactttgggctcggacaatgtcgcgctgtcgtgcgtttatctaaacgatgccgacgcccccggccctttgaccatcgatgtcgacaccgccgaccaccaacccttcaggttcgcgtttaatatgcttcgcattgaccgtggcgctantggtggggcgggcggtggtcgcattg

SEQ ID NO: 86821 - DNA, 532 bp, Heterodera glycines
gttgatcccgaagctcctcgtaaagtcggattgtacatcaagacatcgatgtgttcgaaatcacgaagcatttgctggccaagtattggccaatttgaaggcactcgattctgattggttctgtcagaattatatgaaacgcaaagcaaaatttgggcttttgccattggaaaaagtgaatatgtggggtggctctctctcattgggccatcccttcggcgctaccggcgtccgattgttggcacacgcggcgaaccgactgcaggccgaaggggggcgtttcgcagtgatcgcggcgtgtgctgcaggcggacatggcatgggaatgttggtggaaaattacgagtcgaaacagaagtaaaagagggagacggagggacggacggaattcactcgtcgccatttgtataattgatttacaaatagaaatatcggaatagtgaaaacactaattcaatgggaatgaatgagaaattgtaattataaaaattgtactgcttaaattcttattaaagattacgtgccggaaaaa

SEQ ID NO: 86822 - DNA, 746 bp, Heterodera glycines
ggattattgcgttattagtattttttacttgttttctatttgcccattgtatcaaagcatcgttctgctccttcatcgatcacagcaaacggaagtcgtcacacgtggcggcatcatggagaagaagatcatctacttcaagctgatgcaaattgggctcactttggcattcatgtgggaactcctttcacttcaccaattctgcggcacatttgccgacccaaaagccttcatccatgacatctcagttggccattgcgaaagctttacgctcatcggaaaggactcaaaaagcggagaatttggcgctgtgttcgaccaggacaaatggcacaaccaactgtcgatgagcagcaccaatagacaaccaatcgaagaacaggacgaattggccgcgaaattgccttccgctgaacgccattgcattccaattacgatttcgctttttgactggattggcgaagagagaaatcttctcaacaatggcactttgttctttttttccctcctattgtggattgcattttggtcgcttcttccccttggccttaccaccatcatagtgctacactctgcggaagaatatgaaggattccccttttatttcaatgccttcgcttctatcttcttctggtgtgtttctgctgcggtctcaaccaattttctgctttattggacgagcttctggacttgcgtcaacttccaagcggaccacacaaatgtgccaatggtcactttggtgatca

SEQ ID NO: 86823 - DNA, 245 bp, Heterodera glycines
atgaagcggaggaacaaaggacaaagaatcagctggcaaaaggaaaagaagaaggtgattctggagtgattgtgccatgaaattcaaaacaacaatttattttttatgttggttaaaaaatacaatcaaaaagaaataaagccccccccctctctctcccccagtcgccatctcccgactcgccctttagttcctcattttattttaactatttcctgcgcatttgccccaattttgctgattgc

SEQ ID NO: 86824 - DNA, 608 bp, Heterodera glycines
aaataaaatttccttggaccgacaaaaatggcaaaattcgttgccattgctcttctctcgctgaccattgtttcgatggcacttgcaaaaactggcaaaagtcaaacggcagacgaagttgagggatttcgcaatatgaacatcggcgacaacaataaggttgacgccggaaaggagcccgcggctgataaagcaaccaaaaagggaaaagctcagaaagccggaacgaaatcggcggcggccactaatgagcccgcggctgctaaaggaactaaaaatggaaaagccccgaaaaccaaagcgaagcaagaggtggccactaatgagcccgcggctgctaatgaatggaacgaccaattgatgggcatgggcgttgagaaatttaacgaggagcttgctgtgttgttgccaaaagccaacacttttatggaaaatgctttgagcttcatcaatgaacaaatggaaaaaaatggtattgcaactggcgctgccggggactcgtgctcgaccgggatcccggccaactaggagaccaatgccacaggacggcaccggaggagggaagaaaggatgacgagctctttggatgatgaaggtggtggaatatg

SEQ ID NO: 86825 - DNA, 291 bp, Heterodera glycines
tgttcgattgtgtcgaccgcagaccatcgcccaagggctttggcttctgtgaattcaggaccacaaggagctcagaatgcggttacaaatctgaacggagccgagctcaatgggcgtgcgctgcgtgtcaattggaccaacaaataagaaggttgtgcttgaactggacggatgatgatggatggattgtcatttttgaggatcgttttgacaattttcatttttctttgttgattggttttttgaaataaaggaatggttcgcaaaaaaaaaaaaaaaaaaaaaaaaaaa

SEQ ID NO: 86826 - DNA, 233 bp, Heterodera glycines
catttcctcctataccttcttcccaaatgtccttccttcgtctgatcacttttgttcttctgatcactctgtgctctttgccttctctggtcgaaagcggcctcattggcattgtcggcactcccgttgaagccgcttggtgcggtgttttgggcaaagaatccagccattgccctactgctggaggcggtcaacatggcggaggaggaggaggaggaggaggaggaaatttc

SEQ ID NO: 86827 - DNA, 604 bp, Heterodera glycines
gaattaaggaggtgttcttgctggactgtgacggacttgttgctgctggacgtaacgccactgtcacttggaattgaaacgcttggtggtgtgttcaccaaactgattacgcgtaatacgaccattcctacgaagaagagccaagtcttctcaacggctgctgacgggcagactcaagtggagatcaaagttttccaaggcgaacgcgacatggcattggacaacaaaatgctgggccagttttctctcgttggtattccgcctgccccccgaggtgttccacaaattgaggtcgcttttgacattgatgccaacggaattgtgaatgtgtcggcacgagaccgtggaactggcaaagaacagcaaattattatccaatcgtccgggggactcaataaagaccaaatcgaaaacatggtacgtgaagcggaaagacacgcagcagccgacgcagaaaagaaagagacgatcgaggcaattaaccatgcggagtcggtgctgcacgacacggagtcaaagatcacggaatacgcggaacatctcaacgcagacgaagttaatgtggtcaaagagaaacttgaagagttgaagaagaagttggcca

SEQ ID NO: 86828 - DNA, 621 bp, Heterodera glycines
cagggttggccggacggggagagctggcaatcgcgggtttgccccacgttggtcaccgagaaagacgccgatttttgtgcccatttggtcaaaaatttcgagtccgccggccttccagtcagtgccgagctgctgcacgtggcgctcaaatgcgcctggtacaagacggaacgtgaacagcagctgcaaggccaaccaattgcgggcggtgccgtcggctttggcagcggggcgcgacaacggacggggcttggctatacggcggcgccaacaatgatgatgggccaaggtgctggcaccgtcgccccgggaataacgaccatggcaaaagcgtccgtgacaaaccctcttggccagtcgtcggggccgtccttctcccaacaggcgaccattacgaagcaaatcgatcgcgccaagtcgttggtggccaccggcaatgtgaagggcatggaccgggtgtcgatgatgcggtcggcgttgaagagcaccttcaaacactccttccaagcggccactgttactgggtcggactattcgttaccagcatctgacccgaggccagaatggaaaatcaaattggacgaacaggcggaaaagatcaaccaatgcatcaacagacaa

SEQ ID NO: 86829 - DNA, 585 bp, Heterodera glycines
  unsure (1)..(585): unsure at all n locations
cgcttcgcgaatgaaaggcatcgatttcgaaactgggcaacaaatcctttgcccttctaatttgctttggttggctccggctctgatgaacaactcggtggctatgctcggcaccaaactgttttcaaaagcaaaggattggacggagttgcggaggaattgtccatggaaatgcatcggatcggagcacgcaattttggcagggacgaccgaattggcacagtgaatggcaaaagccttctggcaccgttccttgaggagccgttggtctgctggctgaacactttgccgaccgcgttgaagaccggcttcggactgccgaccaatgacggcaccgccaacaaatttttgttgcgcaacgccctccgctctttgggcgtgccggaatgttttgtgcagcggcctaagcgtgcgatgcaatttggcacacggatggtcaaaatggagaacgcggagaatggcgacccaaagttaagagggcccaaatttgcgagaaactgatgctatgatttgctgtgctaatttatatttgttattgaaataatcaattttatttcaaacgacnnanaanaaaanaaaaaaaaa

SEQ ID NO: 86830 - DNA, 746 bp, Heterodera glycines
caaattcgacgcctgggaaaaagtaaagggatgccgaaggcagatgctcagcacaaatatgcggagattgtcaattcgttgttgaaaaatgcggggattaacaacgcgaacacttcggaaacagaatcggacggaatccgacggacgaaggagggcaaagtgtacaaaattgagctgaaccgttccgacaaatacaatgccatcacttgggagatgtatgagggtctgatcagcgcacttggcgatgcaagcgccgacagagaaacgagtgtgacagtgatcacaggcgttggttcctatttctgtgccggcaatgatttgtccaattttacgcgcggcgtcaaaacgagcgacgatttgcgtgctatggccgaccgtggggagcgcgtgttggagcgttacgtgcgcgcgttcattgagcatgaaaagccgctgatcggactgatcaatgggccagcgattggaatttctgtcactgttttgcctctgttcgatttggtcatcgcttcggataaggccactttccacgcgcccttctcttcgcttggccaatcccccgagggctgctcctcctacacttttcctctgattatgggcacgtcgaaagcatctgaactccttttgttcgacaaaaaaatgtccgccgaagaagcattggagcgcaatttggtctcccgcgtcattcccaacaacagttttggcaccgaaactgaacggatggtaaattcgctggcgtcccttccgcc

SEQ ID NO: 86831 - DNA, 714 bp, Heterodera glycines
gtgaataatcgccattactaaatgtttttttgtcggagattttatcaacttaaaagggaaagaaggaaaagtgagagactaacgaccaaacgaaaaccatcgattcgatcgtaagaaagaaggaacgcatttctctctgttcttttgccgtcccttctccgatttttccctcctccccatttattcatttctcctcccaatttcttcctaaaatgccctcctccgttggcccctcttcctcttccgatttgctcatccgtcttttcctcctcctcgactcggccgttcactttgccctcggcgctttcctcttcttctgtccgtccacctgtgcccatttccttttgaaacgcccttcttccgatggcgtccattggcaccttttgcgctgcgtcggtggccaattgatggcctccgccactctctcgtggcgttgcgcctccccccgccgtctccccgagctgcgttcgtcctgtctgatgctccgtctcctcggcagcgttctcttcgtgttcctcttcctccacatccgtgctgttcatcccgatttgatgccatttcttgtgttgcgacaactcatctggttctgcttttccatgattgctttgtgtgttgcgctattaattgtttcgggatggccaatcggtgataagctttttgctgcgaaccgttggggcaatgtgctgtaccaaattgatacaatcgcttccatta

SEQ ID NO: 86832 - DNA, 701 bp, Heterodera glycines
acctgcttcgacgtgctgatacctcttcccgacgaagtttttggcctgctcatccaagccatcgtttgggcagtgaaacacacaatgagaaatgttgcggaaaatggagttgacattctccgcgagcttttgaccaaagtctcaacaacgacggacaaagcgcaggcacaatgccttttacaaaaagcactttatggtgatcatggaacatgtccttggcgttgtcaccgattacaaccaagtgaactttgttgggctgacgaatctggctgaaagcgtttgtctgttattccaagcagcagaaacaattattgaagtgccactgaatccgacaaatcccagccaaccgaacatggaatttgtttacgaggctattgccactttattcaccactcatttcaaaaatttgacagagccgcaaattcgagtcacagtcaaagggttcttcagctttaaccgcacagttacaaagatgcgtgaacacatccgagacttcctcgtccagatcagggaagaagccggcgacgacactgcggaccttttcttggaagagaaagaggctgagatccagcgcattcaatcgttaaaacaagcgattcccggggttagaaatccgaacgaattgttggaggaggacatggtctgacaatgcgtccgtcgggtgggctcgtccctgccttccccgtttttgttttttccat

SEQ ID NO: 86833 - DNA, 486 bp, Heterodera glycines
tgggcggctcttacgactggctcggctacttggaaacgccactctttctaccgggactgatcgcaatcaaacgagtgtgtggccgtatcagaccggacctcataccaaagcaggagcggctacatcgaacagactctgacctaccataatctatcggaaaccagcgtgatgcttatgcccatgggcgcgttcggcactgacataggcgcattgcgcgaactagaatactgaccatcgaccaaccttccatgaacatggatgcaagatgttacgaggcactacataataatagtgacaaccaaacatctgaatctggctgcataatcctaactcactacactccacattcatgaatgcgccattgcctaaacttggtaacagcggaccactggtaaacccctagttgactgcacaatatgagcaaaagcattaaaaggggcataatataaatcgaagatgaaaagtaaagttgtttttttggtagag

SEQ ID NO: 86834 - DNA, 708 bp, Heterodera glycines
aaagcgcgtccactttacacaccgacgccgaaggtcggatggcaatggccgacccattggccgaggccaaagaaaaagccatgaaagcgaagaacccacatttgttcaccatcgctacgctcactggccatttgatactcacttatggccattgctccgccgcgatggacaacggaccggcgagggcggcaaattacgcggaacaattgaggaaaacgggcgacgaattcggacaaccggtggaagtgtcgcgactgttcagtgaggacttcgactttcactctgcgaaatgcgaagcggccgatttgatgcaatcgaacgctttgccaagcgtgagaacgccacgagggcacatgggcccagcggcatttctgatgcgcgtctcgcgcatcgacgaggctgggcttgactcggcacagccgttgaaatacacccatttggacattggcatatccatgggggagtacccaaacacttcgttcccttcccctctgctcgcacttattgcacaacatgttttgcctaaggtcaagtgaagtttggtgaaagaggctaataattaacgctttggctaatttttaaggggaaaattgcaatccgagattttaaattattaacgacagtgcgcaaataaatatctttattgttccctgtctattcacatctttaaaataaattgttaaatcaaaaaaaaaaaaaaaaaaaaaa

SEQ ID NO: 86835 - DNA, 636 bp, Heterodera glycines
cagcgaatggcactcgccgaagatgttggggacatggcatcactgttggactccaatgggaaataccgctgcaacacctatggattgtgctttgagccaatagacaatgagatttgcttgggctcttccaaccgaattctcattgacatggtgcttgccccggctgaccgtgacgtcacttgccttctctttgccactgctcgttctttttaccaggaacaacaacattccgtcggatcttgtccaaaaattgtaaccaaatgcacggttaacttgcgtcccattgaattcaatctttcggaggagggccgtgaatcgatgtcatctcccatttataatgcccattggacttcgactgaaccgatttggtctttgtgcttcaattcgcaccacatgaaaatttgcgttggcatggaaaaatgtgccaaaatactgaacgtactcagtggacaaaatttttatgtcggaagcggcggaaaaaatgtcatttcgtgtattttttccaaggacggaaataccctttttctgggccggaaaaatgccgatgtttccatgttggacatgcgcatgacatcgaaccataaagtcggcgaattggcccagtcgccctctaccggatacatgcatttgctacag

SEQ ID NO: 86836 - DNA, 606 bp, Heterodera glycines
ccgttagaatacgccacagaaatttggaatccattgaaaaaagaaaatgtccacaaaattgaagcagtccaaaaattttacaagaaaagccttcaaaaaatgtgggcttgtccccatgccgtatgaaaaaagattaaagttttgcggaattaagacattggaaattaggcgcaaaattaatgatattacaactacttttaaaataataaaaaaacatacacatcttaaaccatctaacttttttgctgttgctaaacgggctattcgcaaaccctttttattacaaaataggatatatattacaaaaataaaaaataatttttttaatagggttattaattcatggaatttattaccgaaaaatattatggaaataaatgaccccaaaaaattccgagaaattgcaaaagaaataattaagcaataatgcatattttccccattgagaggtgtgatttgtttcatttatgtctattgtttttaatttgacacctattctgtgatttgacacttatttttgtgatttttgactgccatttatgttttatttttattctcactttttttctttttacaccactgttagagtgcatagcaccttgtggt

SEQ ID NO: 86837 - DNA, 596 bp, Heterodera glycines
cattcctctgtttaaagcccttttttaatcggaaatgaatccaacggttttttctttgttttagcggtgctctttcttgtcaaagtcgactttttacagtgcaaatacaatgaaccaatggcacgacaggtgctgcaaaagcatgcttcacaatttcagcagcattgtaaaaatgcccgcagaggaagtgccgtggccaaatgttgcagtgccatcagaagcataatgggccgattcacaagccaaaaaaaggcaatgaaccaaatgctggccaagtgtaaagcgggcacaacgccaagcgaagcacagcaaatgcgaagaaaattggaaggatcgaataaactgaaggattgtggccagtttaaaagccaaattcagcacaagttcagcgagttgaagcagtactgcaacaatggggcagaaaatgaggaggaaaacgacgaatgatcagagagggagagagaagaggagagagtagagagagagaggaacagcaaaattctaatcactagtgatcactgataattgccgattgattgaccggtacgactcatttggctgattgaagttttttttatggcataaagagttgcgtt

SEQ ID NO: 86838 - DNA, 362 bp, Heterodera glycines
cattggtgggattattgttcggatgagagggggagacatggcctttttcgattttttttgcaacccatatacttttccaacattgtttcagtcatcgtgccatcttttgttttgttacgtatatataaaaatttattggccgaaaaaaaaaaaaaaaaaaaaaaaaaaaaaaacaaaaaaaaaaaaaaaaaaaaaaaaaaaaaaaaaaaaaaaaaaaaaaaaaaaaaaaaaaaaaaaaaaaaaaaaaaaaaaaaaaaaaaaaaaaaaaaaaaaaaaaaaaaaaaaaaaaaaaaagtcccttgggggggaccccccttttaaaaaaaatccccggggccccatggggggggggaaaattcaaa

SEQ ID NO: 86839 - DNA, 754 bp, Heterodera glycines
ggtgtggaaatgaagtcgatagaaacaaatattttaatctggcaaacttaaaatacattaaaacttattgaattatctaatttccacagtacttgcccggtacgtttgctgttacccagttggcgtcgcccatttgacattgcccagttgaccccaccattcgtttttaaacttgaccacttccatttatcgtcagaagtactcttaattgtgtttgccctgtccaatatttatcggcaattctgcttttgactttaatccacagctttcaaacgatggctcgtgcgcctgttttcctcaatgtttatgacatgtataagctcaacgacatcgtcttttcgagtttgggcattggagtgtttcacagcgggatcgaagtgtacgataccgaatatgcctacggtggacatcccttccccttttccggaattttcgaaaatacgccacgcgatgctgaagaattgggggagaatttcaacttcagggaaagcattcctttgggcgaaactgatttttctgctgaagatgtgaacaaaatgattcagaatttgggccaagagtaccggggggacagctaccatttgatcactaaaaactgtaaccatttctctgccatccttagcaaggttctaacgggccaggagttgcccccgtggattaaccgtttggccaacatttccggttctttgccatttgtcgagcgatggatccctcaggaatggcttactccaatcgcccttcaacagtcgttgga

SEQ ID NO: 86840 - DNA, 762 bp, Heterodera glycines
actcgggcggcgagaatgcggagacggaggacgacgaactgagcggtgaaggggcggcgggcgatgaggaggagggcgacgcgtcgccatgcgagtgcgttcaatgcgaggtttgcatggccgaaaattggtggcgtatggccgcctaccaaaacacttttcttcaacagcagcagagccaaacggacggcgacacttcgggcgccacgtcagtcaccgattcgaatggcttcgacgtgccctccaacgcgtcgtccgccggcttggatttgatcggctccgccgccacgctcattctcaaccagcagcagcaaatgatacggcagggcgacaccgccgagcccagcgcggacgaccttttgcgagccgacttttccatgccaaaactgcgcgagtttttcgaatgccaaaaagcgatgggcgtgccgaactttcccgaggatttcgatgaattttggctgctcgtcgtcaaggcgcgtcttttcaacgtgttcaaataccgcggccccgaggcgtacaatcgaattgtgctcaaaattcgtgacattgcgcaccaattccgagcacaagtcgaagaaaatgagcacagcgatgggacggagaagccgaaaagagggaaaaagcaaatgaccaattaattaatcaattgaccgaccgatgccaaaggcgaataacggaggcaaaaacagacaaatgaccaaacaataaacaaataattgtaattgttttttaagcattttgtttctcatctctaactttaat

SEQ ID NO: 86841 - DNA, 391 bp, Heterodera glycines
catttctcctccattgtcttcctttccctctattttgcgctgcatattcatcgtcaaattgtgctgccgacattttctttgactcccaatgtctgatgatgttggtcctcccgctccttccggttccgtcgatgactttgcgcagcgcaccagccaattcctcgacttcatccacggcggaaacatcgaccgattgcgtgcgctgatcgactcgctgagcgccgatgagctgaacaccttgctgcagatgaacgacccgcgcaacggacaacaatttgcactgttgatcgcaattatgaaaggacacacagaaattgctgcacttttgttggagaaaggcgcggacgtgcatcagaccaccgttcgccaagtgaaccatgtgaacatggcc

SEQ ID NO: 86842 - DNA, 630 bp, Heterodera glycines
tcttaataaatggttcgaattttgttggccaacggtggagtcggccaacatcaactccttcaaaaagtgttgaagaagcgattaagcattgcgttggtggagatatttcatcgcagaatgactattcattggttttctttggtcgcaaattaaactccgaccaacgcttagctgacattccgcatttggacggcgagtcacgctcagttcgattagtctgccgaaaattgcccggtgttagcattgaaaagaacctggcggatgtggacaaactgcggtcacaatgccgaactttgtaccagaatcttggcgaggaacttcagcaaaagctggagacatatatggtggacgataacaatgccatattcaattccattctcaaagaccatcccgaacttgtgcatgatccgatcgcccttcccattgtcaaggatttgcgactgctggtgcctgccatcattgagaaccataaatttgcctacgagcgtcctgtttgtgccaagattttgaagaaaactttgctccaattcggcataatgcagcaagggcccgcagattcgtttatggcacaacagggagccaatgggtttccgggacaacgaatgcccgcatttaataaccgagaaaggc

SEQ ID NO: 86843 - DNA, 372 bp, Heterodera glycines
  unsure (1)..(372): unsure at all n locations
caccgaaaatggcagcaattgaggaatttngaacacatctcctgcttacactacgaaaaggacagctttcaaacccaacgactgttgtgcaaacccaagaagcatcactcaatcagcaaaagatgtggtcacttttgaatgggccaaagagaaagtgcaaatcgaagaacaccgttcgctcgagccttctaagaaggaacacaaatggacaaaaatggaacagaattgaaaagaaaagcaaaagaagaaaatgcattttctttggattgataaagcgatcattcgatgattaatttgtaataccaataaacaatttatgcaaaanaaaaaaaaaaaaaaaaaaaaaaaaaacaaaaaaaaaaaaaaaaaaaa

SEQ ID NO: 86844 - DNA, 438 bp, Heterodera glycines
  unsure (1)..(438): unsure at all n locations
ccggaaatggcagtacttgcaccgaaaatggcngcaacttgaggaactttgaacacactctcctgcttacactacgaaaaggacactttcaaacccaacgactgttgtgcaaacccaagaagcatcactcaatcagcaaaagatgtggtcacttttgaatgggccaaagagaaagtgcaaatcgaagaacaccgttcgctcgagccttctaagaaggaacacaaatggacaaaaatggaacagaattgaaaagaaaagcaaaagaagaaaatgcattttctttggattgataaagcgatcattcgatgattaatttgtaataccaataaacaatttatgcaaaaaaaaaaaaaaaaaaaaaaaaaaaaaaaaaaaaaaaaaaaaaaaaaaaaaaaaaaaaaaaaaaaaaaaaaaaaaaaaaaaaaaaaaaaaaaaata

SEQ ID NO: 86845 - DNA, 624 bp, Heterodera glycines
atcgcccgacagcccgtggcgccggagcccgagttgccatggtcgacctggacactcagctgaacaacttgttggaccgtgtcgatactccgcaattcatcatggcttttatgagtatgagccaacaggacccaacgtttttggcaaaggcatttgaggttgtgatggaagagtgtcgtaccaccggcttctccaatccgattttgccccaaagtgccaccattccatctcttcggcctgtccaccgtctgcccactccgctccaccaacaaccgcccggcgtcccttccgcttcgtcgtcagcgcggcatcaatcggcgagaagtcctggctctttgtacctgccgcctccgctgcagcccaaagcgtatgtgcaaggctcatccctgctggggccatctcggccaacttccaccgtttcttacacgcaaattacgccgtacgccgccatccccgaaagttgggttgtcgacgcaccgatacgaaaacagccgaagccgagttcaccggcccgggaatatcgcaccccagtgaatttaccgttcaaagacttcagtcaatcatgatgaaagttatttttattttttcattgccttgacaaaaaaatgtttgtttattgtgacc

SEQ ID NO: 86846 - DNA, 625 bp, Heterodera glycines
caaaaaagatcttatggcccggctgaaaaagctccacggttcagcgttggccagtgccaatttgcgatggccgaacttttcttggcactcgagcacatccatgccctggacgtcatccaccgtgatgtaaagccggaaaacattttgttgcgcgaggacgggcacattttgttgtcggactttggctgtgccaagcaaatcattgcaaagcgggaaaatgtggcggaggaaaatggtgacaaaaccgacggacaaagagcagatgatggccagaaagcagagaaaagtgctgacagcaaaagcagcaaaaaacgggaggaggaggaggcgacaaagctggcactgagacggcggtgctcatttgttggcagtggcgcctatgtgagcccggaggttctgaatggcaaggaagtgacgggtgcatgtgattggtgggcatttggcgtcactttgttccaactgttggtcggccggctcccattctcggccgacagtgagtatttgctgttccgacaagtgctcgcgctgtcctacaaattcccggacaatttcccatgtgccgcggcacgccaactcgtccaagcattgctagtgcttgagcctacgcaacggattggtgctgcgg

SEQ ID NO: 86847 - DNA, 105 bp, Heterodera glycines
  unsure (1)..(105): unsure at all n locations
aatttcccatttttgcccgctgaaaagaaatcgaccgcttaccgggaaagaatcgaatcgcttcccaaagtgcaccaaagcactttaaagaaacttctgggcnca

SEQ ID NO: 86848 - DNA, 650 bp, Heterodera glycines
cctttttcttctggcttccttatacttaacctataatataatgggctgagtcggaagcgaaccaattgtccatttggtatgacattggcggaattgtcggttctgtgcttggcggattggcttcagaccgactcggtcaccgcagtcccatcattctcctgatgcttgttttgtccgttccgttgttgttcatctactctggccttggttcctcgcgggttgagcacgttattggcatgtctttgctcggagtgaccatctcgggcccatacaatctcatcgttggcacaattgccattgatttgggttctcagcaagccttggccaacaatgctgaggccctgtctaccgtaactgggctcattgatggcattggctcggctggctccgcattgggccaactttttgtgccgttgattcaaaatgaacttggatggatttgggtcttccatttttttattttaatgaactttctttcatccatgtgccttatccgtcgtttcttccacgacgctcggctcatttccctttcgtttgctccgaggcaaaatggtcgtcggcaagagaacgagccgctgatttcgaataactgaactgaaattgctattgtatttaattcatataatgccaaatatactcttaagtcgtca

SEQ ID NO: 86849 - DNA, 661 bp, Heterodera glycines
ccactccgacaaccaatggccaacccaagcgatttaactgtgtttattatcaggagccagcaattaacatcgacgaatggatcaacaccttcaaagaagcatttctccgtgccacttcttctgcttgctacgaaattcaatttgctgttcatgccacgtcgacgtccatggtgccgtttgaagaggtgaacaaacgaaccaacgagaagctgacactgatcagaaaagcatgtgaatatggatgggccatccgctggatgattaaacgacaccaaattggacaaatggttcagtgggaggacgcaaatttggacaatttgaacaatgtcagcattgatttgagtggcgacaaacaaaacattgggccattgtctccacaaaacgaagaaaaagaaacgggacaaatcggcggaaaagggtgccgaaatgtgcttaagaagtgaaataaattgagaaatgatcggctatttttgagattattgaatggacaaatggatctgttaattattttagatgctcatttgctcgttaattttgttgtaattctttcatttctggcatatgtaatttcgcaattctatccgtgccaataatcattttcatgtaatttcgtgcattgaattaaatttgttctaaaaaaaaaaaaaaaaaaaaaaaaagg

SEQ ID NO: 86850 - DNA, 631 bp, Heterodera glycines
acgcatcgtaatgtactaaacttggacaaaaacctggagaacattcgccgaattgaccaattcgcccgcaaagtgatcgaacattgcacccatgcggcactgttcaatttcagcattgagcagaacaaatggctgaagacggaggtggacggcccgctgttcatctacgaacggcttgaccagccgctgtactcgatgattgtcgtcaatcgccagtcgcccaaaaattttgtggaaccaatcacggacgggctgcagttgcgctacgagccgccctacatttttgtgcatcgcgaagatggctgtattcgcggtctttgggtgttcggcgaagacgaatgcaaacgagtttttgacactctgacgaatctgggcatggagctgaagatgaaaagtgccggtgccaccaccagcagccccaaaaacagcatctccgccatcaacaacgacagcggtgccgtcgccgctttcgctgccgcaacgccgccgacgaaaattgtcgctgccgccaaaccgtcaccgccgccaccgtcgcagcagcaacagcaacagtcgatccgcgtcagcagcttcatctcttccaacagcagcccgttcaacaacaccaatcagtacaccaactcgaacaggg

SEQ ID NO: 86851 - DNA, 608 bp, Heterodera glycines
acatccgaaaatttgggcattatatggaatgatgaaatggaagatttctcatttcccgatgtgaaaaattggttcggatatgccatttcaccaaccaattttgttgcacccggaaaacgtccaatgagctcatttagtcctatggtcatctacaacaagcacacggggaaagtgaaatttgtcattggcggctccggcggtgccaaaattccgtcgtctgttgccaaaacagtgttgcatgtgttgtgcctgaaccaaacagtgaaagaggccattgatgcgccagtgttgcacaaccaattcactccgaaccatgttatttacgagaatgggacaccgccgaaattgatcaaagatctaaacgaaaacttcgggcacattatgaagtcgtacgacaacaacaacgtggttgtgcaagctattcatgtggccgatgacggcttcatctatgcaaatggggacttccgtcgtcgaacttacatgcacccggccggcttctaattggcgtggcacggtgccatgaatttgtggacggacccccggagttttctagactgaatatacaatataacaccaccatcaacgcataacaccatagattatagaca

SEQ ID NO: 86852 - DNA, 535 bp, Heterodera glycines
ttttattatataattgcttttattcttttttgttttgtttgcaccaaagaaaatgtgatagaaattgttcagcacaaaacaaagccttcccatctctcagttttaattaatggacaaaagtttgactttgacaagtttggtgcgcatgtttccgattatcgtgctgaccgaaatgatttaattgacaaaccaatggaattcaattcgatggcatttttggaagcaaaaaatgatccaatgttggtgttcgacgaattgatgttcaaatggttggcattctcagaagcagataatgtggcaaaaacaaccgccaccacaacctcctcacccaatggcacaattagaactgtggattttgtgattgattttgtgatgaatgtggccaatgtggacacatttttgtggccaaaattgttgtacggtattgacgagctgcgcaatcagtacaatagcagtagcagtgatcggccattaagctttgcgtatgatcaaaacactcgcaaagtttggctttccaaaggcataatgtcatgct

SEQ ID NO: 86853 - DNA, 654 bp, Heterodera glycines
ggatggaaagggaccgtgaaagagctgaagatttcgccggatgccttcatgcaatggctcttagctacttacttaggaaccaggttctttttcgctgacttacgaggcgtctatcacgcgtttattccgtgagggtcgcacggaaacgattcgctcgtgtactaacgaatcgtgtgattttgtcagggcgatgttggacccccagcagaagaatgaggaacgtttgcgcttacttcgactcgcggcagaacgccatcagaatttgacacgggatgcgatgtgtgggaagggcgtggacaggcatcttttcgccttgtacgttgtcatgcgccatttggaagagagttcaccgttcttcgacaagattttcccgcctcaatatttgctgtcaacttcacaaaccccactcaaccaattcgattccgagcaggaaggcatttccatggcacagaaattgaagctggtgagtgctggcggcggttttggcccggtcactgacgcgggttacggagtttcgtacatcgttgcgggcgaagaccaaatttctttccacatttcgtcaaagaaaagcgctactaacacgagttcaattcgttttcgggaggatttgaagaagactttgctcgaaatgaagcaattgctaacagttgaaca

SEQ ID NO: 86854 - DNA, 636 bp, Heterodera glycines
gagtgatgccgattttgtgcccttttgtgtgctccaagtttgatgggcggtggtgggagtttcagtgccggtgggcccggaaaagggatgtacacgcgactatacgtggatgtccttaaccagcaccattggatatacaatgctaccgctttcaatcattcctacatggactccggtcttttttgcattcgcgccagcgccgacccgactaagcttaacgatttggtggacattattctcgcggagttcggccgtcttactaagggcgtgtggctggatgaattggagagggccaaagttcagctgaagtcgcaactgttgatgaacctcgaaatgcgccctgtccaattcgaagatttggcaagacaaatgttggcccatggacagaggaaaacagctgacgaatactcggatttaatcgaccgagttgagaacaccgacatcattcgcatcgcccacaaaatgttggacagccgactttcgattgttgggtatggagacttgagaaacatgccgacgtacaaaagcatcgagtcaaggctttgaacactcagattttgttttgttatattcaacaaatttttgcatggaatatacacttatttgtttaataaattgatgatggtgaaaaaaaaa

SEQ ID NO: 86855 - DNA, 753 bp, Heterodera glycines
  unsure (1)..(753): unsure at all n locations
ccagtttgagagaatgaaagcgtcgcgcggtctgatcgttcgtgattggaaacccgacgtggtttatttggtccaattcccacgcacccataatgtgctcagtccatccccatttgcactcaaattggagacatggcttcgcatcaatgggcttaaataccgcaatgtgaacaacgaattcacaaaggcgtcggccaaaggtcaaattccgttcattgagctgaacgggcgccaatttgccgactccaatctgatcattgatcatttgcgcaaccatttcaaagtttccatcgattcgcgcctcagcacgcacgaacgcgcgttgggtcgcgcattcactattctgatcgaagaatcgctttttcggtgccttcagtacgaccatagcattgactttgggtggttggccaccgaaaatggttgggccgttcacatgagcggattccaaaagtttctgtttcagaagatcaaactcaaaaagttccaaggattttacaaaagcgttttgatggcacaaggctatggacgccattccgagacggaggtggaagaaatcgcgaaaaaggacctgatagcactatcaacgctgctcggtgacaaaaactttttgtttggagaatttccgacaacactcgatgcaactntatttggccatttggtgcagttcacggacactccgctccattcaaaggcgatcaagccaatgcttgagaaaaatgtgccgaatttgttggcatttgtaaagcgcatgaa

SEQ ID NO: 86856 - DNA, 581 bp, Heterodera glycines
aatccgttgttaatgcgtgacgattattttggtcctgcaacaaaaggttcgaatggctctcgagaatttggaagatgaccctgaaatcggtggaactgattatccactcgaaggaatgacgaaagaaacccagaaacaactcatcgccgatcatttccttttcaaggaaggcgaccgttttttggaggccgcaaattcaaaccacttttggcctgcaggacgtggcattttccacaatgctaaaaagacctttttggtgtgggttaatgaagaggaccatttgcgcattatctccatgcagaaagggggcgatgttggcaacgttttgaaacgattgatccgcggtgtgaaaggtatcgagaagcaagttccatttgcgcgtgatgatcgactcggctatctgacgttttgcccctccaatctgggcacgaccatccgtgctagtgtacacatccgtttgcctaaaataagcgcaaagcctgaattcaaaaagatctgcgaggacctcaagttgcaagttcgcggcattcacggagaacactcggaaagtgaaggcggggtttacgacgtgtcgaacaagg

SEQ ID NO: 86857 - DNA, 669 bp, Heterodera glycines
actctctattacgactaacttcaatcgtttctcaacaaaatatgaatgtaaataaagaagaggaacgactggaaaagaaagtgaccaaatgggctattatgctaaccagtgaagacaagattgaacatgccttgaggcgattggatcatgttgagattaacttacaacttttgtcttcgactggagttggtaaagcggtgaatgctctgagaaaacatcatcggtggggcgaaagggcggccggattggtgtccaggtggaaggaagtggcaaaggcggagacggcacgcgcggcggaagaggcgcaacgacagaatgaaaatggggacggagacacaacggaagaggaagacgagcgggaggaagaggagagagcgaagagtcaaagcgaagaagggacagacgacgacaacgaggaatcgcgaccgaacccacttgtgttgagaatcaaaaaggaaccgcaggaagaagcatctccaacgaaacacgcagcaacacccaacaattcatcggcaacaaaattactctcacaatcagcaagacaaaacgaagaaacggaagcgaaaaagagacaccactttgacgatgactgcgaaactttcgaggatgagcagccaatcgacgccttcgcctcccaacttgccgctgctgacaaagtacaaaaaagtt

SEQ ID NO: 86858 - DNA, 664 bp, Heterodera glycines
  unsure (1)..(664): unsure at all n locations
gtgaaaaagatgtcgagaaatctctgccggnccaagttgagcaaattcttcgcgtggacatgaccgctcaacagaaacaatattataaattggtgctgaccaggaactacgaggagctcagcaaaggcgtgaaaggcagcattaatgggttcatcaacataatgatggagctgaagaagagttgcaaccattgttgcttggtgcgtcaatatgacgaaattgaggaagaaccgcaggcgaggctgcagcaactgttgaagtcctccgggaaactcattttgcttgacaaattgctttgtcgacttcgcgagacggggcatcgggtgctcattttctcgcagatggtcatgatgttggacattttggaggagtacatgcggttacgccgatttcctactcaaagattagacgggtctatgcgttccgatttacgcaaacaagcacttgaccattttaatgctcctggctcacccgacttttgttttctcctttcaacacgcgccggtggattgggcattaatttggctactgcggacactgttataatatacgattcggactggaacccgcaaaatgacctgcaggcaatgagcagagctcacagaattgggcagaaaaaacaggtcaacatttatcgactggtcaccaaagggtctgtggaaga

SEQ ID NO: 86859 - DNA, 706 bp, Heterodera glycines
  unsure (1)..(706): unsure at all n locations
ccttctacgaggatgatgttgatgaggagttcgaattactggaatatttggccaagggcatttatggcgtatacgcggacatcaaagacttcgacatgtcggattcggagaaagtgacaacgcgaaatgcgcagccaaaagtgttagacaccagagatgatggcaaatttacggcaaaatttatcgcgcccagaagcagggagcccgactcggtgttcctccacatatttgggagcaaaaaagatcctcatttgtatttggacgtgtccgaagtgcaatggggcaatgtgtacatttttgacttgaacaaaacggaagtgatcgctgttcggccgcgcagagttgcggatgaattgaggaagttggaagaacgggaccgaccaccggtgaagagggagcaaccaaaaccgcaaccgcagccacaaccacaacctcaacctgtgacttttcaaaaaattctgtccggtttggtttggccaaccactgaaaagtacaccctgctggtgtcatcgcgtgattttgatttggatggacgaggatcaccgatcaaacaacgtgccaccaatcccgacccgaccagagccgagacaaactacaagggcacattcgacgtcaaaatggcactgacggaaaggccggaaactttttacgtgtgggtttcaagtgccanagggggccaaaaacggtttgtcatcccggcttatga

SEQ ID NO: 86860 - DNA, 607 bp, Heterodera glycines
  unsure (1)..(607): unsure at all n locations
tctctctactaactgttgcacatcccaattttactttcttccttagtaagtagggcttggtgcacaatgcgcacttttctgttcatagccgtagtcgggttgatgttggccgtcatcttggagaatgtaaatgcgacagggaaaaattcgccgacaaaggaacttatacatgagcaaggtaacctacagaaccatgctaccggacaatcgccgccagacagtccaaaccataaaaatgaccatgaaaacgagattagtaacctacagaaccgtgctaccggacaatcgccgccagacagtacaaaacgggaaacagaacataaaattgagaaaggaaaaccgtcgccagacagtccaaagtatgatgagcaagccttaaaatggtgaagaaactgtgtggaacgatgatgccaaccatgaacaaacccaaagctgttgtagtagatgtagaaaaaaactgtggtatcatcacgctattattgttgtgtaaaaaacgatccgtttttacctcttttcgggaaaaaaaactggaaaaaattcacaaaaaaaaaaatctcacattgtgcagattttattgaaattagccaattaaaaaaaacagtgncga

SEQ ID NO: 86861 - DNA, 714 bp, Heterodera glycines
acagtcgcaggacggcgccgcaacgacagcagcaacctgcaccagccgagtgtcaccaacacggacagccgaatgatgttcacgataaaggacattgtgcaccaatcgttcagcgactttggcttcctggtgcctggccgtgtcgcccgttacatcggcgttcagggcgacttggacccgctgttgaccggcacagccgtgctcgagatggttctgcagttcttggagtcgcaatttctgcaccagcaacaacagaatgaggacgaggaggacacggaagatgaagaaggagaagaagacgagttggaagaagaagaggaaggagagaaggagtcaaaagagagaggaggaggagggcaacgggatgtgcggactgagcaaggggagcaggacgaagtggcgagaagcaatgcctccgcgttggaccgtttgcgtcgtttggtggcggagaaatacgcggcttttgtggtggaagggacggacattccgcaggtcaaattggacgaggtggccccccttgtggaagcggaacaacagcaggcggtgtccgcggaggaggagcgcaacgtggccaatgacagcggcgtggacacaccgccgacgactgagacaacgacggaggaggcggccgagaataataatcagcccagcagttaaagaatgaagtgccaaaagtgtgatattgaattcaaataaatgccatgccccaagtgt

SEQ ID NO: 86862 - DNA, 615 bp, Heterodera glycines
catgatctatcgcgaggtgaccgccagttcatttgtcaaaatatccgtcgacggacgcattgttgaccctggatcaactccgctcgggatcaaccggccggatatatccttcacacggccattcacgaggcccgtcccgatgtcaaatgtgtgcttcacctccacagcgcgtcgggtgccgccgtttcgtcaatgaaatgcggtcttttgccactgaatcaggaatcgatggtcatcggacctgtggcgtaccacgaatattgtggaatgctttctgccgaagatgaaaaaacggagattgtcaaacatttgggggacaaaaaagtcattttcttgcgtaaccacggctttgccgcctgcggcgcctccgtggaagaggcgctccacttggcctatcacacgctgatcgcctgtgagactcaagtgtccgcgatggcggcgggcgaaaaaaatttgatatacccaaatgaaattgcgaagaagcgcgcttatgacatcgcacagcacggagccaacggaatgaatcgtacggcatcgggccaaaacggtacaatggcacacacttatgagaaaatgggagacatcgaatggggagtgggcgaattggagtgggag

SEQ ID NO: 86863 - DNA, 595 bp, Heterodera glycines
  unsure (1)..(595): unsure at all n locations
caattcctctgttaaagcccttttttaatcggantgaatccaacggttttttctttgttttagcggtgctctttcttgtcaaagtcgactttttacagtgcaaatacaatgaaccaatggcacgacaggtgctgcaaaagcatgcttcacaatttcagcagcattgtaaaaatgcccgcagaggaagtgccgtggccaaatgttgcagtgccatcagaagcataatgggccgattcacaagccaaaaaaaggcaatgaaccaaatgctggccaagtgtaaagcgggcacaacgccaagcgaagcacagcaaatgcgaagaaaattggaaggatcgaataaactgaaggattgtggccagtttaaaagccaaattcagcacaagttcagcgagttgaagcagtactgcaacaatggggcagaaaatgaggaggaaaacgacgaatgatcagagagggagagagaagaggagagagtagagagagagaggaacagcaaaattctaatcactagtgatcactgataattgccgattgattgaccggtacgactcatttggctgattgaagttttttttatggcataaagagttgcgtt

SEQ ID NO: 86864 - DNA, 664 bp, Heterodera glycines
  unsure (1)..(664): unsure at all n locations
catcgtcgatgcgtacggcatagtccactaccgggagattaatccagccccctacacaatggtcacctttccctttctgttcgctctgatgttcggtgatttgggccatggattaattatgtttttgttcgccctgtacctggtgatgaaggagaagcgtttggaggcacagcgaataaaagacgaaatttttcaaatgttttttggcggtcgctacgtcatctttcttatgggattgttctccatttacaccggtctcatctacaatgacgcgttcagcaagtcgttcaatctgttcggcagttcctggctcaatccgtaccccgtcgacatacttgagaaggcggacccggagcaaattcttacattggacccatgggaaagttatgcttcgtcaccctacccagtcggtgttgacccggtgtggaatttggccgagacgaacaagctgaacttcttgaactccatgaaaatgaaggcatcagtgatcatcggcatctctcaaatgacttttggtgttgcgctcagttactacaatcataagtattttggctcggatttggacatcaaatntacgttcatccctcaaatggtcttcctttcctgcatctntatctatttgtgcttgcaaatcattgccaaatggattttctacgatgcattg

SEQ ID NO: 86865 - DNA, 659 bp, Heterodera glycines
ggacatggaagtgttgaaggaggaagtccggagacggacccggactattgggaaaagctattacggcaccatttcgaacaagaacaggaggtggagcggatgaatttgggcaagggcaagcgtgtgcgaaaacaagtgaactatgccacggaggcattgcaacaggactggcatgccgggactccgggacaggaccaagactattccgattcctattctggtgcctccgaccatgatggttctggcagcaacgaagacgagtttgactctgcgcgtgaggaacggcgccgtaagcgagagagagacagcgagaaactgccgccactgttggcacgagttaacggacagctggaagtgctcggtttcaacccgcggcaaagacgcgcctttttcaacgccgtaatgcgctggggaatgccaccccacgacgcgtaccaatgccaatggcttgtccgtgacttgaagggcaaatccgagcgggcttttaaggcgtacacttcgttgttcatgcgtcatctgtgcgaaccgggagcggattcacaagaatgcttcaacgacggagtccctcgcgaaggcatcaatcgagtgcaagtgttgacacgaattggcataatgtcattgatccggaagaaagtgcaggaatttgaagcaatcaacgg

SEQ ID NO: 86866 - DNA, 696 bp, Heterodera glycines
cagacgttgaacgtggcatttggatgtacgaacaatctattctctcctctgagctcatccttcctacccagacgttgaacgtggcatttggatgtaacgaacaaatctattctctccgtctgaactacatcattcctacaccagacgttgaacgtggcatttggatgtaacgaacaaatctattctctccatctgagctacattcttcctacaccagacgttgaacgttgcatttggatgtaacgaacaaatctattctctccacctgagctacatccttcctacaccagacgttgaacgttgcatttggatgtaacgaacaaatctattctctccatctgaactacatcattcctacaccagacgttgaacgtggcatttggatgtaacgaacaaatctattctctccacctgaactacatcattcctacaccagacgttgaacgtggcatttggatgtaaccaacaaatctattctctccatctgaactacatcattcctacaccagacgttgaacgtggcatttggatgtaacgaacaaatctattctctccacctgagtaaactgtttcgtagtgggcgcgtctgtttaccactgtcttttttttatggtcgtgtgaactgcaattgacctggaattatgattttctttattcgataaaacttaccatcaaaaaaaaaaaaaaaaaaaaaaa

SEQ ID NO: 86867 - DNA, 667 bp, Heterodera glycines
ggctctccttctctctttttgtgactctctatattccgtcctcctttccttttacttccaccaatgcccctcgtgcacaattgcatcgctggcactcgccattccctcttaattgttttgggcctcattatgataatggccaattgtggacaagcgatgcggcagcaggcggtggccgtacgtggccaactccgttgtgggaacagacccgcctcgggggtcaaagtgaagttgtgggacgaggacgacgggcccgaccccgacgacgtgcttgacgaggcgtttaccgactcttctggctccttccaaatgagagggtcgacacgcgaactgacaaacattgaccccgtgctgaagatttatcacgactgtgacgatgggataatgccaggacaacgcaaagtgaaactgcgcatccccagccaatacatcacaaacggagggttggccagacgaacttttgaagtcggagtacttaatttggagacagtctttgctggggaggaaagggacttcatttgaacatggaggggaagaagaactggcgaaatgaaagctgatttattatcacatacagtataatcagtcattccatttgatattctttgtataccacattcgtattcagcaaaagaatgtagaaacaataataaactatacaatttgc

SEQ ID NO: 86868 - DNA, 721 bp, Heterodera glycines
catgacgaacttgccctacccaaactcggcccttccctacccaaccgccgatccgccctcgcacataatgccacagccatcctcctacactccgatgccgcaaccgggaaattatcaggctccatatccaaattcatacccatcggaccccatttcttacccaactcctgccacaaatgtgacgccacaatccgatggagtgtatccctatggaaccgggactatccaaccaacccacattcatgccagtttgcttagtgcggtcgaggatcgaattcgacaacgacttcgagacaaaattggcactccgtttgctgagttgcaatccatcgatgtgaacctgcaagaattgcgtgtagggaaacaaaacttgcgcgatatgctcgacaacattgccagagaccaacgcgaattggagcgggttttagacatttatacggataaaaaggaagagctcgaaagtgcgttgaaagtggtcgattcaaatggcactacggacaacggagttgcattcaacgaggaacaggcgatcgatgcacaaacgcccgtccatcgacaaatactcaaatgccatgtgcaagacagtgccattgacgacaccatttaccacttgggccaggctttgcaccaaggggccgtcaatttgcagacctatctgaaatatgttcgccagctgtccaaacaacagttccaacatcgtctgttgatgtacaaatgccgg

SEQ ID NO: 86869 - DNA, 694 bp, Heterodera glycines
ttgcttttcttttgctcgttttggcaagggattcaaggctcactttcagttgtttggacgggtgcgaatgtgacactgatgacgaggccatccattgtcacaatcgtcccgatcggcactttgtccaattgcccccgtcgcgtctccgcggtttcactgtgctcgcgctcacccgcaataacatcgatgtgctgcccagcgaagaagtactggctcgagaaactgcccgacctgaaggccgttgacgtcgaaggaaatgaacatttcgactgtttcacgctcgaccattatcggacattgatggtgatgagcgattgcggaaagactcctgaacaattggaggccgaccgggccaaactgccgacggacacacagccaaatgaggattgcgacttcgaatgcgtggcgaaccgacgcagtcgcgagttgcgcgagtacgtcaaacacttgtgggagatggtcaaagagaaggtgagccgactggccaagaagcacggattggacaaagtggtggacgacgtgggcaatttcttcgacgacgtgggcgaacgcatctccaacatcaaactgaagaagaagaaatgagacggacggacggaaggaacaaaagagaaaaacaccaaaaaaaattggaaaggaaattgaaagattgccatttaaatcgacgagttcagaacttcctgtccattttgct

SEQ ID NO: 86870 - DNA, 694 bp, Heterodera glycines
ttgaaacggcgatgagaaagcacaggagacaattaacaggtgctccttccgctcatccgtcttccccttgcccttcctctttgcttcccccgcccgtctcgtctctctccgtcccattgcatcaccgatccagcatttctggcggcgggtcccgcccaattgccattcggaaagggccccaaggcttcggattttccatacgatccgtccgcgtttatttgagcgaaatgtccgagtattactccattgaacatattgtggccgctgtgcgcgagggttcgcccgcttgggaagccggtctccggacaaacgatttaatcacgcgcgtgcacacccaatcggtccacaacatgactcaccccgaaatgatgcgccgtctcctctcctgcggcaatgaactcactgtccatgtcgttccattgtccagcacctccataaaagagggcgaaccgcgtcgaaacattggcaaacccttgcgcaagaagccgcgacggccgccaaccgcacaacagaaaaacaaacaacagagtcgcaaaggttctgcacttctgcgacgactcagcggcaaacggacagtcggagacatcgttcccggcacttcgtctcagaagcaaatgttcattccccgttccgtgtcctcccaagaagggagggctcaacctttcaacagttcgacttcgaaattggagtaaat

SEQ ID NO: 86871 - DNA, 679 bp, Heterodera glycines
ccttgtcgcagtgcggattctttgccaaatgttgcaggacctcaacgtggaagccaacggactgagtgaggactttatgttcgacatgaccaaggcggagattccggcggagactttcaaaaagattgtctcttggatggaggaacacaagggtcagccggtgcctgaattcgaggaggatccgaacactttcgagcgcaaatggctcacccaaaacgattttcagcagaatttcttcaagtgtgaatttgcggaggccgccgcgtttctgaacgccgccaacttcctcgacttgcagtctctgttccgtcacgcaacgcaggcggtggccgcgcgtattaaggaccgttcgccggaagagattcgtgaaatgctccacctcaacgacaaggaggacaaaccgttgacggaggaggaaaagaaggcgattcgtgagaagaatgtctggtgccactactgattgtgatgcgattggccatgcgattccttccctttaccatttatgcctcaacaaacatttcaccgacggatgcccccccccccccgccaattgttttcttcagtccgttaattatttctcttgccccacaaattttgctttctgtttgccttattgtcctattgcgtgtccaattattgttaggattgtttttgaaaaaaatctataggttaaagcctt

SEQ ID NO: 86872 - DNA, 618 bp, Heterodera glycines
atcccattttcgctccgtgcgcccggcctttctttacaacaaaatgccaatcttacgtccaaacaaaagaaatggaccatcactggatgagttacacttggccgatgggattggggccgaatgttttgctgatggaactcatggggaacggaggcgcacttctcggcatcaaattccatccgtttcaatggaaaaatcgaatctccccagcaacaaaaacacgtggtgcactccgtccagattgatctgcaatttcgaggaaagcattctcaacggacgcatcccagcaaatagtgttgtcagcggtttccgtctccaacttacggtcatcggtaacggagtgtctacggacaatcgcctttcattcccggcaagcaaacgcctgacattgccagtgcttacttacttcttcaacgatttgatgtctcaacattcgggacggtttccagtggcggttccgccttcgccgttgcatttggctcgctgcgagttggcggcggagacggttcccattccgaaacggtgcacactgcaaatagtgctcttacgtccgtgcggttcggtcgttaagctgttcatggtcgcggtgaatgtgctcgacatgccttccaattcgag

SEQ ID NO: 86873 - DNA, 712 bp, Heterodera glycines
agtggactatgctaaatgtgtaaaattaaaaataagtttggtttttgtgttggcacatgtggggtttaaagcgtggggaaattccttaaaaatggtcaactttaattgatcagccaattcatctgctatcaccgcctcagcttccctctgtagcactttgtcttctgttgctcggttcatcaaccgtttttgccgttcggcggacagtgtcgtgccgccggtggcggaggacgaattggtcgtcgtgcccggcgtaaccaccggcgccgatttgttgtcccaaattttgttcgaccccggcgactttcttttggtgccctcgcccttttattatcgtttcgtcaatgactttggcgagcgtggctcggtgcacattggctgtgtgccggcactgtccgaggacggcacgcgcacagaactgcgagcggaacgctttgaagaagtgtaccaggaaataatgcagcaccaacagcagggaaaagtcagggccattatgctggtgaatccgcaaaatccggaggccggctacttttccctggacgaaattcggccggtcgtccactgggccctgagtcgcaatttgttcgtgcttttggacgaaatttacgatttgtccatttacgacgaggacagcgaatgtccgtttcgaagtgcggtcgaactgttcgaagacgaacgcagccgacagaagctgatttggctgtggggactg

SEQ ID NO: 86874 - DNA, 603 bp, Heterodera glycines
attcgatgtcggacgaaagaaacgctaaaattttgctttttgcaatctctgaaagaggcgtgccaactcaaacttggttctaacattgctgcgtcgatgactaaggatgagcatggtcgactatttgacggcttatgcaacgacagatttaacgacttttggatggtcaacgacaaactgatgggactccgttcatcatcaggcgaagaacagtttagcactattcccgcccgattttatgagtcatcatattcatttcgtcaattgcttttacattccaaaaaacaacttgacgatggcaatatgggtgaagtgttgttgattgacgcgctgcacaaagtgtttcccgattatgccattgaaacagactttgaagcggtgacccatggcattctgttgcccctcaacactccgctcatttggctggctagaaaccttgtgtaccctgacaattttgttcacattgtaatacgcagaaaaactgctccatttgataagaattcaaagaatttgtgaaaaaaaaaaaaaaaaaaaaaaaaaaaaaaaaaaaaaaaaaaaaaaaaaaaaaaaaaaaaaaaaaaaaaaaaaaaaaaaaaaaaaaaa

SEQ ID NO: 86875 - DNA, 623 bp, Heterodera glycines
  unsure (1)..(623): unsure at all n locations
actaaatccgaagaaatccctccaaaatgtcttcttccccgtccgtctctgtgctcgccgtcgtcgcaattgtctgtttgatgtgccaatgttgcttttcggcaccgcatccgtgctgtcccggcagtcaaaaagtggtttcacttatgtccaattacgttggcacttttgccaattccatttccaagtcatcgctttgttcggatgcccaaaatgttgcggacgcgttgaaaggccaactgatcggctgctccgcttcttcccatgccagcaacaacagcgaatggcagacattgagtgggcagtttggtcagaaagtcactgagattgactcgaaatgtgcagagtttggcattagcattggcaaagtgcccataaacggtcccaagggtgtccatgttcaaaatgtgcccaactcggaaagtgtgatttctatgcctggattggccggctcacacacccaatgaatgctgaaccgaaataacattgcttgaaattagatgatgaattgagaagattattattatttttgatatttatttgtagttggacatgaagttagtgaacactctttttataaataaattaaagcaatttaaaaaaaaaaaaanaaaaaaaaaaaa

SEQ ID NO: 86876 - DNA, 518 bp, Heterodera glycines
  unsure (1)..(518): unsure at all n locations
ccatggaattggcgattatttgtgcccaattttgcccaaaacgggagcccgacagcaattccatcattgacccgtacatttgtgtcaaatttttggcgtcccacgcgatgaacgcaaagcacacacgcgcacattacggaacaacggtttcaacccggtctggaatgagtgcttttccttcccactttgttgtcccgagttggcaattctccgcgtgtgcgtcaaggactttgaccggacaagttcggacgactttgtcggcgaattttctgtgccagtcaacagcattcgaccaggttactcgcatgttcgcctcaacacacatcgccaacatacgcctgatgaagcggcttcaattcttattcgaacagccttttcatgatcaaacacatccatttttgcactcaatgtttccagtgataatttgcttcctaaattttttttttcgcngaanaaaaaaaaaaaaaaaaaaaaaaaaaaaaaaaaaaaaaaaaaaaaaaaaaaaaaaaaaaaaaaaa

SEQ ID NO: 86877 - DNA, 584 bp, Heterodera glycines
cctttccgaaatgcgtgggaacaattcgggcgctgttcgtgttcttgaggttgatgagtctaatttgcttcgctggagccttatgctttatccggaccgtgaaccatacaacaaaggtgcttttcgtgtgaatgttgattttccaactgagtacccattcaaaccgccatccgtgacattcgcaaccaaaatttaccatcctaacatcgacgataagggccaagtctgtctcggcatcattctcgcggagaattggaagccggcaacgcgtgcagagcaagtgatgaacgcgctgctgtcgctgattgccgagccggaaattgctcatccgttgcgctccgatcttgccgaggaattccaacgggacaagaagaagttcttcaaaaatgcagaagactacacgaaaaagtatgccgaacgtcgcgactgagtttgtttggacagatggagttatttgtgcatgaaagtcccgctggtatctacgaataatctctcgccactcaaattgttcaatttataaattattgtgttttgtctgtcgttgattattttaacttcgtatcgatttaaacttgaagaaaatt

SEQ ID NO: 86878 - DNA, 721 bp, Heterodera glycines
  unsure (1)..(721): unsure at all n locations
ggagagtcgcggggtacaaataacaggaagaacatcgaaagcactttgaaatatttggaccatcgggagaaggcggggtaccaactaaaatgtgtccagttttacccggacaatgggtctaacccctttgaactgtgcgtgtacatctcggaagcgggcgacaacatttatcactcagttcccacgagcatcgacgaaattgtcaaacaaattattcgaagcagaggaccaagcggaagcaatttggagtacgctttgcgattggccgactgtcagcggagaatggccccgaaagtgtgggatgaacacctctttgaaattgagcaaagactgttgaaagaatgtgagtatttgcgccatgaagacgaaattctggagaaattgaaccacaatttaagctatttggtcagagagcgaaataattctgaagcgtagagatttcgtcccagtgaagaattcttgagaaattaacactgattcggatagttcttgttaggcgcttcttactggtccaattcactggtcttaaaaactccaaaaaacttaagcacaatttaataacataaaaattttgggaaaactcacattaaatgaagcccgactatccctcctcttctgaatgttcaactctcttaatttcgttgaccagttacttgaccatataattgtgaggatttattggngtntgttcatatgtacgccttacgttgtcactcactca

SEQ ID NO: 86879 - DNA, 256 bp, Heterodera glycines
  unsure (1)..(256): unsure at all n locations
acagatgggcgttcggcgagtcggacggtgactttctgcgcattgaggaggcactgtacctggctgaacttggcgccgccgttgtgctgaaccacaccgtgcaccgctcaccattccacatattttctcactgatgtngctcaatgaatgtgtcactgtttaagtatgcagtgtatgctcagcttgtccgtgccggttatgttgttcggcggccgtctgacgcatccgtcactgatgacgcgtcctcctccgcgtc

SEQ ID NO: 86880 - DNA, 683 bp, Heterodera glycines
tcacgcgcaaatgacagcggaattgctgcgcaaagcgatgaaaggctttggctgtgacaaaagcaaagtgatccaagcgttggtcaactgcaacaatgcacaacgccaagaggtcatccgcacgttcaagcaaatgtatggcaaggaactgatcccggagttgaaaagcgaactaacaggcgacttcgaacacttaattattgcacttatggaactgccggcagtgtacgacgccgcacaattgcgccgttcgatggagggacttggcaccaaagagcatattctgatcgagattatgacgacgcgaccaaatgcgcaaatttatgccgtcaaaatggcttatcgccaaatgtacaactcggatttggagcgtgacatcatcggcgaaacttccggctatttccagcgtctgctcatttcgctgtgttccggcgcgcgtgatgagcaaatgcacaccgacccaattaaggccaatcaggatgcccagcgattgtggcgcgccggtgaggcacgcctcggcaccgacgaaatcgccttcaactctattttggcggtgcagaactttgcgcagcttcgcatggtctttgacgaataccaacgacagcatggccattccattgaacaggcaattagcaacgagtttagcggtgacattcgtgatgccaatttggctttggtgaaga

SEQ ID NO: 86881 - DNA, 121 bp, Heterodera glycines
tggtctgcttgcacacgaactgagtgataccctgcttccggaaaagccctaagcttcagctatagacgaccgtaccgcaaaccgacactggtgcgcgagatgagtattctaaggcgcttga

SEQ ID NO: 86882 - DNA, 723 bp, Heterodera glycines
gtggtgtgcctctccaatcgccaacaacacaccgtttgttctgcaaagctaggccgttgcctgatggactgccggaagccattgaacgcggcgatgtcaacccgacggacgacccgaaaaatcgtgctaaaatactcaccgagaaattcgaaatggacgcgaccgactcgcgcaaaatttggtgcttcggaccagagggcactggtgccaatttgctgattgacgtgacaaagggtgttcagtacttgaacgaaattaaggattcggtggtggccggtttccaatgggcaaccaaggagggtgtgctctgcgatgagaacatgcgcggcgtccgttttgacatccacgacgtcacgctgcacgccgatgccattcaccgtggcggtggccaaatcattccgacggcgcgtcgtgttttctacgcttcggtgttgacggcaaaacctcgtctgcttgagcctgtctatctcgtggagattcaatgtcccgaagcggctgttggtggcatttacggagtgctgaaccgtcgccgtggtgtcgtctttgaggagagtcaaattgctggcacaccgatgtttatcgtcaaggcacatttgcccgtcaacgaatcattcggattcactgctgatttgcgctccaacactggtggtcaagcgtttccgcaatgtgtgttcgaccattggcaagttcttcccggcgatccgtttgatggcacttctcgtc

SEQ ID NO: 86883 - DNA, 558 bp, Heterodera glycines
  unsure (1)..(558): unsure at all n locations
ggagaaaagtgcgaagcgggcgacgcgcggacaacgccaaatttatgaagaaaacagcagactttgttatgctatgtgctggccagcatttgctcttccgttttggtgttctctctcaatactttctttttctgccgcaaaagggcgcgtggattggactcgcgttaagctctgccagtcaagcattttctgtgattcttatgtctatgatgatgaaaaccgtgcggaatgagcgtaatcagctggtcgatgctgggttggacctcaacgatccgaatgcgtttggagagtactgcaaagacatcgtcattctgagtgtgtctgcacagcttctgagtctgatttggaccggcttcttcttcgtcctgctgtccattccctttttcacactttacaaactttggacgaacattctcggcccttggttcttcagaccgactcttgacgacgatgagaaagaggacaagaagaagcagaaaaaacccaaatttgtacatgtgagacgatgaccaattgctgttgttgtttttgtttcataaactcccttataaacganna

SEQ ID NO: 86884 - DNA, 587 bp, Heterodera glycines
aaatcaaaaaaccggaactgattttgtagctggaaatgcccggggatggcgtccagaatttgctggaagaagcgtcgtcagaagcacacaaagccaacctaaacagtggaataattcatcaatgtcctttaatgtggagaaaagaggacgagtaagcaaaagcaaatccatgtcgacaactttggaaaacgaatcaaacgatgaagaaggaacaatgaaacccgcaaagagagaccaaaaccatcgaaactcaacgaatgacttgcgaacaacttcgactaattcggtttccaacggagaatatgccgattgtgatgagatggaattggacgagccgttctctgaatctgaaggggaagactttccacaagcgaagggcgttgagaagccgtgtttggtcatcccccgtggacgcatccgctcgctttccggtacaattccccccgtgggctttgcgccccattggggcgggccgacgatgtgtttgagttgcttccaatttttccaattgcctgagatgatttgcgagttttccactcatctcctcactgagcatcaaatctttatcgatgggatggatatattcg

SEQ ID NO: 86885 - DNA, 699 bp, Heterodera glycines
  unsure (1)..(699): unsure at all n locations
ggtttgggaacacactgatgtgaaatggtcttcccgttgggactatattctcgactcaatgcctcatacaaacattcaatggttttccattatgaactcactcgtcattgtcattttcctttccgggatggttggaatgattctcctcaggactctccatcgtgatattgctcgctacaaccgtcttgacgaagaggaggatgcgcaagaagaatttggatggaagcttgttcatggcgatgtgttccgcccgcctcgccatgcgttgcttctttcagtgttcgttggtacgggcagtcaagtgttgctttgtgcttttatcactcttgcatttgcttgtctgggatttctttcgccagctaaccgtggctctttgatgacctttgcactcgtttttttatgttttgttcggagttattgctggatacgtttcctcaaggatttataaaacgatggagggcctcgcatggaaatcaaacatccttctcacgagttttcttattccgggaattatctttggagtatttttcgtctcgaatttgatgttatggtctaaaggctcatctgcagccgttccttttggcactctgtgcgctctgctttttctctggctgttcatttccatccctntaacttttgtcggcgcttactttggattcagagccaaacgaattcaagcgccagtcagaacgaaccaaa

SEQ ID NO: 86886 - DNA, 638 bp, Heterodera glycines
tacctattacctaaatgtcgcacgggaaaattcgaatttgcctgaaaagaaccttaaattaacaacttttttaacaacgacagaacaaagccaaaacaaaatagcaaaaggagacagtgaagtgtttggagaaggaatggacaatgaacagcagaagaaaacgcatagagaaagaagcaaaagccagtaaagtgccgaatgtttggttatgtgccctttgcatcattcagcaacgattggtccgcccaattctctcctccgtttgcttcgcccacccaaccgaaaagtcgtccctcgtcctccaattctcccccctcggcagcagaagaagatgaaaatccgctgccagccgcgttcagaattggcaatgagtcggagagcagtgacgagagcggcgcggaaaggtcggaacacgaggaggaagtgatcagacgaagcaaacagatcaggaatcgagaaagatgggaactgctcaagtacaaaatgttgatctcttcgtgctgcactccgtcaaaaaaccccagtaaaaatgacaacgaattgcctgctaattgtaagcacgaaacggcggaggatgaggagcagtgggacgaggaaagggagcgcgagttcgtgttcagtttgttgtaacggaagag

SEQ ID NO: 86887 - DNA, 668 bp, Heterodera glycines
tggagcactgtgccgacgcgtatgttggcctggcgcggcatcgagcacatccaatcgttgcgcgacaaccccaatttgtccgcccaactcggcgttccgttgggctgtgcccgttcctccggcctcccttcactcagtgccaaattcgccgctgccgtacgccatgacaccggcggcatgtcaccctcatcatcggccatgcctaccgcgcaacagatgcgtgccgaacagtcggccaaattggcgatggcacacgtgcgacggggtgccgaactgacgcgtgacaacaaatgcttcgaggctatccagtgcttcaacaaggcgctcaatgtgtatgagcactgtgccgacgcgtatgttggccgtggcgcggcatgtgccggctgtcgcaattttcccgccgcgcttgccgacttggagcgtgccgtccaactgcagccgaaccaccggaatgccaacaagtacaggctggaggtgttgcacacttatgccaaggagcttgaacgtgatgggaaattggcggacgctcgggccaagtttggccaactgttggcactgtgccccgaccaccagggcgcgctggacgccattgcacagttggacaaaaatgatgacaacatcggcgacacggacattgaactcgtcgagctgagcgacgacgaacacac

SEQ ID NO: 86888 - DNA, 505 bp, Heterodera glycines
  unsure (1)..(505): unsure at all n locations
ggtcttacccctttgtcgtctattttactctgatacccgacccaattttgctgaatttaattgtgttcacttattactccgtcctttctctagcaacgctttgattgaattgactttaatgagacgtcatcaaattttgaagaaaaatgcattgaaaattttggcaaaatttcttccaaatcgctgcttctccaataatcgcatcactgacagtggcaaaagtcagaaaatggtccaaagaattgacgggcaaaagcggtgggaaaagcgacagcaaaaaagagacaataaaagcaatgaaatgacggaaatgcactttaaaaagttgaaggaacagtggcaaaagtgaaaaggaaatttgtgaaaaatggaaatgataaaagaaaaggaaaggtgaaaatgaagtggacaaaatctaattgatcattctgataatcgtttgaccattttattattgacttttggcgaataaaactaaaactcanaaaaaaaaaaaaaaaaaaaa

SEQ ID NO: 86889 - DNA, 705 bp, Heterodera glycines
tgggccgaatttgccctcatcgctttttcctgttgacgaacattctctggttggccccgatggcgagtcgcctctgttcacccaccgaatcggcaaatcggcgccggagggccaaccgggcgaaaatggcgcggcagtgacactgacgggggaggaggcggctgaagggcggcgccaaatgagctactggttcatgaacgtcaaggcaagcgacaaaatgtcgctggaccgcgcagtgccggacgtgcggccgaacgcctgtcgctcgctttcctacgatttggccaatctcccttccgcctcggtggtcattgtgttcactgatgagcccacttccgtccttttgcgcaccgtccattcggttttcaatcgttcgccaatgtctctgctgtgcgaagttgtcctcgtggacgacttcagtcagagagaggagctcaaagctccgcttgtcgcccatttgcgtcgcttcggttcgcgcgttcggctccttcgagcgaacgaacgtttgggattgataagggcgaagatagtgggagcgaaatacgcccgcggtgatgtcgtcctatttttggactcgcattgtgaaacatcgccgggatggctcgagcctctcctccatcggatcaaagacaaaacggtcggctgtcgtttgccccgtcatcgacatgacttctgactcttcgatgcaatactcgggcggatcag

SEQ ID NO: 86890 - DNA, 696 bp, Heterodera glycines
ggtaaaagttggctaaacgcttcctccggcgctctcggttttcttgattggatggtaagttgagcaaatgagtaacgaaggctttgaatgaatccgggccgagaaggatgagggaaaaaagtgcgcttgaagcatcactcagcaaatccaactcgaagctgtactccatggccaattgaaacattttcggaaccaaggccagaagacgttcagtcattgtcgcatatttccccgttttcttcacggagtcttcgacacaatttgctgccaatccgttgacaatttcgagcgcagaacggactctgtccccgccgaaagagtagtcgagagcggctttcacacaacgcaaaatatcgtcgagcatttggggcggactttgggcaattccctcggcggcgatgtccgaaacaaaaatgagcagccgaaagaaagaggcgcacaaatgcggcacattcagcaactcctcggtcatcaacggcaacaacagctccaacccatgcatcgaaattttctccctccccgccaaacattcggactccgtaacagaaagaggcggcacataggttttcgagtggaagagacaaaggatttcgatcagcgagctcaaatcctgtgtctgctgctcctcttcactgctgtcaccgcgcagcacaaaaacaccggaacgaaagcgatggaattgcgtttgcttgtagg

SEQ ID NO: 86891 - DNA, 714 bp, Heterodera glycines
aacacttcaaaagcgacctcatcgccgtttctcatcgttcgttcgtccgtccgtccttcacatcaattcgctcgccgttttcgcaatggcacttcgacgcatcaaacaggaactggcggagctgaagcaggaaccgatcacgggttgcaccgcggcaccgatggatgacggcaaagacatgttccactggaaggccaccatcaaaggaccgcccgagtcgccgtacgagggaggcaccttcaacatggacatcgttttccgtcgcgactacccattcactccgccaattgtcaaattcgaaacgcccgtttaccatccgaacgtcaacaagcagggtggcatttgtctggacgtcctgaagacgacgcattgggcgccgtcgttgaccatttcgaaagtgctgctctccatctcttcgcttctctgcgacccgaatccggatagtgcgctggagatggacatcgcgattatctaccgcaacgaccgcgagcagtacaaccgaaatgcccgtgaatggacgcagaagcacgcgatgaaatgagacgacaaacgaccgatggatgggagaggatgcagaagacaaccgccgaagagggaggaggagggaggatacattcaactgaccctattcccacatatgatcccaactgtaaagattgtattattgtatctcactgtatgtacagtattatgtcgcctggttactgtttaagc

SEQ ID NO: 86892 - DNA, 566 bp, Heterodera glycines
  unsure (1)..(566): unsure at all n locations
ccccattcgtcccttctctctgccgatgctttcgccttcgtttgcgctgtttctccgtccgctttttcttctccttgcgatgattttcctctccgtcgccttcgaattcgatctccgcgacgatggccaatccgtccgctttggtccttcctcttccggtggcaccagcggcgcatccgttgcctcccaactgttcgtgaactcggaggacaacgcgggtttcattggcggaattccgggcggatccgcgcggcgcagactcatccaaccgccgccgctgaaaagggatggaacggcgctgccgtggggggcggaagaggcgtgggcacggatcagcagaagcggggggagaaggttctgattgaagagcggagagagtaaggaagagtgatcggacgaaaagggactgatcagaagaggaaaagccaccaaagaaaggaatcatctgatcggtggcacccaatgatctttggtccaatgggcaattcgacgtgataattctcatttcggaaaatcaaatataaaattaaattgagtgaattctaaanaaaaaaaaaaaaaaaaaa

SEQ ID NO: 86893 - DNA, 740 bp, Heterodera glycines
caaagggcccgtggttgtggaaagtttgaaaaagttggacgtcgatttgagggagttggcgctggagaatgcaaatataatcgagattggccccaaagcctttgcggggatgcgcatcaaaaagctgattttggacaataacaaaatcaaaaccatccaaaagaacgcgttccgcgggttggactccgtgctgcaggaattgtccatcgcttccaacagactaacggaagtgccgaccgctgctctcgaagggttgcgtgcgcttaattcgctgaatttgcgatgtaatcgaatcggaaaccctagcaacgcggcctttttaaacacgccaagtctaattgaagtgcaattggagtgcaataagatttgtgccatttcggacggagcatttcgcgaagtgaaagagactctgcagaacgtcattttggacaacaactgtttggagcaggtgcccggaggagcactggaggaaatgaacgctttgatttcactgcacatgaagcacaatcagattgagcaattggacgatggccatctccgcaatctgagcagcctttcgttgctcactctcacgggcaacaaaatttctcaaatctctccgaattttgcccaaaatactccgaatttgcgttacatttatttgggcgacaacaaattggaacggatcgacccgagctcaattaagcaattttctgcagccgaaatcattgacctcagcttcaataatttggctgaaataa

SEQ ID NO: 86894 - DNA, 661 bp, Heterodera glycines
aacgcgtgttggcactcttcgcattgccttgcatgggtctcattcttttcctcagcgaatcgccccgttttttgatcagtgcacgtaaaatgaaagaggcgaaagaggccatcattcgaatgcataaattcgacgggcgtccgtatgacgaaaaggcgttggacgcactgcttgaaaaggagctacaacaaatgttggaactttccgtcactaaaaagaagtacaattatctgcacctcttctacaacaccaaattcaccatgtacactttgtcagtgtcattcagtcttttcgtggtcactctgatcacttatgcccttgtctacaacatcgagaagatgtcgggcaacattttcctgaatatgatttggatgggcatgttcaaatacacgatgaacttggccattgcctttgccgacctcaaattcaaatggttgggccgtaaattgtcccatttgctctccgaagtgctcgtcctcgctgcgcttggtctcttcgttacgctgcgtttgacaggtttcgatgccaactttacctttttgtccaacggctctttggtcgctgcggttggcttttgtggcattttgttcaactcggacaaattggccggcagcgaactgttccccaccggagtgcgcaatttgtcctgctcctttggcca

SEQ ID NO: 86895 - DNA, 696 bp, Heterodera glycines
tttatttacttccacctttgttcggcaacgaccaagcagtcgaaacaaccgacgcagaagtaagcgcaacggcaccagtcaaacgacacagtgacaacaccattcattccttcattatttatcgcaacaacagcagcgacgcatgggccaaatcaatgtatgcgacgacgtttggttggacacattggcatggatcaatcgtgtagaagtcggcatgaagttcgcgctggtcaatgttcggttaaacgctttggcggacaaacatttcaagcagaggaagtggtgcttcggcgagtttcatacctgtgagcggatgacggaagaatcgggcgcagaaatcatgacatcgatcgacggctccgacttcagcacgttgccactgcccaccactccgttgccggacagtgtcgtcggcttccgatcaatttccatttggtacatcaatgaagaggtcgtcaattttctgcgcacaattcgccgtctccttaccaaagacattgcgctggaattctccactttcttcacggaatatcgcagttggaaagtgatggcacaacacatttggccactgttgaaagatgggatcagcaccttgtgcctgaagaagtgtgacttggccatgctccgtaaacacgtgtcgcccaccgtgctgttcgactgtgccggcctgcaccgaatccacacgcaaatgctgcc

SEQ ID NO: 86896 - DNA, 538 bp, Heterodera glycines
  unsure (1)..(538): unsure at all n locations
agctttgagactttattattaacacatcctgatttttgtgaaaatgttgcccatttttcggagtggaaacaccgacggcttctctctcatttcagcgccattccttcttggcctcctctcagctgcgcttctgctggtggcacaaacagctgctctccaaacggacccctccgcgtcggacattgattacgaaatcgttttgccggttgcgtcgttgccgtcgctggactcgccccgggggacgacgttaaattggcaggacgaatgggtgcgacgcttttcgccacggcttgttgttgtgcaaaacggcggatggaagcacaggacattgccccgaaatgacgacgacgcccaccaacggattgtgctgcacaaaaagtggtccgccttggagccgtccattcgctttttatgatcgctttttttgatctgaaaatgggcacggatttcggtcgacgcatgaccaacctaaagcttgttttgctttattgcccctgctttacatattgttttacaaaanaaaaaaaaaaaaaaaaaa

SEQ ID NO: 86897 - DNA, 749 bp, Heterodera glycines
ttatttgaaaaatattttgcgcaaattttttttatttttgtccgaaatgaaactcctttttaccccaatgtttttttctgtcattcttaaacaattcttctcctgctgctggtccaacatgtaaatggaggaagagatcgagtgcaagagattcaagaggaagagggtggctacagtagtagtggcggcaacggtaccgaaacaccaacaaaaaataaagcagtgaaacaatggcagcaagcacggttcaaaattatgcaggaaaagattgccgaataccttggtggattagcgaaagcaacaagaaagagtaaatatgtgcacaagcttgtggatgacatccagtacacaacaccagaaccgtttgaaggcactgtgaccagaagaactgagaaaaccaaaaatggcactggcaaagaaaaaaatgccaaaacgaacggcactggcgcaaaaacaaaaatcaaacaaatggcaacggaatacggtcgcgcacaccgtacatccatggccaaatacaaagaaaaagccccgctctttggagcggatgatgaaacggtggaaacaatgatgctgtatgtgcagatgaagttggacaaaatggccaacaaatatgaaaaatatgtagaaagtgatgataaaaagaacaaaaaattggccgaaaacttccaaaaaaagcgggcggacttggccaaattggccaatgaaatgcctgctgagggatgcaagctcagtgttggatacaataaaga

SEQ ID NO: 86898 - DNA, 762 bp, Heterodera glycines
  unsure (1)..(762): unsure at all n locations
cctttaaggttgaattataattttgatgatataaaatgactaaaaagcgatcaagcatttcatcggccagcttttttgtcgaagacaccggcagcaattcgactgatgttggagtgaaagagaacagtgccaaaacaaatgacccaaataaatttgagaaggccggatggctttacaaatggacaaattatgtcaagggctatcggcagcgatggtttgtccttaatgctgaaggaattctgagctattatcggcacccatcggaagtcaatcgcgcttgtagaggcagcataaatttgagcgaagcgaacattcacagcaatcagggcgagtcgagccacagcttgatcatcactactccatcagcccaaacctttcatttaaaggcatcaaatgagattgatcgttcacaatggcttaaagcactcgaatatgctaaacacagggcaataatacaggccgtttcacttgaggaagatgaagaggaaagccaacttttgctcaacaaaacgaaaggactcaaagaatcatcgacaggaaaattggaaaatatgtcgaaggatcttcggacttccggcgttaaattctacaaagaattggatgagctgatgcattttatagttggccattgcaacgcaaaagaggcaaaaaattgtaatgagatagccaaccaactgagggcaattgctgacaattttataaagaattcaaatgaattggtgctgaattacaaaaatgactacnggacacttttgcgacttg

SEQ ID NO: 86899 - DNA, 614 bp, Heterodera glycines
gggcaatggggcgggacggacacatcgcaagagacatttcccccctccatgatgcctttgctcacttcgttttggtaaaaaaacgtttgacttcgatggcgcctataatcccccgagaacaagctcaatgtctgcaaaatgtcttcaaacatttcgcacactttgaaattaatagcgcaaccaaagattggactcaggaagaattgcgtctttacaaacgcttgtttctcggcctgcggctttgcactttgacttttcctcctcaattgttacgcaatttgcaaattcttttcaaatgcatccgccaattttgtttcaatgccaaattaatgcgagaaaattgttggtcagcaaatttaaggatctcaaatgaagagaattcactctcaatctgtgaaattaatgaccagcgcattgagagagttcttcgagaattattcgttttattttttccgcaaaaaaatttggaatgtccaaaatcattttcgctgtttaaacttttggtggaacatgttacgccgtgtcttatccaaacgccaaaatggttggccgatgaagtgcaaaaagaaatgaaagaatttgttaatagtgggcagactcataataaacaaagg

SEQ ID NO: 86900 - DNA, 530 bp, Heterodera glycines
  unsure (1)..(530): unsure at all n locations
accgcgagttcgctgtccacgctggtcatcctggagtagacgacgatgtaatcgaattcagccacggcatgaaaatttacgaaaattgtcccggctccgtggaaccgttgtgggtgcgcggcgctggccataacgacgtggaattgcacgccgcatacctggacaggttgagacagttcatcgactcggaggtgtgcaacccgcccacccacagagagcagttgaaaaatgcgaagcggccgcagacgaaccaacaggcgcagaattagccttttgtgcctccctttcctctgtatgttgtaatgaatgacctatcgatcggatttcgctgatcacttctcctgtgtccatgtccttcttttttcactcgcctcaccatttgagatcatttcctcccccacccccaattgatgtaaatccgtggccgtcactttcatgtcttactattagcatattttggaatccgaaccattgattgaagcgttaaagagctcttttcgtnnnaaaaaaaanaaaaaaaaaaaaaaaaa

SEQ ID NO: 86901 - DNA, 717 bp, Heterodera glycines
tatttttaatgaatttatacttttattatttacagttatttctcgcaagaaattaattgctttccattcataaaaatgattttgtttttgcctttacttgttttcatttattatgcacttcgctacctttgggaattaatcccgcttcaaaatgcttcgaaacgcgctgtttttgtcaccggatgtgactctggttttggttactttgttggcacttaaattggcacaatatggaatgctcacatatgctggatgccttactaaacagggacgcgatgaactgattgaggaagcaaaaaaaaacgtggagttgcggcaaaactcaaaacagtgccattggacatcacccaggaccaatctgtgaatgatgcagcggattttgttcgcaaagatttgaattctgttggaaacattgaattgtgggctcttgtgaacaatgccggcatattcagctgttttgggcctgatgcttggacatcgattgatgaatataaattgtccatggaagtgaattgctggggaacaatacgatgttgtcaggcatttttgccgttactcaagcgcagcagaggcagaattgtttctatctcaagtgtagcaggacgcgtttcagtgccgggcggggcgccatatgccgtggccaaatatgggggttgaagcatacatggatgcgatcaggcttgagctgaaatgttggggaatcggctgtagcatatt

SEQ ID NO: 86902 - DNA, 774 bp, Heterodera glycines
ccaacttcgctccgaagcgctccacaccaacacagcagcaacagaatggtgccactcataatcagccttcaaatggaagtgcggtgctgcaggatatggcaaatttgacacttggaaaggacaaggaatcgtcagtggacagcgaaagagcaagcaaacgatcgtccagcgtctacagcagcagtgagcaggacccttcgtgtgatggacaaggggacacttcgaccgaccattgtgccaacgttgcttcgaccatcgcagcggagcacgtctcccattcgacctcttcctcgccctcattaggctcttccgcctcggaccaaatttccaaatcatcgggcaccaatgaagtcgtcaatcgtgtgcagcaaagggggaccaccaactcttcgtccagtctgtacagcagtgaccaatgtgtgcaacggactgtgccgatctcggcccactcgtcaccttccgttgcttcttctctgctctcttcgtccaattctgtcaactcaaatagcaatttcaatgagcagcaacagccgtcgtcgcccgcttcgctaatttcttcttcgattggactgcaaacgtcgaaatcggccgttttaaaagctgccgaaaccatccaaagactgcgccaacaattgccccaggatcgacccaaatctcaatccgttgactatgggaaagtccccatctcctctggaccctaatccacgtttgaaatcgcctcctggcactgcaccgcttgcgcagtcagcgcgtaatttttggaactccgtccat

SEQ ID NO: 86903 - DNA, 760 bp, Heterodera glycines
ggatttttgttgatttttacgaactttgatcattttttctgagcttttttggctccatagccaaaaaagccgaaaattggcaatagcaaatcatctatgctctacacgatataagtgattttaaagcgatctgagcagtgacagttcggaatgttcccttgttagattaatttggcaaaagagactctcttgcattttttaggtgactttcaacttggacagtcgacgaccctttgggatgtccattgtgacgaagaacaaccgttccggatttgcagggatttatgtgcatgaagttaaccctggcggtcttgtggcgttggacggtcgaatcagacccggctttatcattctggaagtcaacgacatttctttggatgaccttagctcaaaggaggcgctcaatctgatcatctcttcggttcgaaatgctaccgaaaccagggggcaactcaaattggtctgtgctcccagcagccgagcccgcacgaccgattgatcccaccgcgtggattcagcacgcaaacgccgccaggggggttggaccaccaattgcagcactttccccctcccccgccaaccgctcattcgcaagggcaacagccgccgatttgttgtattatgccgccacaatgtcagccgaacgcggcgaaaccgatggccagcaaatcgtcaaccattccaaaaacaaaccctcagcaacaggggaaaggtccatgaaaaacaacaccaatttgcgggtgctgcaaattgtgccgtt

SEQ ID NO: 86904 - DNA, 710 bp, Heterodera glycines
atattttgttggactgtaaaggtcctgtaaaactgacggacttcggcctgtgtaaagaggccatcgaaggggaccaaaagacgcacactttttgtggtaccattgagtacatggcacccgaaattctgatgagaactgggcatggcaaagcggtcgattggtggagtttgggggcgttgacttttgacatgctcaccgggggaccgcctttttcggcagagaatcgcaaaaggacaattgacaaaatcctcaagggacgccttacacttccgccctatttaagtttcgaagcgaaagacttgataaaacggttgctgaagcgacacgtggacactcgccttggggccgggccgggggacgccgaagagataaagaaacacgcctttttcacccaccacgtcgagaattggacaaatgtttatcggcgagagatcgaagccccgtacaagccgaacatcaccagtgaggaggacgcctctctgttcgactccaaattcaccaaaatgactcccgtcgattctccgaccgccgaattgccaccaatgtccgtcaatcccttcgaaggattcacttatatagcgccttccgtcctcgaacaagtcagccaacccacgttggtccgtccgaggcaacagcgcaaaatacatggccccgccatctttcacagtttccacccccaccaatcgacgaccgacaacggacccttggaa

SEQ ID NO: 86905 - DNA, 394 bp, Heterodera glycines
ggagttgaaaattttttttataacaaatgatgaacaaaatttataccaccattcatttcttattgcttttgactgttattgctaacaaatcgactaattgtgctacaaatgttcaaggaactcaaactgttaaaacagcagatgcaacctatgatgaagctggaaaaatttcgcgtgattcatcatcaagttccgatgaagatgactcaacaactgcagcttcaaaaatgctactgaatgaagcaaatcacgctttctccaaagataatgatgagccgattaaccagcagcagaaaatgaggcctgaagctaattttagcgttaaatatcttcccccgagactgaacgctgcacaaattgacaacattgcacaacaagcatcatccatgatcac

SEQ ID NO: 86906 - DNA, 584 bp, Heterodera glycines
ggatgagttggcacgccttgacagttgccgaaattaaaatgagcgcaaacggttcaacgacattcccgaacgggacgcatttgaacgtttgtgccgcggtgagttcgacatttcgcctgcaaatgcttccaaactctactgttatttcaagcgggacaagccctacctaaagttggcaccgcacaaagtcgaaattgttcattatgaaccgctggtggttgtgttccgcaatgtgatcagtgacgaggaaattgcggttgtcaaacaattggccaccccacggctccgtcgcgcgacagtgcaaaattcgcgcaccggcggattggaattcgcttcgtatcgcatcagcaaatcggcatggcttaagggagatgagcatccgataattgagcgcattaatcgacgaattcacgagatgaccaatttggacatggagtcggccgaggaactccaagtggccaattacggcattggtggacactacgacccgcacttcgattttgcgaggagcggcgaaaagagtccctacaaagggaagggcaatcgcattgccaccgtactgttctatatgtcacagccgaaga

SEQ ID NO: 86907 - DNA, 693 bp, Heterodera glycines
gattccctggcgcctgggactcgcgccggtggggctccgcgacgaactccttgtaagtgcgttgtccacgtcttcgctgctctccagctcaaccattgcacttacaacatttccatcggggaatcgagcatcgaattggaggaactttcccgggaagagctcatcagacgatgcaacgaactcaccgaacggtgcaaaatggaaatacgttctaagaacaaggagaagcagctcaaggaagagaccatcaaaaagctggtggttcttggccagcagaaaggcatcatcgacacacgcaacaaatcgaagaaaggggagaaagagaagcgcatttgggaacttgcacagcacgagaaaaacctcgagataaacaaatatgaagaccgatacaaggagatgcaatacgcactcgacagcacaagacacgaattggaagaggagtaccagaacagaatcaaaactgaggaggagctacggcagtacaaggactgtttcggacagcttcccaactcatacttggcctccgccaacccgcataataatgacaggcaacgtaaccaggcgcggcgtcggcttaaatgagtttcagtgaccaaacaatgcagcggatgagacttaacttgtgcattttcacgaatttgtgacataaatatgaatcttactttgttttgaataaaatatgaacccggacaa

SEQ ID NO: 86908 - DNA, 602 bp, Heterodera glycines
  unsure (1)..(602): unsure at all n locations
tttccattttttttctaattttgctgaaatgtcggccaatacttgcgcagaatgcccccctctctttcgcttcttttggccctttcgatggccttttgcctaatcactttggtactgaaatgccccgatgaagaatgcaaaaacaatttgagggaaatcatttcatttccaatggacggcgacgaaacaaatggaacaaattcatcgggagcaatggaaaaaacggcggaaaatgcacaagagtttttgctaaaaatgtccaatttcgacaaattcgcatgtaaaattggggacaaatattgaaaattaattgaattaattgaatggattgatcatttgattattatttattttcttttctttcaatttttcgttttgttctgctgccctccggccataggccattcattcgttcattaagtcaattaattaattcaattgttttatatttgtttattttccttcgcttcgttttcattgtttttaattacttttttatttcctatcgttcgctgaataatgtcataatttgaaagtgcatttcaattttggattcgttacataaattgactttttcctcannaaaaaaaaaaaaaaaaaaa

SEQ ID NO: 86909 - DNA, 651 bp, Heterodera glycines
gatttgtgtaaaattcgatccatcgcccgcctcagaaccacaacacctctcaaaaagcgaaagaggaagcaactcgatgttgaagttgatgagaatgttgctggctttgatagacaagaagcatcttcgccagttgccgccaaaacatttcgacacttttcttgggcaattgcacccccaacggcgccacaccccgtgaaagaggcaaaaaaaagaagaaataatagaaagcggaaatgaggaggaaagggacgaagaggaagaagcagaaaaagagcaaaatgatcaaattcaaattggacgaaaaattgaggaaaccgaacggcagcaaaagacgaaagtgggcggagaagatgagggagtggaagaagtggtccaacaaccgcaaacaacgacagaaaaacccgcggacgcaacacagccaacagcggaaccggcgaaaatccaagtgattacatccgttggcggcgtcgatgatattctacgaaagagacgagaattgaagcgagaaaagcgaaggcaagaacagctgaaaagggaggcggaaaagaagaagaaggaggaagatgaagcgaggaggaaaaaaaaatgaagaggaaacgaggagaaaaagtgaggaaacagaagcgagaaaacggagacatgaagagg

SEQ ID NO: 86910 - DNA, 634 bp, Heterodera glycines
ataacgcggcacagtataaatataaaagatccgaaaaaatgccaaacattttcaaaatccttctgattgtgcttttggccgtcgtctcattccgtctctcggcttctactggtgacaaaaaaactgctaatgatgggagtggaaacaactcatcagctgggattggtacgaagatcaaaagaattgtcaccgctggactgctcttcacttccctggcgacgggtggggcggaagcgattgggcgaagcaatgctcagggaggaaatgccgccggattggtgccatcgcatgtgaccaatcgctcaacggctccaccacctcctcctgtgcaatttgaaatgggggcaaatcgattagaaaaaatgagggcacacctacgcgaacttgctgagaaaatgccggtcaatgaatcgaagcgtctgtcaccgagtggacccgacccacatcatcattagggccatggatggatctaacggaggaagaaagaatggatgtttagttttcagattttattctatcctcttttatttattagtttttcaaaacaaatttcttccacaactttttaaactatttgttgttttgaatctttttagataaatctaaaccccgcaaaaaaaaaaaaaaaaaaaaa

SEQ ID NO: 86911 - DNA, 355 bp, Heterodera glycines
  unsure (1)..(355): unsure at all n locations
gaaattgctgcgttaagaagaagatccggcctgggttgtctcattgctggncaaagaccgtttcaagaatctcgcattctttatcggcgaaaacatggccgagggcaagggcgaaggacaggtggccattgttgagtaccgtcaggagaatggtgaggaagtgcccactctgatgctgatcaaggaggcgctcattgtggagaagtgctgacgacgacgacaagcgatatacgagaaatgcgcgcgatattattattataacttttttgttttaatatgatatggtgacacaatgtccagttactattacatattgttgttgttttcaaaaaaaaaaaaaaaaaaaaaaaaaaaa

SEQ ID NO: 86912 - DNA, 638 bp, Heterodera glycines
ataacgcggcacagtataaatataaaagatccgaaaaaatgccaaacattttcaaaatccttctgattgtgcttttggccgtcgtctcattccgtctctcggcttctactggtgacaaaaaaactgctaatgatgggagtggaaacaactcatcagctgggattggtacgaagatcaaaagaattgtcaccgctggactgctcttcacttccctggcgacgggtggggcggaagcgattgggcgaagcaatgctctgggaggaaatgccgccggattggtgccatcgcatgtgaccaatcgctcaatggctccgccacctcctcctgtgcaatttgaaatgggggcaaatcgattagaaaaaatgagggcacacctacgcgaacttgctgagaaaatgccggtcaatgaatcgaagcgtctgtcaccgagtggacccgacccacatcatcattagggccatggatggatctaacggaggaagaaagaatggatgcttagttttcagattttattctatcctcttttatttattagtttttcaaaacaaatttcttccacaactttttaaactatttgttgttttgaatctttttagataaatctaaaccctcaaaaaaaaaaaaaaaaaaaaaaaaaa

SEQ ID NO: 86913 - DNA, 662 bp, Heterodera glycines
ttcccacacattacttcttactttccgtattttcgccttccgttggcctcgacaacgcaacagcagcaacagcagacggaaacaatcgacgcagaactgtgcacaacaaccgacgtcatctgtctgctgttaaacattggacatatctcacaatcatcaccatcatcatcagcagcagcaaaagcagaggacaacaaaacgcatggaccaaaaccgactcagcgacttcgcttggatggaaacattggcgtggctcggtcgtgcagaagtgggcatgaagatggcgctggtcaacacccggttcaacatgctggtggacaagcaattcatgctacggcagtggcgctttggcgagtttcacatctgcgagcgggaaggagcacaacgaggcggcgcagaaatcatgacatcggaagacggcaccaacttcatcacgttgccactgcccaccacgccgatgccgagcagtgtcgtcggcttccaatcactctccatttggttcatcaacgcggacgtcatcaaatttctgcgccggattcgccgtctgttcgccgaggacatcgcactggaattctccactcggcacacggagtttcgcagttggcaagtgattgcgcgacatgtttggccactgttacgggacgggatcagcacattggtgt

SEQ ID NO: 86914 - DNA, 613 bp, Heterodera glycines
actgagatatgcatgccggggatggcaaacgagcttctgccaaagtttggcactacgctggccgttgagcgtacacgacgtgacacaaatgccgagatgatgggtaccaagatgactgccaatgccgagcgggaggcaaagaaggaaatgaatggcgagatgggtgccaagaaagaaatgaatgccgagatgatgaacaccaagaaagatacgaatgccgaagtgatgggcaccaagacgaatgctaaccccgagcgggacaccaagatggacgccgtggtgatgaacaccaagacgaatgccaaccccgagcgggacaccaagacggaaacgaatgctgtcatggtgaacaccaagacggattttgccaaccccgagcgggacaccaagaccgacgccgtcatggtgaacaccaagacaaatgttaaccccgagcgggacaccaagatggacaccaccaatgccgaggtgatggacaccaagaaggaagccaacgcggcagctgcagcgccggtggcggcgtcggacaacacggcaccagccccaatgacatggatgatggacggcattgtgccacgcgatgtcaatgtgatggtggaccgtaccacgaagg

SEQ ID NO: 86915 - DNA, 656 bp, Heterodera glycines
ggagacggcgctgctgaccatccgaacgtggacacatttgcgtttatgggcaacccgcaaaaggactatctgatcgcacttgtggtcccaaatcgcaaaaacttgcaagcacttgctgaaaagaatgccgtcaatgagtcgagttgggaggcaactttgtgccaacaaagaaatggccaagcttctggaaaaggaactccaaaactttgtttcggggaaattgcgcagggaggaaatcccgaggaaagtcattatctgtgcggagccgtggactgccgactcgggaatgctgaccgaagcactgaagttgaagcgcaagaacatcgagagaaaatttgcggaggaaatccgacagctttatgaggggaaatgattgggttgttaattcccggaggctatttcgcttcaatttgatctcgaacatcaaatcaagcagtttcattgtgccgtaattgccatcatcatgagctttgtacccccaattatacgcaattaatttttgttctgttttcactggtcattcttctgtcagtgcgcgtttatttattttttgatattcgttagggcttttgtcgagagaaatgtccccatttgtcgctattaattgatgtgtaatgtttgaatttgtattggaattgtacgatttcgtaaaagag

SEQ ID NO: 86916 - DNA, 665 bp, Heterodera glycines
gcggcgccgggtgttcatggccgactttgaggacgcaaattctccacttggcgcaatcagattgagggccaaatcaatttgtacgatgccattcgtggccgaatccgctacgtgaacccggtcacgaagcaggagtacacgctgaagcaggacactgctgtgctcaaaatacgcccgcggggttggcatttgccggagaagcatgtgctgatcaacgagaagcccatgtccgcttcgctgttcgactttgggctttatctgttccacaatgccaaggcgttgcaggagaagggcagcggcccctacttttatctgccgaaattggagaatgcgcaggaggccaaactgtgggccgatgtttttggccatgccgaaacactgctgggcctaccgcacgggacgatcaaatgcacggtgctaattgagcatctgttggccaccttccaaatggacgaaattgtgcatgcattgaaggattacattgttggcatcaactgcggccgatgggattacatcttctcatacatcaaagtgttccgtaaccatcgcaaatttctgttgcccgaccgctttctgatcacgatgacttccgactttttgcgcgcctacacactgttgtccatcaaaattgcgcaccagcggaacattttcgcgatgggcgggat

SEQ ID NO: 86917 - DNA, 665 bp, Heterodera glycines
ggaatcctaaaaattatcctatatccctccaaatatatataaaaaatatgagaattcccattatattaatattattatgcatcgttgcattgctaatacatgatgcatgcgccgcgggcaaaaatacgacgaggaaagcaaacagaaatcgtgccaataaaaatgggaatagtgggaccccgtccagacaagcagcggcaccaggaaaacagaacaaaaatacgccggaagcaagaaccaatgggcaatctccgaaaaagggtgataagagcattggaaaccaagcaaatccagccgaagtaaaagatgttcctcaactgtccacgccaaaaaaattattacgtgctgcaaccgttggtgtacttctattttcgagtcttgcagggcagcccataccggcaggagccaattcacatatgaccgaggccgaacagtacaaaatgcatggacagggtaataatatggcggcatatacgaaacaaagaagtaatttatatggagaaacagcagcggcaaccaagccacaaataacacacaataattttgcacgtcatacacgaacaagaaatccgcctccaccacacaaaaagactcttcgatcaccaaacttttcagcattagctgctgaaagagcaaaacaaaaaaaagaagaagaagagcgtctg

SEQ ID NO: 86918 - DNA, 531 bp, Heterodera glycines
ataaaaaaattttatttaagtttaaatacttttattaattaattaattagttttttattaatggtctttaaaacgttccagaagaatcggctatacgtttttaatttttaactttagatttttagatttttttaatttattataggttttttatattttgtttaaaatttatttttttttaataaaaaaaaaaaatcaatttctttttaaaaaacctgggtttgaatccagttattttttcttttttaatacttgagtaatttttttttataaatagaaagaattaagttggaataaataattaatttttggagtttgataattaataggagaaacctccattttagctttttttttattttctgtatgtttatcttttttttttattaaaaaaaatattatttttttactttttttgtagaaatatatagagtataaaattaagtttaattgagctacattttttttttaatttttattatagtttaatttttgtttattaataggaaaaaaaaaaaaaaaaaaaaaaaa

SEQ ID NO: 86919 - DNA, 640 bp, Heterodera glycines
  unsure (1)..(640): unsure at all n locations
acatttttgccggttggattggcgcaaatgctgctgttaagtcaaaaagtcgcgtggccatcgatcgttcgccaattggcccctttaatgtgggcctggtctttgcactcgaatggccggcatttcgggcggaattgctgtcgcaatgaatgcgtacggcgcacactttgttctcgccaatgccgacattaatgatgaacgaaaaagagccatgacttatgcgatcaaccatcacttcatcaactgcattggaatggcgttggccggcgtcggtgcccattatccgacgctgacctcgagtatgtttctgatcagcactgtgctgttcagtgtgccttcctatttgttcgccatacgcaatgatcgccgactgcgcgccgtgacgccgtacggcggtgtgttggccatgctcgcttggttcagtttcgtcctttgatcgcttcccaaaacaattgcaacaaattcggacggaaaagagaataattgatcaaattgtggaattgtaatttcaaatttttaacaatgtatctttattttgataccacaaataattttttgctcgtcattctcaagtttaattgactttatctcattgtctaaataattgcttattaaaaaaaatgtttttaaaaaanaaaaa

SEQ ID NO: 86920 - DNA, 608 bp, Heterodera glycines
ttttaaataaaatttccttggaccgacaaaaatggcaaaattcgttgccattgctcttctctcgctgaccattgtttcgatggcacttgcaaaaactggcaaaagtcaaacggcagacgaagttgagggatttcgcaatatgaacatcggcgacaacaataaggttgacgccggaaaggagcccgcggctgataaagcaaccaaaaagggaaaagctcagaaagccggaacgaaatcggcggcggccactaatgagcccgcggctgctaaaggaactaaaaatggaaaagccccgaaaaccaaagcgaagcaagaggtggccactaatgagcccgcggctgctaatgaatggaacgaccaattgatgggcatgagcgttgagaaatttaacgaggagcttgctgtgttgttgccaaaagccaacacttttatggaaaatgctttgagcttcatcaatgaacaaatggaaaaaaatggtattgcaactggcgctgccggggactcgtgctcgaccgggatcccggccaactaggagaccaatgccacaggacggcaccggaggagggaagaaaggatgacgagctctttggatgatgaaggtggtggta

SEQ ID NO: 86921 - DNA, 729 bp, Heterodera glycines
  unsure (1)..(729): unsure at all n locations
taaaaatattttttgccatgtcttctctgctgctctcctcttccaatggtctttttagtctgttgccatgcaatgccaaaattcccgtgctgcccgggcagtcagcaagtggttgctgtgatgtccaaatacattgacactttctctgctgctgatgcggacaaatctacagtatgctcaaccgcgaaaaatactgtggatggaataaaaagtgatttgttctcttgcggcggatgcccaagcggaggagaagcacaaattgtgggcgaaatcgatcgacagctgaagaacattgcaaaaatggagatcaattatgaggacgagtgtccatacaatttgggctttgcccgtgccatgttcgacttggccgctgctgctgctggccatgcgggcaccgacacaaaatggcaaaatatgaaaggacaatttgaacaagaaagccaagcaatcaaagcaattggtcaagaattgaacattacagttacggatgtgcatgttggacacccaagcaaaggattttccgcgcatcaaaatgtgccaagtccaagccatgtggttgccaaccctggccaaaagagttcggttggccatggaaaggatgacgaaccgttgtcatctgatttggacttttgagggcatagaaaactgaataaattagaaggaaattcatcatacagaaaactatnttgttgacattccaaaaatatttattttaagtaataaataatt

SEQ ID NO: 86922 - DNA, 746 bp, Heterodera glycines
aacgcaccgatggcatattacggacagcaaccagccgccgaccaattaccggttatcagtccgcagaataacaactccttaccaagctcaggaaggagtgcacgtttacgccgccaatccgggcaatgccgagggcggaatgcccaaaaatgagctgggcttcaacgaacaaagcatccgtgccgcttttgttcgcaaagtgttcctcctcgttggtgtcatgctcggtgtcgtcactttaatgtgtgtcgtccctttcgtccacccgcccctaatggcatttacgaagaacaatcactcgctctacttcatctcgctgatcactttcctggtcgtctatttcgtgctgatttgctgtgacagtgtgcgtcgttccttccctaccaatttgatttgcactgccatcctcactttgtccatcggttttgtcaccatggtgatgacggccttttattccttcgagtccgttttgatggctgcggggataactaccgtttcatgtgttgggatcgcactgttcgcaatggtcactaaacgcgacatcaccagcttgctcggctttgtgttcatcgccacgatggtgttgatgatgctcggttttctgctcgtcctttggtcttccttcagctacagtcgccctttgcacattgtctacgcttgtctcggggctttgctctttatggtctacttggccatcgacattcagatgattattgggtggacgcaaatacgaaatttccccggat

SEQ ID NO: 86923 - DNA, 559 bp, Heterodera glycines
aattattttttttaataataattttttacaaaatgagcaactttatatttgtcgcctttttaactgcagcgttttttagctcaagcctcgctctaccggctccttatgatgctgaatcggtggtatcttctgaattaaatgttccactactttcagctgacgcaaatgttcaagcagctgaaaatgttgagatacaaattccatcaattccagcaccaattgaacaacaaactgctgctcacattactcatccaactgaaactggcaatgagccttctattgcatcatcatcatccgcgccgaaaagtgagcagacgccaaaaaaagtgatgaacatgaaaagcgcgatggaaggcgcggcggccaacgtgtacggggggcttccgttagaccagcagcccaagacgatcgctgaagcggcagcaaaagcaaagcagacgcccgccaaacttccggctgactacgacgcgaaccgcgtggcggaacgcgcggcggcccgtgtgtacgggtggcttccggaagacaagcagcctaaggcgatctatgacgcggcggagaa

SEQ ID NO: 86924 - DNA, 498 bp, Heterodera glycines
cagaaaaaggtgtttttaaattccagaaaattgttgggatgccttcgcttgtcacgaggtcatcgaaatcagtggtgacaaaagtctcattgtccagaatatgggaaatataatggttggcgctccgtcttcgcaaccgtcttcgctaaatatccgattgtgctgaacaagcatttgtccgactttttttactacgaaatttcagttatgaaagaaaacgaatttatttggggcttcaacttcggattcgctgttaaacagcagacaaaattggatgaatcaattcgatgtgaaaagggcacttatgcctatgaaaacgatggcgaactttggattaacggagaaggaaagggaagcaatgcccaatattcctacgatattggtgataccgttggaattggcatcaattcggccactcgacagatcattttcaccaaaaatggacttcgtttggatgcctctgattttttggttgatccatcttttgctgatggttct

SEQ ID NO: 86925 - DNA, 556 bp, Heterodera glycines
accgtcgcatttccaaatgacaattttggatcagcaagaggaggaagtgatcgtcggctctgatgacagtcacatgattgtctcaaatattccgcatcgcgcacacaatgtttgtggcgtcttaaacaagcataccatcattgtggcgccggcagacgactcactgaagcgtgactttggcatttacgaactgttcaacatcaatgaccctcaaacgaaatattttgcttggtttgtgcggccagatgctccgaagaaaagtgctattgagacgtttcttgcccactacgaagtcatcaaggacgcggagggtgacgtgcacattccgagcttaatggctgccagaccgattaagaagtttcacttcggcatggacattattcaacagagtgagcatgacgctgactggagacgtccggttatgattctgaagatgcccgcccattgtgtgtttttggtcgcagtgcgtactctgtcgcccaccgcaagtgctccgagttggctcgcattagcagtcggctatggcttggtgaatgcgctgaactcattgcatgag

SEQ ID NO: 86926 - DNA, 621 bp, Heterodera glycines
  unsure (1)..(621): unsure at all n locations
caatgctcgattcgaacattctgctggagacggagtcgaaaagtcggcactcgccgagtgaagttcggcacattggccaaattgacggcggatttgcttctccgattattctcacagaagacgccattttggcgcatcgaaataggcgacaaacggacgaagaaacggcggaaacagcgaaagttttctgcgaaaaaaaattttcttataattgtccgaccgctcttctgaccataagcatggattggcagcaaaaaacgacggaagggccgcgagaaaacaatcgcaaaacgaatggaaatgggggcgaagagcaaagggaatgctgcgcgggctttgtcccatcgaatggccaatgcgtgaaaagggagcgaagataatggcaaaaggcaattaattaattaggggcaattaataaaacggacaaaggaaaggcaatgaaaatggaaatgatcctccaactttgaaaactattttgtatatataagtaatttattattgcactgttctcatttcttattcccaaattcagatatttgtgttgtacgattcggaaatgaaattaaaattaattaacgcataaaaagcatttaattnaaaaaaaaaaaaaaaaaaaaaaaa

SEQ ID NO: 86927 - DNA, 265 bp, Heterodera glycines
atggaatgacttcaactcagaagattatcttcgaaatggacaaaaaccggcaacggattagctgaaaatgctcaaacgaatggaagggcacgacgacgaaatcgcagaagacgctcaaattcagtgggccaaatggtcacattcgccacggcacgacttggaagacagtgacaacatacaaagggataatgggcggaggaatggcactaaaggaaatggactcggtggacctaaatagcatcgaacatctgttatcgtgccccca

SEQ ID NO: 86928 - DNA, 663 bp, Heterodera glycines
gagttggttgttttaccccatcaattgtggtggacatcgaattcgattgtcattcggaacgtttcttttggagtgatatttccggacattccattcgttctgcttttctcaatggcactgggctcagttccaacttttccgaagtgctccgaagccccgaggggattgccattgattggccttcgcgcatcatttactatgtggacagcatcaaaaacgaattgggagtgttgagcatcgacggacgctttcagaaggctttgctgacggagggactgaacaatccgagggcattggtaatcgacttggaaagtcggcatttgtattactccgattggtcccgagaagggcccaaaattggcagagtttcgttggatggaagtgcaaatgaaattttcatttcggacgacgtacacttgcccaacggaatggttctgctgcagcagcggagatggctttgttgggttgacgcgggcattcagcaattgtcatgcattgggctggacggaacggggcgaagagtgatttacgccccgcttgagtatccctttgggctgacagtgaatggagcggaggagcgcttttactggaccgattgggaagacatgaaaatccattccgtggatgttttcggcaaagggtacacccaatttttgccaggag

SEQ ID NO: 86929 - DNA, 653 bp, Heterodera glycines
ggaacgaaccctccgtctttggcacaatgagaaacatcctggtactttgacacgcaacctgcatttgccggcaagccaccaattgcgccgctgatgtgcccagagccgaacaacaaattggactacccaccgtatcgcacatggaatgcatacaaatgggactcgaagaatacgaagagaacgctgaacgaaaaaacattatgcatgattggaaaaagtgggcgccgcaactggacaatgtacgatacgcattctctctacggctggtcagaaatggtcgccacacaaaaagcgttgcgcgtctcaactggcaaacgcggctcactcacttctcgttcaacatttccatcatctggccattacggtggccattggcttggtgacaaccaatcccgatggcctgatctccggctgtcaataatcggggtcatggagttcaacatgtttggcatcccacaagttggcgccgatgtttgcgggttcatcggagactcaaatgaagaactttgtcttcgatggcaacagcttggagctttccattcttattaccgcaatcacaatgatgttaattcaaaagttagccaagatccggcacagtggaaatccgtggcaacagcaacacgcgttgcgaacttattccgatatcgtcatct

SEQ ID NO: 86930 - DNA, 428 bp, Heterodera glycines
gtgctgaacaaatcaccaatagcgtcgaagagttggacattctttacactgtgccgcattgtgtgccaatctcggcacatcacaaatggaactttgacgatttgttggaaaagatttgggcctatttgaatctgatcagagtttatacaaagccaaagggccaattgccggattataacgcaccgatcattttaaacgcagaaaaaaaactttctcgacgatttatgtatgaaaattcacaaaagtctgtcaaaggacttcaaatgtgccctcgtctggggaagcagcgtaaaacacaatccgcaaagtgtgggcaaaacccatttgctgaacgacgaagacgttgtccaagtgatcaaaaagtgagggaaaggcaccaccgaacgcggcaaagagagaagcgccaaaagagtgccctcctaattgat

SEQ ID NO: 86931 - DNA, 440 bp, Heterodera glycines
tggttcgccgccgcgttcgcttcgtatgtgccgccgtcggcggcaagggcgcagccgcctcaccgccaagcagcacaatgttgctggacgtgccagtggttgttgttggccggcacgactacgacacgtacagagactcggtggaacggctgaaagacaccggctttgagcttggcctgttaaatgtggaggcggagacggaacttgtccaactgcggccgcacattcagcaaatgatgtgtgaacaccaaattttgccgtacgacccgggcccggactggcgctttctcgactatgtgtccaacgcggaggagggcactttccgcgtgtcgcgtcaccaggagcagagtcggacggtggccgacgtgtgcacattggaggcggaggagggcaccagcagcagagcgggcattttcattttggacgacgctttcccttca

SEQ ID NO: 86932 - DNA, 558 bp, Heterodera glycines
taagaaattgtaacctaaaaatgaaaattgagtataaatattgcgattttcccaccttttttcattcctcatcattcctcaattacaaattatttaattccctgcaatgctcgtcgacttcctcttctccgcgtccctttcacttcaactgctgcccctgctgatgtccatcgttgccgcttctgtgctggtgatcgtcacgcaatgctgcggctgcgggaagaaagatgctgccgaacaacagatggcgccgactggggaccaaatgcagcagggaagcgtggcaaagcagggctcacaaatgggacagagtgcggcacaaggcggcgcctccaagatgggacagagtgcggcacaaggcggcgcctccaagatgggacagagtgcggcgcaagactccaccatggcaaattcgcagatgcccggcttgtcgacctacgcaggcgttgcacaatcgccaactccaattgaagtctcggcctgggcgcaacctccgaagcccaagtgaattgccaagaagtgaacggacgatgtgcgctctgcgaagtacaacatttg

SEQ ID NO: 86933 - DNA, 709 bp, Heterodera glycines
ccactcttctcgagtcgtcttttaacgttttagaaagtcttggcgaaatgctcacttggccttttgtcgacgcttttgtcattgccccaaaaattgcacttttaacgggtcgaaatgactttagctttgaccaattgtactaccgaagtgaaattgcgcttgtcgattccatcgatttgctcgcttttccccagccacgtgccactgatgtgttaagtgccggtgcgcattgtgaagtgcccaccgaacttccgaaggattaccgtgtttttgtggaggatcctcactcaaaagggactgtttacgtcgccttcggcaccgccgtgccgtgggactacgccccgcctcacattgccaatgccttctttgatgcttttgagcggttatctgaccatcgcttcatcttttcattccgtggcactttccccaatcggactctctcttcccatattcgccttgtctcttgggccccccaattggaagtgctttcccatccgaagaccaaagtctttttgacccattccggactgaagagtatcaaagaatcgctgtgttctggcactccgatgctaacaatgccaatgttcgcggagcaagcacataatgccaagatgttgttggagtttggcattggcattgggctaagcaaattttcgattgacgcgcaaacggtgtttgacggactgagtgagcttttacataaaccaaa

SEQ ID NO: 86934 - DNA, 717 bp, Heterodera glycines
  unsure (1)..(717): unsure at all n locations
gcaaaaagttcttcctaaagaatcggaaaaggccaaagtacgccagtctaaggcattggtgccccaggcaaaagcgaatggcaattccatcgatggcacaaacaccgaaaaaaggggttccgcctgtgcatcttcaacagcagcagcgaagaatgatggatccattcctatggaggattttgtactgccggcacagattaaagaaatcgtgccgaagacagacgctgcggaagcgccccttttaatcagcgaagtggacgacgggggaacggcaatcgaagaaggcccaaagaatgatgggccatcggagggaagtggggcggacgagacggaggagaagcgcaggtcggcacctcctcagctgaccaaagagtgtctgccgacgatggtcacgggccgttacagggaggacttgatcttttacacgccgaaggcacgggccaaaatcagagagaaggaaatgcaacgactctcttcaggttcttcgcgtcgtaaacaaattttttcctccttggaactgacggaaagtgatgcaatttcgttggttggttcttcgacttcgagtagcaaagaccagcaaaagatggactccgatgacaaatcagtgccacctccacccaagccaaaagaccttggccaagttcccgtctatctgacggagcaccaaagggatntgttttttaagccgttgaagccgctcttcaacttaaatacggt

SEQ ID NO: 86935 - DNA, 755 bp, Heterodera glycines
cataagcttttgtcgtattttcgctttaatctcttcgattgttttccttcaaattgcctaattatccgccattaattaatgacttctcccccctcgccaaatgcgctcctcattttggaggcccaagctgattttgcgttgaatttgttgtgtggcgtgtctagcgtcgaccgttcgtgcattgtttcgccgttttctgtcgccgtcactttgtccatggtttacgcgggcgccaaggaaaagacgggcgaagaaatgggccaactgcttggaaatggtgcgcccgagtcggaagtgcacaaatatttcggcactttgctcaaatcgatcgcaagtggacagaacagcaacactttggagatggccaacaaagtgtacgtgaagaaaggcatcagagtgaagaacgcgttcaaaaaaaaaattgaggaaaactacggtggacggatggaaacggtggactttgaggacatcgaagggacggcggagaaaatcaacaatttcgtggaggaagcgacccatgagaaaatcagcgatttgatcgcgcccgacacacttgacaaggagagttgcttggtgctgatcaacgcgctctacttcaaaggcgcatgggcgaacaaattcaacaaaaaattcaccaaaaaggcgacattttatgtggacgcgaacaccaaaaaagagctggaaacaatgcatttgacgtccaatttcatttatgccgagaatgctcagctccaactcctcggcatgccctacaa

SEQ ID NO: 86936 - DNA, 744 bp, Heterodera glycines
gagtcccgggtctgaactcttagggattggttgcccacaattttttcggattcttccttacagaccgagagacgtcgtttgttgacgaagcgcgtgcacgtggcacgttgcccactcattctggacggactttactgcgcatcgacgaggatggaaactgcgttgagattccgatgcagcgtaaaccgacttcgcccgtcaaaaaaaaattgcttggacattggaaaaccggagatggaactgctgcaagtaaatggtggtcaatgggaatttgtccaacgcatcaccaatgaatcgcaactctatttttacatcaatcgtttcaaccttgtgttcggcagcagcagcaaagcgacggggggacgacgatatttcaattgcattgaacgcggcgggtcgaccaaatgtccctatcggatgatgtacatgttggaaagacaggtactctaccaaaccggggaacataaccattcgttctcactgttacgaaggcgaaagccgaccaaaatcaacataaagggactgcttccaacacccgaaaaaggaggtgatttcgagttgctgtctcttgccactgatgtcgcacaattggccgaagaattgggcttggaattccgcgaggaaaggggtcgttttgtgctgatttcgaattctgatgaaagcgacaaggagaactgcccctctacctccactgccatcccacaaaataatgaagttgtcaaatggctggtgttggcggacaaa

SEQ ID NO: 86937 - DNA, 451 bp, Heterodera glycines
gagttgctctcctttttattttgacaataaacaatttttcccgctaaatttggcgaacgatggcttcttctcattgcgcacccggatgatgaaacgatgtttttttggaccaactctgttgttcctttcatctatcggtgttcaattgcatttgttgtgcattacgtcggggaattctgagggacttggaacgattaggcgaaatgaattgtattcgtctgcttctgtttatggcatccaacccaaatacatctcttttgtggatccagaagagcgaagattcccggatggttttcgcgattggaatatcaccagcctttctgcgctgatttactcttacattcgacggctgaaacccgatggactgatcacttttgacgaatggggcatcagtggacatccaaaccacagagacagtttcaaagctattttgaacttgaatactgaaggc

SEQ ID NO: 86938 - DNA, 545 bp, Heterodera glycines
agaaaagaacggattggtaaatacaaattttgcttcatccgcgcaccgttggatttgtccacattttgaagagaatgcgcaaagaaaaatatgtcgactttatctacgatgtctctgtggcgtacggtggccgtattattcagtcggaattcgatttgcttctccttggccttacgcctgcccatgtgcattttttggtacagaaaattccaatttcattaattccggaggaagacgaacaattggagcaatggctgaacaacaaatgggcggaaaaggaggaaatattgcgccgtttttattcgaccggcgaattccttccaacggatgcaaacactgagaaatccttccaaaaaactgagttgtcccctcgggcatttcttctgcgactgatcatttcggccgtttggttggcactcaccgccgtttggaccattattttcttcgggtttttatccgctcaaattcgatggagttgtactctgcttacgattatttactttgttggtttgcaactttattttggcggatttgaactgtttttg

SEQ ID NO: 86939 - DNA, 333 bp, Heterodera glycines
ccttctaggaactttcgcccagaatttccgccaaattttttcaggaatttcataaaccaaagtagaattagtatatattactaagtttaatggttttatttatttatagatgaaaaccaattttaagaataattttcctttaattcgatttcacaaatcgtttaatcatttgtaagaaccagcattttgaaaaacaatctttttaccatgacataaaaagaaactaaaaaaaggttagagtctcaactaaatgatattgtaaatttcgaaaactattcatggtcatcaacaatcatgatcaaataaaaatcactgatcaaatggatgagagca

SEQ ID NO: 86940 - DNA, 640 bp, Heterodera glycines
atttcgattaacgcttagcgctttatggacacagttccatccttgaaaattggtgccaagcatttgggacaggtgaccgagttgagtgttccggccatacacaatctttgctgagcattcgaattgctgacaatgagcatgtaaagtcctcttccatacactttggcaatgcggtgcgcccattccaactgcttttggcccgctgttgcgcacgcgcgtggtgcgtaacgaatgcgtcactcggacggacacgggccgaattggcaaagcaaaatgggagttggaattggcactgatcaccactgatcaggatggtgctgatgatcagcaagaacaacaacagcgtgaactgctcgaaagctgtgatgccggtgactcgttcaacgtgctgttcgagaatcccgaacaggaggtggactttgtgcttaaaaggttgggtttctgtgccgaaacagcggacactgaacacattttggagctgcacaaagtgccggaaaccaatggaagatttgcccattttccggcccgttgttcgcctcgccaactgatcgcccagttcatcgacattcgcagggcgccttctcgactcgctctccgtgtctttgccgaccatgcgcatgagcctgctgaacgtcgtcga

SEQ ID NO: 86941 - DNA, 584 bp, Heterodera glycines
ccaccagcagcacgccaacgacgccaaaggggacgacgacggaaaattggagcgaatcattagcggctgctgctggcggaaagaccatacttgtgctgatcatcgttggcgcactgattgcaatcattgtcctgctcgtggttgttgtgtgctgctgctgctgcaaaaaacgcaaacgccgccgccgccacacttctgccgacgacgacaaggaggacaacaaaaagcgcaaacgtcgccaccacacttctgatgacgacaaaaaggaggaggaccactaccacattgaccagcacaataagaaggagggggagcagcacggaaaggaggacaacaaatcgccgatacaaagcgaactgaaagtgtcgacgatttccgccgtgccaagcgactacaacacgaacaaacggctgggcgcaacagaattggacgtggaagcggaagaggtgccgaagacgaagccggttcccaaaaagccgaagtcagaaggaggcacaaagcgcaaactgtccaatttcttttggtccaccggcaccaccgagaagcgaccgagcgcggcggaacatggcgtggaagtgccggaa

SEQ ID NO: 86942 - DNA, 650 bp, Heterodera glycines
ttatttacttttaaaagcacttttgtttttatttgtaacacctttctgagtcccattagtcatgctcaacacgggaaaatttcttggcaaaacttttgtataacgggggcatcgcgtggcattggcaaggaaattgcacttaaattggccaaagacggcgcgaacatagtcatttgcgcgaagacaactcaggacaacccaaagttgccagggacaatttacagtgcagcggaggaaattgaaaaacttggtgggaaggcccttcctctccaagtcgacgttcgtgatgaacagcaagtggaggaggcggtcgaaaaggcggtgaaaaaaattcggtgccatcgattcgctggtgaacaatgccagcgccatttcactcaccaacactttggacactccgatgaaacgttacgatttgatgcattcggtgaatgtgcgtggcacttttttaatgtcccaaaagtgtgtgccatatctgcgtcaaacttcgaacccgcacattctcaatttgagtccgcctttgctgatggattaacaatggttcgctcctcacgtcgcgtgtaccatgtccaagtacggcatgtcaatgtgtgtgttgggaatgcacgaagagttccgcaaagatggcatcgcagtgaacgcactttggc

SEQ ID NO: 86943 - DNA, 689 bp, Heterodera glycines
gcttattgttattcgtccttttccgacattcgttccatcgattcattcgtcgacaaaattctcatcgccgtaaaagcgccttttgagccccaaccgcgttcttcgatcgaagtgcccgacccttgcgaaaccgggcgatacgaaatgaccgttcgcaatgaaaatggcggtcctctccaagcgtacctttgccgtgagcccacgcagaaaaacgcctcggaactcacaccaaacaattgcaaagcggaaacggaggagaccaaagcgattgactctttggggacacaaagcttttgcgggcccaaaattccgtcgaatgagcttcggtcgccctccaaacagcagagaatgctttcgccgttgaaattgctcttcgccaattctcagccgcaccccgacgccgtctcctcaaattccgtgggccccggcggcgttttcttcccgcccccgggcgattctttcctttcgttggaccccccttttgaggagaatgacccgtactgtccgctcttcatgaacgaccaaaacacttcactgaattcgctgttcggctgatcattcgctgcggcggagaaacgaaaggaaaaggcaaaagaaataacggaaggtgccaaaaaaaagagagaaaaatgcacacatttaacattttctcatcagatgttctacttgcttctcataataaacgtttt

SEQ ID NO: 86944 - DNA, 716 bp, Heterodera glycines
aataaaatttctaacgcaattatttattctgctctttgttgtgtgacatcattcggaactcggccaaaattgtgctaattgccacaaaaatgaaccgacgttggatttgcaacgacgtttggatggacattttcccctcttttgaccgtcctcaactcggcctcaaattggcacttctttcccacgtttaatgcgttggtggacaaacatttcaatggcaaaagcgaattgactatttggagaacgatcggaattagcaaggacaaaggaccagaaccggagctgtctgtacgaatcgattacgaatttgtgccatttccattgcccgacgaccgtccgttgcccagcaaaatccgttttaagagccttcagatttattacattgatcacttcgtcatcgcttttcttcgttcaaatcaccaaattttcgacaaaagaggcaccaatttagatttgtgtattccttactcaaacaccacggatggccagcggatttgggatgtttttgttcgtgaaatttggcccattttttcggcaaatattcatcacttgcgcttttcccatcgtgatcatttggaccatttgcttcgtcgcacttcgccaacaattctcactgatctcaaccaattgacttcaatccattcatttgatttgtttcccgctgcgattggtgatgattttgatgtgccaaatgcaacaatctctgctggccaaat

SEQ ID NO: 86945 - DNA, 703 bp, Heterodera glycines
ggccgaatttgccctcatcgctttttcctgttgacgaacattctctggttggccccgatggcgagtcgcctctgttcacccaccgaatcggcaaatcggcgccggagggccaaccgggcgaaaatggcgcggcagtgacactgacgggggaggaggcggctgaagggcggcgccaaatgagctactggttcatgaacgtcaaggcaagcgacaaaatgtcgctggaccgcgcagtgccggacgtgcggccgaacgcctgtcgctcgctttcctacgatttggccgatctcccttccgcctcggtggtcattgtgttcactgatgagcccacttccgtccttttgcgcaccgtccattcggttttcaatcgttcgccaatgtctctgctgcgcgaagttgtcctcgtggacgacttcagtcagagagaggagctcaaagctccgcttgtcgcccatttgcgtcgcttcggttcgcgcgttcggctctttcgagcgaacgaacgtttgggattgataagggcgaagatagtgggagcgaaatacgcccgcggtgatgtcgtcctatttttggactcgcattgtgaaacatcgccgggatggctcgagcctctcctccatcggatcaaagacaaaacggtcggctgtcgtttgccccgtcatcgacatgatttctgactcttcgatgcaatactcgggcggatcag

SEQ ID NO: 86946 - DNA, 572 bp, Heterodera glycines
gcaccgaactgatggtgctggcagaacgcagcttcgaccagtgttggccaattgcggagtaccactgaagtcccaccatatttgatgacgaagacgccgtttgcgctggtcaccgatggggcgagtcttcaccacgcggtgatcggagaggcgagacgcatttttgcggaattaattctcaactgccattccgtcatttgctgtcggatgacgccgatgcagaaagcagagattgttgaaattgtcaaatcgcttggcaacgacaaaacggtgacggccgtcggtgacggggccaacgacgtggcgatgatccaagcggccaatgtcggggttggcattagcggagtcgaaggccttcaggccgcttctgccagcgattattccatcgcacaattccaatttcttcagcgcttacttttagtgcatggcacgtggaattttgaacggagcgtaaaagtcattctgtacagtttctacaagaacacctgcctgtacagcatcgagctgtggttcgccttcttctccgccttctccggcgtgaccattttcgagcggtggaccatcgccatgtt

SEQ ID NO: 86947 - DNA, 425 bp, Heterodera glycines
acaatggacgtgggaagggccgaactgcttaccaggccgacctcatctccaccaattgatgctcactttgttaggccgatttcctttcctaaaggtcatttcagaagaaaaatcggaatttttgccggaaaaagagaccgaaaggtatcgtgccgataactacgaactttggttgggtctgcgcgaagtattgtccaaattcccatcttggcgaattccgctagcccgggtgaccgtttggattgacccgctcgatgccacgcaggaattcacggaaggtctaactcaattcgtcactgtgatggcctgcgtcgccgttgacgggaagccgatttttggcgcaattcacgcaccttttagcaacgaaacagtgttcggaatggtcgactttggccttttcgattcaaatggtcttcctatcaatt

SEQ ID NO: 86948 - DNA, 577 bp, Heterodera glycines
cattgggctgacaataaagcgcaacaatgtcttctgacgaatcgacgacttcttctgccagtgttgtgagcgttcagctgcgtgaagtgcccatcaaagacttcaaggacgtgcttccggtgctgcagaaaacgctcaacgaattggaacatccgttcatcaagaaggccgaagaaataagcggaatggaacgtgagaagctcttctacatcacttcctctcttgtgctgctcgtgttgatgctctgccctggcaatatgcttctctctactcttatcactgtggcctacccaatgtacgcgagcttgttgaccctcaacactcaaaacacatcggaatacacccagtggctcgtttattggtgcgtgttcgccgagttttgccagttcgactatctctttggctctatcaatggccttctgctgctgtacgtgcctctgaagaccgtctttctgctctacttggcccttccgcaaacttatggcgctcacaacttgtacgtgaagcatatccgcaaagtgcttgccgtgacgaacgtattggacaggatgaagaagatgttctgatcgagcagata

SEQ ID NO: 86949 - DNA, 618 bp, Heterodera glycines
tcggatggtcttcttttcgttgcctttatgtaccgggcatcagccaaagcttttggagttccatttatccaacaacagtggcaaacacggaaatgttccagctgaaccagggagtcaatcccaaactgttgttggcattgaccgccattgtccaaggcgtgggccaagcaacatctggtttctttttcggcattttggacagtcggacacggcgttttggacgcaccaaaattgttggctttggtgccgctttgcaactgtgctcctttttgctggcctacctgaatttgccggcgcacgcaccgctcgaaaaaacatttgagcatggcattctgaactcgccaagcatcacgctcgcgttggttggtggttttttgctgagttttggcgatgcctgttggaacacgcaggtttttgccacactaattgccaaatatcccatcagagcgtcgcaagcatttgctgtctttaaattctttcagtcacttttatgctgtgctgcatttttctacgccacttcaatttctttgccatggcatgtgctcattttggccattggtttgttaatcggcttaattggctttttgcttgccgagcgaatggtcagacaaaatgatg

SEQ ID NO: 86950 - DNA, 595 bp, Heterodera glycines
attggctggcacaagaagctatctaagaacacaatcggcacaaatcgccactgatggatcggtgacccataacggaacgagataaaccctaaaggtggaagataaatgcgtaagtgagcgatcttctgctgctatgcctcatacaaatgaacccaaaggaatcataacattgaatgacaagcaaaataagaaggaatcagctgggcgtaaataatttaaatacgacgattgaaggggaaggtgtattagagattatgcaagatggatctgggttcttacgttcctcagactatgattatttagctagtccagatgatgtgtatgtctctccctcacaaatcaaattatttaatttaaaaacaggggatacggctcatggagtgatacgagctcctaaagaaggggaaaagtattttgcccttttaaaggtagtttccatgaatggcataacggtagaagagggacgcaaccggattacctttgagcatcttgtaccgctttctcctaataaaaaattaaatatttccaatggggctacacaatattctacccgtattatggatcttttctctcctattgggaagggacaactcgg

SEQ ID NO: 86951 - DNA, 353 bp, Heterodera glycines
ccctaatgatatcattaaatgcagcacatatcttagtcagcccaaacctaattctccgttcccaaaatatttttcacaaatttttgctatttaaacggaatccaattttgcaaatctttaaatcattgctcacaattaaataccaaaatatataatttatcttgaatgatggccaattcctctctgatgttgccaattttcactctgctcgccctgctcattgtgatccaattttacgccactgaccaaagctcaatcagtcgtgacctatcgcaattggatcgccaaattagtgataaaaagcaacgagcggaccaattgcgacaacaaattgcaagtgaaaagaacccggc

SEQ ID NO: 86952 - DNA, 346 bp, Heterodera glycines
cgatgtgaccatcgctaatggctccccacctcctcctgtgcaatttgaaatgggggcaaatcgattagaaaaaatgagggcacacctacgcgaacttgctgagaaaatgccggtcaatgaatcgaagcgtctgtcaccgagtggacccgacccacatcatcattagggccatggatggatctaacggaggaagaaagaatggatgcttagttttcagattttattctatcctcttttatttattagtttttcaaaacaaatttcttccacaactttttaaactatttgttgttttgaatctttttagataaatctaaacccccaaaaaaaaaaaaaaaaaaaaaaa

SEQ ID NO: 86953 - DNA, 565 bp, Heterodera glycines
cagtttgagttttaaaagattcgaattttgcaaaagttgcacaatttttccatttttactgttcccaccccgccgctacccagtttttcaataatcagcagaacaaaatgagcgcaacagagcaacaacaaccacaatcacagaagcgggcacgccctgccgaggaaaacggcaacgatgatggcgcggtgttgacaaaaacgcagaaagtggacaacggcgatatacccgcagcaacagcaaataatgaagccagtgcgaacaacaacgtattaaaagccaaactgaccaacaatgaaaagcctggcggagcagcagcagcagctgatgaggagacggaagagcaagggcacgaggaagaggaggagagcgagggcgagtcgggcgccggcggagaggaggacgaccaggatgatgaggaagacgatgaagatggtgcagagggtgacgatgatgatgaagaaggcgatgatgatgacgaagatgccgagggggatgagggcggtgaagaggaggaagaggaagaatgagcttttcgcatctgttttaagctaactcttctggc

SEQ ID NO: 86954 - DNA, 706 bp, Heterodera glycines
gtgaaaaagatgtcgagaaatctctgccggcacaagttgagcaaattcttcgcgtggacatgaccgctcaacagaaacaatattataaattggtgctgaccaggaactacgaggagctcagcaaaggcgtgaaaggcagcattaatgggttcatcaacataatgatggagctgaagaagagttgcaaccattgttgcttggtgcgtcaatatgacgaaattgaggaagaaccgcaggcgaggctgcagcaactgttgaagtcctccgggaaactcattttgcttgacaaattgctttgtcgacttcgcgagacggggcatcgggtgctcattttctcgcagatggtcatgatgttggacattttggaggagtacatgcggttacgccgatttcctactcaaagattagacgggtctatgcgttccgatttacgcaaacaagcacttgaccattttaatgctcctggctcacccgacttttgttttctcctttcaacacgcgccggtggattgggcattaatttggctactgcggacactgttataatatacgattcggactggaacccgcaaaatgacctgcaggcaatgagcagagctcacagaattgggcagaaaaaacaggtcaacatttatcgactggtcaccaaagggtctgtggaagaagagatcgttgaaagggccaaacagaaattagtgctcgacca

SEQ ID NO: 86955 - DNA, 592 bp, Heterodera glycines
attggtgaaaatacgagcaatcgttgggttagttgtgacatacttggacaagtgttcgcctggccacgaaaatgaacagacgttggatttgcaatgacattttgatggatttgttcccattctttaaccgtcctcaactcggcctcaaattggcacttctctcacctcgtttcaatttgctggtggacgcgcatttcgatggcaaaagcgaattgacaatttggagacaaatcagaattcacaaaaatggacccaaaacacaactatccgtggatacggctaacaatgccgattcggtgccatttccgttgcctgaccgttcgctgcccaacaaaattcgctttcatttcctccgcattggatgtatcgatcattccgtcatcactttcctccgttccaatcagcaaatttttgacggaagaggcaccaatttgcgtctgtggctccgtccggacgccaatgattaccagccaatttgggatgctttcgtccgtgaaatttggccgattttcgtgccaaacattcgccgcttgggcattccaaaaggcgatcagctggacaatttgcttcgccgtacttcgcccacaattct

SEQ ID NO: 86956 - DNA, 450 bp, Heterodera glycines
gaaagtcctcacgtgaccggccttaaacgagtgggtgcgctgtgtccattttggttcgcggctccagcaaattggtgttggacgaagccgagcgctctctgcacgacgcattgtgcgttattcgctgtttggtgaagaaacgcgcccttctgcccggcggcggtgcccccgaaatggaagtgtccgtccgcgtccgcgcagctgctcagacaaaacacggagccgaacagtattgctggaaggcatttgcggacgcactcgaagtggtgccatacactttggcagaaaacgcgggactgtcgcccatcgaaacagtgacggagatgcgcagtcagcacgcaatgggaaacaaagagcacggagtgaatgtgcgaatgggtgcaattacggacattcgcgaagaaaatgtggtgcagcctcttttggtcagttcgttcgccgtcaaacagg

SEQ ID NO: 86957 - DNA, 495 bp, Heterodera glycines
gaaaagccgcaggaaatggccagaaacaaatcgactttaaagaattcgtactccaatcaaagcgggcttctgctgttgactaacatgcgggaagacaaatgaaatttcatggcgggcgaagcaaatgaccgatttggactaccggagagaaaagccaaccagagactggacaacgaaagtcgcagaaatggacgaacttcggatagaattgctgagtttgctgcgcgttgacgtcgattgtattttccgaagcgtaaagccaaacattgcggtttgttgtgctgcactccaaaggtcgtaccctgacagaatttacgccaccgatgaaacaggcttggactatttgccatgcctgcagatgatccacaaatgtgctttgagctcgcgcgcgagtcgccgccatttgcaccctttcgaaacggtcgacagtgaaattggtgggaaaatagacgagtcgcataagctgcagtattacctcgaggagtacagcccaat

SEQ ID NO: 86958 - DNA, 743 bp, Heterodera glycines
catcgcaaaccgttgagcggcgaaaatgccaagcgcaggaactgttggatttgttaacgaacgttcgctggtgtgggaagacgaggaaaagatgatctttctattcgactacgtcaaaggtgccgcttcacgtggagagatcataaccgggtggtgcttaagacgctgaaggaccgcggccaatggcgcgtcatccggcatcctttggtgctcaattttgtcaatgaaaagctgctctcctgtgccctgttttacgttgtgcacattttgctttactttttgttcttggcactgctcttctcctacgtgaatggtcctccatcggtggccaaaaaccttttggtgtccacaattttgttgttcttcgtgtttttcatgttggttaaagcggcgcttaaattgcaatttggcatcagtgccgtgtccgcctggtttctgatctcctacacatggtctctgatcacttacgccatcactttgctttacatttggagttggcacctgttcagcttcgacgactacaacgaggagcttaaacgcacaattggctggttcttgcccattgtggccacgttggcctcctggatcaactgcttgtatgtgttgcgcaaggcgccctgcggctcctacattttgatgatgtccaaaattctgttctcctttctcaataccaccatcatttggatcccaacccttgccacgttcgcgttcgccttcatgctgatcatgcgcgattcgggcac

SEQ ID NO: 86959 - DNA, 670 bp, Heterodera glycines
cattgtctttcttaccaaaggccataactactttggtaaaacacaatgttcaaaggagatcccaaacacatcgtcgaccgtcctctgttgaaaagtgccacagaaacagtcgcaaagtttaagacactttttaatgtgacagaatggaggaatgtaaaggtgcccgaattggaccgcgcaacactaaaaacatttgtgcgagaacacttcggtaaagcggacgattttctcgagagcccacaaccgatcgattggaaggaaaatccaccgaaattgcaaaacattgcggacccagaattgaagacttttgcaaatcaactgcatgatctttggaaggaattgggcaaaaaaatgccagaatcggcgaaagaaaataagtcgacgctgatttatgttccgaacccttttgtggtgccgggaggccgtttccgcgagttttattattgggacgcttatttgatcgtgcggggactgctcgcttcaggaatgaccgaatcggtgaagcacatgtgtgacaattatgccgagatggtcaagaagtttggctttgtgcccaacggcggtcgcatttactacaacaaacgttcgcagccgccctttctcactttcatggtcaacgattattttgcggagaccggcgacacggaatacctcaagagcattctgccgg

SEQ ID NO: 86960 - DNA, 533 bp, Heterodera glycines
taatttaaaaaaatgaggaaacttccattcttgctcttattttctgcttgttgctacttgcaacggaaggaagtatatttcgccgaaaaaacagaaagaaaaattcatcgagcagcgaacaaaaaacacaaagaagaaaccgagggtatggccgaagtcgcactttttcaaatggcaatggcatgtatggccaatcgaatggattttcaaatggccgatttggcggctccagtgtctattcaaatagcggccggtcgaatagctttccaaatggtggatttggcggctccagtggcttttcatcgatgggacataactcgggcggacttcacggctttgggtccggcccaccttctggaggctacggatacggaagcggttttggtggaagaaaatgaaaaaaagaccgaaagtgatcggcgagagaatgatttgtgctgttgccttttatgcatgcaaaatttaaatggaaaaacgcatttcaccagcagaacacttttttaaatcaaatcacagagaattaataaaaagaa

SEQ ID NO: 86961 - DNA, 429 bp, Heterodera glycines
taaaagatccgaaaaaatgccaaacattttcaaaatccttctgattgtgcttttggccgtcgtctcattccgtctctcggcttctactggtgacaaaaaaactgctaatgatgggagtggaaacaactcatcagctgggattggtacgaagatcaaaagaattgtcaccgctggactgctcttcacttccctggcgacgggtggggcggaagcgattgggcgaagcaatgctcagggaggaaatgccgccggattggtgccatcgcatgtgaccaatcgctcaatggctccaccacctcctcctgtgcaatttgaaatgggggcaaatcgattagaaaaaatgagggcacacctacactaacttgctgtgaaaatgccggtcaatgaatcgaatcgtctgtcaccgattggacccgaccctcatcatca

SEQ ID NO: 86962 - DNA, 276 bp, Heterodera glycines
gtgagggaagacaccgacgtacatcccgagcgaagggttctaaaatggactaccgatttatgcccgagcccaatttgccccgcctcaacatcgactcggattgggtgaaagatgcgaagcgaagcgtaaaaagggaactgtttttccatcaatgcgttgtccagttcggctaccctccgtcgttcgccatcgaaattatgaatgatgccaaaatggagacttttattcgccattacacctcttctggcaaaatgttgcctaatgattgcttttttc

SEQ ID NO: 86963 - DNA, 192 bp, Heterodera glycines
atgttccactgaacaggtgccgcctatcagtccaacatgaacaacccccagcatgccccgccacaaccgtcgccgggcgccgcgccggccggcaacaccaccaccacttacgtgtacatggcggacgggggacagccccactgggggcctcggccgcaaaatgtcttttgctcgaactgtcgccaacagggg

SEQ ID NO: 86964 - DNA, 357 bp, Heterodera glycines
cgaatccccccccccccttttttacttaaaacgcgtctttccattgtccgatgattctgcaatttccattcggggattttaatgttttgttgctgcttacaatcagcactgttcttttggccagatgtttaggcacaattgtacagtttgaagatgaattagaattgatggaaaacaccgggacggcggatgaatccgccgatggtccgttgggtgctttttgggaatggcatcggatggtcactggggctgacaaattcggctccacctcgcagcgaatgcttcatctgcgtccttctttgaaagtgccttccgtctccaagcgaattgccttcccttcgaccgccttcccaaatc

SEQ ID NO: 86965 - DNA, 97 bp, Heterodera glycines
tggactcttttgtcgtcctaagaaaattaaaaaaaaagactaaatattatggagaatacaaaagaaaatgatggaaaaaccgagggacacttgttct

SEQ ID NO: 86966 - DNA, 691 bp, Heterodera glycines
attttatttatgtttgtttcttattttaatcttttaaaatgccgaaacgaagaagagatgcttttatgggagaagacagtggccaaactgagggaagcagtggggggccttcagttgctgatcatcagcagcagaagaaattgcaagaaaaatgtgcaaagatggaaatggaactgaacgtcaccaaattggagctcgaaaatagggcacttaaagccgaattgaagcaaagagaagtgatggatgaactcaatgctctgaagaagaaagttgccaaaatggaagagcaaaaagaggctgctgaacaacgattctcacaatttcaaaatgagcagaaaaaaattctggaaataatcagtgaattggagaagcaacaaaaacagcagctgaacagaaacacgacaaaagctatttttgaacgattttcaaaaataaaaattgatcaaaatacgctattcgaaaaagtcagagcattggagaaagaacaggagaaaggaaaggtgcttttaaattttcgaaaaaattgttgggatgccatcgcttgtcccgaggggatcgaaattgttggcgataagaatttgactgtccatcataaggggatatataaatttataaaaggtcgacgtccccccgtcttcgcaaaacatccgatttcgttggacaattcgaccgacaatttttactttgaaat

SEQ ID NO: 86967 - DNA, 638 bp, Heterodera glycines
ttcttttatatacgctttatccaaaatttttttttaaattttacattaaaatgatccatttgcttacgcttacattattgctttttccacattggcattgtcaaagctgaataccgtcaattttaaaagcgatgacattgtgctgctagatgaaatccgaggtgtagcaggcaaccaaaaagaaaacaacgacaaaaacagcgagttggccaattgggcggtggaaaaaggatgcgaaacaattcaaagtttggacaaatatttagaaaatgacaaaattgatgaatacactgaggaaatgaaaaagtttggccaaattgttttgcaaatttgtaaacaaaaggaagtgacaaatgcccaactgatttcttccaacttctgctcaccagcctgagtttggtgaacagtgaaaattccatcaagcatgaaaatgccaaagaaagtttggcgctttctgattatttaattaatacaaatgcccctgttttggcacagcgccgacacagacgtggaattccatcaaaactcgtcaaattaggactgattttagcgctgtttgcaattggcacgaagaccgaaagtccgaaaatagtaatgcttgcttgctatcttggatgcatttactcactatatttttt

SEQ ID NO: 86968 - DNA, 280 bp, Heterodera glycines
gctcaaacacctaaagacgtgatacaggagaaaatgaacaataagcttggtcgtgccttacgtgaaattcagttcaatacgctctctacttcaacgctcactaccatgggaccgggccatctgcatgggccaaactaaattgctgcttaatgttcctggagtgtcacaaaatgatactgatgctgaatattgtggcgtgtttcgagatgttgctgctatgaaactgaatggaatataggggatagtcgaaagctggttgtgattttgagggagcaatgag

SEQ ID NO: 86969 - DNA, 393 bp, Heterodera glycines
tggattaattcgctttatcgttaaatgtgccgactccagcaactcatctgctcgctcgactctttctgcttcttgcgctttgcactgctctcgttagctctctcacggctgttgccccgccattcggccaattgtccgtttccggcaccaatttggtcggcgccaacggacaacccgtacagctgatcggcaactcactgttctggcaccaatggtacccgcagttttggaacgctgacacagtgaaggcactcaaatgcaattggaatgccaatgtcatccggggggccatgggcgtggacgagggcggctatctgagtgacgcgaacacggcttacaatctgatggtggcagtgatcgaagcggccatttccaatggcatttacgtgatcg

SEQ ID NO: 86970 - DNA, 374 bp, Heterodera glycines
gcaggagaaacggcattatcggcacgtgcctgatgatgagacaactaaacgcgagtacttttgctgatcagtggacatagaaaatggccaaattcgattgcatgaattaggaaatggataaatgccatggcatcgccaaaattcaattattcccgctgaaaggcatggcaataagaaactctcacttctgctgtctctgattatagtgattgatatctgctgatagtatttgatcattccgatcaactcaaacatttctcttctcatttatgcctttatttttttaaataatgaaaataaaaataaaattattcattgtaatgttttttgagtttaatatttaataagcaaattgcagaataaaagtcgtcaaa

SEQ ID NO: 86971 - DNA, 678 bp, Heterodera glycines
actccgtggaaatgaccttttacagccgcgtttttactccgtctttttgcttatgcaaattcggatgcagtcggaaaacgcgagaaatctgaaacaagcgatccgaatactgagaaatcgaaggctatacttggaaaaaaacagcaattagtggacacaaacgatgttcgaagtgaagtggttcgaaggaaggctgcacttaccttattaaaagctccgtttgtattgaaaaccaaacacaaaaatattcaaacacctgaggaacaatcatccgatgatacgcttgtgttcatgcgaattctcaaaagccttacattttttaatgttcaacttcttagacgtcttcaaatgctcgacgaaaagtgctttttgcacggttttgcccaattcgctcttcatttgagccaacgcgaacccggcaatttgcttttcgttagtttgttgcaagaaggcattttccatcggtactttgctaaacatggcgatctttttcatcatgacaatctgagtcgagcaaaggatgattggatttgtattttggcgcacatttttacggctaaaatattgccattttacgtcaatttacaagggacaaatgagtcaatgcctgtcttgcctcctcttgacgagtcaatcgaagcacacattgagaagcataatcgggaagtaaatgaactg

SEQ ID NO: 86972 - DNA, 689 bp, Heterodera glycines
  unsure (1)..(689): unsure at all n locations
atttgtaatcgaaaacatttctctttttttgtccaaaaaaaattaaaatgactaaaaccatttcatttttgccgtttttccttttggctgtcgttttcgttggcttcggaaatgccggcgtaattcattcacaattgaaaaaactcgaagagcgctatgtccatggacgagcacaatcaccgcaacatccctcctcatcatcaccagcagtgaaaccatcatcacccaaacattcttcttcatcttcttccgatgacgctgataatgaagaaaccgatggatgtgcgtgccctgctgaaaagccacaatcaccgcatcattcctcctcatcatcaccagtgatgccatcatcccccaaacattcttctttgccttcatcacccaaacatcattcttctgaggatgaaacggaagtgaagcaatcaccacctcatcatcattcatcttccgactcggaaaaagaagaacaaaaacttcatgcctgattcataggcaccagaaccagttggatttgaacagatgaatttgagaagtatcatctgctgacgacaaatagggaaactttttttcaaatattaccattttacgaatntccacctttttaacacacactttctttcttttatatcatagattaatgatatggaaatttttattctatcctttaaaaatgtgtcgtcttgaattgt

SEQ ID NO: 86973 - DNA, 507 bp, Heterodera glycines
cagtgtgaagaaggctgttgaccagtgttcgtcgccaagaccgggcggacatcgctttggagacgtcttgagagcccgctgacaccttctcccaggaggcgcgaaaggccaacgaccagatgctgttcgtgatgaaggacaagaagctcaactcggaggacaaagtgcgcaaattggaggagtgggccaacactttgccggagaatgtgcgcggagagctgcgcgtgcgcgacttgcgcgagctgaagcagctggtgcacctgtacaacggactgacgcccgtcctgcaccagggcatccaaggcggcatctgaacggaggaagagaaagggaggaaagggggcgaccggactgatcggacggaccgaaagtgatcggtgatctgttgtcattgtgaacgaaaatgccgcattccattcctaatttatttaagtgggtattaaacacattaaaatgcattgcaaaatgaatttgttccatctcacaaaaaaaaaaaaaaaaaaaaaa

SEQ ID NO: 86974 - DNA, 693 bp, Heterodera glycines
  unsure (1)..(693): unsure at all n locations
acatccgatgtatgtgaaggtgatacatccctacggcgaagtgttgcacgtcgactggaccaaacagtacaaagcattgaggggcaaaattggcattgcctttcccgggtacatgatccacgagtccggccaatggtccgacattcacaagaaatggtttttcttgccgagaagagcgtcaaacgacacttattccgaaacggaagatgagcacatgggcaccaatttattgctgatagccgacgaggactttgaacatattcaggtccgtcacattgggccccccggcgatggcttccgcggtttctccgccttccaatttttgccaaacaccgaagatgacatcatcgtcgcgataaagtcggaagagcgaggcggcaagccaatcgcctcctatttgttcgtcttccgtctcagtgatggccatgtgctgttggacgaccaaaagtttgacgggccctacaaattcgaaggggtcgtcgtgtactgacagagcaaattgggcaatattgttgaggagtcagagtttgttatttgtgtatttaaaaaagagcagacaaaacgccgtcggcggaggagaaaaagctgacaataaatattccatgaaattttttaattaaaggcatttggaaccactcgaaaacgcaactatntttttttgcttttttaattattttgcccacctcatttggc

SEQ ID NO: 86975 - DNA, 602 bp, Heterodera glycines
acccgagctgatcgcgagaagcgccagacaaccgagctgatgaggagaaccgccaggtagacagtgctgatcgggagaagcgccaagacaaccgagctgatcgcgagaagcgccaagacaaccgagctgatgaggagaaccgccaggtagacagtgctgatcgggagaagcgccaagacaaccgagctgatcgggagaagcgccaagacaaccgggctgatcgggagaagcgccaagacaaccgggctgatcgggagaagcgccaagacaaccgggctgatcgggagaagcgccaagacaaccgagctgatcgcgagaagcgccaagacaaccgagctgatcgcgagaagcgccaagacaaccgagctgatcgcgagaagcgccaagacaaccgagctgatcgcgagaagcgccaagacaaccgagctgatcgcgagaagcgccaagacaaccgagcaataatgtattaagccattacggatgacattagattttccgacaagaaacgtctactatgaaaatgtttcaataatacaccgaaccttattatgtaaaataatcaaataaaattttaagataaaaaaaaaaaaaaaaaaaaaaaa

SEQ ID NO: 86976 - DNA, 670 bp, Heterodera glycines
gttaaaatccgccggaactttgccctcgaattggcccgcctttatgtggcggaaacggtgttggccatcgaatatttgcactcgtgtggcattgtgcacagggatttaaagccggacaatttgctaatcacttccatgggacacataaaactgacggatttcggcctctccaaaattgggcttatgaatcggactactttggtgtcggaaggttatctgctacaggacgacacgcagcagttcaaggacaaccaactttgcggaacgcccgaatacatcgcaccggaagtgattttacgacagggatacggaaaaccggtggattggtgggcacttggcgtcattctctacgagtttttggttggaattgtgccttttatgggagatacgccggaggcgttatttgccaacataattaatgaagacgtggaatacccggagggggacgaggcattggattcggatgctgagtcgttgattcatcttttgctggagaaaaatccgctggaccgactcggcaccgtcggcggtgctccccaagtgtccgcgcatccgttctttgcaccactcgactttgacacaatcttgcggcagaaggccgagtttgtaccccaactcgagaatgacgaagacacttcctacttcgactcgcgctccgaccgttacaacc

SEQ ID NO: 86977 - DNA, 664 bp, Heterodera glycines
  unsure (1)..(664): unsure at all n locations
gcatttctggttccgtcgacatggcaccgcggatgctgctgctattcagcatcggtttagtgatggcatttccgtctcgtcaatgccccgtgctctgatcaatcgtcaaccgccggtgatcagtgcttcgacgaaaaaaacgggccgcaaacgcatgtcagcttcgtcgagtgcctttgttcccgaagacgaggaagacgcaccggccgcctatcgcttgccatcgaatgcgatgggtgacgcacggggacagaagcggaaaaggtccgtctcttcatccagcagttcttcctccgtctcctcctccgattcttcttcttcctccggctcttccagctcgtcatccgcttcatcacatactccactgaaaaacgcaaaaccaaatgcatcagaacatccatcaaaaaggacgccgaatgagagggagaaaagcaacgacatgagcggaagtggtggcacgaccattagctgctcaactgtggaccaattggcgctcaaagtgacaaaggcggagcaacaggaagtaaatgcgcaaaacgtggcgcaaatggatgacgaaagtggacacaaacaattgagcaaaaatattgcgacaggagaaagaaaaaacgtcaaaactgaaaaagctccctgcaattcttcccgtttggccgatggggacana

SEQ ID NO: 86978 - DNA, 687 bp, Heterodera glycines
gttgcttatcggacaagctgaaaaaactagttaactcgtaatatttgtttttaattactgggccgaatgttggaatggctaactgagcatggaaagcctctcagagtgaaggtgaccacgatggacgctgacctgaacgagctcagcattgagagggattcgctgggccaacatctgttcgacaccgtatgcaaaatcatcggccttcgggagatatggtattttgggttgtgcttcaccaaccgcaaaggcttcacctgttggcttcaaatggacaaaaggataaaagaccaaagcgtgccgaaacaggaggacggctcgctgcacttcctcttcctggtcaaattcttccccgagtcggtgaaggtcgagctgatccaggacctgacccggcatttgttctttctccaaattcgccagtccattctctccatggatttgtactgtccgtcggaggcggccattcttttggcttcctatgcggtccaggcactgtacggagacattggccaacaacaacagcagcagcaaccgcaacaacaacagcaggccgatcagcaacaacaacaacaacagcagcaacagttggatttggccaaactgttgccggtgtcggtgctgcaacaatacgaactgacggccgaaatgtgggaacagaaaatccgcaattggtgggccaacaacagc

SEQ ID NO: 86979 - DNA, 326 bp, Heterodera glycines
cgccttataaaatccgggctgaagaaatgtacgatatttttggcaaatttggtgcaatacggcaaatacgaattgggaatacgcctgagtcacgtggtaccgcatttgttgtttacgaggacgtttttgatgcgaagaatgcctgtgatcacctcagtgggtttaacgtgtcgaaccgatatttggttgttctctactaccaagcgacgaaggcatggaaacggatggacacggacaaggctcgcgtaaaattggaggaagtgaaggaccgctacggattgggcggagacattgagaaaaaaaaaaaaaaaaaaaaaaaaaaaaaa

SEQ ID NO: 86980 - DNA, 627 bp, Heterodera glycines
atctgactccaatctccacaaaatggcatttattcgtttgaaggacaagtcatcaaaaggataagcgccttcccccgccccgcaaatcattcgttccgacttttgggcttctccaaaagtgactgtctcatcagcattccctcttcctccctttgtcacatcataaaaccctctgatgagggcgtctcattctctgaaaattcggacagtttccatttgtttgccgaggttctcggctcagaaaatcaaattgccattctgagggatgagcaaacggatgaagaatttgtgcttaaaccatacagggacgacccctccaaacggtggatgctttgcctccaattgttgccaagtgcgacgataaaatggcaaacagtcagccaacaacaacagagcccggccaaagttgaatttcccgaagtcagttataagcaaagtgcgtcgactagaatttattggacggatcagcacggcattcagtcggatgtgcagagattgcaacgattacttaaaaggaccgacagatcggaacagttcaggcaggaattgagaagaattgcgacttatgcaaccgcgttgggttaccataattttgcgagtgtttttgcggaagtgatcgaacgaatg

SEQ ID NO: 86981 - DNA, 585 bp, Heterodera glycines
atctattcgccgtttttcgtctctttgttcgattttctcttctgacaatgccttcaaaaatgacttttctgtatggcgtgccattgtttgtcggctgttgcaccattctttggatgttttgggaccgattcaaaaaaacaccaaaaccaccagcagaccaaatttgcctcgacaaaatgacagacaatcgaaaagaagcggcggaggaagaaatggcaaaagtggaggcaaaaatggaaaaagcaatctttatctctggtgactgttggctagccgtgttcgatttgcttccggcttatcaacttggcctcagaatttcgatgatcagccaccgttttaacatctacgtggacgaacacttcaaaacccgcaaatggggattggattttcttcgaattggaagcaaaattgacgagaatggcaccaaggagatggaaattgtcaattacgatggtgaagaattgccaattccgcaaaacgaagtgccacacaaagtcatcggattcgaatgcatcatcatctcattcatcgaccgaaatgccattgcttttctccgccgttttcgccaactcttcgccactcgtc

SEQ ID NO: 86982 - DNA, 121 bp, Heterodera glycines
tatgagagtcgcgactctttcttcaacttaaagaaggagaaagtgatcgcaagaggaggaatttgctgatcactcccttaaactggcaaatgccctccctccgtttccctcccccgcccct

SEQ ID NO: 86983 - DNA, 594 bp, Heterodera glycines
atcgtaattaactcgtcgtggctggtctcattgtccttctgctggacgaattgcttcagaaagggtatggacttggctcgggaatttcgctgtttatcgccacaaacatttgcgagaccatcgtttggaaggccttttcaccggcgacgatgaacacgggccgtggcacggaatttgagggggcgatcatcgcacttttccatctgttggccactcggaatgacaaagtccgtgcacttcgtgaagctttctaccgacagaatttgccaaatttgatgaatctgctggccactgttctagtttttgccgtcgtcatttatttccaaggttttcgtgtcgatttgcccataaaaagtgctcgctaccgcggccagcacagttcctatccgatcaagctgttctacaccagcaacatccccatcatcctccaatctgcgctcgtctccaacctttacgtgatctcacaaatgctggcggccaaattcggcggcaacattttggttaatttgctcgggacgtggtccgactcttccggcacatatcggagcttcccaaccggtggtatctgctattatctgtccccgcccgagtcgc

SEQ ID NO: 86984 - DNA, 531 bp, Heterodera glycines
gtggaaagcagtggaaattgcttcgtttaaggcgaactatcggccgaattgcaccaagtcaaactctcaaatatggacagacgtgctttcgattcggcaccaaacaaagaatttactccccacgaattggaattgcgtccccatttgtccttcttggaacggtaccgagaggacccaaattcgaactcatgcatccgtttggaaaatgttcccaaaatggtttacgcggaacaactcgccgaatttctcggtgtccaattcgatgcgccatatgaaaacattgcgcggatgcaaaacggcgtcctttacattaatttggtaagcatttttttgcaaaatggcattttcaggaaacccttgagctcaactcgccttttgaggcggtcagcaccgtaaatggacaccaatttatgctgcagtcgtccaaggggcggaatccgtactgtgagacgtgtctgggcacaatttggcggcttgcgcagcactggcgaagatgcaaaagttgtggttatcgaacgcatgagaaataca

SEQ ID NO: 86985 - DNA, 614 bp, Heterodera glycines
agtcggcgtcacttgcgaccgatgtgcgcccgagcgttaatttgtcgccccaaacccccaggggtgtttgcgctgcttctgctcaggcgtcacgcgcgtgtgcgaaagttcgcattggcgccgcaaccgagtcgagctcgattatgcgcgcggagaccgcgaccaattggaggcgaccacgtcggacgcgcacagtccgtacaagccgccgacgcaaccgcaggtgtacgatggttccatcagtttcaacgggttttatgaggcacgcggtcaaacactatactggagcttaccgcaaaagtttctgggcgacaaagtgaccgcctacggtggcaaactccgctacactttccgcttctccggcgccgggccgctcaacccggacgcggacgcgatcatccgcggcaacaacattcagctggaatatgtgagcaggcagcaagtgcacgcggaccggcccaatttggtggaggttccgatcactgagctcggctggcgccactccaacggcgtctccgcctcgcgcgagcagctcatgatggtgctggccgacctggacgcgcttctgatcaaaatgagttacatgcgcgagtgctcgcaagcgtcgcttgtct

SEQ ID NO: 86986 - DNA, 657 bp, Heterodera glycines
gacttcttccgcacggtgctaacaccggtgatgcctcctatttcttgtccattctcttttcggctgtccacgtcttgaagcacccggagagccttcgtcggctgaagaacgtcgagttggcccgtagtcagtgcggtggagtgcatcagtcgtatcctttcgccgactttatgggctcgcaatcgactctgcaagactttgacgattccgacctcctcttacgcgtggcaattctcaacgaacacgaagggaccattgagtatcattctttccccattttgccaaaaatgactgtggcgaaactttgccgaatgattgcccaccaattttcggttaccaatcccgaagactatcgactctacctgatctttgacgattacgaatcgcctcccctcgagcccactcaaattcctcatttgctgcgcagtcaaatgaacgagacggaacggccacaccatttgttcgtctacaaacgggcggacgtgaacatttcgtacccggggcaagcggtcgctaactttttcgcctcaaacacgacggtgctgatgaatccgccgccattagttgtcacaaatatgaggaaccatcgatgaaaaaggacaaaagggtccgattgttcagattttgttgggcattttgttctcgccacatggtcct

SEQ ID NO: 86987 - DNA, 667 bp, Heterodera glycines
caaccgggaatcgcattgacacttaccgattgcgttgagtggttcttcatcgacgacaacaccggcaaattcagcgaccgtttttccgatgatcagttctcattgttcgatgcgatccaccaacctcgtccgctggtcaagagcaacgtgcgagaaatcattgacatggcaaacaatcggcggcttactgttgcggaagcggtgcgtgcgaatgtcttgtgccaagacactggaagattcatcaatgtgcacggacacgctgagtcgctgcgtgatgcgcaccaactcaatatgattcaaaagccgcagactttggtcgaggtcattgagagtggctcgctggacaacgatggtcgtttcatcgatggtgtcatacctcgcactctgctcgaggcgatttgctcgggaatgctcgacccggatgtggcgcacatcaaagcgggaccaggcgatgagctgatttccatcggagaggcgctgaagcgaggccgattgacgccgaaaggagaaattgtgttgactctgggtgaagttggcatacacagaggagagaaaattaatttgttcatggcgcacgaacggggccttttgaccggccgtgttcgacacaccatcttcgatgtaaaaggagtgagaaatgctgcggatggttcaattatgagcttca

SEQ ID NO: 86988 - DNA, 660 bp, Heterodera glycines
gatttacgagtgatcggaagggcgaagtgctggtgaagggaccgtcggtgaccaaaggctattaccgcgacgcggaaaagaccgccgaattgttcgatgagaacggctttttgcacaccggagacattggccaattgttgccggatggacggttgaaaatcatcgaccggaagaagcacattttcaaattggcacagggcgaatatgtggcaccggagaaaatcgaaagtgtttatgtgcaatgcccacttgtccagcaagtttatgtggacggcgacagtttggaacgaaatttggtggcgatcgttgttccaccggagaaaaccctcaagcgattgtacaaggaattgcacggcacagcccaaaatggcgatttggagaagcgctttcaggaaatttgtacggacaaaaagattgtcgaagctgtgttgaaacaaatgcaacagatgggcaaagagcagaagctgagcagcattgagcaggtaaaggcaatttttctcgaggtggagccgttcagcgtagaaaatgggcttttgacgccgacactgaagtcgaagaggccccaacttcgacaaaataccgggaacaaatcgcggcactgtacagaacgggcgaaaagtgaacgaattgccattggaaagacggagaaaaatgcctcat

SEQ ID NO: 86989 - DNA, 622 bp, Heterodera glycines
catcttttcgatctgtcgcgagcgaagtgggcttaaaacgttggatgcgttgtgcgttttcggttttccgcatttcacgccgcttcgtcagggcgaatggacctttcagcctgcctttgttgaccacctttactcctttgctgggcaacgccttccctcggtgggccactcaaaaaacggccaaccgacagacggagaatgccagggatggcccaaggcaattgccatggccaatgcttttaaaaatggaccaacatcggcgaagtcggggggatcaggaggagagcatcagcagcaacgacaaagagcggcaaaccgtcgacaaatgggcaaaaggggcgccgacaacggcgatggcaatggaaaagctgacggcaagatcgacgacgacgaagcgtccaccgtaatggaggcgaccataatgcaatgtcggaatgccatcggcaacatggtgcagagacgcccttgtgtggagccaacgctcgtcaaactgctcaaaatcattcacccattttacggaagtgagaaggaccacgaaagggcacgagctgtggatttcacagtgttgattctgcacatttattcggaaaatgcctccgactgttcgttgggcgttgccaat

SEQ ID NO: 86990 - DNA, 768 bp, Heterodera glycines
  unsure (1)..(768): unsure at all n locations
caccgcgtgtctgaagttcgtaattacgcctttttcttctggcttccttattacttaacctataatataatgggctgagtcggaggcgaaccaattgtccatttggtatgacattggcggaattgtcggttctgtgcttggcggattggcttcagaccgactcggtcaccgcagtcccatcattctcctgatgcttgttttgtccgttccgttgttgttcatctactctggccttggttcctcgcgggttgagcacgttattggcatgtctttgctcggagtgaccatctcgggcccatacaatctcatcgttggcacaattgccattgatttgggttctcagcaagccttggccaacaatgctgaggccctgcctaccgtaactgggctcattgatggcattggctcggctggctccgcattgggccaactttttgtgccgttgattcaaaatgaacttggatggatttgggtcttccatttttttattttaatgaactttctttcatccatgtgccttatccgtcgtttcttccacgacgctcggctcatttccctttcgtttgctccgaggcaaaatggtcgtcggcaagagaacgagccgctgatttcgaataactgaactgaaattgctattgtatttaattcatataatgccaaatatactcttaagtcgccaaatgatgtaaattttgtttttgttgacttgttattttgcaacacattccatanaattgccacacattaaaaatttgaatagctttttga

SEQ ID NO: 86991 - DNA, 236 bp, Heterodera glycines
tccttttcgcgtaaacaaaattttaatttatacttgctgagcaagtggatatttaagcggggtttccttttgcaattaattaattgtaattaattgatcgtctccccatggcttcttcactcaccattgaaaaacgctgcaaacttttcaacacaaaacaaatggaatgccaattcgatggaactgaagccggaaaatgtgctttttgtgtaaagcttccgtgtaaatttggatca

SEQ ID NO: 86992 - DNA, 479 bp, Heterodera glycines
tttcctttctcgtccttccatttgccccccccctaaaatgccgttcaattgcgaatttgccggcggagtttgtgccgagatcggtcaagtgctcgccgtttggctcttccaatggatgttcatcgatttcgcctttgtcggcaccgctctgttccttctcctccttttgcatcgttcgctttggcctttggctctgttgtacttctgttggtactgttacgacttcaacacaccgaaaaaaggctcacggcatttccgttggcttcgaaatttgcacttgtggaaaagtgtggccgaatattttactgtggaaacggtcaaaacggcggaaattcccccggacaggaattacattttctctgctcacccccacggcgttttaagcatttcctcggcgttggcctttggcaccaatggcaccgacttccaaagactgtttcccggcatcgaatggcgcgtggccaccctccccatgaatt

SEQ ID NO: 86993 - DNA, 458 bp, Heterodera glycines
acgcccatcccaaaaactgataaaaaaaatggcgttcctctcccgtctctccatccttccaaattcgccaatttcgctgcttgcagtttctttggccgttttggctttcgtcgctttggcatcggccaatccgccgacggcacgcgaaacggcgccaaatgcgcagcaaaacaatgccaattcagtggcaactggggaaattgcgaaaaatattgcggaaaagatggagcggatgaatgagttcattaaggcgaagaagttcatcgatgcacataatttggcatttgagaagggcgaagtgtcgttcaaagttgcgccaaaccatctgatgcattttacacctgcccaatataatcgaattcgcggcttgcaaatgcgcagcaaccgacaacggcacaacatggcaactctggcgggaaacagcagtactttgccggaaaagttggactggcgcgaga

SEQ ID NO: 86994 - DNA, 216 bp, Heterodera glycines
acgaggacacaccgacttcaaattgaggtgtcaatccgcgcaacacggagtccgtccaattatattttcgtggccaaaaaactgcaaaagttgtaggacaactggcaattaatgtgccggaggatgggagcattgtgagcggcattttggtgcggcgaaatttcaattaccatttgttgcatccgaatgaactcagcgcttacactgacttggcca

SEQ ID NO: 86995 - DNA, 711 bp, Heterodera glycines
tcaagaaaagtccccgattcgattgtttatcaaaatgactggcaaagaccaagtgaaaaatgaggaggaagaattggtggaactgaaggacgatgactcatcactgttccgttatgtgcaagacttgctggtgacgagtcagaaatgcggacaatcgccgaatgtgtttagtgctgatgcgaattctctgatttgggaaaacacttttacgctgatttattcggttaatgagaatgaggcggcagaatgcccaacggaggacacggaggaggctatgactaacaatttggacgagacaaatcctttggttgaacaggcattgaacgtgatcaaaatattacacgaactttctcgctcaattagcaacttcgaccaaattattggtgttgaagtcacttttccgactcttcctgaagaatcatttcatagtacaaaattgtcgcaaaaactttgccaagaactgactgatccattagtggtttctgcaaaggcgttgcctaattggtgcaactatttggtacacaatttcccatgtcttttttcgatggacatacgaacaagttttatgaacacgacagcttttgggacctcacgggcaattgcgtatttacaaaccgctttcaacatggcaggccttcgaagagatgaccattaccctgagtacagaataggacgagttaaacatgaacggataaaagtgcaccggtcgcc

SEQ ID NO: 86996 - DNA, 463 bp, Heterodera glycines
ctcctctgtttaaagcccttttttaatcggaaatgaatccaacggttttttctttgttttagcggtgctctttcttgtcaaagtcgactttttacagtgcaaatacaatgaaccaatggcacgacaggtgctgcaaaagcatgcatcacaatttcagcagcattgtaaaaatgcccgcagaggaagtgccgtggccaaatgttgcagtgccatcagaagcataatgggccgattcacaagccaaaaaaaggcaatgaaccaaatgctggccaagtgtaaagcgggcacaacgccaagcgaagcacagcaaatgcgaagaaaattggaaggatcgaataaactgaaggattgtggccagtttaaaagccaaattcagcacaagttcagcgggttgaagcagtactgctacaatggggcagaaaatgcggaggaaaacgacgaatgatcagagagggagagagaa

SEQ ID NO: 86997 - DNA, 534 bp, Heterodera glycines
  unsure (1)..(534): unsure at all n locations
gggcgcatttgctgaagagaaaggggacggacagaacggaattaatggncaaatcatccttacgaatgcgtggtaccaacccgagctgaattccatcactgtgcccgcctccatcctggcgcagcccttttttgacaccgaatggcccgaagcagtgatattcggcgcaatcggcgttgtgcttggccacgaactcagccacggctttgataaccacggggtccaatgggacgccgaaggtgcggccaacaaatggatggacgcgcattcgcaacgcgcattcgacagaatggccaaatgcgtggtggacgagtactcgcagctgtgcccattccctcccgatggcattgttcaacccgcgtgcattgacggagacaaaactcaggcggaaaacatcgccgacaacggaggtctccacgccgccttccgtgcctatcgctctgcgctcgaagtggacggaccaagcaaagcgttaccgggcaaattggtcggccgcttcaaccacgaccagctgttcttcctgttctttgctca

SEQ ID NO: 86998 - DNA, 272 bp, Heterodera glycines
gcaggaagaagcgcacatggtggaagagcatagttggtcgaacgtactctcgaatcctgttcaaaatgtatcaacagcaaactgtttgagaaacacagtattgttgcctatggcctaaagacatatctctccgtggtcaattgggacggtctttcccctgagcattgttacattgcgccaatggcacattgtgcgagtcttgtgcagatggatgaggatgtgtatgaagagatgaaattgtggatgaagggattggtggcgatgtggcggga

SEQ ID NO: 86999 - DNA, 469 bp, Heterodera glycines
gcaactttctaaatactttgactatgtcaaatttcggctacgaccagcagcaggtccactcctactatgtccagggggacaacccctacgatcagcatgcggatttggatgtgccgcaccgtcccaagaatcaacagccgtttaattcgcaacatttcgcggagcaaggcaaggccgggatgccgaagaacgacctgggctttaacgaccagacaattcgttcgcgttttgtgcgcaaggtgttcttcatcgtgggcattatgttgtccgttgtcactctgatgagcgcttttccgtttatgtgtcagccaatgatggagtttgttcaacagcatccagtatatgcgattgtggcatatctcatctttatcgtcgtttatctcgtgttgatgtgctgcggccatggaatccgtcgatcgttccccattaacatcattttgcttgccattttgactttttccattggctt

SEQ ID NO: 87000 - DNA, 568 bp, Heterodera glycines
aatcggcgcatgacaacatggaagaatcggtggaaagcaacaacagcgaacaaataaacacaacaggaagttgaacagctaaaacagctcgaaaatcgggaggagggagccaaaaatgggcaacagacgaacgaaactgttgccattgaggaggaatggacaccgacaagtgaatgggtggagtcgtggaagaagaagttgccactgcagacgatcatgcgagtcttgcagattttggtgccgcaagtggagaaaatttgcattgacaaagggctcaccgatgaaagtgaaattctgaaattcctccaacatggaacacttgtcggacttcttcccgtccctcatccaatactcatccgaaaatacattgcgaattctgcaactaacaattggttcagaacatacctttggggattcgtttattgccgtaacatcgacccaccaatttggtttgacagcaacgtcactcttttcgaaattcagcgattgtgaaggaatgaaaatgaatggtttatgcactgacgaaaatgcatattaagaaaaaaaacctattgctgatcgagcagct

SEQ ID NO: 87001 - DNA, 625 bp, Heterodera glycines
acaaagagcttaaatacaggacaatatcttacaaataaggacaaagggtaaccctgacttagaatcttttaaaatgactggcttgtccgaaaatgtggccttttcccgcttcgtctctgagtttggtggccgctgcaaagaactcaaaatcgctaatgaattcgccagggatccgagccgtgccaacaaatacacgcgaacgctcaaagacggaaagggcagctggcaattgtgcgtggacttctccaaaaacctcatcgacgacgacatttttcaccaactcatctcagtggctcgctttgctgaagttggacaatggcgcgacaaaatgttcaccggtgagcgcataaactttacggaggaccgaccagtgcttcatgttgctgcaaggaacacatcaatgacgccgatatttgtcaacaataatgacgttatgcccagcgtaatggcggtgctgacccagatgaagatgttttgcgacgacttgatcagtggccgatggaccggctggacaggcgaacgcatcaaggacgtggtcaacatcggaattggcggctcggatttgggcccgttgatggtgacggaagcactcaaaccgtaccaacaaggccctaatctgcatctc

SEQ ID NO: 87002 - DNA, 501 bp, Heterodera glycines
cgcgaatgcgatattcgtatcgtaatggatgcgttaagcagtggaaaagcattgctttgtctgccgatgtttgccgaacagttttatgtgtcggaaaagctgcgacgcatgggcgctgcggttgtgcttgatccgcgcagtggcagtttcaccccggaggggatttccaaaagtatcggcgaagcattgacaaagcgtcatgccgttacatttccttcaaacgaagaatccctgaagcaaacaattttgaatgcattcaagaaacttgaatgattgcggtgtgtccgctgctgctgatcgcggttgtgacatcatacaatgtgccgcactgatcaaagagagattttcttttagtttttccatatgctttttctattttctatttgggtattagatgagtgattctatccgtttttcaatagtttatttcatatttcctgtttttttgtaaattctttatgtataaattgttgacaaacaaaaaaaaaaaaaaaaaaaaaa

SEQ ID NO: 87003 - DNA, 640 bp, Heterodera glycines
gtgaaattgagcccggagaactttgaggatttggactgtgccgtttttgttgacaaccatccaaacgcaatggcattgtcagtgctcgtcacaatcgaaatgctgaatgcgatcaacagtttgtccgagaatcagtccattctgaagatgcccccgtggacaaacatttggctttgcgcggccatcgctctgtccatgtcgctgcactttctcatcctttacgtggacatcatggccaccatcttccaaattactcccctcaacttcaccgaatggatggccgtgctcaaattctctatccctgtcattttgttggatgaaattctcaaatttgtcgcccgacggatggaagcacatgggcgtgtgaaggcggactgaccgaccgaccgacgacggcccttctcacacatgccctaccgtactccaccgtactcttctcccctccctttggcccatttgttacgcttttgcttgggatgctttggatgttaacatgttccaattgctcgcccgttcatttttcctcgtttcttttgctgttcactttatccttcgtctcggcatattccctccgcctgctcattgtcctatccaatattttgcaatgctttgaccccctcttacgaccttttgttttcat

SEQ ID NO: 87004 - DNA, 513 bp, Heterodera glycines
agatcgtgttttgatggaacctgaaagaataaagggcgactgccggatgaggaagaaaccgatcaccgccttccacgaagcgggacacgccatcgtcgcccatttctctgaccattcgaatcctttgcataaagtgaccatcattcccagaggcacttctctcggccatacatcgcaactgccggacaaggaccgtcaccaggaaacgaaagcacagcttctcgctcaattggacgtgacaatgggcggccgtgtggcggaagaattggtttttggccaggaacacatcagcacgggcgcaacttcggacttgcggcgcgccacaaaggtggcggaacgaatggtgaaattattcggaatgagtgaccgggccggacttcgcgacttcactgtggaaccgattgaatctgagcaaggcttttgtgtggaaaggggcccgagcaccagcgaaacgatcgaccgggaaattgaaaatctgttgcagcagagccacgaacgcgttaaggaactgtt

SEQ ID NO: 87005 - DNA, 492 bp, Heterodera glycines
cacattgctggacaaactgaagagggaacaagcggaactcgaggcagaagcaggcggcgaagtgcaaaaggaaacggcggcgacaaaatcgggcactgtttcacccgaaaagaatgccgaaatggatgtccaagatgcactacgacgtaaaactcgaaaacgtgcagccaccgcttcatcgtccgtttcgtctgcgtcttcaccaactcgttctccaaagaggtccaatgccatggacacgtgcgaccgaatggaagcttcctcctcccatcggacagatgagtcccctccagccattaacctaaacgagtccaactcgctttcgcaccgccatttggctgaagaggccaatgcttcggttgcaggcgattcagcgacagagtccacaacaacagcatgcggcggcacttttggtcaaaaagggacggaggagagagttggacggactgctgaagatggactttggcaaacactcgcccttccagacttcgg

SEQ ID NO: 87006 - DNA, 419 bp, Heterodera glycines
tttagaaaatttaacggaggataaggaggacgttgtatcttgcgcacaattgtggtaagcatccattgatggctcacatgacgaagaaagcttcgaatttcttaattggtgatttcaactctgttgactttgacaatatggcggatcaacttggcaaccatggatatgtttcgccttgcaacatgctcactgcattggtatacattatgcggctaaaagaatcaaacgaaagagattttctcgccttcaatccaactgaactcttcgtttcttcgttggtgttggcaaccaaataccttaacgatggcactttgcaggaatttgtttggaacgactaatgggcatcagtttcgggccttgcattacccaaactaaacgagttggaaattcgcctgctcacttctttacgttgggatgct

SEQ ID NO: 87007 - DNA, 387 bp, Heterodera glycines
cggcgcgggagcgccgttgtttgtaccggagtatggccaagttcgtaccaggcgatggcgggccagaccttgtcgaaacacagaattggtacgactttttaacaaaaactccctctcgtacatcaactgggccatcgacgacaagcaggaagcgtcggcagcgctgcagaacacacagcccccagtcgggccggccgacgtgtgcagcaccgatcggctgaccaaatcgggcaaatttgtgcacgaccacctcatcggtgtaaaccagaagccggatggctgttaaacatcagaaaatggcaaatgatcggaatcgcgcgctcttttttttacttttctgggtcatttcatctttagcattaaacctaataaaaaaaaaaaaaaaaa

SEQ ID NO: 87008 - DNA, 684 bp, Heterodera glycines
acagtggactttacgtttttcacttaaattggaaaatatggcacacataatagtggtgaataaattccaggatcggacaatgatccgtggcacgacattgggccaaaacatgtacaagattggcggagaagaagcagtcccggtcagggaagcacttgtgaataatatgcagcaaaagaatgccaaaacgtgtagagcagcagaagatgaaccaaaaaaagctgctattggaggcactggagatgaactggatttgttgagcttgctgatcaagggtgatcgaagcaaaacaatcggtgaggacgggttcgatttggagctgttcgaccaggacgacaacaacaacaacggcggggaagagcagggcgtgaataagggcaaaacgacgacggcaccgcagaaagccaagcgaacaccgtcccagccgaaggaatcgtcgttgagcaaagcgatgaaagagatggacttagaccggagcaagcaaacaccatcatcaacagaaaagccgccgtccagaaaaggttcccgtaagggagcacatctgctggagatgatggaccaagaaactgcagccccaaaaacgacccaagcgagaaaggggtccgttaagcggggcaattaacacactaattgcgtcttaatcattggccattgtgaaaaaaaaacaattttagcaaaaaaaaa

SEQ ID NO: 87009 - DNA, 656 bp, Heterodera glycines
gtccgtcccttttttgggcgtttcctcgccaaattgtgcccgttcaccgatcgattggcaattttgtggacgaagtaccgaagaaacagaacgaagaagtccttgacgaggacatttttgaaaatattgggaaggaaaaggcggcgcaattgatggccgatttgggacttgcggaagagaaaaagacgggggcacagagtgcggaaaaagtggccgaagaacgaaccgaagcgcatggacagcaaagaatggggacggcaccgcgcaatttgagaaaagaaatgcagaagaaaaggcctcaacatcttgccattttgactgattccgaagaggaggcggaagaaacggaggagaaacctaacggaattgacacggcggtgttgggaaacggaggcgaagaaaagggacgaggggcgacggatttgtcagataaagcacaaccaccaccgaaatcgaaaggagtcgttggcatttcccatgccgaaaaatacattatgcgagtgaagcaaaaccgagaagatacgaaacagcagcaaaagacggagcaaaaagaagaaatgagaaaagggacggggaaagtgcaaaagcaggggagcagtgatgacgaagagccaaacgaatgggacaaactcagcggagcatcggcgaatgggggg

SEQ ID NO: 87010 - DNA, 539 bp, Heterodera glycines
tggggagtgcgacggcttcgttcatgctaatacgctaatttgctcactaattaccccaaataacaaaactgccccctgcatctcccaacaatggccaccaaatgccttccgctcgaacttctgtacgaaattgtgcctctcatccctgccgaaaatgccacaccgaatgcgctctcgtcctgtcggctgctgcacaaacttttgctgccacgtgtcatcaaatggaaagagataatgagtgaaaataccggcttccaaaagcaacttcttgaaatggtaaaggccctccatgaaaaagtcgccgtcattgaaaaaaagcgtcgccatcattgaaaaaaaacgtcgccgtcattgaaaaaaaagccaccgtcattgaaaaaaatgtcaccgtcattgaaaaagaagtcaccgtcattgaaaaaaatgtcaccgtcattgaaaaagaagtcaccgtcattaaaaaaaacaatcggcataaagggagaaacgacgggcgttgtggaacaacaatttcacatccgggagacggtgccgacgaa

SEQ ID NO: 87011 - DNA, 278 bp, Heterodera glycines
gagcaattggatggaaccgttagtacaccggatcgtcagaaagccattaaaactttaacggcctgattcggacgtgttcgcttttcttctgacaaccaaagcgggtggtcttggtctgaatttaaccgccgcagacactgctatttttctcgattgggacttcaatccgcagaacgacaaacaagcggctgcacgatgccaccgcatcgggcaggacaaacctgttaaaatcattcgtctcgtggcaaaacatacggtggaggagctgataaagcaga

SEQ ID NO: 87012 - DNA, 501 bp, Heterodera glycines
cccttgtcttcctttccctctatattacgctgcacactcgtcgtccaattgtgctgccatcagtttcattgccccccatggctgatgatgttggtcctcccgctccttccggtgccgtcgatgactttgcgcagcgcaccggccaattcttcgacttcatccgccagggaaacatcgaccgattgcgtgcgctgatcgattcgctgagcgtcgatgagctgaacaccttgctgcagatgagatacaacgaacaacaatttgcgctgctggtcgcagttatggaaggacaccccgaaattgctgcacttttgttggacaaaggcgcggacgtgcatcagaccaccgttggccgagtgaacaatgtgaccatgggtgagcaattcgccgttacgcccctgtggattgctgtcaatatgcgccacttggagatgcgccgcgtgctgatcgctcatggtgccgacgtggacttgggaagcgattcctcctttacaccgctactgc

SEQ ID NO: 87013 - DNA, 473 bp, Heterodera glycines
ccgacattttttccatgtcatcggctaaatcgacgcctgatttttgcggttgggaggaaaaaccactttgggtgtcattgattgagaaggcacttgccaaagcttatgggaattatgccattctgcgagctggacgaactgtggaaggactttcaactctcacgggtcagccgacactttccattgaccttgaatatttggacatggaccaacagtcccggaccgccgacttggacatcgcttgggctaagctgataagtgcgagagaagcgcgctttctgatgggatgttcttgtggtgctggtaaacggactatggaagaggcggaattccaacgggttggactttcgtcccaacatgcctattcgctgttggatgttcgccaaaccaacgatgggcatcggtaacttgggaaacagacaaaatagactggtactgttgcgcaacccatggggagaaaactttgtttggct

SEQ ID NO: 87014 - DNA, 450 bp, Heterodera glycines
  unsure (1)..(450): unsure at all n locations
cagcgtcggggccggtggtggacaatgtgagcgacaacgaagaagacacggacgaaatggacccaattacagcgtttttgagtgtccgggtctcgcaccaaccggtgatctcgaaatacaaaaccccaatttcgtgggcgctgagaagtcggcagccggcgaaacacgccgcacagaatgaagccaaggaattgttacccccttccaccctacatttattattgcgttccttcccaccaattcccttgtaaattaggcctcaaaatccccgtgaccgaccaaaacatccttttccccttccactgctctagtctgaacacttccgcacattccgaagttctgtccgattaaacattcctatttgagctattggatttgaatgtctacgctttggggggcttttcgataaacttgggcgcagtnaacaaaaaataaaaaaaaaaaaaaaaa

SEQ ID NO: 87015 - DNA, 572 bp, Heterodera glycines
agatgactttgagttatgctaaggggttacccgacttcttaacaatcagttgcaaacttcttatctgccgaactccacgaagaaggttgaactgcaccaggaactgcttgttttggtatggaaatgttgtgagtacaaccagaaattcctttattatgtgctgaaaagcagcgatgtgcttgaacttctcgtcccaattttgttccatctcaatgattcgaggacggacccaactcggattggtttgattcatatgggcgttttcctaattcttcttttgagtggtgaaagaaatttcggtgtccgattgaataagcctttcacttcccgaggacttattgacgtgccaatttttaccggatctcatgccgatttgctgataattgttttccacaaattaatcactagcggaaatcacaaattgcagtcacttttcgattgtcttcttacattgtcgtgaatgtttctccttatctcaaatcgctatcgatggttactgctaataaattagtgcatttggccgaagcatttagcactccttggttcattttctcaactccaacaaatcacca

SEQ ID NO: 87016 - DNA, 491 bp, Heterodera glycines
cattctcgcttctctgaagagttacaacccttcattgtttttgagaactgataagtttcgctcgagaaatgcgtgtggcaataaaaaaagcgaagtgagtctacaaattgatgaatttgacgaattttacaaacgatggatttcaaattatgagcaagagggagcggggaagagccacggagaggagaacagtgaacacgatgggaaggaggaaagtgaaagtggagacgaagaggaggagccaccacaaaacagccgaggacccgtgatcaaatgcccacggatgccaaagataagaatcaatttgaagcgacgtatttcaacaatttccatcgaaaaagcaaaggaatagacttcgcctaattctacagccaattcaacgccacagtgaatctcccttttgttgtttccattagatcattaccactaactacatcatttatccattttgtaaattaacaaagaaaacgaattaaagactggaaaaaaat

SEQ ID NO: 87017 - DNA, 502 bp, Heterodera glycines
aacagcatgcaaatcgtgttttatcaatcggtgatgcttttctgtacaattctgcttggaaaatgtgcatgccggacgttgtggtggattggcaatacgaattgttcacccgtgtacagcttcaactggatagtgccgaacatgcattgacgggcgaaggagggcacgacttggattttctcatacgctttgtaattaatcggaggaatggcgagaaagtgctgcttgaattgctccagcgtgccattttgcacaaatctctgcaattttctcgaattacgcaaatattccgtcaaattcttccggaaattccaaccgaaaatgccgaatcatccgttacgaaggtcaaatggttgcctcatgcgatgcctttggtgccattgaccgtttcgcataacagtctcttgcgcaccgttttcgagccgttgtctcagcgcggtgacgaagtcgacaaacgaaatttggccaatttgatgatggaattcttcctgattctcaagca

SEQ ID NO: 87018 - DNA, 616 bp, Heterodera glycines
atctttgacttttttcttctagttatgtgtctttccaattctgtcagaatgctgagccgcacttggatcgtcgcaatttgtttttatattttctttggcacgattttaccattctctgaagcaattcgtttttatgtggcttctaacgataagaaatgtctgaaggaagaaattcacaaaaatatcgtgttgacgggcgaatatgaattaagcgattctgttgggcacacaacgacagttcatgtcactgatactcgtggtcacactctgtacaagcgtgaaaacttcccagaggcccgtggaaaatttgcatttactgcggacgaatacgacattttcgaaatttgcttccaaatgcatggcccgactcaccaacaaaagttaaacagagaagtccatttggtgctaaaacatggagtggaggccaaaaactacgaagacttggccaaagcagaaaaactgaaacccctcgaggtggagctccgtcgtctggaggatttgtcggattcgattgtgcaggactttgcttacatgcgtcagcgggaggaagaaatgcgggacaccaatgaatcaaccaacagtcgtgtgctctacctcagcatcttctcaatgttgt

SEQ ID NO: 87019 - DNA, 150 bp, Heterodera glycines
tgtttgccggaggaggaggattactttgtgtggtctgcaattgacccgggcattggcagcatcgctcattcactgaaacatttggacgacgaacgcaagctgttggaccgtttcgagcgttttgtgtgcaaaatgattgaacccgtcgct

SEQ ID NO: 87020 - DNA, 155 bp, Heterodera glycines
attgaacaccgatgacagaatgctgaatgcttgggctccaattaaaaagctgaatcaataccaatcagaggaggaggaacacaaacaattgatgttcttccaactaaagtcgcaacacattgaaaaaaagcggaaacttttggaagaaattgatt

SEQ ID NO: 87021 - DNA, 660 bp, Heterodera glycines
catatttgctgtttatgtactcatcaagcgtcattttcacttgtcatttgtgcaagcgtcggaatcccatcactttcgaatccatcgaccatctggaagcacattttgcacaacaacatttccaatgtttgccgtatgtttgtgagcaatgtccgcagtttgccagtggtctttaccctacagaaggcgcaattattgaacatatgaaattggtccatggctctgagagtgaatttgagtttaaaatcatcatccgtgaggacactgaagagaagcgggcaaaagtccgtgctgcacttgagcattgcgtccgtaattctggcgacgtggccacttcgtcgtccgctgccactacaacttcgaacaatgacagcacagcgattgaacttccacagacgcaacagcaagtgcaaacaacgcatcagcctcgcgttgtccaagtggttcctgcgccgacagttgttgtcaggacggaagtggtgcaacagacagcggaaaaacactcgggggcaaacaacacgagcaacggcgcggcattggcagaaggcggtgggagtggaacgacgacgacgaacacaagccgaaccaatcgaacatcatccggagggaacaagcgtaatgcatcagaagctgttggcgctggaaaaggaccgcccgttt

SEQ ID NO: 87022 - DNA, 672 bp, Heterodera glycines
caactccgctcggcataaccgtgtacaatttggtcagcgaccaagtggcaaggcgtattggggcgggagagaatttgcgctttgttggcgttgcgttgtgtcgcgctgttcccggcgtaacggaaaaactgcaaggtgcagcaacaagtgtgaaggttgaggcggcggacaatccgaaccttcgcatcaacgaacccgacccaatgctggtgacttgtgcgcatcgtaagtttttactgtcacaaattcaataaaatgcaaaaatgaacttcaaaagtccaccaaattgtgtcccctccccatactgaagtgtccgaactcagctgtcctcgggcatgcccacccgtccctctccttataagtaatacatttgtacaatttcccttcccccaggcaacaatcgtttttatttgtttaccaatgtcgaaccgtacgcggaagaagcggatgggtccactcatagcagagacgtgtacaacgaaaagccgctaaaggaggacatgatcaccgcaatagaagaagaagcaccccaatcgaagctgtgcaacaaggcaattgtttacacaacatatggcgacattcacattgaactattcccggacaaaacgccaaggacggtggaaaatttctgtacacacgcacgacggggttattataacggacacgcctttc

SEQ ID NO: 87023 - DNA, 458 bp, Heterodera glycines
tactcgttggacaccgttttgcttatgctctttccccgccatcggctggcgtcggaatggattttggcccatatctgaaattgaccgccattttcatcgtcctctctacttttgggctcggcttatcattggcccacatgaaaaaaatgctgcaaatcggcaaagaattggccaaacaaaacgaaacgacaaaaacagcgtcggccacttttgttggacaggacaatttgcgaacacttcgggcattcaccgggtgtcaggccggcctttccgtactttccatttatgtggccgcctcattagcatttatgaaattttggtatgtgcgtactcatctcgtccaggagttctcctgctctttgatggccattactttggccgttgtccaattttttgtgcttcgaatggccaatggcggcggattacttctgatcaaaggaattgttttggccaatgcg

SEQ ID NO: 87024 - DNA, 583 bp, Heterodera glycines
gagcttcttccgcacggtgctaacaccggtgatgcctcctatttcttgtccattctcttttcggctgtccacgtcttgaagcacccggagagccttcgtcggctgaagaacgtcgagttggcccgtagtcagtgcggtggagtgcatcagtcgtatcctttcgccgactttatgggctcgcaatcgactctgcaagactttgacgattccgacctcctcttacgcgtggcaattctcaacgaacacgaagggaccattgagtatcattctttccccattttgccaaaaatgactgtggcgaaactttgccgaatgattgcccaccaattttcggttaccaatcccgaagactatcgactctacctgatctttgacgattacgaatcgcctcccctcgagcccactcaaattcctcatttgctgcgcagtcaaatgaacgagacggaacggccacaccatttgttcgtctacaaacgggcggacgtgaacatttcgtacccggggcaagcggtcgctaactttttcgcctcaaacacgacggtgctgatgaatccgccgccattagttgtcacaaatatgagga

SEQ ID NO: 87025 - DNA, 376 bp, Heterodera glycines
gcgccgttgtttgtaccggagtatggccaagttcgtaccaggcgatggcgggccagaccttgtcgaaacacagaattggtacgactttttcaacaaaactccctctcgtcatcaactgggccatcgacgacaagcaggaagcgtcggcagcgctgcagaacacacagcccccagtcgggccggccgacgtgtgcagcaccgatcggctgaccaaatcgggcaaatttgtgcacgaccacctcatcggtgtaaaccagaagccggatggctgttaaacatcagaaaatggcaaatgatcggaatcgcgcgctcttttttttacttttctgggtcatttcatctttagcattaaaccaaacaaaaaaaaaaaaaaaaa

SEQ ID NO: 87026 - DNA, 537 bp, Heterodera glycines
ctctgttaaagcccttttttaatcggaaatgaatccaacggttttttctttgttttagcggtgctctttcttgtcaaagtcgactttttacagtgcaaatacaatgaaccaatggcacgacaggtgctgcaaaagcatgcatcacaatttcagcagcattgtaaaaatgcccgcagaggaagtgccgtggccaaatgttgcagtgccatcagaagcataatgggccgattcacaagccaaaaaaaggcaatgaaccaaatgctggccaagtgtaaagcgggcacaacgccaagcgaagcacagcaaatgcgaagaaaattggaaggatcgaataaactgaaggattgtggccagtttaaaagccaaattcagcacaagttcagcgggttgaagcagtactgcaacaatggggcagaaaatgcggaggaaaacgacgaatgatcagagagggagagagaagaggagagagtagagagagagaggaacagcaaaattctaatcactagtgatcactgataattgccgattgattgaccg

SEQ ID NO: 87027 - DNA, 651 bp, Heterodera glycines
gaatagcgccatttgcttaaatgccgtccgacatacatgaccggtgcgcgctgctctctattttttgcgtctccgatgattcgtccgtacaatgtgtataaaattgctgagcaaatggtcgaccaaagtcagaaggaaagtctcacccgtttcctggcacgggttatccccgtggaagagtcgtgccatgctaatttggacgaaattaagacattgttgtcagaaatggtcgtcaaacacttgaagggagagaagaaggacactccgccaacttacgcagtcgaattcaaagcgagcaacaccaaactgttgagcagacagcaaatttacgatttggttgcgcaactgatgaacgaactgtcaccggaaagtgccgtcaacctcacccagcctgatctgctcgtcattgtgcatactattcgcactgttacaatgctttcgattgtcgaaaattattaccaacgccgcaaattcgctttgaaattggcaacggagagcgaaccgaaagagaaaagcaacgaaaaacagaacacgacccatgaagagggagagacttgaaagaattagagatacggccacattccttattatttattttttgatttcattataccctctatcactttactctgtgagaaaaatttaattgtt

SEQ ID NO: 87028 - DNA, 634 bp, Heterodera glycines
tcttaattaaattaaatatattttttgccatgtcttctctgctgctctcctcttccaattgtgtttttggtctgttgcaatgcaatgccaaatttcccgtgctgcccgggcagtcagcaagtggttgctgtgatgtccaaatacattgacactttctcttctgctgctgacgagtctacagtatgctcaaccgctaaaagtactgtggatggaataaaaaatgaactgtcctctcgcggcggatgccaaaacggaggagaagcacaaattgtggatgaaatcgatcgacagctgaagaacattgcgaaaatggaaatcaattatgaggacgagtgcccgtacaatttgggctttgcccgtgccatgttcgacttggccgctgctgctgctggccatgcggggaacggcacagaatggcaatacatgaaagtacaatttgagcaggaaagccaagcaatcaaagcaattggacaagaaaagaactttgaagttacggatgtgcacattggagtcccaagcaaaggggtttctgcacatcaaaatgtgccgagtccgagccatgtgattgccaaccctggccaacacagttcggttggccaaggaaagaaagaagaaccgttgtcatcggacttcg

SEQ ID NO: 87029 - DNA, 249 bp, Heterodera glycines
acacggaacggagaaaagtgccaaaagggaacgatggaccaattggagtataatgccggagggattggcacagtcgcaacagaaaatgagacaaaagtggtggcatcagccgacactcaaagggggacacccctcagggcaattagcatgataatgccagcaattgttgccattttgaatcatctgcataggacgttaccaaacatgaaggatttatagcgaaaaaaaaaaaaaaaaaaaaaaaaaaaa

SEQ ID NO: 87030 - DNA, 371 bp, Heterodera glycines
caaccggagcggcgactcgacacggacgcggcgaccaaaccgaggcgaccgttgcgacaacgacgacgaatgcggcgactaacaccgaggcgaccgctgcgactactccggcgacggcgacaaccgcggatatggcattggattagcatcatggcacaacaacagaaaaaggatatcaaattgtcatttatccgattgatcatttgaattgtacatttggtttcgttgatacctatgttgcctatcatcatgtgtcaatcaatatccgatcacttgaattcaatcaatgtccgatcactggaattgtatgtattggtaatatgcgtttaaactaatcaaacttttcgaaaaaaaaaaaaaaaaaaaaaaaa

SEQ ID NO: 87031 - DNA, 710 bp, Heterodera glycines
acatttcttcttcttctggtcccacccctccacacccgaaccgcttcagtgcccaacgcaacgcaatggccacttacctattcctcgctgcagctgccttcggagcgggaatttactgttggaagacgtaccttggcccgatgctcgaccaaccgaagagcgacgacgaggagaagcccaagccggaaggaggcgaagaagcgacgaccgccggcgaggaggagaagaaggctggcagcaagggcgacaagcacaagaagaaggacaagaagggcgaaggcgcagcagcagcaccagcggcggacaaaaaggaggagaagcgcaaggacaaacacaaatccaaggagtcggggaagagcgacgacagcaaagcgggcaagaaggacaagcacgggaagaaggacaagaagggcaagaagaaggacaccaccgatgcatccaccgtggacgaagccctgggagaacagagcgcagcggagacgagccaagcagagcaatagccaggccgtgatgcgtgcaaatgacagtgttcgacgacgatgtctcgcgacacccacacatatcccttcgatcattcccgtcccttccgattgctgtgttttgtctgttccaatgcttcctaaatgttccccttgtgaacagtgatccttccttatgtgatctgaacatatatatgttgtatgcccattaatatattatgcttcgcttgt

SEQ ID NO: 87032 - DNA, 422 bp, Heterodera glycines
  unsure (1)..(422): unsure at all n locations
cactaaacggacgatgcgcagacgcgtcaatgaggtaattgacgagtttcgtctggaagagtgtcgccctgagctcgttggattcagcggagtcgaaaagagcattaagggaggagagacgcgtccctctctgnncgcctccgaatggnngaacaacccacaaataaaaaaacgcccctcctccgaccacgggcctcttcttttcaatggcggacagngngatcagcgtaatgcgtgccctggctttgtctggccggactctcactcgcaccatcgttcagccgcccttggacatttactggatggccgcnggaaataatgcgcgattgactcgtgacgaattgtttcgggcggttgaacgtctcagagaatccattcttctcatggacactgaaagagcccgattccgtcgttcgaacggg

SEQ ID NO: 87033 - DNA, 616 bp, Heterodera glycines
  unsure (1)..(616): unsure at all n locations
catccgaagggcatccatccgaacgtacggagacaccattcattcactgattgaacggcatcactactcgggcccctttctgcccggcttttgcctcgtcgccgcttcgtccgtgccgcgctttttgctcggccaattgccttctgtcgggcttaacttcattgaccattgcgttggaaatcagcccgaactgcaaatggagtctgtggcccagtggtacgagcgtgtgctgcttttccaccgcttttggtccgtcgacgattcggtcattcacacggattactccgcactccgttccattgtaatgtcaaaccgcgaggaaaccgtaaaaatgccgatcaacgagccggccaagtcacgcaaagcggtctcacagattcaggagtacgtggattactacggcggcgcgggtgttcagcacattgctctgaacacttcggacattgttcacgccatccaatcgctgcgcgcccgcggcttggagtttctgagcatcccggacagttactacgcgtctctgaagcagcggctgagcgacgcgggcgtggagttgaaggaggactnggagaaactgagggagctgaagattctggtcgattttgacgagcagggctat

SEQ ID NO: 87034 - DNA, 590 bp, Heterodera glycines
gtggaaaatgctcgctttttgtttgttgtaaattttgccattttcccctattgctttgttcccccgtcctccaatggtcgtccctctccaatccattctccccgccattatttccgtcgcttattatctgttcgtgttcttttttgccgaagtcagtcgcaagttggtcgacctgagtctgaagaagtttttgctcgtccacctgttcctcatcgaactgattgccactgctcaaatgtgcacttgcgtttatgagaatgccatcatcatcaaacattacggtccttccggcttcttcctcgtcgtcacttttctccaaatcgccggtgcctttttcaaccgcggcgctttcgtttctccgctcgctcccattgaactgtttttgcgcggaaaaatggacaccgaaaagtttttggcaattttgctgtcgcaaactttgggcggttactcggcatttcgactagccaattccctctggtattactcgcaatcgtactcgacggatcaccaccaattttacgacagtctcccgtgcgctctctcttacaaagtgcctttctattgtgcccttctgttcgagctgttcggct

SEQ ID NO: 87035 - DNA, 294 bp, Heterodera glycines
gagtcgcagtccgagccgttcgcctctcgaaagcatcgtcgttctcgctcccgctctcgcgatcgcaaaccttctcgtcgttcgcgaagtcgtgaccgccgtcgtcattgaaacggaagaaatagagatgagattgattcagagaaggaagttgatcaagattttgctgttcaaaggttcttgctgttcgctccatctttaaatgttggatgtccatcactgtaacccatttcatttcacattataaaatatttctgggaaaaaaaaaaaaaaaaaaaaaaaaaaaaaaaataa

SEQ ID NO: 87036 - DNA, 593 bp, Heterodera glycines
ggttatcgtcgacattttttccatgtcatcggctaaatcgacgcctgatttttgcggttgggaggaaaaaccactttgggtgtcattgattgagaaggcacttgccaaagcttatgggaattatgccattctgcgagctggacgaactgtggaaggactttcaactctcacgggtcagccgacactttccattgaccttgaatatttggacatggaccaacagtcccggaccgccgacttggacatcgcttgggctaagctgataagtgcgagagaagcgcgctttctgatgggatgttcttgtggtgctggtaaacggactatggaagaggcggaattccaacgggttggactttcgccccaacatgcctattcgctgttggatgttcgccaaaccaacgatgggcatcggtaacttgggaaacagacaaaatagactggtactgttgcgcaacccatggggagaaaactttgtttggcgcggcgaattcagcagcgaatggcttggttggactcaccagctgagaagggaactcgccgcggatgccgtgtttggtccgggcacattttggatgccttttgaacaatttgtg

SEQ ID NO: 87037 - DNA, 646 bp, Heterodera glycines
taacgaaagttcggatattttcttaaaagtttatgaaattgctgataaaaattaaggaccttttcaagaacaatgcatttcctactctggaaaaattgttcggagatgcaaaagctttgttcgtaacacaacgcctttattggattatgacattggcagtttgccaaaacgcgtcaaattcattggtggcattgatctgatgcagcccgatcacaaggatgctttaccgcaagtttttgggcaaccaaaaccggtgatcgtgttcagcatgagttctttactagaaccatccaaaatgccattggacaaatttaagacggttattcaaggacttggaatgtgtgaaaaggaagtgatttggaaatatgcgaaacaggaggatcatggtcggatgtcactcttgcaaaagcatgctcctaatgtgcatcttgtggagcattacgatcaagccacagttattggcaataaaaagacggaattggtgatcagcgaatgcgatattcgtatcgtaatggatgcgttaagcagtggaaaagcattgctttgtctgccgatgtttgccgaacagttttatgtgtcggaaaagctgcgacgcatgggcgctgcggttgtgcttgatccgcgcagtggcagtttcaccccggag

SEQ ID NO: 87038 - DNA, 629 bp, Heterodera glycines
ttgtgcgtcggagcagctgccggactgaccccatccactccaaggcatcatccattgcgacatcgccgccagaaattgtctctactcgaacggcgtggtaaaaatctcggacttcggcatggcgcacagaggaccagtgaataaaatggagcccaatgcgcgcgtccccgtcaaatggctgtcaccggatgcactcgccgagcgctgcttcaccgcgaagagcgacacgtgggcctacggagtgatgtgctgggagatcttcaccaacggagaagtgccgtactcacaaatggcgggaagcgacgtggcggtatcgctgatcaacggacagaggctcgacttcccaagagatgcaccgtcaaaatttgtcgagttcatcttgcagcacatttgggatgcggagacgagcggcagatactcaatggctgcggtccacgactggctgaagcgacacacgtaaggagcctagtggtgaacggattcaaagccatcagaagagccagccgaagcaaacgtcattgtgtgtgtgtatatatatgtgataaccctatgcttgttgtatttttacatattgcttactcattgttgtataactactattatgatatgtataaatgactgatgtcctg

SEQ ID NO: 87039 - DNA, 595 bp, Heterodera glycines
agacatgaacgactcgttggtgcaccagcgcgaagacaggcagttacaaacagtgagaacactttatacgcgacgaaacgactcattggccgccgctttgatgaccctgaagtgcagaaggacataaaagttgtgccgtacaaaattgtgaaggcgtctaatggcgatgcttggcttgaagctcaaggaaagttgtattcgccttctcagatcggcgcttttgttttgatgaagatgaaggagacggctgaaagttttttgggcacttccgttgcgaattctgtcgtcacagtcccggcgtatttcaatgactcacaaagacaggcaacgaaagatgctggaaaaattgctggactgcatgttcttcgcgtgataaatgaaccgactgcagctgccttggcttatggtcttgataaggcggaagacaaagtcattgccgtttatgacctcggaggcgggacgttcgatatttcgattttggagatccaaaaaggcgtctttgaagttaaatccaccaacggcgacactttccttggcggggggactttgacaatgtgcttgtgcatcaccttgtcgccgaattcaaacgcgaaca

SEQ ID NO: 87040 - DNA, 609 bp, Heterodera glycines
  unsure (1)..(609): unsure at all n locations
ctattattttttgtattatttttcaatgccgcaattaattttgtcagttcacatcgcattgtcggttattatcagggcatacgtccattgacaaatgatcaagccaagaagttgacccatcttatcctggcattttcaacccctgactctcaaggcaatttgagtccattgagctctgtgcttaaacaagcgctaaaagcgggtaaatccgctaatggtgcgctcaaagtgatgattgccattggaggaggtggccttgatccggccatatttacttcgttagcatcaaacagtggcacacgtaaaagctttattaataacattgtttcttatctgaaaaccaatgagctggacggttgcgacatcgactgggagttcccaacttccagtgacaaggcaatctttgtgacatttctgcgcgacttaaaaaaggcgatggcacccagcggcgctgtgcttagcatggcatcggcagcaagtgccttctatttggaccctggttacgatntgccaggcattgagagtgccgtcgatttcattaacgtgatgtgctatgactattatggaagctggaccaaaacatcgactgggccaaactcgccactgttt

SEQ ID NO: 87041 - DNA, 547 bp, Heterodera glycines
tctcttctcctctccgtcttcttttccctcctcctcattcttccgtccgatgctcttcacttggccggctttaccatcccaaaaatttttgtcaattttcttggcgatgaaagacttcagttcgtctattccatttgcgccgcactttgctcaccgctttcattcattccgcattttttttcctttgttttgttggccttggtttaagcattgatcagcccgtcttctcccatagtccgaataatttcatccaatggctttcactgttttctttgcttatcgtggcagcttcaatcgcaattttgtcattttgtcgaagtaataattacgaacgccatccgttggttcacacattgagaaatttaagtgatgcccgaaattggcaaacattggccagggaaattgacgacgaagtccgtgctcctttgctcttcactattttgtacaaagattgttctcgcgttttggtcacacgcctttggctgataaaagttacaaattacgcaattcaattggctccaatttccgattcgcaatttctcgtaat

SEQ ID NO: 87042 - DNA, 615 bp, Heterodera glycines
ttttaagagttgcacaacgttatttttcgagcagtcgtaaacaaacggaacaatatttggaacgacaggccaacgaccaatactcgaggcgggccagagaacactcataccgtgcaaggagtgcctttaaactcatgcaaatcaatgacaaaatgcacttcatcaggccgggtaccaataataattgactcgttgcgattgacgcgggtgcaggttcatttctgttactcttttctgttgaaactcgctctttgcccatcgcccggctcgtggtgccaagtgctcagcgagttgattttccctaacaatttcgcaccaaaaaaaagaaccaaagcggatgaaagaacggacgaatgtccgtttgatggaactgagcaacgccaaggatatattttgggcgtcgaccttcttgtccggccactccttttccttctatcgcatttcctccgttttatttcgcccctttcagacaataagtccaattgaaaatgttgatttactgtgcaaagccgacttcaccagaagagccactcagacagaaatcagacggcgttttgaatggccgaatggtcgatttgctgctcagtgacatggcaccgaatccgaccggcgaat

SEQ ID NO: 87043 - DNA, 270 bp, Heterodera glycines
  unsure (1)..(270): unsure at all n locations
cgaaagacaccaaaggaaaatttattcatatcgaacagaagaacgaattgttgaacgactgggaagtgtggacgaaggcattggagaaagtgttcccagcagaagagaaaaaaggagtggaaagattgtaaataaataaaaaaaacatttgtctgtaaatacgaccaaattggtatatttatttgtaaatataaccaacgtatgattgttgtttattacatcgttgtcttttaatgcaaaagtctcttcagtnactaaaaaaaaaaaaaa

SEQ ID NO: 87044 - DNA, 577 bp, Heterodera glycines
catttaaaaatgtcaaacaacgaaaatgaaaatgtgatgaatggagaagccgtgggaggggtggaaatcaaagtggaagccaatgaagaagtgaacacggaatcgcaggaggacggagaggaggcgattattccccagttcagcaaagagcaaatggaacgttcggtgatgtgctgcttatacgaaggcgaaattgtcaatgcgccttggcatttgatggcacagtcaaagacattcatgcaaatgtgggaaagtctcgacatggaagaaaaaacgcaagaagattttacggatttcgtttttccgctcaatgacatcaccagcgactgttttcagcagattctcgcttggatgcgcgaacatcacaaccttcccgagccaattgtcaaggaggacccggtgacgcaggaacgcatttggttcaaattcaccgattgggagcgccaattcttcgacgtcgactttgaaagggtcaaggagtactttttggcttccaactttttggacattcgttcattgtacctctactgtgcccaggaatgcgctcgttgcataatggacaaatcggcagaagata

SEQ ID NO: 87045 - DNA, 529 bp, Heterodera glycines
  unsure (1)..(529): unsure at all n locations
caaaagcgtcgttccataacgtcacacacatcatatccctcatgaccactccagcaaacgcggcgagggcccggagtgccaaggcgaagctgcgcgatgccaagcggaggatggttgcagttggacgcgcaggatacacaagaaaagcgcagcggggcgatcgtcttgccatttgtatgaccaacgtgagcgccatcacgcggacgacgctcggctgcacccatccgttccatcgccgctgcttgtatcgctggatccgctaccacaccaattgccccgtgtgccgctacaacttcgcccgcaccattccgcgcggtgagcgtaaccaaccgctgtaagatgccatgtgttgtgatcgccgtacgatgtcatttgtgtgatcatatttgtatcccattgttcggttatgcgtatgtatttgtacaatggaatgtatgttcttatatgtactctgtatgtacagtatgtataatactcgtcagtaaaatactctccttgttnaanaanaaaataaaaaaaaaaaaaaaaa

SEQ ID NO: 87046 - DNA, 603 bp, Heterodera glycines
caaaattccgaattcttggcccccaaaaagttcgaaagtcgtaactccattatatatttataaattcttcgactgattttgtgaagcccattaattaagttgaaaccacggcacataatttttgaaaaaagtatcgttttcctttttttcagaaatttaacggggagggcaaagaattgccaaattgggcaaacgaatcagtaattgaacgcatttggcaactcaacgacctttcatccaattacctttacaagacaacaaaattggtccgttttcgagccggtgttctcttcaccgaaattttacaacggatgaaaaatgtgcagcagcagcagcggtctgctgctgctggtggtggtggtgacaataataattatgatggtcgacaacgtgtccaagcctattcagcgcatgacacaacgcgtgaataattaataaataattaattattagggctgccaaaaatatgtacaaaaaagtggtcaaaatatgtacataaatatgtaagaaaaatcccgaaatatgtgtacaaaaaaccccgaatatgtaccaaataattaagtaaaatttttttaatggttattattttttggaaaaaaaatt

SEQ ID NO: 87047 - DNA, 694 bp, Heterodera glycines
  unsure (1)..(694): unsure at all n locations
tcaaacacaacgaccaaatttgttccacatcaattgaggatcggtcattcgcagccgcccccaccctttgggcatgtcctcgcgaggcctccgatgatgcttccccccgcgggctcttctgtggtcatcgaatcgggaccaactctttacgttcagccaccagccacattattttcgaacaatggaaaggcggatatgccgatgagtttcagctcaagttccacttcgactttgcattcgcagccattcaaaactttggctttaccttccgatgttgagcttttagcagcgaaaaagcaagcaacaaaagcgcatgagaacagttatttgggggctgttcctcgcggtgagaaaaagatgaaacgatttgtgaggagttgtgggggacaggtgtngggaggactcatccatggccgagtgggacccaaatgattttcgaattttttgtggtgaccttggtaacgaagtttctgacgaattacttgccaaggcttttcggaaatacccaagcttccagaaagcgaaggtggtccgtgacagcaggacgaacaaatccaaaggctttgggttcgtctccttcaaacaccaagacgactttattcgtgcaatgaaagaaatggacgggaaatacgtcgggaacagaccaataaaattacgaaagagcaattggaaggaacgcaatttggacatcgtc

SEQ ID NO: 87048 - DNA, 696 bp, Heterodera glycines
ggtcttaaaatctgcgaattaaaattttgtggaatgtctacgacaaaaagacaatcataatttaacgaatacccttgttaacaaagaaaaggcttctattgttcaggagtcatcatttgtcactcctggcatttttcgtcgtcgtaaaatgctcacaggcagacaactgaatgatgaaggaaacattgaagctaaggaaaaaagcgcggatttcaaatggtcaattgaccaaatcgcaaagatacaacccattgaatttgatgagactgaggagttttcattgccacctgaaaattgggacccttgtgcaaaattcaagactccacaatttgaaaatattgatcacttttggactcacaacagcttaattgctccttcaccgggactattcgccacagcctctgctttacgtcgtgttcaaccgtccgccaattctccaaccacctcaccgtttcagctcgctctttctcctttcggttcgggtccttcctgctcctgattgcattgccgcagatatggatgacggggagggattcgtgttcatggaaatgcgcaaggagggcccttccgttgaccttgttgaagaatgaccattgactgtgagaataactggtgtccgataaatgaccaaacaaatatttaaaaaaattaaaatattgtgcattatgttattatgcagttaatacagtatggtca

SEQ ID NO: 87049 - DNA, 598 bp, Heterodera glycines
gccgaattttacgctaggacttgccgcaattgcagcagtgtcccatttgcttaattccggacagcatgtcatcgtgtcgggggattgtaacggcggcacgaaaaattatttcgacaaaatttgtgtgccgcatcatggcttggagctgagttttgtggatttgacgcgattggaaaacttggagaatgaatttaagcccaacacaaaaatggttttgtttgaaacaccctcaaatccgcttctaaaaatcgtcgacattgaagcggtgtgccgtatggttcgagcacgctcaaaagattgtgtcgtcgttgttgataatacgttcatgacaccgtactttcaacgcccgttggaacttggcgccgatgttacggtgcaatcgctcaccaaatacatcaacggacacaccgatgtgctgatgggcaccgtagttaccaacaaggagcagcttgatcagcacatatacgcccagcaaatttatgctggcgccgttccgtccgcctttgatgcctttttggtgcttcgtggcatcaaaacgctcccattgcgaatgcgccagcacatggaaaatgcgctggcaattggacgatggcttgag

SEQ ID NO: 87050 - DNA, 354 bp, Heterodera glycines
caaattcgaagtccttagaagcgacaggaggccggccgatttgcgatgtcatgtcgccgaatattcgcaatgattgaacgtcgtcgacgatcggcggataacgccgaacattcgctggatcaactgttcaaatcgcatttgatttggctgaatgagcagcaactgtatgagctgaagcaaatgaaagggtccggaaagggacggacggaaatgcagcagagagtgatggaatggtacggacagttggaggggcaagataagcagaaagcgcgagaacacccgcgggacggatgccgggacatattggcacaagtgttgggcaaagaaaaggctgaccaactgaagcaattgaga

SEQ ID NO: 87051 - DNA, 427 bp, Heterodera glycines
aagagcggaagagagaagtggcggaggaactcggagagcatctaatttaaagaaaccgagaacacgaacgtcataaaatctacgaacacgaacaaaacttcaaagcacttttggttgattcgattttttctaccgatctcagttggcacgacggtcgaaaactgatgcgatttcctcccggtaccagaactgtgatttgctggaaaaggatgtcaaggagcgcctgttcaaagagcctgtgcgcgaattggagaggaagagacgcgacgtgtttttccaactttcggatgagcatcaggacatcacttttacaactcgttggcattcagcacaaaagatcattgctgaagatgagcgtcttggtaaatcgaagatggatgatcagaaattggaacaggactacagagaatggatggacagacgacgg

SEQ ID NO: 87052 - DNA, 607 bp, Heterodera glycines
cctgcatcggcccggcactgctcagagttccgcccgtttatactcaacagaagggcagtgccgtgccgtccttcgcttcatcttccgtaccgtatgcccaacaacaacaacgacagtacccccaaaacagcgttcagtcttcgccccactcgcactcattgtcagcagcctatgtatatccacaaccccttttcgtgccctcctcctcctcgccaccgttccaacctctccaaattcgaccccagcaaagtgccgccgcaattcccagcgttcggcaatcctccgtcccccgaggggatgactttgaccgggcgaatgcctcgccaaaaaacaaaattccaccggcagtgtgcgcagttttctccgttttggaagtgctttttggcgtcgtctcactgttcgtgggttcgttcgtgcccaaatgctttgagtctctccaaattcgcccgtcccattcgcaggtgcgctcaatgcgaatccgtacaattgtctcatccaacccaacgtgcccatttatttgatcctttccggcatccttttgatcatcaatggagcggcacgccttttcctaagcctttctgcttctccgactgactcgacaaagaga

SEQ ID NO: 87053 - DNA, 339 bp, Heterodera glycines
  unsure (1)..(339): unsure at all n locations
cattcccttctactgtaacgtgctcggnaatgcggctgctcaagcaattggacttccctgagggaaaattctcgctctttttcatgggctacaaagatttggacgaaatcccttcggacgatgcggcccaaaagaaattcgccctctcaacccattcgaccatcgaactcactcacaattgggaacatggtacggacttcaagggctatcacaacggaaactcggaaccgcgtggattcggtcacattggcattgctgtgcccgacgtggactcggcttgcgcgcggtttgagcaattgggcgtaaagtttgtcgaaaaaccgaacgatgggcgcatga

SEQ ID NO: 87054 - DNA, 671 bp, Heterodera glycines
gctcgacaagatgaaaaagtgcaccgctgccactctgtccgacgttttggccaatttgcacagcgtgaaaaagccggaggcattgcgcaccgtcgaaatgctcaaaatggcgtccattcggttgggcatgtccccggcgaggacaatggccgtggccgagaaattgtacacccggggaaacaccagttacccccgcacggagacgtccgcctaccatgacgagtttgagtttgagcgtgttttgtccgcgttggaacggtcgccaacatttgcccgcattgttcggcagattcgctccgatggcaaattgctgcccgaaaatgggacaaacaaaggcgaccatccgccaatcactccgctacgttcattttgtctagatggaggtgcgaaaaatcaactcaagtcggccgttaaccgaaaaaatgaagtggacaagtggttgtacgaagatgcgcatgcgctttacgaacaaattgcgtaccattttctcgccacgcttatgcgcccgtgcaaatacatgctcaaaagtgtgattttcgacattggcggtgagcaatttctgtgccaatctcgaaaggtggaggatgccggcttcaccgaagtgctcagttggttggccgtcccggaaagcaacacaaatgcgatggacgcactttccaagctttcaattg

SEQ ID NO: 87055 - DNA, 500 bp, Heterodera glycines
taattcgcacgagcgctccgatggacaatcgccttcgttttgcacaagaaatcaaagattccattcgcgattgttacccacaactttttatcgatgcaccgatcccgacgaaagaggacatagaaaaactgagagacagtctgaatctgagcgaccaagtgttggtctgtgacaaagacgaggaagtggatgatggcgagcacgaggaggacggcgaagaagcggcgatggacaaagacaacgcgaatgaggacgaagaagaagacggagaggaggatggggaagacgaagaagaaaaggaagaagaagacgtggagaaggaggaggaggaagaagaggaggaaacggaacagcagtcgaccgccaacgacgaagaagaagcagaggaagtgataggcgagggggaagaagacgaagaggaggaagagacagaacaggcggctgagaagatggaggccagaaaatacccggaagaggaggaggacgaagatgaattctct

SEQ ID NO: 87056 - DNA, 646 bp, Heterodera glycines
caaatgacaattttggatcagcaagaggaggaagtgatcgtcggctctgatgacagtcacatgattgtctcaaatattccgcatcgcgcacacaatgtttgtggcgtcttaaacaagcataccatctttgtggcgccggcagacgactcactgaagcgtgactttggcatttactatctgttcaacatcaatgaccctcaaacgaaatattttgcttggtttgtgcggccagatgctccgaagaaaagtgctattgagacgtttcttgcccactacgaagtcatcaagaacgcggagggtgacgtgcacattccgagcttaatggctgccagaccgattaagaagtttcacttcggcatggacattattcaacagagtgagcatgacgctgactggagacgtccggttatgattctgaagatgcccgcccattgtgtgtttttggtcgcagtgcgtactctgtcgcccaccgcaagtgctccgagttggctcgcattagcagtcggctatggcttggtgaatgcgctgaactcattgcatgagaagggattcatccatcgttttgtgacgccgtggaatttcatggttccgatgccattcaccatggacaacattaccaaaaagatgattatcatggacttgagtt

SEQ ID NO: 87057 - DNA, 629 bp, Heterodera glycines
cgctggacgaccttttctggtccttcggtttcgccttcgccactttaattccccgccggtggcatttggcgccgaatgagcgcaaagagccgcacattgtggcatatgcaacggcacagagcgggtctctttcgcacaattccatcagagcaacgagccaataagggaaagtcggtcccactctgtccgctgtcttcttccgattccaacgacgttttttcgcccgaccgttttgtccaccgaatttacgcccttctggacataatccaagaagctgttgcggtcaatatttttgcccttcactttttgatgccaaacattgccaaattcggagtgccgaatttcagcttcaccgaattttattcgcgtagccaattgttcttgcacgacagcatcgacaggctcgggttgccggtgacaactgctgctgacattttcggagtcggcgcccattgcaaaacgccaaaagattcttccgccctttccgccaaaatcaaacagtttttggaggacccgagctcaaaaggcacaatttatatcgccttcggttctcacatcgattggaaatttgcgccacggaaatttttggacgattttgtcaccgtttttcgaaaactgccccaatatcg

SEQ ID NO: 87058 - DNA, 178 bp, Heterodera glycines
tgtccggggctgcacgcgcgctacactggcaaaatcagcgcgcttgttcttccccgaaaggggtcggtcaaccggcgaaaatctgccgtgattgggatcggacattgcaattattgtccgtgaactactaattccttgtcggggctagtcatcaactcgctctgaatacgtccctttt

SEQ ID NO: 87059 - DNA, 363 bp, Heterodera glycines
acggaacgaggaggagctcactcgatgattcgcccgccttgtcgctgacgtgggtgtgcgtggcactgtttgtggtactcgatgtcatcggtcttacggcacctagccagagtgatcctttattcgtcctgggcgcctttggtggggccgcgtccttctagggcaccatcggtgcgggtgtctggtgggtctccttggcctcccagcggagggctcgtgtcttggatgaccgtctcgattgcgaactcgacatcgaggacgatgccaggggcaatgaccggcgtgagccgccggctgtctagtctgtcgccatgatcgacgatatccgacgcagaaccgtactgggtgcttcaatgacagcga

SEQ ID NO: 87060 - DNA, 490 bp, Heterodera glycines
catggaagtttgccgcttcaactcattattttattcgttttaacgttgcaaatttcaactcagtcgccagaaatttcagtgccttctgatgttcaaattttgtcagcagtccgaaacgtagatttgaccactcaaattgtcaaggttaaaactgactttgagttgaaaaatggaagaaacgaggaattgagcagttttgtacatgccgtgtcggctgaggaggctgcaagactttcttggatgtccgcttatgagagcggcaaagaatcgggcaaattacggatttctcgtgttagagtcaaaggggtctcatcggacatggttttccacaaaattgagtttctcgatttgttaatgtccggttccaatatcaaactttcggtggattatgctcttacggaatatttggtgccctctcctaaggacattttgcagtcagaaaaccagctggtcatcttttccggtactgctaatgttctcagcgcctacc

SEQ ID NO: 87061 - DNA, 400 bp, Heterodera glycines
ctcggtgccttcggacttactgagcccgacccgggtcgaacccggctgggatggagacgaaggcggagtgggacgagcgcaacagttgtcaggctgagcggctctaagtcgtggatcagcaactcttcggcggccgacctgttcattgtgtgggcccgaagtccaaagctcggtcatgccgtcaaaggttttatcttcgaacgtggcgccaaaggactaagtacacccaaaattgagggcaaactttcgcttcggacttcgatcacagggcaaattgtgatggacgaagtgccggttccggaagcgaatttgctgcccggtgcccagggactcagtgggccgttcggctgtttgaacagtgcgcggcttggcatcagtcggggggcgctcggcgcggccg

SEQ ID NO: 87062 - DNA, 641 bp, Heterodera glycines
ataaaatcgtccgtggcttttacggttggcttctccgttccttggattggattaaccggcaaattttacaccgactctctctctctgctcataatcgcgaggacatgataatcgaaaagtttccatcatatcgtcaccctggactgctccagcgtttgaacgaattgaaacggatctataccgtttacaacggcggagtgttcatcttgttcacaattccttatcgatattatgaggactacgcgtccatcactgtcaaccaagcagttaacgacatcaacgccatggacaagacgggcgttttgcagaatctgaagattgcgtacatcgaatgcaatgtcggatattggcacgagtgggacacgacgaagaaagagccgaaatccatcttcaaaactgacgagacgttgggcctgcgacaattgccgacgctgctcgaatattcactgacccaaggacgccatgtggaggggcgaagagtggacttggacgaacaattcttgagcgtggagtacgtcattaatttctttctgaagcgccagttaaatctgttctgatgcggtgctatgcccaattaactgtgatagttctgtgatatgaacatgtgttgcatatatgtaatatatattatgtatttaatc

SEQ ID NO: 87063 - DNA, 284 bp, Heterodera glycines
tcccttgccgctatttctaagctcggaatttgggtttttgagatcgctactctaacaactcattgtcgataatatcttccaaaacataatttatgcttcgtccgcatcatgaactcgcaatatctctaagtggttgtggctttctttgttcttaccatattggggcgatgatttgttttcaaaagcatgccaattctctcctctctcgtgttaacttttattgtggtgcgtccgctggtgccctaatcgcctctttgctcgttttatcgcctcattcactggaa

SEQ ID NO: 87064 - DNA, 355 bp, Heterodera glycines
  unsure (1)..(355): unsure at all n locations
tgagccatcaacgctgccccttctttttctcgcttccccttcatggaaaagaaaaacactgtgaccnaaattgtgcctccttcaatgctttcgaaaccgcttcttcttgaatcattcaaaccacagccatcgccgatagggacaaacactccctccctaaggngnccgcactgtttttgctgcncccacttcgatctgggcccccaacgatgatgacatgtacaagccgaagcagtccgaccagctggaacagccgaagcaagcggagcgaccagcagcagcgcacggcttgctggccgacgacgacttttacaacccgaagcaatacactgaacagaaggctggcggtggtggt

SEQ ID NO: 87065 - DNA, 604 bp, Heterodera glycines
ggaaagctaaggcattggaaactgatcgatgaaaaaaaacgaatattcgatggtaaaagaccaaatgatcggtcagacaaagccaaggaagggataatgatcaagaaaaaccgaaggctatttcaactgattttatgaagccaaaggaagagactaatgatcagaattagtcttaacgatcggaactgatcatataaagccaaaggaagatgctgccaatacttcggtgaagtctaaagcagtgattattgatctgggcgatcccaaagagaataatgtcaacgatcggaagaagacaactacggatgataaagcgccaaaagtgatgccattcgcccaaactgagaaatcattgcacaaaatcaatgaccaaattgatcagcggatcaagccgagagaagaaaaccgggaccacattaagcaaagccgtgccaacactgagcatccattgcccggccaacggatcaagcccacaaaattcagaaagccattcgatccgttatcaacagtggccgacactttggagcggacaatgcttggcgatgatgatcgtgatcagcgccaggaaaaatcacgattcgagactggtgtcgggaacgtgaac

SEQ ID NO: 87066 - DNA, 562 bp, Heterodera glycines
ccttttaaaagacgccgaacatcttcgatctcctcaaggaacacctcttttttaaaggccctaaatagaacacatcttttcgattagaagcggcggttggttccgattctttgcacgacatgtctcttcgttttgaagaaagtacaaattcattggaagagaacgaactctcctcccttgacggtgttgtcgttttttaaggaatggacgcttttactggaacgacttcgggcgttttgaaaggtctttgcttttccaattcttcatttctcaattatcgaactgcgcaactttcttcgtctgccgatttttccatttgttccgtctccgatgagcaaaatcagccgaccaaagcgttgccttccgcggtgaccgcaatgagtttcagcggggcggatcagatggaagttttggtcgggcgcgagaatggccgcgtcgaccatttcaattctttgactgaccaattcaatgcgctttttgctttaccacagccttccgaactcaaaggaattcatcgcatcgacggtgatcggattctgactgctgaagaatgtggcactct

SEQ ID NO: 87067 - DNA, 315 bp, Heterodera glycines
tcacgaatgaggaggaaatgagccaagtcagaacagaaatgccgaagaacaaagggacgacgtgtgcaaattggaagcaatgaaaaagaaaggggagaaggaaatcgggaaaagtgtctggatggaagtggggtggcgagaggagctttgccggtgccaaaaatgctttattttgtccgaagacttgggctgttcgttcctgctcgagcccgatgacacactcgcgcactttgaacaacaaaaccgagaaaacgcgtcccaaaacgacggggcccaagacatttaccaaatggtggtggaggagacgaacgaaca

SEQ ID NO: 87068 - DNA, 549 bp, Heterodera glycines
caaattgcggatttgaatctgttgcaattgctcggctccggcaccgccgccggactcaactacggcgtgtttcggcacaaagaaatcactgaaaaaccacagaccttgcttatctacgatgtgggttcaaccaagaccctggtgaccattgtccaatttcttctcgtcaacgattccaatgagggtggcagcagttatccgcaggtggagaccatcggagttgggtatgaccgtgcgcttggcgggcaccatttgacactgcgtttgcgcgaccatctcgtcaaggagttcaagaagcagaatgcctcccttaacgctgacatctcggctaatccgcaggccatggccaaactgttgaaggaggccgaccgtgtcaaacaggttctgtccgcgaatgcggaagcgtttgcgcaagtggagtgtgtgtttgaggaccgcgacttccgcgtcaaagtcactcgggacgagttggaggcgatgttccgcgactttgaacagcgtcacatggaacccatcaatgttgctttgacaatggcacaactgacgctg

SEQ ID NO: 87069 - DNA, 366 bp, Heterodera glycines
cactaccgccatttcttttgcaataacggcgttttccgaacttgttggtaaagtgctacgttttatacgagccggctttgatactcattactttcttgatttgtggccttattctctggcccttatctcaatttggctttacccaattgtgtatcgttctttaaatttgttcaacaaaatgatgaacacaaaaacggtggaccgtatggacagaatgccaaagtgatcaatcaacagtatgccaaagtggtgccaatgccattgccaaatgccgaaatgattggataattgcattcttttatatggaatatggataaattagggcgatcacaaaaaacgaaaaaaaaaaaaaaaaaaaaaaaaaaa

SEQ ID NO: 87070 - DNA, 623 bp, Heterodera glycines
cgcccattctcttatagccatggtttgcttggtgatggctgtcctaatggaaatggcaaattcaaaggctgtcaaaaaagacaacaaaaaaggagcagtggcggcatcaccagcaaaaggaaaatcatcgccaaaaggaggcaaaagcccagcaaaaggaaaagcggcaaaaaaattgaaacctaaaaaggatgctaaaggcattaaagctaaaaaagcaaagccagcaaagaaaagcaaagcggcaaaagcagtaaagggagcgcctaagacagtcaaaaaactcgcaattgccaaaacagcagcgcaagtgaaagaaataaagtcaccagccaagccaatggttctaaaagcagtgccgccccaccaaatgcatttaatgaatgagaaagttcaaactgctgtgtctccacccgcccatgctcgttcacttgcgaccgttccttacagtacaccgatggcagccgaccgtaactcactgccatcgtacacttcggatggcaccaatttggacatggcccatgagaatgatgattatcagaattattactacggaacggaagacagcagcagagaatttgatgcatcggcggaggaggaggatgaactgtatgaggaggggg

SEQ ID NO: 87071 - DNA, 539 bp, Heterodera glycines
  unsure (1)..(539): unsure at all n locations
gaatggacgacgaanactctcatcaagcgaatatggaacgattgagagaggacgaagatgaaaaaattggtctgatggacattaaacgggaaataaaagccgaactcaatgaagcgattggtcgccaaacggaagatggcgaaacggagccaaaggcggagagagatcgctcgatgaaaagcgacagagatatggagcgcaagaagaagagcaagcggacttcgcgagaccgaagccggtcgaagtcgcgggaacgcaaacgatcacgcgaacgccgacgaagtcgctcgcggtcgaaggaacgccaccgcgagagagagcgaagccgagaaaaggaaaggggcgaaaagaggtcgaaagtgaagagcaacaaatattgggatgtgccacccgctggctacgaacacatgagcccgaaggagtacaaagaactccaagtagtggtcgtccattagaattgcgcaagggtgctgaatcgatggattttttagcatttagctaccggcgccctccctcgggccaccctccaatcgtctgtt

SEQ ID NO: 87072 - DNA, 253 bp, Heterodera glycines
aagcattttgatggacaaaatggcaaattaattggcaatgacatctacgagtcattggaatcattggtttcatttatttctaaaaatggctttggtctcataaacgacgaacggagaacaaaatttgttcaggcaattcaagaaatagaacaaattgttaagaaatggaatttttttcgaaaattattgtcatgggttcctaccaattgggcgcactcaccaaacaatcagacatcgatgccatttgtgttgt

SEQ ID NO: 87073 - DNA, 361 bp, Heterodera glycines
tcatcaaacgaagaaacacaacaccaaaaacgcgccagcggcgagactgagaagaaacgcggaacaggcggagaaggaacggaaggggaagcgggaggagacaatttccaagcgacgcgggatggtttggaacagcaaagacgcgtcgaccagcagcacattggagcaaatgtcctccttttccgctgggacggttattgtcagcaatggcaccaaggccaatgcgaaaccaaccgatcaaacacatgcaaatgttggctctggccggcccggctccgttcagcgactcgccggaggcgattgccattcgcgacgcggtcgactacacgcaaaagatcacgctggaaatggcatacaacaa

SEQ ID NO: 87074 - DNA, 184 bp, Heterodera glycines
  unsure (1)..(184): unsure at all n locations
accctcccctttctctttttcattgctcaaaatgacttctcccattgcttatgaccaattgcgagaaatgacgcgncaatttncctctcaaaaggcgtcagtgccgtggaaacaaatgccattttccagggaaaatttggcaccgaaaattctccgactctttgcacgatttacaaatggcgaa

SEQ ID NO: 87075 - DNA, 636 bp, Heterodera glycines
caaatgacaattttggatcagcaagaggaggaagtgatcgtcggctctgatggcagtcacatgattgtctcaaatattccgcatcgcgcacacaatgtttgtggcgtcttaaacaagcataccatcattgtggcgccggcagacgactcactgaagcgtgactttggcatttacgaactgttcaacatcaatgaccctcaaacgaaatattttgcttggtttgtgcggccagatgctccgaagaaaagtgctattgagacgtttcttgcccactacgaagtcatcaagaacgcggagggtgacgtgcacattccgagcttaatggctgccagaccgattaagaagtttcacttcggcatggacattattcaacagagtgagcatgacgctgactggagacgtccggttatgattctgaagatgcccgcccattgtgtgtttttggtcgcagtgcgtactctgtcgcccaccgcaagtgctccgagttggctcgcattagcagtcggctatggcttggtgaatgcactgaactcattgcatgagaagggattcatccatcgttttgtgacgccgtggaatttcatggttctgatgccattcaccatggacaacattaccaaaaagatgattatcatg

SEQ ID NO: 87076 - DNA, 559 bp, Heterodera glycines
  unsure (1)..(559): unsure at all n locations
cggaagaaccaccgaattcattggagttgcaatttcaaagcattttgtatggagaaatgaaagtgatcagagcaaaagccaaaggcacagaaggactttttgaactgaattctgacacacatcttttagagtgagagaaatcacaatgaaaaaacgacagaatggagaaancctcgcttaatttgcacgtcattttattggggagaatgaacgaaggttgcttactggatgcagaacatttaaattcccaacaaaatgggcacggatcccctcggggagttcatcattttccctaatggcaaagccgagagagatttgcgagctcgccgataattgtttctttgatgtacaagaattgaaaaaaaaaaatcaagcatcgggaagctttctccccggtggatcttgcacattctgctgatgtcagtggaaagggcgacccgtgcagtttcctcactgaaaattacgaagtgcgatgggcgtccgacagccacacagccaacgttaatcttgcgatgaaacaaaaggccaaaagtggaaaatggtggtcagctgtggggat

SEQ ID NO: 87077 - DNA, 534 bp, Heterodera glycines
  unsure (1)..(534): unsure at all n locations
catttgacacgggatgcgatgtgtgggaagggcgtggacaggcatcttttcgccttgtncgttgtcatgcgccatttggaagagagttcaccgttcttcgacaagattttcccgcctcaatattttttttcaacttcacaaaccccactcaaccaattcgattccgagcaggatggctcctccatggcacagaaattttttctggtgagtgctggcggcggttttggcccggtcactgacgcgggttacggagtttcgtacatcgttgcgggcgaagaccaaatttctttccacatttcgtcaaagaaaagcgctactaacacgagttcaattcgttttcgggaggatttgaagaagactttgctcgaaatgaaacaattgctaacagttgaacagagaatgacatgaacacaatcggaagggttttcaggcaaacgatgataatatgcagataatctcatcactcctccccatcccttgtcaatatgatagctcctcacaattaattacctcctcgactccctactgtatatt

SEQ ID NO: 87078 - DNA, 555 bp, Heterodera glycines
taatcttctctgtttctctctacatatcccaaaattgttccccaatgctgcaagctcatcagtaccaacttcggcaaggtcatcgtcgcgtttctgctcgcagcattttggcccatttcggtttcgaattctcgaacgactaccgacttggctgcggacattacagtaaagtgtacaaaggctatttcaaggaagcgcaacgcacttttgccatcaaagtcaccgacttggaaagcgtttccgagaagttcaagcaaaagtttctgccacgtgagctggaagtttggcgggaattggaccacccgaacctcgtctatttgtacaaagatttccagtggaacaattatcagttcgcagtgatggaattggttgttggtggtgacttgctttcgttcctccaaaaatgtggccacgtcagcgaaacgacctgtcacaattggatgctccaaattgttgctgctttggattatctccaccgtaagggaatcgctcatcgcgatctgaagctggaaaacgtccttctttgtgaaaacggcgtcatcaaagtcactgact

SEQ ID NO: 87079 - DNA, 477 bp, Heterodera glycines
cagttcgccctccattctccgacacggcctcgtctcccccattccttcacttcctcaatggcacaacaacagtttcttatgacagtgatcaggaattggagtttccgttgtcattggttcgcgatgacggagtcatttacgccactcagctgagtgtgtcttacacgagaccacgggaacaacatttcaggacgggaattcaaggaacacaaccgaacagctagccggggaggacctttatttggttggatgttccgttctgttttctatccattgttattctcaatccatttgtcttaagttttcttccttatttattacagcatttacacttgcatagtttcataaatgtcattctaaatctattcaataattattttcaactaatgataatatatggtgtcgattccttctgtgtctgtcattgtttatccgttatcttgtctgaaaacacgaataaatctcgttgtcgcccct

SEQ ID NO: 87080 - DNA, 388 bp, Heterodera glycines
actgagtcggtggccgacgatctgctaatttgggccgctttttgttccaatgaaaaatcaaaatgccgacattgagcactctgtccactcattacgaattggaccaaaaccttttcaaaaacttttcattgcgcgagttttgtgccgcgattcacagtttctacggaatttgtttttccaacattctcgatcacttcaaaaagcgattcaacattttgcaatttgcgaggcatccgccccatttctttgtcggcctcaatccagcatggctttacgaattcgttgtgctgctcgaaactaccggatcaaatggccctatcttggacaacgattccgaaatggacgacaacgatcgattcattgcgaacacgcaactgccacttttgtc

SEQ ID NO: 87081 - DNA, 441 bp, Heterodera glycines
ttttaattaataattatccttttccaaaaacctttaaaatgcgcgccattctcttcctggccatggtttgcttggtgatggctgttattcttgagacagccaactcaaaggcagtgaaaaataagaaaggaacagttgcaacgccagcaaaaggaaaagcggcgccgaaaggagcagcgaaaggaggaattaaaaaagacgcaaaatcaaagggaaaaggaaaaaaggacgcctaaggcaaaaaggacataaaggctaacccatccaaagggaaaggagtgcctaaaaatgacaaaaaatccccagcggcaaaagccaatgacaaaaagagcccattcaaaccaatggcagcagtgaaagccgtgccaaaggcggcggagaatgctcagaagggaccgtcgagtgcggaagtggtggcggaggaaaacaacttggacactg

SEQ ID NO: 87082 - DNA, 484 bp, Heterodera glycines
cgctgcggtgaagacttgtctctttttgggtgcttacatcggtggattcactttcaccgggtctttgatggcctatggaaaattgcagggtcttcttggcagcgcgccgactcttcttcccgccttttatatgcttaattttgcacttctcagtgccaatgtcgccgccctcggtccttatctgacaacggacagcttggccatgggattgtccatgctcggcactacgtctttgctctcctctctgatgggcgtcaccctaacaatggcaatcggaggtgctgacatgcccgtagtgatcacggcgttaaactcgtacagcggttgggctctctgtgctgagggattaatgctcaacaacaatttgctgaccattgtcggtgcgctcattggccgctctggtgcccttttgtcccacattatgtgcaaagcaatgaatcggacgctgttcaatgtcattttgggcggcgttggcacaaaatcg

SEQ ID NO: 87083 - DNA, 681 bp, Heterodera glycines
ttttgcctattttgaggacgctcggaagttgtacgaaacacgtatgaaaaatgcctcaaatggcaacaatgaggccgattgtcgtataaagaatttggaaaaagagctgaaggtgctgaagcgacagctgagtgcgttgggcgaccttctcgaccagtttttggacacttcgttggccatgcgcgaacggactctgttaatggagggcgaattggggcgacgattggaacgattggaagcgcaaaatgtgcagctgagggcaaatttggcggcgatggggcaacagacgcacaaaaacggggacaacgaacagaggaatgaagcggagcaaactattgaaacgatacatttcgacgaactttcgatttccgacggagttccgcttcaacaaaatgtccaacagcagccgcaaccaccgaatgtcagcaattgccctgtaaatgatgaggggggcgacggggacggaattggcgacgaattggcccattttttggccggtcttccgcccgtggatgaattagggcaattggtgctgaacaagttcaaatactcgtgcgaatttgcccaacttctctacaccggcggaggccatgtggactcggtgttctgcaatattttcagcggatatccgcccactttcttcgaagaattgatcgagtacgccctcacaacgcatcgtcc

SEQ ID NO: 87084 - DNA, 458 bp, Heterodera glycines
cccttggaagaaatgttcagctcttccatttgtttgctctctttttggcctcctccgttttggccgtgcttataattggcattaaaatggacggaccgacggaggcaaaatgtgtcgcccctccaaacgccgcggggccaatgggacttttgcttttaccgtcgtgaaacaatcggcggcttttgaaaagggaaaagcgccctctggcgaaagtaagccaaagccggggcagaagccgagcggagaacggcgaaagagggacgttttggggcacgccggcggatacgtcggaggatgggaccatcccattgactcgacacttgattgggcaaagagtcagtggaatgatgccaattggctcgccgatgttgtcaacagaaacggatgggaaaacaccggcactccaaccggcggacgatgaatcagtgaattgtgccgaccaaggaatgaaagacggc

SEQ ID NO: 87085 - DNA, 647 bp, Heterodera glycines
ctccctatattcttccccggtcattttgttgctgcaaaaatgtcttcaggacttctttggcgtgccgtgcttctgttggtcgattgtgcctccattctttggttctttttggaccatgccaaaaaacgacggcgccctcgcgaaaaagaaatctttatctgcgccgattgttggcttttggtgttcgactttcttgcgccttctcaacttggcctcgaaattgcactgatcagccgtcgatttgacctccgagtggatgaacatttcaagacacgcaagtggatgttgaacaaacaattgctaatccaatggaaaactgtcggaaatggccccaagcaaatgcaaattgacgatgccgatggaaatccattgccaatcccgcgaaatccgttgccaaacaaagtcatcggattcagacgcattacgatcatttacatcgatcaaaatgtcatcgcatttctccgccgttttcactgtcttttccccatttgctcaatattcttggacattaccatggtcaatgatcgcattttggactactttttgctccatatttggccaatgttccgcgattccatgcgttttatgattttgaataccaacgcttttcaccgtatgcgccaatgggccccgtcatcactcagcga

SEQ ID NO: 87086 - DNA, 599 bp, Heterodera glycines
  unsure (1)..(599): unsure at all n locations
cacagcagcaggacgtgccgtcctcgttcttttcgtcggccttcatcagtcgccgccaaacagcaacaacggaggcggtggtttctcctcattcaccaccacaaccaccaaatactctatcttcgttgtgaatgcggtggtgatgtacgtcggtgtacgagccatttccctcctcctggcaaagggcatcttttttccctggaaacaattgcacacagcccgttcatggacattttccaaaatttggccgtctcactgtgcaacgaaggtcgttntttgctgttcaacgccatcgccaatcagttgcgttacccgaattcacacacgcattacttcagttgtacgctgctttacctgttcttgggtgccaattccaagcacattcaggagcagatcactcgtattctttttgaacgtttggttgctctccgtccgcacccgtggggtttgttgatcacattcatcgaactgatccgcctccagcgttacgggtcttggaagcacgaatctgtttattgtgccacagaaattgaacgtttgttcctcagcgctgctaatccttgcagcgccagcggcccgaaagtcatcactcaaacggg

SEQ ID NO: 87087 - DNA, 564 bp, Heterodera glycines
ccctcgtccgcttctattattgcctcccttctcttcctcttcggctgttgtcgtgcggatggaaatgttgtgcctctgtcgagcctcaattgtgccacgaaggacggaggaatcgatggcttcaattttgtggacgacggtctgatcttggattcctcatctgtcaccgctgtccctcctgacctgcccctcatctgttttcagaagaacggaaaggaggacttgatcttcaaactctttgtgcgcgatggaggatgcgtctcaaaggccaatttcttcaccaacggtcaaccgtgtacactcggagagtcggaggacgtgactgagtcggataagtgtccgggcgagggcggcacctccaactgcacatcccacgaagtcacctgtccgggcatcggaatggcgaaggtcgcggaggagtccaatggtcacgccttcaaagtcaacctggccaatctcaccaaacttaccaatccgtgcgcgcaatggaaggcacattttggcggtgttcatcaagtgctgaagggttcttccagcggagagaagtgcgcgagtgcaggattc

SEQ ID NO: 87088 - DNA, 390 bp, Heterodera glycines
caccgtcggaaacccgtcgtcccaacccaacaaggagatgtgtcggtcggacctcgcttgccggccgttcgtcacggcgtcggcggcctcaggcagtgggaaactgtcgccgaagatgtcgaaggctgctgctccacgacgtttgcggacgggccgaagtgtctttttaagttcgtcgcctcaacccccgacgcgtccattcgtcgcggagtgcgcggcctcctgcggggatttatgcggggaggagcagcaaagtgttgtcatcatcgccgcttccgacgccatcagcgtcagcgctcttccgctcataaagcctccaccggaatgtctcttctcggcctcgagttgtgcgttctctgagtgggaaaagtgtgccgcgtcggaaggtgc

SEQ ID NO: 87089 - DNA, 539 bp, Heterodera glycines
gccccgcgccttggccccgctccatcgatcgccggcaatttgacgtttgaatcagcaagcgaacgaagcacaaggaatttcactcgtcatattttgacacacattgttttgtccatccatcttagcattccaacagcagaaaaacagcaatggcatatgcaacaaaatattacgactatcagattgccgttgtttttgccattttactcggcggtcttttactcctcgcgttggtagtcacagccatttattacatttgtgtggtcaatatgcggggcaaaaagggcggcattacgcgcgttccttccggcagaagtacagtaaggacgaggatgaatccgcaacagtactcgccgtctgctcaaccgcaaatattccatcaacagtacccacagtattcgccgtacggtgggatggaagggatgagcagccaacaaacgcagcagcagcaacaacaacaacacccattccaagcgcaaaattatgagcaggcgggggtcagagtgagggaaatgcaaccggagtatttccaacagcag

SEQ ID NO: 87090 - DNA, 411 bp, Heterodera glycines
atcgtcgtcacaattcaccgtccgtcagaaggaatgtgccagaaatttgagcgggaccgtcttttgaagttactcgaacggacgcaaaaggatgtccagcgcctgacgaccgccaaccaacagctcaccaccgccaaccaacagctcaccaccgccaaccaacagctcacgacaactaaccaacaacagcagaacacaatcaaccaccagcagcaaaacatccaacaactccaaaacttattggccggtcagcaaccgcttgttccatcgtttgcccccggggtttttgctgaacaacagcagcatcatcatgcgccagcggactttctcggcgaccagcatgcgctcggcggccagaatccacacgcggcaccttttggccccgactttttcggcggtcagcccgaaaat

SEQ ID NO: 87091 - DNA, 466 bp, Heterodera glycines
cagatgcttttgcctgtgccttcggttgggacatttgcgagggttccttttgttacacttcttcgacttcaaaatgtgactaacagtggtcactttttgctccgtcgcggttgtttcggcagtgaatccccgcatattcggtacaacaacgagttgaagccgttcacttcgctgaacgaatgctttttgattttgtggaaagacatcgaatatttattgggcatttgtgcggacagcgatttttgcaatgtttgcaattattggagcgaattggcagccgaaaagtcggcggccgttggcattatgcgggcgggaggagagaacactttgaggggaaaaaagttgctgatgggcacggcggcacttttgccacttttggcactttattttattgacaaaatcatttaacaaaaaccaatttagataataaagcattcatattaaaaagaaaaaaaaaaaaaaaaaa

SEQ ID NO: 87092 - DNA, 556 bp, Heterodera glycines
  unsure (1)..(556): unsure at all n locations
ctagagaaacggacggaaaagcctgtccagtgcaggcatttgcggagtctgttgtcagagaaatggagaaagggagtgaagtgatgaaaagcgagactgttagagctaggaatgaaatcggagatttctcggcggaacagaggaggaaaagaacagagagtttgaggagattgctcctttttcaaagaaatttgcgctaattttctaaagcgaataaacaaggaaacacaaaaaggaaaagttctgatcagccaaaaaagcagcgatttaaacaacagatcgaaagcatttgcaatgaagaaagacgaatgtcgaggagcagaagcatcacaccgaggagagagaagaccacttacaaacaaatgattcctaaagcatttgtcatgtntttgtcggtttacggcgaacgaatggacgcaaaaaaatgccaatctattgacgcaccacactttttgtctggcccaaatggaacaacaaacttgattgatggaccaaaagcgcacactgaaaaagcgccattggaaatgggggagctgctgaattcgctgaacgatgc

SEQ ID NO: 87093 - DNA, 545 bp, Heterodera glycines
atccgaaaaaatgccaaacattttcaaaatccttctgattgtgcttttttccgtcgtctcattccgtctctcggcttctactggtgacaaaaaaactgctaatgatgggagtggaaacaactcatcctctgggattggtacgaagatcaaaagaattgtcaccgctggactgtcctcccttccctggcgacgggtgttgcggaagcgattgggcgaagcaatgctcagggaggaaatgccgccggattggtgccatcgcatgtgaccaatcgctcaatggctccaccacctcctcctgtgcaatttgaaatgggggcaaatcgattagaaaaaatgagggcacacctacgcgaacttgctgagaaaatgccggtcaatgaatcgaagcgtctgtcaccgagtggacccgacccacatcatcattagggccatggatggatctaacggaggaagaaagaatggatgcttagttttcagattttcttctatcctctcttatttattagtttctcaaaacaaatttcttccacaactttttaaactat

SEQ ID NO: 87094 - DNA, 666 bp, Heterodera glycines
cgtgatgaccgatgcttgtgcttgtggactaacggaaaaacattcaaaagttcgcttacatttgccattggaattgcagtgtgagctgctttctgcgcttccctttgagcatgccgctcgtctgcttttgctttccaaagcgattgccaaaaattgcaattccctcgtgcaaaagcaaacgaaagggtggaatgcgttttccgaaaaatgtgtcgacaaacttatgaaattctttcaccctttcgtcctcccaagattggaaagtattgaaacggaacaccattcatttgttcattcagcagcgcatcaggaagaaaaattgctcaaagaggaaattcgactttctcgtgcccaactgtcccctttggttggtgccaatttggtgcggcgtttggaaaagtgtggcacggccggcgaggcgatgaccgaactgttgaacagcgtcgttaaaatgtaccacatcattgaaatgtataagaagcgaaggaaagaattggacgagcgattcaacgaagtcaaacgaatggcggatgcaattaagcccgacttcgtcccgcgtgacattccgccccgaatttgtcccaccgccaccgtttggtccgctgaacgccttcgactcgattacaccgaacatttgcattctttgcgcgttcggttgcgccaaat

SEQ ID NO: 87095 - DNA, 630 bp, Heterodera glycines
cctccgcttccgtcgtccgcagcagtcgtcctcttccgccccgttcggcgcgcccttccacagtcgtcgatggcatccgccggttggcttcccccgggcgccaccgttggctgtggtggaccaccacagcagcagcagcagcagacgatatcaatgatgatgatgcatcaacaacaacagaacggcatcatggtcaacgggaacggcactgtggtcggcattggccacctgcaacagcaacagcagtaccaccaattcatcgccgccaacccggggatggttggcgccacttcgttgccccaggacctggagaatgtgaacgcgatgccgtttgaccagagcctgttggacctgaacgactacgaaattgcgccggacggacagttcgatttcccgtgaacgcgggccacgacgacggcggcggcgaacgcgcgcggattttggatggacgggagagataatgaattaattattaattacccactgatatgtgtgtctcttctgttctccccgttttttgttttgttttgtttcatttttgtggagaaacacggcgcagcacaacaacaaatggccattcgacaggaaaccgcagaaaactatctacctacctaccgtatattcatttgt

SEQ ID NO: 87096 - DNA, 624 bp, Heterodera glycines
catccgagagttagaatctccagatgagcactccctggttttattcaatccgcttcgttcttgctttcgtcctactagagatgaattgtttcgggcggttgaacgtctcagagaatccattcttctcatggacactgaaagagcccgattccgtcgttcgaacggggctttgctacggatgatcgtgcgattgtcaggtggcatcccgccaaattttaatcatgctcattttgctgctgctgcacagccggtcgtcaatgtgactgcggttctcgccaatgccaatcccactgggcagaattaccaacgccttctgaatttgaacgccgatttgacggagaccatcgcccgtttaactgtagaaatttcccaattgggatatatgaatgagcaattgacggaacaacttgaacatctcacggaagtgcctccgaatgcgaattttaatctggatgatgttgtgtttcatccgcccctcgaccaacagcacgaagtgcctccgaatgcgaattttaatctggatgatgttgtgtttcatccgcccctcgaccaacagcacgaagtgcctccgaacccgaattttaatccggctttgcttgagtttgatgatgttgggcttcagcc

SEQ ID NO: 87097 - DNA, 580 bp, Heterodera glycines
tccgctgcatattcatcgtcaaattgtgctgccgacattttctttgacttccaatgtctgatgatgttgctcctcccgctccttccggtgccgtcgatgactttgcgcagcgcatcagccaattctttttcttcatccacggcggaaacatcgaccgattgcgtgcgctgatcggttctctgagcgccgatgagctgaacaccttgctgcagatgaacgacccgcgcaacggacaacaatttgcactgctgatcgcaattatgaaaggacacacagaaattgctgcacttttgttggagaaaggcgcggacgtgcatcagaccaccgttcgccaagtgaaccatgtgaacatggccgttacgcccctgtgggttgctgtcaatatgcgccagttggagatgtgccgtgtgctgatcgctcatggggccaacgtggacttgggaagtgacgcctccttgacgccgctactgctcgcatgtgacaaaggcagcacagaaatcgtcacccttctcgtggagaatggcgccgacgtcaatctcggggacagcgaaggaatgatgccgttaatggtcatttgccg

SEQ ID NO: 87098 - DNA, 574 bp, Heterodera glycines
aattgagcgattggaggaggaaatcatccatctgagggccattcttcagacttagcgatattggaatatttttaaatattcattatatggatccactctttaaaatggtctctaaatggaaatgacaatccaaatatatttccgcttttgccaatttccttccatttattttttcaaattgcataatgtctcctttccctccgagtgccaccgatctcttcagtcttctggatgccatcgacaaattaaaacatttaaagcggactggttgggttctcgtcggcatttcggagcccgagacagtcgcttcccatatgtatcggatggcaactgtggcaatgactttgtccgcgcaccgaactgatttggacgtcaacaaatgcattcgaatggcattggtccacgacataggcgaagcgattattggggatattaccccccactgcggcgtatcgaatgaagaaaaattcaaaattgaaaaagacgctgctgagactatttcgaattggttgcccgaaacggtgggcgacgaatggaaaaacctatggagagaatacgacgagggaaaaagcgc

SEQ ID NO: 87099 - DNA, 610 bp, Heterodera glycines
ggtttccctatgaatatgtttatccggagcaacttttatacatggaacaactgaagaaagtgttggatgcgccagtaagcagttgggagtgttttcgggccattgtttgcttgaaatgccttccggaactggcaaaactgtttctctactggcgcttgtcgttgcttatatgagaaagtatccggaaagactccacaagctgatttattgctcacggacaattcctgagatagagaaatgtgtcgaagagcttaaaaggctgtttcgctattataccaatgtcaccggatccgcccccgatttccttgccctcactctctccgctcgtaaaaatctgtgcatcaataaatccgtcgtcagttttcggtatggttcggccgtcgacggagcttgtcaacgtttgacggcgagttacgttcgggcgaaaaggcggctgaatccgaaccttccctgttgttcctttttcgaaaaatttgacgagaaaagggacatgactttgccgaagggtgtttacaatttgtcagacttgcgggggtggggcaaagagcacggcatgtgtccgtatttcgtcgcgcggcacttggtaaatcgtgccgacatcatcgtctat

SEQ ID NO: 87100 - DNA, 206 bp, Heterodera glycines
aagtcccgcaacgagcgcaacccttgtccttagttgctacgcaagagcactctaaggagactgccggtgacataccggaggaaggtggggatgacgtcaagtcctcatggcccttatgggtagggcttcacacgtcatacaatggtcggagcagagggttgccaacccgcgagggggagctaatcccagaaaaccgatcgtagtcc

SEQ ID NO: 87101 - DNA, 147 bp, Heterodera glycines
ctaagtgtcttgggctgacataaagcgcaacaatgtcttctgacgaatcgacgacttcttctgccagtgctgtgagcgttcagctgcgtgaagtgcccatcaaagacttcaatgacgtgcttccggtgctgcagaaaacgctcaacc

SEQ ID NO: 87102 - DNA, 590 bp, Heterodera glycines
  unsure (1)..(590): unsure at all n locations
caattggtggcccgtcctgaacagtttgacgtcatggtaatgcccaatttgtacggcagcattgtggacaatttggcggccgggttggtcggcggtgcgggcgtggtcaacggcgagtcggtgggctccgactacgtgatctttcagcctggcgcacggcacacattcaaagaggcgtttggaaaacaaattgccaacccaaccgcgatgattttgtgctgtgccaacatgctcaaccatctccatttgaacagttacggcacggcactgcgacacgctgtggagaaagtgctcaaagagggaaaagtgcgcacccgcgacttgggaggctttgccaacaccagcgattttgccagtgaggtcattgccaatttccaaatgtgaaacgaatgattgttgcgcgacagaaatgtgaatgatggcacaacatgccgaaaaacaaaataattattagaaaagatttttattggtttgtttttttcttgttattctgatctcattatcatcatcatcattctgttgttgttgttaattttgttattgttgttgttgttgttgtcgtaagaatataataggcatagcaaaaaana

SEQ ID NO: 87103 - DNA, 755 bp, Heterodera glycines
  unsure (1)..(755): unsure at all n locations
ggctcttctgcgtccttaagattaaaatatacctaatggcttagcagtgagagctttggaaggtaaaattgcagttgtgactggtgcttctcgtggtattggacgagggattgcgcttcaacttggtcaagctggtgctacggtttatgtcactggacgagctcctgccgcttcgtactctctgattgagaagggacttccatctttggaacaaacagcgaaggaaatcaaaagtcgtggaggagaagctcatcctgtgtattgtgaccacgcgaactctgacgacgttcgccgtttgtttaagcgcgttgaggaagaacagaacggccgactgcacattttggtgaacaatgcctattccggagtgcctagtctgattgaaaatgccgggaaaaagttttgggaatgcgaaccggagttttgggatgacatcaacgaggttgggctgcgcaacgtgtacttctgttcaacgcttgccgctcgtctgatggttccgcatgaggatggccttattgtgcacatcagttcggctgggggacttcaataccttttctcggttccttacggagttggcaaagcggcggttgaccgaatggcatccgacatgggactcgaactcaaatctcgcggagtggcagtgatctcactntggcctgnttttgttcaaacggaaattacgacgatgggagaaaatgcggaacaatttgcttctgccgctcgcatgtcaatggatgcattcaatgcggcattgaaaa

SEQ ID NO: 87104 - DNA, 703 bp, Heterodera glycines
tcccccgcgctgtttaagcgccgcgtgcgcgcgttggccaatgctttccgaatgtaattatgggagacgagcgcccgatgaaaagtgacggggagggcatgatggaagcggtgttggactgttttgagcgattggacacgccaaaacgcaaatgggaatatgtcactttgttgcaaaaccacgacacggcaatcaaaacgcgtgttcaaatggcacaaattttcgcttggatggacggagcaaacgatgttcaagttttagtgccaccgcctggacgagttgacaaaattaaagcaatggattggagttttgaggcattgaatttgttcaaaaatgccacccgtaattctgctgttgcgggatccgcttctgcccatggctttccagcacatttggaactggcaaaagggggttttcatgcgagtttgacccgtgccatggtccaattcattcgattggagctgaacctgaccgaacttgtccgacgaatgaatctgattggattcggacgggacgaaatcatgctgatcactttgcactcggctgatcagctgaacgcgccgggcggctttacgcagacatgcttcaggcagaagaatggcagagacacccgtttcttgaccagggaggctctatgggctccgcacgcgttttgcccctcgcacaaatggcggcacgccgtttgcatttttggcgtcgaaga

SEQ ID NO: 87105 - DNA, 676 bp, Heterodera glycines
  unsure (1)..(676): unsure at all n locations
tgccgcgcgcggtcgntccatgcgccagcgaagcgtccgcgcggttttcttccgtttgtgcgcttttgcacgcgttcgctgtagtaccgtctgaactgcaattatactgatcgaagaacgcttggacagtgcgcataaaagggacaaagcggcagaatttgtgatggaaaaagcgaagaaagagggcgaaaaggcgccaatccatccgtttaaaatgagcggacattgtgacggagaggccgtagaaaaggaggaggaggagtacggtagcaaacagctgatcccttgtgctccgtacgctcgtctgttgctcttcggcacgccctctgccattcaaagtgcgcaattggctcagctccgtgcgctcgtccccggcgcgcaactggccgtggccaactgtcggcctggcctggacacggacgaagcggtggaggaggaaattgttgccctgggggcaagccatctggtatttgtccatggggcagacggagaaacgcgcgacgcgtgggaagcgggcggaccggcgaatttgcgggagaatgtgcgcgtcaacctgttcagcccgtggcttctctccaacatttgtgaccgttttggcattgtgttcgtcgaatttgatggggagggcaaaaactgttgcaattcgaatgggaaagtgccgacaaatgctgacgcc

SEQ ID NO: 87106 - DNA, 642 bp, Heterodera glycines
caccgcgtgtctgaagttcgtaattacgcctttttcttctggcttccttattacttaacctataaatatcaatgggctgagtcggaagcgaaccaattgtccatttggtatgacattggcggaattgtcggttctgtgcttggcggattggcttcagaccgactcggtcaccgcagtcccatcattctcctgatgcttgttttgtccgttccgttgttgttcatctactctggccttggttcctcgcgggttgagcacgttattggcatgtctttgctcggagtgaccatctcgggcccatacaatctcatcgttggcacaattgccattgatttgggttctcagcaagccttggccaacaatgctgaggccctgtctaccgtaactgggctcattgatggcattggctcggctggctccgcattgggccaactttttgtgccgttgattcaaaatgaacttggatggatttgggtcttccatttttttattttaatgaactttctttcatccatgtgccttatccgtcgtttcttccacgacgctcggctcatttccctttcgtttgctccgaggcaaaatggtcgtcggcaagagaacgagccgctgatttcgaataactgaactgaaattgctattgta

SEQ ID NO: 87107 - DNA, 623 bp, Heterodera glycines
catgaacattctgctgaagtctgttctattcatctctcttctgtcactgtttggtgattgcatgaaaaactcagatcaaattggagtcaaaagaaaatcagcaggaataagaattgaggaaccaaatgatgtaaaaggcaaaggaaaagtcgtcgaaacaagcagaaaaggcaaagaaaaagtcggcgaaaaaataagcgttatgaacacagctgaacgcattgaaaaaatggaccttgcccaagacaaagctaaaatggatatagacaccaatggcaaacccaaacaaaatgaggaaaatgctcctccaaaatatgttttcatttggagcggtaacaatgagaagaagaaccttgaggttgacctcagagtgatccgtcactccaaaaaaactcagcgaattattccatgccaaaagtgatcaatccgtcaatgcaaaacacggaaagcaggaagcattaccggttccgaaacaggaagctgaaaaaatactgaaggaagtggaagaatggtacgcacatcacaaaaatgataaacataaaaacgctccagtttttgtgttcaagtgtaaagacaatgtcagtctggtgataaatgttcatcttgatgcagtccggctttcc

SEQ ID NO: 87108 - DNA, 583 bp, Heterodera glycines
gatacattcccgtcgatttacttgtgtacaatcatttatttgtctatgatggtggaattctcctacagagaagagaagacggtgttcaaagaggtgcgcacgtcgttcgactgatcggttacggacgcgtgaactgtacggacggacggcgtgtcaagtactggttgggagtgaattcctggaacacatcttggggagaaaatggcggcttcttccgtatcaaacggggcgaaaatgtgtttggcattgaatcgcgtgacatcagttttgggcgagtcgagttgccatgagacgaagacgaagaggagagagacaaaatacggcacaaatttctagcaaatcccaggctttacgaaaagggaataaaacgggctttttaaaatggggcaaggaattaacgaaaaaataccattaggtggtaaataaactatatttgacaattcctggccctgttaaagcatttaccatctgactaattttccattcccagtcaaatgtttactaaacatgtaaaattcatcgccttcatttttttgtccattacttttgacaaggaaataaacgattttctgtaaaaaaaaat

SEQ ID NO: 87109 - DNA, 414 bp, Heterodera glycines
ggattaattcgctttatcgttaaatgtgccgactccagcaactcatctgctcgctcgactctttctgctttttgcgctttgcactgctttcgttagctctctcactgctgttgccccgccattcggccaattgtccgtttccggcaccaatttggtcggcgccaacggacaacccgtacagctgatcggcaactcactgttctggcaccaatggtacccgcagttttggaacgctgacacagtgaaggcactcaaatgcaattggaatgccaatgtcatccggggggccatgggcgtggacgagggcggctatctgagtgacgcgaacacggcttacaatctgatggtggcagtgatcgaagcggccatttccaatggcatttacgtgatagtcgattggcatgcccacaatcc

SEQ ID NO: 87110 - DNA, 726 bp, Heterodera glycines
gtggaaaattgctcttggtaaattagttggcatgcaattattacttctcttggagtttgaaaatcctttgatattctcattagatattttctgcgacaaacaattggcattggattacgccatattgttttgcacaaatccaaccgtttcgtccgatgctgagaatcggctgtcaattcgtttgtattttgccaaaattatggcaatttttacgaaaattttcaattttattaaaacgagtacagaaaaagaaaacaagcaaaaatatttgcttgtatttgttgaaatttggaacaaaatttgtccgcgtattcatacagaactccaacagaatgacatttcatcgactgttggcatactgtacaacatttggcggggaattgcatcccgatacaatcaaattccgcttggaatttttcaaggttatgagccaattagggtattatcgtcagataacggcttactgttactggatgaaaaaggcacctacagttctaatgtgatccgtgctgaacttttgaggaccatgtggtgaatatgttgcgactgtatgagcaacagagcgaaggaaattcgttcggccttttgttgcgccgttgcaaattggatggcattgcgtataagcatttgatgagagcgttttttgacgacaaatttgcaaatggaaacgaattcgaaaaattacgagcgaaatatcccaagcttaaagaattgtttcgtttcgat

SEQ ID NO: 87111 - DNA, 662 bp, Heterodera glycines
ttccaagaaaacgaaattacgaacgcgaaagggaggcggacgcaaaggaccgacacgaagaaagggcagaactggaggagataagaaggtcccttttggaagaggaagtggtcagcaaaaaggaaggggacggcgaagaagcagacgaaagtggggacacttctggcagaatggacattgccgacgaacaaaaggcggaatgggagaccgttggcgagacggcggcgatggtttctgggcctgttcctcctcctccccttcccagcgaggaaccgaccccagcccaagttgaaagtccgacgccagtgaagaaaaccatcgtgacgacgttacaacagaagcaagtggtgccgttgtcgaaactcaacggagtgttccaagaggaagaggaggatgaagtcgatacgttgcatcagatcaagaaaaagataaagcccttcgaaataacgcgagaggatcgattacaatcgatgacaccggaagaacgcaagaagctgatcaaggaccttatcacgcggattcccaccgacaaagccaaacttttctcttttgaagtgtgttgggaattcgtggacgaaaatctgatggaacagcgagtgaggccgtgggtgaacaagataatttgcgaatacattggggaggatgaacaatcgctggtcgct

SEQ ID NO: 87112 - DNA, 672 bp, Heterodera glycines
cacttgcttttctgatggaccctcccgatctatccgagactcagccgaccattccgaaaaggggccaccaccaccggcgtcgcgtggatatctccgcctcgcgtttgccccgcgctgtgctcgtccgcatctttgggcatttgagtgtggctgagttgggtgctgtttctctcgtttgttgcagttggaaattcatcgtcgactcaaatgacttcgatctgtgggctcgccatgctcgtgctcagctgccggagagcgcgctgtccgacccgtatttgtttgtcaacacttcctcccacagggaaatgttgagggcatttaaacacgcctggaatccatcggactgttctcgaaatgcttttgtccgcaccaatggtttcaccgtccatcggcaacccattgcacagagtacggatggaattcggggcaaagttggcgtttcgagcggggcgcactgttgggaattttgctgggaaggcccactcggaactaccgctgttgttggagtggcgacaaagttgccgaaatgcatgacttaggggagttgtgccaatgttttgtgccttaagacatgccgcgttgcattgtcccggctatttgccgttaattggcagcgacgaccaaagctggggatggaatttggtgaacaatacaattgcgcacaacggcgaa

SEQ ID NO: 87113 - DNA, 708 bp, Heterodera glycines
  unsure (1)..(708): unsure at all n locations
ataaaattgtcccctcaccgaaacccggaaaattccctaaaactcctacaacaaataatatgaaatacttgccgccggaacttttggacgaaatgactttttacatatatcctaaccaaaattgttcgagaattctgacttcttcctggttactcatggaatttttgaggcctcatatcgaaagatggaaaaaaatatttaaaatactgcttaacgagttgatcgatctgcacaaactctgtaaggaagaaatcccttggcgcacatttaccgccctggcagaaaaggacaaaaactgcaatgcctttgttgccgcgttactggaactggttaaagaggacgcttatgcatctatcgacggatctggctcgaatgcgttgctcatccgtctccgcgaactttacccaagtgttattgaaactcttgcgtggactggccttcaaacactcaatgccgaactttttccatcaacacagcgtatggtgcaagcacttcgcgagttaattgaaacgacgggactttattttggagccgttcccaaggcgtcctcatcaaaggaacatttttaccattctgtggcttgcgttggcgatgttccgccgaacgttgatgaccatcctccgccacagcttaagataattgatgctggtngtcagtcgacttcctcatcaacggctcccattccgaaaccgctggacaaatcgatga

SEQ ID NO: 87114 - DNA, 733 bp, Heterodera glycines
tagcgtttggggtagtgaacgatatcccacgcaagaatgggcactcatcggcgagtttgaggcattggacaatcgcgaagtgcagctattcaatgtgctggaacacacttcgtacgccaaattcgttaagttggaactgctcactcactatgggtcggagcattactgcacactgagcactttccgtatgtacggcacctcaatggttgacgaatacgaagcggaaactgtggtggcggttgacgccatgcaacaacagcaacaccaacaacagatggactcggtgttcggccgcacattctccacacttccgtccacaaattcagcagcggtgaatgaagctgtggtggccacgggtggggaggaggaaaacagacagaacaacggcacaataacggaaaagacaccgctgacgacagtggtaattcacaggccgaccgaacagccagatgttttgcgacgctgtcgcaagtgcccatatgaaatggcgtcgcaatgtgattggttttgccacgtattctttggccatcatcagaatcaacggacgacagagatgacaaaagcgacggactcttcctctccatccgctactttgcctctggctaaggtatcttcctcactgctcatggaatttctcaaccgaatttcgcccagtcgttccgcaatttgcgcagcttcttcaatttctcgactcaaaacatgcgaattgaatgggaagaatgggaacaaccag

SEQ ID NO: 87115 - DNA, 616 bp, Heterodera glycines
  unsure (1)..(616): unsure at all n locations
gttcgtaaattccgtgcccttacaataagacgaggacactttccgcgtcgaacttctcgtcctcccgtgcattgtgctggcgctgtttgtcaacgccgatttcactgcgttggaagttttgtggaccttcagcatttaccttgaggctgtcgcgattttgccccaacttttcatgcttcaaaaacgcggcgaggcggagacaatcactgcccattatctgtttctgcttggcatttaccgcgctttatacattttcaattgggtctatcgctattacactgaggcgttctacgacccaattgtgatcgtttcgggcattgttcaaactgttctgtacgccgatttcttctatctttacgtcactcgagtggtcaaagatggggccaaattggaattgcccatttgagtgatcaaagattggacgtgatgagtaatcgatccccttttcttggcctttttagttgggtgttccatttgaaaatttgatgtcccttcattcctttattttgtcctttaccattttctttcgacaatttgcctttgggttttttgttatatttttattctttctgtgaataaatggcttttgggcnnnaaaaaaaaaaaaaaaaaaaaa

SEQ ID NO: 87116 - DNA, 664 bp, Heterodera glycines
taaaaatgggaaaagccaacgaagaaagtctcttcagaaccatcggatgttgaggttttacatcttgtccttatctgaacaattaatttcgcgggctgaagtcgatcctgagatttgtgtagttcaaattgcggacacttccgtaaactctgttgttgatcatttagtgactgagacttactcaacgacggaatgcgcctcacctttgcgaaccaatccaacgtttttgaccaatgtttgcagaataaacatttcatccaaaggacaacaaaagattttcttctgtgatttgaatgagcctttgctcaatgtaatcaatgaattcgctgaaaggacgaatgtcgacccgaaacgcgtgaatttgtacacaaaacaatacaaacgctgtgatccgaaggacacgccgaggacattgggactatcggaaaaatgcgatgaaattgaattggacgcatttgaggacctcgaagagaatgaagggaaaaggctcgcacttaaataccaaacgaagggacagaggccgaccatagtacgcgttttgccggatgcaacattcgcttcactgaaggagctattttgcactgaccatgcgttggatcctgccaagacgcgcttccttttgggttcaattgaaatgatcgctgatgatgaaacgcctaattcg

SEQ ID NO: 87117 - DNA, 607 bp, Heterodera glycines
ataacgcggcacagtataaatataaaagatccgaaaaaatgccaaacattttcaaaatccttctgattgtgcttttggccgtcgtctcattccgtctctcggcttctactggtgacaaaaaaactgctaatgatgggagtggaaacaactcatcagctgggattggtacgaaggtcaaaagaattgtcaccgctggactgctcttcacttccctggcgacgggtggggcggaagcgattgggcgaagcaatgctcagggaggaaatgccgccggattggtgccatcgcatgtgaccaatcgctcaatggctccaccacctcctcctgtgcaatttgaaatgggggcaaatcgattagaaaaaatgagggcacacctacgcgaacttgctgagaaaatgccggtcaatgaatcgaagcgtctgtcaccgagtggacccgacccacatcatcattagggccatggatggatctaacggaggaagaaagaatggatgcttagttttcagattttattctatcctcttttatttattagtttttcaaaacaaatttcttccacaactttttaaactatttgttgttttgaatctttttagataaatctaaa

SEQ ID NO: 87118 - DNA, 614 bp, Heterodera glycines
tggtgatggaaatgcactcaatgctgtttattttcctatggaatggaaatggcaaaaaggcatttatgcctggttttaagcttctaaggcaatatttaaaaaaaccctttaaagcggccaaaataaccgctaaaaagagcaacatatctctcaaattgattatttttggtaaaaataaaaaaattcatgaattttttcccgttgttaagcccctttttaatttagggaaaagtcagggccattatgctggtgaatccgcaaaatccggaggccggctacttttccctggacgaaattcggccggtcgtccactgggccctgagtcgcaatttgttcgtgcttttggacgaaatttacgatttgtccatttacgacgaggacagcgaatgtccgtttcgaagtgcggtcgaactgttcgaagacgaacgcagccgacagaagctgatttggctgtggggaccgagcaaggcaaaagcaaaaaaatagaaagggaaaagggaacggaggagaaaaaaaaatgagaaaaaaaagggacaaagggccaacaaaacggacaaagggccaacaaaacggacaaagggccaacaaaaaggacaaagggctaacaacagtca

SEQ ID NO: 87119 - DNA, 600 bp, Heterodera glycines
  unsure (1)..(600): unsure at all n locations
catttcgaagtgcacccgctgncaacacttttaaacgggcctcgacaaaacaagcaaattcttcaccaacacaccgatgaatagcggcgtcagcccaactccgttcctttcgctccgctgtgtgtgctcagtgctggtgctgctcatctgtgcgttcgatgtgtcactggcagcaaaagacaaggagaagaatggcaaagaagaaccaggaggccaatttaatacgctcagcatcattttgctgattccgctggtcatcgtcaccggcgcgttcgtctacctgctgtttatgaagccaaagagcgaaggaaccggcgatgacgacggagaaggggacgcggacgtggagaagggaccaaccgaagagacgaaaacggagcctcgaattgaatctccagcaactcttttgggcgtgacagtgccgttggagcaagacgaagaagagcagaaaaaggacgacgagggtggcgaccaaaccgcggagaagaaggaagaggacgcggtgacagcggacgaacaaccgaaagaaggcgccgcggaggcagcggaagcggagaaaagtgcgacaaaggaggagacgaccgaggacacggaggaaac

SEQ ID NO: 87120 - DNA, 629 bp, Heterodera glycines
gaaggtaattgtaaactaccaagatttatttttgctgaatcattccaacaatggtgaagcatatccgtggtcgtccattgggacaagtgcgtattggctttggtgatgccgaccccctttgggactagagaatgaaaagtacaaagtgctgtgccgaagcattcatgtttccaaggcagctctgtacattggttacatgcggttgttggtctccttagtgtccagtctcttttttgcgtaccaatacatgatggccgtcactggccaattgtcctccgaccattggattaaccaagtgactgctcgctttatgtcacaggcaatgatgtccatctgtttgcaagtgattgtcgtcgtacttatggtccacggtgtgaaggctgagaagaagtccttgttgcttccttttattgtgtatgctgcgatcgcagttttggctggttcgatcaaggttatgagtgatttggtgtatttggacacgagcgtctacaaaaacaatgaggcggagagtcgagccgccaaagtgcaatttctcactaatctgttgcgcactgtgctccaggcctggtgtctgtctgttgtttggcgttgctatggttacctgaccgaaaaaaagtggcacgtcagat

SEQ ID NO: 87121 - DNA, 557 bp, Heterodera glycines
acgaattctacgaagaacgcattcggaataccaatgggagaaagtgcgcattttcactgcttggttgtcggcggatgactatcccaagtttctgtcctgtgccgaccttggagtttctcttcatacgtcgacctcgggatttgatttaccgatgaaagtcgtggatatgctcggcagcggtgtccccgtgttggccaagaactttcccgccatcggtgaactcatcgatggaaccaatgggctcctctttgatacgcctgaagaattggaaaatcttttggccgacctttcgcttggatttcctggaaattcgaagcttactgatctcaccaaaaatgtcaaggaagaggcaaagaagaacgattggactaaaaattgggacgatgttgtctggccgcattttgagaatttgtagacacgcacataacgggaccaatttgacacatgcccagtgactttcttcaatgactatttatttatttttttatttcatgagaaatcaaaattataatgtttttgttttatatattttgaaagataaatttttgacttctaaa

SEQ ID NO: 87122 - DNA, 415 bp, Heterodera glycines
acccggggacgcacgccattccctttactatttaacctcttcattcgcgacttcgtctcttggcaaccaaaaccaaagatttgccccatcaatttgaatgctgtaaatacgaagagccctcctttggatgttacacttgtcatctcctcctctatttaatgttcggaaatcgttgaccacttcatttctctccgagctccgaacttatgatgtgtggcgctgcgaagacggaaacgaatgtgcaagtggctgttgtgaatgtgaactcgggcgtcattggggccaatgggaacggcgtgttattggcggaaagggaaaccgactcgcgaaatggcgccgaatttacaccaaactttgacaacactcaccagggcaatttgttgccctcctcgttttctgcctgcggtgcttccac

SEQ ID NO: 87123 - DNA, 732 bp, Heterodera glycines
gtggattttatttacaacctttaccaaaaaacgaaaatggcccataaaaggaagcgacaaaacaggatgcgccgtgttcataacaaattccgacttggtcgaccagtgttcgttcccgcttgaccagctgccactgaacacactcgtcattatcgcctcacaactcccgttcaaggacttcaagcgggtcggcatgatttccaagcagttcaaccgagctcaacgaatgaccaggttcagcagaaagcacgtctcggtcgacctgttgcgcaagctgttcccggacgaagtgcccgacacggacgtggacaacagcaacaacgacggcactgagcgtagcgttggcatgctggaggtgatggacccgctgcgtcagcacctgcgaagttcgccgcccagaaacatccgtgaagtggacatgagcaagttcagcacgttccgcgagtcgcactttgtcgaactgttccgttcaatcagcaacggcagagaactgctcacggaagtacgacggctcaatgtgcagaagtgtgtgatcgagttgcgcgacatggaatttttggcccaactgatgcccaaagtgtggtacattcgctgctccgcccaaacgcttgtcattccggaagacattgatcagtccaaattggcactcagcgtggaacagatgcgccaattgcacgccaagctggacaagttcgactacgtggcgaggaagtgcaccaaaaaacacctgtg

SEQ ID NO: 87124 - DNA, 603 bp, Heterodera glycines
gtgattcgctttgtccttccctttagatggcttttcccgattttgcagccggcgcaatggaaaattggggattggtcacctaccgggagaagtatttgctgtacagccccgaactttacacggcgcaacagaaacaagcggttgcatcggttgttgcgcacgaattggcacaccaatggttcggcaatttggtcactatgcgttggtggagtgatctgtggttgaacgaaggcttcgccactcttatggagtatctcggcacgaatgcgattagcgacggaatgttccgcatggacgactatttcctcgtcgaggctctcgactcggcattcgaccgcgactcgcgtgccacttcccacccgctgtttttcgaaatccgaaaagcagaagatgtgaccgaagcattcgattcaatcacttacagcaaaggtgcatccgttctgagaatgatccgcgcagtgatgggcgaagagcacttcaagaaggggctcaatgtttgtacaaattgaggggtctgaagaaaatgttttggcgcaatgcgacggcactttgaaattggacccattggcagtgccttttggcattttgtcggctctttcagat

SEQ ID NO: 87125 - DNA, 611 bp, Heterodera glycines
gccacatattattgttattatatcttgctcatcgtctgcaactttaatccacgcagcgacgtgcccggcgcaacaatggcaagagaggactacggcttcgatgcaacggcggcggcagcggcggagcagtctcggccttcggcaaccacttcaacgccatattggcagcacgactccttggacatcgcccttcaagccatcatccggaaggtcaggcaatcgcctgtccaccgcttcacggatgagatcaccgacgaggaactccaacaactctgcatggcggcaacggacgtcttcagaatgcagccgacgctcgtcaggattcagccgccggtcgtcgtcgtgggcgacatccatggacaattcacggacctgcagaggatcttcgacacgcatggctaccctccagagcagcagtacgtcttcctgggcgactacgtcgaccgaggcccccagtcactggaaacaattgttcttctcttctgctacaaggtcaaatacccggcgaacttcatgctgctgcgcgggaaccacgagtgcgccaacatcaacagagtgtatggcttcttcgatgagttcatcaaccgctacaagcgtccggatccctgccg

SEQ ID NO: 87126 - DNA, 218 bp, Heterodera glycines
aaaagtttccgcccctagcgatgagctcgtcaacaaactgcatgtccgaatactgcgcacgacttcgcgagctgttcaacgcacacaaagtgaagcatggcggacttggccacgacgtgcagtcggaaattgcgtgaaattggcaaatgaaaggccacaaaaattataagctcaattttcgaatctaaaggacaacagtgcactcaaatacaatatta

SEQ ID NO: 87127 - DNA, 624 bp, Heterodera glycines
caaaagctcggcactccgacgtggacgagatcatacatttgcgcaaccggcttacatgcgtgacccgttgcgtgccgaccttctcgcgggctccaaactgaaggaggtgaagaagacggactacaaccagtgcaagtccatgctgctcgacctgttcgacggcacgcgcgtgattttggtgggcgaaacgcgggaccgaagcggacgcaagcggttgatctcctgctttcaactgtaccgacaaagcagagccgcggcatatttcggcatgttcgctgtccatccctttttccaagcgtccggacttggcaagcgattgttgactgttgctgaacgctatgcccgtattgtgtggggcagtgacgagatgcatttggatgttggcgggagtttggccgaattaaagttgggcatgggacgactgcagagatactacaagcggcgcgggttcctatcaaccggcattcttcgccccttcaatggggctgtggcgcgcttcatcacggtagaccgaaacgatctgtggattgagctgatggtcaaggacatacgtggagcattggatgacatcggcggagatccagagaaacggatgaaaagagtgaacagtcgggggagattggc

SEQ ID NO: 87128 - DNA, 542 bp, Heterodera glycines
  unsure (1)..(542): unsure at all n locations
cccttctactgtaacgtgctcggaatgcggctgctcaagcaattggacttccctgagggaaaattctcgctctttttcatgggctacaaagatttggacgaaatcccttcggacgatgcggcccaaaagaaattcgccctctcaacccattcgaccatcgaactcactcacaattgggaacatggtacggacttcaagggctatcacaacggaaactcggaaccgcgtggattcggtcacattggcattgctgtgcccgacgtggactcggcttgcgcgcggtttgagcaattgggcgtaaagtttgtcgaaaaaccgaacgaggggcgcatgagaggcttggcattcatcacggacccggacggctattggattgagattttcaatccaaacaacatgtgaaaaacgaacccaaaagattgagaattggattttcccattggcgaagcaatcaatttcgaaaaatcacaatagagcctagacattatttatttttttatttttataatcgaataaatatttatgacttgtaaaanaaaaaa

SEQ ID NO: 87129 - DNA, 365 bp, Heterodera glycines
ccagtttgaggacaatggttgccgccaatctgaagctttccctgatttttgtggccggcttttgcctgctgttcatcgccgactccgatgccgggaagtcgtgcaaaccgggagaaaagggaccgccaggccctccagggaagccgggaaacaaggggaagcccggcgtgtgcaagcccaaatatgaaacaacttccaagtacggtacgactacttccaagtacgacaccaccacttccaagtacggtacaacaacacccgaatacgatacgacaacatccaaatacgatacaacgacttccaaatacgacacaacaacttccgactacggtacgacaacttccaaatacgatacaaccacttcc

SEQ ID NO: 87130 - DNA, 627 bp, Heterodera glycines
gtgcaaacacgcttgtgcaatggccatgcaaatgttggtcatgtacacgcccatcaacagttacgaaggttcggaccaacttctgtttccgctctatcgttcagacttacatttgttcagacaaaagccccaagaatttttggcaaatgccttgctgtcaaacacggatgtagtccatacgcatcccatggaattgttgccgagcactgaccgcagcataaacaataacaacaacccgtacacgttgatgatgaagcgcatttcgacaccaccaattttcgatgaggaggcaattgatggcgaagcgttaaatgcgcggaccgaacaaaaggaggaggaacaaaatttgttgcgggctggacgaaacattgaagaggtgactgctccaaaaatgtatgcgcgtcatcttggcgatttgggaggaacgatgtttcgcttcggatgaattgttgttatatttttcatgttcaaaacaacacagcgcaacggtgaaaaataaatgatgaacaattaccgacaaaattttgaatttcctttcgatctctttggcacaaacacccaaaaaatgtgtgtgaaaacataataaatttcattgaatttttctttgaaaatcgaataaatttgtgc

SEQ ID NO: 87131 - DNA, 725 bp, Heterodera glycines
aaggcgtcttgcataaaactcttttgcgtaaatgcccgacctcttttccacactgtcaacgtgttgctctgctcgacctttctggaatggtcacttcgtacggtgcgccatgcgaaagcgacgaccgaattttgaaagcactgcaaattctcgtctattttatacccgaaacgcataagcaatgtttggaatgtttgctgatccatttgaaaagagtgtcggctcattccgacaaaaacaaaatggacgagtccaacctcggcctgctcttttcttcctacgtttttccagtccaacaacagaaatacgaatcaattgaaaaggcaaaagacgaaattgcgcagttttgtcgtttgtttcccgttttactcaaacattgcgacgcgctgtttaaactgcccgctgagctcgtgcagactttcgacgcttctctaatgaaaagggcccttgagcagcagaattgcggggacctcacaatcagcagcactccctccttcgctttctctcctctgttgccaactccaaatcgaaacacaaaaactccgagaagagacgaagacgacgcggaagtcgccattgtgcactcgtgctcaaagagagtggcgacgcccaaccaaaacaccaccgatttggaagtggcgaagttggcggcgaacatcgcatcgatggatgaaggctcggccaggtcgcggctgttgaacaaaatgatgactgtgcagcgccag

SEQ ID NO: 87132 - DNA, 703 bp, Heterodera glycines
taaattttcgggctttacttgcatttacaggaacttaagcattttgatggacaaaatggcaaattaattggtaatgacagcgacgagtcattggaatcattggtttcatttatttctaaaaatggctttggtctcataaacgacgaacggagaacaaaaattgatcaggcaattcaagaaatagaacaaattgttaagaaatggaatcgcaaagcgaaaattattgtcatgggttcctaccaattgggcgcactcaccaaacaatcagacatcgatgccatttgtgttgtgcccgaattacgcacttggagagcggcaaaattttttgggaaggcaaagtgccaaattcaatggaacgggttcagaaggtgcgcggatgattcactgttttgccacttttgtttggcggcccaagtaacggggctcaatcggatccaagacgcgtgggtgccgctgattaaattcaaattcgaaatcgacccgaaaacttccgtcgattttgacattggactagaaacatttgcaatccatgacgacatttttaaatccgaagagccaataaaatacgaacaatgcgacgcattgtcagcgaaaatggccaacgaaattggacaattagcgaatcggaggagggcatttattacgaggggtggagactatgaggaactgatggaaatgaacagcgagcgggagaagctgagaa

SEQ ID NO: 87133 - DNA, 757 bp, Heterodera glycines
gtgggaaaatcgttctgtattttttgcacttttctactccaatttatttacaaaattgaaaggtttttcttctaaaatgcatttgatcactgatttgaattatgatcgatcggtcattcttaattaatcatttcttctgtggctgatcactctttttgttgtattgtccgtcactcacattcattgttagaagaagacggcccatttgtgatgctttgtccggcttcttgttcttccatttctttcgatggcggagacaatggcctaaattcgtacgtttcagacctctcacagtccaggaaaaaaatatggatttccatgtaaatgatagccctaattattacacaaatgccttttttaattgctcacccaatgcaaagaatttccacactgaaattgttccgaaaaaggatgcacaaacgaaaaattggtacgacgagggccgaaattgaaattgaaaattgcaatgtgcgcattcccgaacttgttcaaagtcatctgaaacttattcgacaaatacgcgagaatgtggtcgcccccgtggacacaattggctgccatgcgttggccgacaaatgcgcagacccaaaaacgtatcgtttccagattttggtggcacttatgctctccagtcaaaccaaagaccaagtgacggcagaggcgatggagaggttaaaaaaggaaggctgcaccgtggacaatttcatcggaattgcagacaaacggctcgagcagttgctgaaccctgttggctttt

SEQ ID NO: 87134 - DNA, 580 bp, Heterodera glycines
catttgaagaacggagacgcggacaaggaggaacagcgcaaagtttttcgtgcacaaattgaactagctaaagaattgcagttgcccctaaacgtgcattctcgttcggctggtacgcctgtaattgaatggttggccgcgcatggggcgcaaaatgtgctgttgcacgccttcagtggcaatgtggaaaatgctcaaaagggcatcgaaaagggcttcttcttttccattcctccatcctttgctctctcaaaagaaaaggaagcactgatccagaaaatcccgttgagtaaactttgtttggagagcgattcgcccgtgcttgggccagttgccgaggagcgaaatgaacccaaaaacattaaactcagtgccgagttcatcgccagaattaagaatgtttccacggacgaagttatccgagtgacaactgagaatgcgaagaaattgtttccgaaattgaaaatttgatggaatacatatacctagtcaacttgttctttcatttgaattttattgaataaaaatttgggtactaaaaaaaaaaaagaaaaaaaaaaaaaaagaaaaaaaaaaaaac

SEQ ID NO: 87135 - DNA, 533 bp, Heterodera glycines
agtgcgcattgagggaagagcactgcaactgttggatgtcgagcaattatgtggggaattggaggagatcaccggactgaggcctcttccccaccgaccgttcgtcgaaaatttcgtcaaagcattttatttgccgtttggagagcttcaaaattggatggtgaatcatacagagtacagcctaagccaaacgagcgcaattttaaatgcagcggctggggcggcggcgaacagctcgtcctccgtcgcgacgaactccagaaaagcgaccatgtcgcgcatcatggccaatctgttgggcgcgagcggaattggggaaggcggcaactctcttttccaatgaataattccaatttattgtttaatttcacatcatttcaatccctttcatcttcgcatttaataagtcacgcaaaagaacactcacattttgtaattctaacaaatcccagttttgtttgtatatattgaatgttgttaattgtgataaaaaaaggcttaaatttaaaaaaaaaaaaaaaaaaaaaaaaaaa

SEQ ID NO: 87136 - DNA, 368 bp, Heterodera glycines
  unsure (1)..(368): unsure at all n locations
ttcgtctttctgccttttgctggccacaacacaacatttccctaacgaccttcgaccgactacgacacgacgcgtacgatgaacgaggaatactgcttctctacttcgactgttgttgcacagagctgggcccaaacaaacttccgaccagtggacgagcaaccgaacagccttgtggacacgctcatcgccaaactttcgcgcacgactttcgagcagttcacttccgaagtcagtgctcaagacattcacaagctttngcgaatgtcaccgtcggtgttctccagcaacagtcaatgctcatccatctgcagcctcctgtggtcctttgcggcgacattcccatggccaatttcgggacttgctga

SEQ ID NO: 87137 - DNA, 684 bp, Heterodera glycines
caatttagatgaaagaatcattcaccgttggcgccaagtgcccccaattgaccaccaattgccccctcgactttggcattgtgccgctctcctcccgcccgatacgttgttgttttacggtgggatgaatgaggtgccctcccgcgattcgcccttcgtccgcactttgctcgtccgtcgtctctgtcctccgacccttcgccatttgtcgctgaacgctttggccttccaaattgtgattcgctggtcacaggaaatgaacgcgcgcaaaatggcgggtgccccggaaagtgcggccgggacacttggccgaagaatgaattctgaatcggattccgatctgctcaatttcgtctcgcgcacttttttcgctcatctgccaaattcgctccactttcatctcaccgttttgttgaccatccgaaaacactcaaaggcattgaatttaatgggcgccggtggggcgaacattccgcgcgtcccttcgccgatgccatcgcattggaatttgccgcccatccctttgcaattccatttgctccatttggtggacggaaggaatttggccggaggcaacgaggaaagcggcggcgaaaatgaaatttccactttctcgcgtcccccactcattgccctttctcccaaatcgcaacggcgtgcgttggcggatgaaataactgcgct

SEQ ID NO: 87138 - DNA, 617 bp, Heterodera glycines
  unsure (1)..(617): unsure at all n locations
catcataaaataaaacaatgaacaaatttgtgggcatatttgccgctgttttgctccaatttgtttcgccattttcggcattttcccgcgtgccaacgacgaccaccgaacgaccgataatttatgacccaaaagaaatggtggaaatcgaagtgaatttggtgaacaacaccaacaacaactgcacaaatgatgttcttcgaaaataccgtgtggagatcactaattatgtgttctttttggtgtgcgatttgaaaattcgagtccaattgccggaaggggcaactttggagaatgtcgtcaacctgaaaccgttcaatggcaccaccgatcaattcatttttcccgattccttgcgctacctttacgtttccaaaacgctcgaagccgaactgagcgtcaaaggcggcgagggggagccgaaaatcactgttttggatgcaaaggccgctttttcgccgaagaaatgccgaatttcgaaattttaatggcaatttaaagaaaggacgaaaatgaaaggagaaataggatagaaaacgtaataatttctaaagggatttgtatcaataaatatggaataaatgttgatgaaccgaanaaaaaaaaanacaanaaaa

SEQ ID NO: 87139 - DNA, 224 bp, Heterodera glycines
ttcctgctattttttgataatgggtcgaccaggcgttatccgatgaaaaaaacagcaaagaatacaaaccaagcccaaaaaatagaacgattgtcctttgacactgatcagacgcctcttcaaacaccaaaggacagcaggaaaaacaagaatatgaacaaaaagccatccaattcgatgttggaggaacagccaacaacatggaaagagcaaatgttgaagat

SEQ ID NO: 87140 - DNA, 612 bp, Heterodera glycines
ataacgcggcacagtataaatataaaagatccgaaaaaatgccaaacattttcaaaatccttctgattgtgcttttggccgtcgtctcattccgtctctcggcttctactggtgacaaaaaaactgctaatgatgggagtggaaacaactcatcagctgggattggtacgaagatcaaaagaatcgtcaccgctggactgctcttcacttccctggcgacgggtggggcggaagcgattgggcgaagcaatgctcagggaggaaatgccgccggattggtgccatcgcatgtgaccaatcgctcaatggctccaccacctcctcctatgcaatttgaaatgggggcaaatcgattagaaaaaatgagggcacacctacgcgaacttgctgagaaaatgccggtcaatgaatcgaagcgtctgtcaccgagtggacccgaccctcatcatcattagggccatggatggatctaacggaggaagaaagaatggatgcttagttttcagattttattctatcctcttttatttattagtttttcaaaacaaatttcttccacaactttttaaactatttgttgttttgaatctttttagataaatctaaacccct

SEQ ID NO: 87141 - DNA, 676 bp, Heterodera glycines
cagtccttaagttaatttggtaaaataaacatcttattaatatatttgttttgtataaagcattatggacatttctcgacttcgaaggatttgtgccatttacgcttccgattggattaacggatatccattcagtttggcggtgattaagaaggcattggagtcaaaattaaatgtgtgctcattattgttccttcatctccggagggatctgcccgatactctcaaaaataacccaaaattcgtcgcgttggaatgttttggtttcgattcattagaggcaattcgcaaaagattggcaaaggaagacatttcgcgcgaatctttggtgttcatcgactcgcttcccgttctgatcgagcagttctcgctgccctccacctcgtggttcctcacccaaattgccgaactgtccgcctgcgttttggcattggttcacagctcagaatccgaagatgaccaaaacagcgaagattggcgacgaattgaatcaattgcgtcgactgttttcgagcttagggcgagggataaacacacattgtgccgaacgaagaccaaaaaaaggaatggcaccgcagaagagaagcttgaacaattctccatcgaagaagactattccatcactttttctccatttgattattcttctgatcggactgacgacaaattcgtcgag

SEQ ID NO: 87142 - DNA, 573 bp, Heterodera glycines
cagttgaattttattttttttttttgtgtacataaaaacgctgcgccgaaatctatatataagtgacttttttcatttttttttttaagtttttcttatttttctattttttaatataatttttaggtgtaaaaaaaaatatttttttttttctccttatatatttttttttatttaatgaataaatttttaatattacagttgaattttatttttttttttattttttttttgggtacataaaaacgctgcgccagaaatctatatataaagtgacttttttcatttttttttttaagtttttcttatttttctattttttaatataatttttaggggtaaaaaaaaaatattttttttttttttttccttatatatttttttttatttaatgaataaatttttaatattacaggggaattttattttttttttatttttttttgggggacataaaaaccctgcgccaaaaatttatttttaaagggacttttttcatttttttttttttaaagttttcttattttcctattttttaaaataatttttggggggaaaaaaaaaacccaaaaa

SEQ ID NO: 87143 - DNA, 695 bp, Heterodera glycines
gtggttgctcttcaccctgccgtgactccattcttagaaaacgcacttcttttatcgcttcttaattggccttgagattgcgccttctccttccatcccttctcgtcgtattgcgagcctttcgatggctatttaaaatttgatggtgaatcgatttgcttctcgggttgggtccaactgccccaaggaatgttcaaacatcgcaaaaggggttgggctgttgtgcggaacaacacattctcaatcagccaagacgacgaaagtcgtactccgttctttgggccggttgaattgtccaagtgcgtttttcttggcaaagagtcagattccgaatctgtggtggtatttatactccgtgatttgtcaaagagaagcaaaaatcagaaacatttgctgaattcttcgggcgaacttaacactgtccgcttcacacctgaggagaatcacgagttttggctgtctctcatggcgaagtgctgttccccacgaaatgatctcttcggagagaaattgccgatggtcgaatgttgcgggaggctgtgggtgaagcaggggatcagtgggcattggaacgagggatgggcctttgtgcacggacactctttgacctattgggtgcaggcgccgaatgccattgcggaggtggacattcgaaaaatatttttggtcaagcaaaacgacattccctcctccga

SEQ ID NO: 87144 - DNA, 658 bp, Heterodera glycines
aaatttgtctgcgtcgaataaaaagattctaatgaagtgccactctgttcggaagtgattctttaccatggcctaagcaagctccaatacgacatgtacagggccattctgagcagcaatcgatctttctttgccaaaaacatgcgcacagagaaacaggcgcgacagtctctgatgtcaactttggtgcaactttgtaagtgctgtgaccatccttatttgtttcgaggaatcgaaaaggaaccatttgaggagggagaacatttggtcaacgacagcggaaaggcattgattctggacagactgttggcctatttgcacaaaaagggtcatcgtgtcctcatttttacgcaaatgcaacgcttcctggacattgtgtacgacatcatgagtcttcgaggatacatctgtgagcaattggatggaaccgttagtcaaccggatcgtcagaaagccattcaaaactttcaacggcctgattcggacgtgttcgcttttcttctgacaaccaaagcgggtggtcttggtctgaatttaaccgccgcagacactgctatttttctcgattgggacttcaatccgcagaacgacaaacaagcggctgcacgatgccaccgcatcgggcaggacaaacctgttaaaatcattcgtctcgtgg

SEQ ID NO: 87145 - DNA, 618 bp, Heterodera glycines
gtgcaagacatgtacgtctggtgataaatgttcatcttgatgcagtccggctttccaggagttgtcaaatatgcttgaagatactgccgacgaaggatatccgaagccaatcccgagtccagttcagaatttcaaaagtgacatcatgctaaaactgattaaattgtgtgaagaatacaagtacaaattcgatggcctaaagaaaacaactgatgtgccaactggagaagtcgcggaggcatcggcttcaaatgtccaagagggtgacgttggggaggcatcggcttcaaaggtcaaggctggaacaattgcggaggaaatccaaaaattcgttcctccgccacacattatgcaatgggacgtgaaaacggaccttgagatggttcgggccgccgacttttataacatcaatcgtttgatcaacgatgattacattgacaatgtgtacgaaatcgtaaaagtcaaatggatcaatggcaaaacgccgcaggaaattcgcaagggattcggcgtcgaagagccgtacccgccgggacatccggaatgggcacgagttgagaaggagaacgagtgggaagaatcggacgaggaacgtgaggcacgccatgcaaaggaacg

SEQ ID NO: 87146 - DNA, 722 bp, Heterodera glycines
gatttttgctattgacagaataacaataatccggctaactaaaatgatcacaattaccatgccaatttgtcgatctggctgtgcaatgacgtttggatggacattctgccgttgtttgaccgtcctcagctcggcctcaaattggcaatgctttcgccccgtttcgatgctcttgtggacatccatttcgatgccaaaacggaattgacgctttggagaccaatcgcaattcgcaacgacggtggcacagacacagctacgccagaattacgtgtgtttatcgacgatgcctacaattccgtgccatttccattgcccgacgcccattcgccgccgatgccaaacaacattcgttttaaggaccttcgaattaattgcattgaccattccgtgatcgcatttcttagtgccaatcaactcattttccagaagggcaccaatttgcgtctgtcgcttccttttggtacattcaacactaatgtcaagcaaatttgggatgattttgcgcgtcaaatttggcccatttttgcaccaaccattcgccactttggctttccgaacggccatcatctggacatgttgcttcgtctcgtttcgccgacaattctcacggatgatcagatcaacatccattcaatcgattccggtcgtcagtttcccgaaccgattggtgatgatcattttgatgggccaacaattacaaattttgatggatcaattgt

SEQ ID NO: 87147 - DNA, 707 bp, Heterodera glycines
cactttttgcctattttgaggatgctcggaagttgtacgaaacacgtatgaaaaatgcctcaaatggcaacaatgaggccgattgtcgtataaagaatttggaaaaagagctgaaggtgctgaagcgacagctgagtgcgttgggcgaccttctcgaccagtttttggacacttcgttggccatgcgcgaacggacgctgcgaatggagggcgaattggggcgacgattggaacgattggaagcgcaaaatgtgcagctgagggcaaatttggcggcgatggggcaacagacgcacaaaaacggggacaacgaacagaggaatgaagcggagcaaactattgaaacgatacatttcgacgaactttcgatttccgacggagttccgcttcaacaaaatgtccaacagcagccgcaaccaccgaatgtcagcaattgccctgtaaatgatgaggggggcgacggggacggaattggcgacgaattggcccattttttggccggtcttccgcccgtggatgaattagggcaattggtgctgaacaagttcaaatactcgtgcgaatttgcccaacttctctacaccggcggaggccatgtggactcggtgttctgcaatattttcagcggatatccgcccactttcttcgaagaattgatcgagtacgccctcacaacgcatcgtcctgatgcgttaatccgtcgcatt

SEQ ID NO: 87148 - DNA, 388 bp, Heterodera glycines
tccaccgaacctgacatatggaagaattagccaggaggaagtggacaaaattctttgggaagtcactgccggcgaattgggcaaagcgccagcggcggtgcgggacgaactcggagaaaagaaaaggcaaaaagaagcagcgattgccacggcgaatgcattcattgctgaacaaatgggctccaactcagtgacgcattgatttttagcaaattatgaattgtttccattcaattccaacattttatgtgtatattatcgaccaacaaattttctttggttggtttttgatactttttttaacaatgattcagaatatcctatcagaaaggctattttactcatttttataaaatacataggaaaaaaaaaaaaaaaaaaaaaaaaa

SEQ ID NO: 87149 - DNA, 708 bp, Heterodera glycines
atcgcaaagcttttcccgacggtgagaaaggtcgtctgtatgtatcggctgctctccaaagtcgaccaataccccgaggcgtcccgaatcgttttcgaccgcacagacgtggccaagccgacgctgtccctttctggagtgtccgagtatttcttgaacattaaattagaaaaaactgaacgcgaaggcaattggagtcagcggccgctccgtctcgagcagaaaaaatacgcggcgcaagacgcgcactgtctgaatcggatcttcagaattgtggcatcgaaattgaaaagattgaaggacaatgaacttgccaaggagttgaaacggcactcactgatcgatttcaacgaagaaaaggcaaagccaacgatggcaattccgctgctcagcggacaattggtgcgagtgaaggaaggcgaggaggacttcattttgaacgtgcaaaaagccgccgtggaaattgagcgatcagccaacggagtgttggacggcttcagaaccattggagatgtccgcttcatcgtcgactcgatgcttttcgggttgggcaaacgtttacgcaagtgcggcttcgacacgcgaatgattggcgaccgtgaacaaattgtcgagttttgcaagcagtcgaaggacgaaaaatctgtggtgttaagcgccggcaaaggacataaacagctcgccctccaaatgccagacaatgaagtg

SEQ ID NO: 87150 - DNA, 624 bp, Heterodera glycines
gcggcacagtaacaaaatattaaaagatccgaaaaaatgccaaacattttcaaaatccttctgattgtgcttttggccgtcgtctcattccgtctctcggcttctactggtgacaaaaaaactgctaatgatgggagtggaaacaactcatcagctgggattggtacgaagatcaaaagaattgccaccgctggactgctcttcacttccctggcgacgggtggggcggaagcgactgggcgaagcaatgctcagggaggaaatgccgccggattggtgccatcgcatgtgaccaatcgctcaatggctccaccacctcctcctgtgcaatttgaaatgggggcaaatcgattagaaaaaatgagggcacacctacgcgaacttgctgagaaaatgccggtcaatgaatcgaagcgtctgtcaccgagtggacccgaccctcatcatcattagggccatggatggatctaacggaggaagaaagaatggatgcttagttttcagattttattctatcctcttttatttattagtttttcaaaacaaatttcttccacaactttttaaactatttgttgttttgaatctttttagataaatctaaacccctgaaaaaaaaaacca

SEQ ID NO: 87151 - DNA, 434 bp, Heterodera glycines
ctctcttccggtgcaggctcaaatcatcgcaaccggcgccgcaatcaccaaaagataggctgtagcccgcacgacggcccacaacgcgatcaacgcggccttgggacgcgacgtcgccagctttcgactgaaccagaccgtctgcaccgacaggaaccagaccgccccgcctgtcatcacgaccagtcccgcgacattgggcaggtcaggtcgctgcaggatcgctccacccagagagatgaagacggcgcatggggccgccagataacactgggcatagaatggcggctgaagggcctgacgactgatctgcttgccctgtcggtgcagaagacttgtggccgccacaagcggaatgaggctgaacatcaacgaccgaaacagcgccagattctcctgcgagtcgagcaaaaaaaataaaaaaaaaaaaaaaa

SEQ ID NO: 87152 - DNA, 653 bp, Heterodera glycines
ccccggatgctttccgtctggttagacttggcgcccaaatgtgccatcgccgaggcgatcgcctcgggcaccggcacaactgttggcggtactgctcgcacttcggctagcaaaaggggaggcaaagctgcagcagcagcggcggctgccgccgctgttgcaacacaaccacacgacccgaacagagaaatgcgtgacgcgttcaaacggctggacagggcgtatttcttctcctcctactcgcaaatgatttcgcgcatcactcactcggacgccgccacatatgccctgttgaaggaaatgttgtccgaattgatcgtccactttccccaccggtgtttgtggctttctcagtccatcgtccgctccacgcgggtcgccgtccgttcaaagcgttgcctggagatttttgaacttgccaagaaaaaagcgcggagcaacaatgacaacaacgctgctgttgttgacctgaatttgctgatccaacaatacgactatttgaccaccttgctgatcggcattgcggagactcaaattgtgcagcagcgactcagcgggctgagtatggcccgcttcttccccaacattgtggacttcttcgagaacggcacgatgcgcggcggcgtcagcactcgtggcaccggtcgattgcc

SEQ ID NO: 87153 - DNA, 123 bp, Heterodera glycines
ttattttgtgctctcacgcaaaaactttgcagaagatggcctgtttttttggatccaacctttctcgcggacggcacaacggcattgaccatgacaagttggacaacggatggacagatactt

SEQ ID NO: 87154 - DNA, 725 bp, Heterodera glycines
atatattaattcttcctgcatattattgccgctgctgttctccatccgtccgtgccatcaaatcaaatcaaatcaacggcagctgagcacaggcagaagtgtgcacaaattgacgacacaacaaacaacaaaactgggcactgcacaatcaaaagcatcatcttcatcatcggaagaaggagaagcaaaagtgacgcagaaggaggagccgacaactgacaaacagcagcaacaaacaagcaaagcgagcggagcaacaccagcaacagcaggatcaagcagttcaggcaccaccgcggcaacgcatggaacaaatcgacactttcaccgaccaaatttggctggacacgttggcatggcttggacgtgaagagatcggctggcactttgcgctggtcaatgcccgcttcgccgccctggtggacacgcagttgcagcagaggcgatggtacttgacggagttgcacatcaataagcgcaggtcgagagggagcggcgcagaagtgatggtcttgaacagcgaaggcgccttcttctcattgccattggcaaccatctgattacggaatttcgcgcttggcaagcgatggcacggcacatttggcccctgttgaggaacggacttcgcacgctggtcagcctgaagcgcaaacaactggcactgatgcgcaaacacgtgtcgccaaccgtcctcttcgactgtccgaaccttgtcgaaatcatca

SEQ ID NO: 87155 - DNA, 653 bp, Heterodera glycines
aaggatctttgcttaaataaacaaagactgtaaatcaaattgacaactttcttatcaattacaaattgttggagaattgtatcatggacagtgaagtggaagatgcgaatgcgactcttttcgttgttggcgatatcggacgcagtcctcgcatgggttaccacgcctactctctggcccggcagggggcgtatgtgaatttggtcggttacatggacaatcagccccatggagatgtttttggcgaacaaataaatttcgtcgcacttccaaagccgccgatttcttcgtcttctgacaatcctttccgtcgctttctgatccgtttggtcaagatggtttggcttctctttgctattccatacgccttttttgtgctttgtcgtggccataggcaccgtcagcttattatggtgcaaaatcctcccggaattcctgcaatgatcgtttgctacttgttggcaaagattcgtttcgctactttcgtcgtcgattggcacaattattcgagttcaatgctcgacaactcgtggatttcttatttggtcggtttgatcgaaggatttttcggtcgaagggcttcgtttaacttttgtgtgtccaatgcgatgaaaaatgacttggaacgccgctggggtgtgaatgctatcacc

SEQ ID NO: 87156 - DNA, 571 bp, Heterodera glycines
tctctctactaactgttgcacatcccaattttagtttcttccttagtaagtaggcttggtgcacaatgcgcacttttctgttatagccgtagtcgggttgatgttggccgtcatcttggagaatgtaaatgcgacagggaaaaattcgccgacaaaggaacttatacatgagcaaggtaacctacagaaccatgctaccggacaatcgccgccagacagtccaaaccataaaaatgaccatgaaaatgagattagtaacctacagaaccgtgctaccggacaatcgccgccagacagtacaaaacgggaaacagaacataaaattgagaaaggaaaaccgtcgccagacagtccaaagtatgatgagcaaggtaaccaacagaaaaatgctaccggttgccaaattttgtaatcattagccttaaaatggtgaagaaactgtgtggaacgatgatgccaaccatgaacaaacccaaagctgttgtagtagatgtagaaaaaaactgtggtatcatcacgctattattgttgtgtaaaaaacgatccgtttttacctcttttcgggaaaaaa

SEQ ID NO: 87157 - DNA, 714 bp, Heterodera glycines
tagcgcttttttgaatgaattctagcaattggatgatcttaattcttgccttaatcagctattacgaacaattaaggaggacacgagtgaattccctccgtctgaccttcttgatgagattaaacaatgcttggattttctcgccaactcgccaaaaatactcgcaaaacaacgagccgaatacatttccctttcctggcctgctgaccttcgcgtcgtgcttaacaggctcttgcgcactttcaatatcccggaggaatatgtcaaattatgcttcgaactgagcaattgtgcggcacaaagtttgggcgccgattggctaaaatcgtcggataagcaattcctgcgtctgttggccagtctctccagtggtcgtcttcgcattttgttggataaacctgaggagattgacatggctcagctcatcgcctgtcttcagctccaggaatatttttgcggctgtgttgaggatgaacagatttggatgagcgacgatgatgccactttcgtttccaaatgctgtcaagaagcagcagcctttgtctgttcttacacagccgcttgtgcccatcaattgtccgacatcacttcgcgaatggatcttttctttgtcctttatcgtttcatttgtgctttccttagcatcggcggacatgaaataattgacgtcaaattgctaaccgatgcattgcccatacttaccgatgtctgcgg

SEQ ID NO: 87158 - DNA, 292 bp, Heterodera glycines
cgatgtctttttgtattgtttcttaataatttacacattttaataacccttctcttccacttttgttttagaactgttcgtttaaattaaccttttacccttccgggtaattcaacgggtataaatattctcaacttcatttttttcgttttgttcagaattgtcattttcatttaatatgaattttttctggcttgaatttgatttggtaaagattaaatcttttaaaattaaaaaaaaaaaaaaaaaaaaaaaaaaaaaaaagaaaaaaaaaaaaaaaaaaaaaaaaaaa

SEQ ID NO: 87159 - DNA, 525 bp, Heterodera glycines
  unsure (1)..(525): unsure at all n locations
atgtcaaaccgcgaggaaaccgtaaaaatggccgataacgagtccggccaagtcacgcaaagcggtctcacagattcaggagtacgtggattactacggcggcgcgggtgttcagcacattgctctgaacacttcggacattgttcacgccatccaatcgctgcgcgcccgcggcttggagtttctgagcatcccggacagttactacgcgtccctgaagcagcggctgagcgacgcgggcgtggagttgaaggaggacttggagaaactgagggagctgaagattctggtcgattttgacgagcagggctatttgctccaaatattttcaaagccatgccaagaccgccccacccttttcctggaaatcatccaacggcacaaccaccagggctttggcgccggcaacctcaaagcgttattcgaaagcatcgaggcggaacagaacgaacgtggcaatttgttctacaaagacgtggcggtgggaggggaaaaaatcnnnttacaaaaaaacaaaaaataaaa

SEQ ID NO: 87160 - DNA, 503 bp, Heterodera glycines
aagtgatatggtcggctcaggcggcgtaggcaaatcggcactgacacttcagtttttgtacgacgagtttgtggagaattacgaaccgaccaaagcagatgctcacagaaagcaagttgtgttggacagggaatattgtgcggtcgacattttggacacggcgggacaggaggactattcggcgataagggacaattactatcggtcgggagaaggtttcatctgcgtcttctccatcaccgatttggattcctttgatcaactcgtcgaatttcgggagcaaattttgcgtgtcaaaaatgccgacccaaatgtttgcattttgttagtcggtaacaagtctgatttggacgcggaaaggaaagtgcctttggagcaagcgcaacaacgtgccgaactttggggctgtcctttcgtggagacttcggcaaaaacacgcgaaaatgtggacaaggtcttttatgacatcatgagggaaaaaaaaaagaaaccaaataataaat

SEQ ID NO: 87161 - DNA, 535 bp, Heterodera glycines
tttcggcgagggtcgcgagacggtgcttgtccttcagacaggacattttggaggatggagcggacgaagtattgatcaacccaaacatgttagagaacgaacggcataaattgaacgtggaacggcgcaaaaagaaggaccactacaacccgtatgaggaggaggtggacgagttcggacaggtcaaaaaacagcaaatgctttccaaatacgacgaaggcattgacggggagaaggaacgcgacacattccgacttgatgagagtggacagtacgacttggacgcggagaccgccgagctggaaacacggcgtcagctgatgatgctcaacaaaaagtttgagtcgttagaaagcaccaaatacacattggccaacgaatttcacaccgaggaagaaatgatcgcattttcgtcgtccgaagaaaaagggagggaaaagcacgcggaaaagaaaggcattgaaagccgacgatttggagacggaaacgacggaagaaacggaggaggaaaaaaaaaaaaaaaaaaaaaaaaaaa

SEQ ID NO: 87162 - DNA, 734 bp, Heterodera glycines
  unsure (1)..(734): unsure at all n locations
acccaagccggacataaaacggaaaggcacgcattgagcgggccggcggtgctgtggccatgaagtcgggcattttccgtgtgatttggaagcgtccaatgcgaggccatcgtggcccggtccggcgttccaccgccactgaaaacattccttttttggctgtcgctcgttcattgggcgacttttggtcattgaatcccatcagcaatgaatacattgttagccccgaacctgacgtggatgtgtttgaactgaagcacaccgacgattttgtcgtcgtggcaaccgatggtctcacaacagtggttggtgttcgtgcaattattgaagcgttgcgtgaagctgaacaacgctcaaaacatttcacctgcaacggaaaggaatcgccatcggtggacgaaaataattgtgaccaactcattgacattgaccagttcgacgtcgacttgccgttgaatcaagcgcagtgtctgctgcaatatgccttcaagcgatggagcactctccgcgcggataacatcagcataatttgtgtcaaactcaacgccaacgaagtgccaaccgatcggaatattgttgtgaatgatgaacagagtctcaatgtgtgcgaagcgattgctgaacaaccgatggcaattcttgtcaccgacaatggcacacaactnttacgtacaaacgcagtccgtctccaataccttggagcgatggataaatgcgtgaaaacttcgtctcaa

SEQ ID NO: 87163 - DNA, 664 bp, Heterodera glycines
gtggagaaaggaaggaaacagcggagagaagagatggcgaagttggaggtgcaagtgcgccactgtttctgctgcggccttacgcccggctccgtcctcgtcgggctgtacactttgtttctctatgctttgttgaccgggttggccgcttgggcactgtcggacacggctttaaacggtgacaagccgatttatgaggactgcgaattggaagtccagggaaactcctcgggtgatgcagataacaaaaagttgaaaatccatggcggacagactacaattcaatttgaagatacttcttcctatcactgctcgatcggcatgtacactgaagagatgaaatggtcgtacggcaatcgttacgttctgttggtgatcgctctgtgcctgtacatcccgctgatctttgcctccatccttctgttggcgggtgtcagtctctcctccaaatggctgctgatgccttggcttattctgcttcctttggacatccttcgtggccttttctcctctctcttcatttttctgttcagtcaaagtgatttggcacgcattgccaccggcattttcttccttggcctccaattattccatgatttccctgtggattatcattttggccaagttccaacgcattcattacagaaaacatggcaacgccttt

SEQ ID NO: 87164 - DNA, 440 bp, Heterodera glycines
atctggttgatcctgcctgaactgatgtgttcattctaaagattaagccatgcatgtgtaagtttaacctgccagacagggaaactgcgtacggctcattacaccagctataatttacttgaccttgacttcttacttggataactgtggtaattctagagctaatacatgcaccaaagctccaatctccccagagcggagcgcatttgttcgccacaaaaccaagcgccctccgggcgtccagtgttgactcagaacaactaagctgatcgcacggtcttgtaccggcgacgtgtctttcaagtgtctgccttatcaactttcgatggtagtgtatctgactaccatggtgatgacgggtaacggaggataagggttcgactccggagaaggggcctgagaaatggccactacgtctaaggatggcagcaggcgcgcaa

SEQ ID NO: 87165 - DNA, 185 bp, Heterodera glycines
tacagtgcgccttgcgaaagcgacgaccgaattttgaaaggactgggaatgctcgtatattttctacccgaaacacataagctatgtatggaatgtttgctgatccatttgaaaagagtgtgagatcattccgacaaaaacagaatggactagtgcaacctcggcctgctcttttcttcctacgt

SEQ ID NO: 87166 - DNA, 514 bp, Heterodera glycines
tattctccttaacgaaacacctaacaacttttggaaacccaaacattcgttcattcattcatcgcaaaatgcaagctgccaacaggcgccccatttgtctgatctgcttgaagaaaatgacccaagtccgtcaggtgcgcaccatctgtgaccacgtgttccactacgtctgcttccaccgttggctcaaatatcgtctgttttgccccgtctgtctgctcaactttcgcacggaattgtatcattcgggaaacgccgtgtttgagggcgcgtacgacgatggacacgttgtgctcatacctgatggtgaacaaagcaacagtggataagtgatcggcactcatctccaattgtgatcggacaaaagcgatatctaattttgtattgtacataaataggttattcggacaataaaactgtaatgtgcaaaaaaaaaaaaaaaaaaaaaaaaaaaaaaaaaaaaaaaaaaaaaaaaaaaaaaaaaaaaaaaaaaaaaaaaaaaaaaaaaaaaaaa

SEQ ID NO: 87167 - DNA, 681 bp, Heterodera glycines
  unsure (1)..(681): unsure at all n locations
aagatgatggacggattcggctacacaaccccgccaatatgaatggaccgtggccggggtggatgggattcgaatgctgtgcgaagaggtgaatgcaatgttcggcaaacgctttttggctggcagtgaaataacggtgatttcgttgcgcgcaaatgtttcggaagcgcaacaaatgacgacgacaaccgcaacatcggaagaggaggaggacaaaacgggaacagagaacactgacaatgaaaggagtgcaccgacgatggctcgcgctgatttgatagttcccagctatgagttcgtacgtgtggcaaatgcgctgtgttcagcgctgagagcggccaaattctgggccgattttgtggacccgcgcaacggtcggccctaccgaaggcgaaagaatcggcgcccggccgaaccgtcgctgggccaacagtcgctggtgttggaatgggacccgcagaacacattcaacggcctgcacatcaccaatggtggtgttggtggcacaactgcttgtggtggtaatgatgatgcatcaacagcggcggagaatgccgaaaacgatgatggaccaacatgcaaaatcattgaacgagccgattggacagcgagcgatttttgtggccaattgtttacagactgtccaccaaactctgatgaaatgcaacaaatnttgtcttc

SEQ ID NO: 87168 - DNA, 723 bp, Heterodera glycines
agtcgacggcacttcctctgctgccgctgttcgtgacccctcaacagtgtcaacggaattggcacattcgatcgatgaaggggcggaagggagcggtgaagcagtggcagttgctgaacagccttcccatctggccatcttgagttcaactgttaaactgatgggcacccgtcggatggtcttcttttcgttgccttttatgtacacgggcatcatccaaagcttttggagttccatttatccaacaacagtggcaaacacggaaatgttccagctgaaccagggagtcaatcccaaactgttgttggcattgaccgccattgtccaaggcgtgggccaagcaacatctggtttctttttcggcattttggacagtcggacacggcgttttggacgcaccaaaattgttggctttggtgctgctttgcaactgtgctcctttttgctggcctacctgaatttgccggcgcacgcaccgctcgaaaaaacatttgagcatggcattctgaactcgccaagcatcacgctcgcgttggttggtggtttttgctgagttttggcgatgcctgttggaacacgcaggtttttgccacactaattgccaaatatcccatcatagcgtcgcaagcatttgctgtctttaaattctttcagtcacttttatgctgtgctgcatttttctacgccacttcaatttctttgccatggcatgtgctcattttg

SEQ ID NO: 87169 - DNA, 617 bp, Heterodera glycines
  unsure (1)..(617): unsure at all n locations
ataaaagatccgaaaaaatgccaaacattttcaaaatccttctgattgtgcttttggccgtcgtctcattccgtctctcggcttctactggtgacaaaaaaactgctaatgatgggagtggaaacaactcatcagctgggattggtacgaagatcaaaagaattgtcaccgctggactgctcttcacttccctggcgacgggtggggcggaagcgattgggcgaagcaatgctcagggaggaaatgccgccggattggtgccatcgcatgtgaccaatcgctcaatggctccaccacctcctcctgtgcaatttgaaatgggggcaaatcgattagaaaaaatgagggcacacctacgcgaacttgctgagaaaatgccggtcaatgaatcgaagcgtctgtcaccgagtggacccgaccctcatcatcattagggccatggatggatctaacggaggaagaaagaatggatgcttagttttcagattttattctatcctcttttatttattagtttttcaaaacaaatttcttccacaactttttaaactatttgttgttttgaatctttttagataaatctaaaccccgnnnaanaaaaaaaaaaaaaaaaaaaa

SEQ ID NO: 87170 - DNA, 794 bp, Heterodera glycines
tgggagggagccgagcgcggaggggacaagggcgaatgtgtgccggatcgggagttcggatcgacggccgaggccaatggcagggctatcacgcgctgatcagttccgtccagctgtttcgttttggtggcgaagtgaatgcgggccaaagaattggcgtggcacgagatttggaatgtgccgggacgcggcccaagccgaggggcgacgaaaatttcgtgcgcatggaactcttccgagaggacaaacccatcgacccaacccatcatctgatcgactgcatgtgcaccggccaaatttgcgagacaaatcgcgcaaatgccctcgagggactcccatttaaatttgacagccgtttcaacggagtgcgcgggtgggaaatcgtttgtccgaatgttcggcccgaagagccgaattcgtcgggcgaatcgcctgaacaaagtgacgacagacaaacaatgagtcccaaaatttacagtcccatcgaaggcgaagtgatcggtcgcgtgcggctgagtgcgtcgagcaactcgcaaagctattcgggctgtgccaacgaaggaatatttgtagttggcacgggaaaatggacggactacgaagtgcgcatttacaacgcgcgattccgcgaatccctcgcgcttggcaagcagcacatcgaacagggacagcacattggccatcgcttggactgtgccggggagggatgtggtccaatcggtgttcatggatgtgcgtttccagggaatcgtcgtcgacgtcagtgaagcgatcagtgcccacaactgcaagca

SEQ ID NO: 87171 - DNA, 166 bp, Heterodera glycines
ttatgtaaaataatttgtggcattcattatttattatatttttctttatttttgtaattgagtccggcaaaatccgaccgaatttcgaagaaatatttggcaacggatggaacaaaaaagagagaaaagaaattatgataaaaattgaacaaaatgaaaaccagtg

SEQ ID NO: 87172 - DNA, 535 bp, Heterodera glycines
ataaaagatccgaaaaaatgccaaacattttcaaaatccttctgattgtgcttttggccgtcgtctcattccgtctctcggcttctactggtgacaaaaaaactgctaatgatgggagtggaaacaactcatcagctgggattggtacgaagatcaaaagaattgtcaccgctggactgctcttcacttccctggcgacgggtggggcggaagcgattgggcgaagcaatgctcagggaggaaatgccgccggattggtgccatcgcatgtgaccaatcgctcaatggctccaccacctcctcctgtgcaatttgaaatgggggcaaatcgattagaaaaaatgagggcacacctacgcgaacttgctgagaaaatgccggtcaatgaatcgaagcgtctgtcaccgagtggacccgacccacatcatcattagggccatggatggatctaacggaggaagaaagaatggatgtttagttttcagattttattctatcctcttttgtttattagtttttcaaaacaaatttcttc

SEQ ID NO: 87173 - DNA, 657 bp, Heterodera glycines
gtggaggaaaagaagaaaatgttgcctttgcccattggcaatcctgcgggaaatgaacccgagaaatgggacatgaatcaggtggttccaccaatttcactggcaacaacatataagcagcaatttgctggaatgcccaaaggtcatgattacgcacgaggcggcaatcccacccgtgatgtgctacaacaaagcattgccgcgctggaaaatgctcgtcactgtcgcgtgttcagctccggactttcagccacagcagcaatggcaaattggcttcattctggcgaccacattattgcgtcggatgatggctatggtggcactcaacgctattttcggcaaatctctgtccagcatcatggcatggaattgagctttgttgatttaacgaaattgtcaaacttggagaaggaatttaagccgaatacgaagatggtgtggtttgaaacaccctcaaatcctcttctgaaagtgatagacattgaagcagtgtgtcgtgcagttcagtcacgatcaaaagaatgcattattgtagtcgacaacacgtttatgacaccgtactttcaacgtccgttggaacttggcgctgatgttgtgatgcattcgttgaccaagtacatcaacgggcacaccgatgtgctgatgggtgccatggtg

SEQ ID NO: 87174 - DNA, 600 bp, Heterodera glycines
tttcggagatctaccgttcctgatgtcattctgttcgggattccgcttcctctcggtaccgtgaccattctttgcatcgatctcggcaccgacatggtcccagcaattagtttggcttatgaagaggccgagtcggacatcatgaaacgcctgccacgtgatccggttcgagacaaattagtaaatgagcgtcttatttcattggcctacggacaaattgggatgattcaagcctcggctggtttctttacgtacttttggataatggctgacaacggttttcttccaaaggacctttaccaattgcgtgcgcaatgggattctcgtgggattaacaatctcgtggacagttacggacaagaatggacttacatggaccgaaagattctcgaacacacttgtcaaaccgcttattttgtgtcaattgtgattgtgcaatgggctgatctgatcatttcgaagactcgtcggaattccattgtccagcaaggcatgtccaattgggtgttgaacatcggcttggtcttcgagactttgttggctgttttcctctgctactgtccgggtttggacaaaggtcttcgtatgtacggactgcgg

SEQ ID NO: 87175 - DNA, 652 bp, Heterodera glycines
gcgttttatttttttgcgtaggatggcagaggatggtgttctaaaatcggtgatcggacttcgcattgaacgggtggcagagctggacggggttgcaaagttttccccagacaaacgcatcgccaaattgccatggcgtcttgaagtacggaaaagtgcgggcggaggacagcactcgccgcccactttggctgtttatgtttggtgcaattgggccaacaaatcgcagtgttggcgctgcaaggccatcgtcaaatttgtcatcaaatcacgcgagttggattttgtccgcaactttgagcacattttctgcgctcgtcagccatttgtgaattggacacgtctgttggagtccaccgcagcgaacagtctgagacgggccgaggacacactcgaaatcgaggcacagatcagtgtcaccgaaatcgtcggatacggagttccaccaaaggaggaccaactgttcgtcaatggaagggcatttgacgtgaacaaatatctcctcgccgcccattcgccgtattttcgtgccttctttttccacgacaattttcgcgagtaccaaacgcagacattcaccatcaacgacagcgctgtggacgccgagctgttcggcatgatgttggagtgtgtgtaccccgagtgcggaaaa

SEQ ID NO: 87176 - DNA, 602 bp, Heterodera glycines
tttcacgctcgcttggtacccggctgccgaatttttggaatttgaacgaatcaacaaagcgtattcgttcaacgtcccagccttttctgtggacacttcgacaacggatgggccgaagtacacacaaattatgaacgcactgtcggaacaattgcaacagcacgtggccaaggcgaatttgctgatttctctcaacgagaaaatcccgcaattcgatgttgaagttggggaaatgatgcgcattgcaattggccgtacgcaattgctgctgaacaaacggatgaagcaatttcgggaacatttgagccgtcatttgaaaccaattcctggccaaaaagtgaccaaattgaacgatttgcacgctctttgggtgcttatcgacatgcaattggatgacatccgatccattttcaactccatcgagcagttccgtcttcgctgttgggctgtcgctgaaccaaaggccgccgcgactgccgcttctggcaattaattaatcctcagtctttcatcatcatcgcatatttttgtttttaaagtgccttcaatttttgaaatgtattgaactttttactagtacaaatggaatggaatataaatct

SEQ ID NO: 87177 - DNA, 710 bp, Heterodera glycines
tgaaattcgaggaagatcggtctctgattggatcattgaacaactcaaaataacacattatgagaacattggcaaacatagaacttttactgttccaaagagtgaatttttacatgacacggttttccgggttgacctgttctcctgtgggattgcgctttgtggaatcgaattttcagggcattttgctggcaactatgaccttctctcatttgatgcgattattactgacattctttcaaatgaggaaattcttatgcagaacattcttgttgattttgttgataacatttatccaacggccactgattctctgctgatttctaatgctgaaaacaaaaagcacaatgaaacggatggctgtgctttttctgtttctccctccaaatcattgtctaatcttttgcttgacgacagtccgtcggatgaaagcgccgatgaacgcgatgatcagactgacttttgtgggcagcgtcagcagattggtgacactcacagtcattcgtcatttgttgccgaagttgtcgattcccttcagggggctttggaggacggttttttgagagagaatgaaaaggcgaaactgagtggggatttgctgaacaaaataaaattggaagtcaatgcctccaaattggcctacaatattcccgcagaagaagtgccgggccttctcttcactgcttttcttagtctccctggcgttgtcg

SEQ ID NO: 87178 - DNA, 609 bp, Heterodera glycines
taagtttgcactgatctgtttacggaggtgatgaaaaaggttgatgagtctggtgaaaagggagagccggcagtgaagaaaatgattattgagcattgcaagtctgtcaaaggtgtggatgataagaaagaaaaattgtgcttctttattggcgctcatcctgactcgtccacttcagtcctgggcgatattgcgaaaccattgagcttccataaaccgccgaataaagtatgctctcaactcaaggaaagggattctcagatctgcgcactgaaatatgataagccaattgattgggacagtttggtgctggagaaaatgcgtgtcaaacagctcaaggaacttttgcttaaattgggcgattcctgcaagggttgtacggagaaggtggactacattacgcggatcaatgagctcaaaccgaagccgaaaggagaactttgattgtttttgttttgttgcttgtttgtttatttgttgtaactgtgacaacaacattgtttttgggttttctaagttattttacctgtttttttcattctgtgttgtattactgtttttgctttactacatttatggcattttttccatttttgtaaaattgttatt

SEQ ID NO: 87179 - DNA, 596 bp, Heterodera glycines
gtgttctttggtggttgagaatttgatttaaaactgtaaaagaatgacggagaatcgccgcgcggcacgtgaaattcagcgacaacagcagaaacagcagtcgttgctgaagaaaattgatttttgctcgtccaatgtgttcgattctacaaaaagttggcatttccccatacggcgccgcccgacgctttcatcacattcaaaagcatttgcataaggtacattgatcatactgtcgtggcctttctgcaccgcattcgtcgcctcttccgtcactcggccattgcccttaaaatggtcatttggccgcagtccgtccgcgcatggcacgtcatggcccagcaaatttggcccctggcggcgtccaatgtgtgccagctgagcgtggacagttatgtgttctcccgtctccgtgagttcgtttcgccgtccgtcctccgcgactgtgccaaccttcgccaaattgagtcggacggactgttccctgaaggcccacccgacgaccatccgcacgcgtcggatggccaagcgttggccaaatggctgcacacgccgcgcgcggacggcaagccgaaactgctaaatgtggaggcgat

SEQ ID NO: 87180 - DNA, 411 bp, Heterodera glycines
ggaaattggcattctgctatatccaaatatcttctcatattttgctttggcaactgatttatgttgccatttccaatccaaccactgaagaattatccaaaaatgaagatggaggtggaaatgctgacgatatacaaatgttggtggaagaggcaattgatatggcacaaaatctttcaatgatagtttcgcccaaggcactcgtcggaagacgtgacacggctgaaattgtcgcattttctcttttcccgtcgcctttcccgcgccaactttttgaacaagcgaaaaatgtgcagatggattttaatttgttatattttcgcatatcaaatgactacaaatttttggtagaaacctatgaataactggcaaaaacgaacgaacaaatccgaatgcatttgcaaattttga

SEQ ID NO: 87181 - DNA, 560 bp, Heterodera glycines
tcttccttctgctgctgctgtcgggacgaaacgggccaaaccaaattcaaagtgccagtgcgacggtttcgttcaatgctaatcagctaatttgctcactaattaccccaaataacaaaactgccccctgcatctcccaacaatggccaccaaatgccttccgctcgaacttctgtacgaaattgtgcctctcatccctgccgaaaatgccacaccgaatgcgctctcgtcctgtcggctgctgcacaaacttttgctgccacgtgtcatcaaatggaaagagtccattcctttcactggacaaagcaaatactgccacaactttcggcctctttcacttgttcacaacatcgagtgcagtttccgcgtcatcactgtgtttgttgatggacaggaggaggcgagtgaaacgtttactggccgtctcactaggaatgcgtgagtgaggaaggcccaacaaatgctgtatcagtgtgcggagaaataaaaaaaagctccttggacatacttatttaacttatttgttctttttctgataaaaccgtgtaactttcaaaaaa

SEQ ID NO: 87182 - DNA, 654 bp, Heterodera glycines
ggaagcggccattaccagacgccctgaacaacgatggctggggccacagaaacgaaaagtgcgctggacactctcagcagcgaattggactccgttttgaccacaacaaaggattttgagaaccaagcaatttccgacgcggaacgttccaacgaagtcgcgaaaaaagcgactctctccgaagcgactgcaaattcactgcaggaaaagctgagtgactcggacacaaaacttacggaagcattggcccaactcagtcaattgatttgcgtttgttttgtcgaaattttatttttattttaggttccttagacaatgtggacgatgcgcaattggacaccgtggagaaactgctgaaagaagcggaaaatcgtttcgattcgagcggcaacgaagtgaaaatgcgagaacggatcatacaagcggagaccaaagcggtgaagcagaagagggaaatcgatacattggcaaaagaattggagaatttgcgtcaaatcagagattcattgccgactcgctgctacaattatgtaaatttggaacaggagggacaacgatgaaaaggagcaattgggccagaatggacggttcatcacaagtggaataatcccggcttttttaaacacattccccgtcagaagcaattttttttgt

SEQ ID NO: 87183 - DNA, 655 bp, Heterodera glycines
tatttttctttgctttatttgtgccgaatgtcttccgtttttctgcccaaattcttttcttcgtcctattgcttttctctttgggcttctttcatcactctctgagtcataccgaagcaccaacgaattcgttgtcccaaattatttgctttttttgtttgactgtgcctttggtttgcttttttaccattcttttgtggccagcagaccacgtcgaaaaagggcaacactttaacaaaaaaggaagaattttcatctccgccgattgttggctttcagtgtttgaattgcttccgtcgcgtcaacttggccttggcattgctctgatcagccatcgctttgactgttatgtagatgaacacttcagaactcgtcgatgggcgttggaatatgtgcaaatttggcgcaaaaagaaaaagaatggcacaaagaaaatgcaaatcttcaaaggccgtgggggaccaatggaaattccgcaaaaatcgatgccaaagaaagtcattggattccaataccttctgataagttacatcgaccgaaatgtcatcgaatttctgcgccgtttctcttcggcttttgcaaattgtggaaattatttgattattcaaataaataatgatcgtcttttggagttatctctgcgcaacatttggcc

SEQ ID NO: 87184 - DNA, 460 bp, Heterodera glycines
  unsure (1)..(460): unsure at all n locations
ccggcctggggccccaaaggcgggcgttcgcgtttggcaccacgagcccaacaaaatcaaaaagtttgagcagacggcggagttgaaccaggcacatggcggacgcgtgttggcactttgtcaaagtccgtgcggagagtacgtaatcgccgcaaaccaagacgaagtgctcaggatttggcacgtttggaagatggacgaatcgatgcgaaaacagacgcaggaaagtgtaacggcaaatgcgaggaaacagcttcagggcgccgctggaaatatcattcgatgaaagcaccaaaattacctatttattttaaccctttcgttctctgcctcactattttttcaatattttagcatttcattaggattgttttttgtttttacgtattcaacttaacttttatactatctttcatttatttgtgtttttcatgcataaaacaaaaagtgcaaaanataa

SEQ ID NO: 87185 - DNA, 433 bp, Heterodera glycines
catgaacattctgctgaagtctgttctattcatctctcttctgtcactgtttggtgattgcatgaaaaactcagatcaaattggagtcaaaagaaaatcagcaggaataagaattgaggaaccaaatgatgtaaaaggcaaaggaaaagtcgttgaaacaagcagaaaaggcaaagaaaaagtcggcgaaaaaataagcgttatgaacacagctgaacgcattgaaaaaatggaccttgcccaagacaaagctaaaatggaaatagacaatatagacaccaatgccaaacccaaacaaaatgaggataaaggcgttatgaacacagctgaacgcattgaaaaaatggaccttgcccaagacaaagctaaaatggatatagacaccaatggcaaacccaaacaaaatgaggaaaatgctcctccaaaatatgtt

SEQ ID NO: 87186 - DNA, 189 bp, Heterodera glycines
ccacccttgtccttagttgctacgcaagagcactctaaggagactgccggtgacaaaccggaggaaggtggggatgacgtcaagtcctcatggcccttatgggtagggcttcacacgtcatacaatggtcttaacagagggttgccaacccgcgagggggagctaatcccacaaatcttttcttagtcc

SEQ ID NO: 87187 - DNA, 649 bp, Heterodera glycines
cgggaaaagggcttacgctttggtcacaacgcgggaatcagtggcaacgagagttgggacgattggctgattccaaaggactacgaagatgttttccaggtgaacactctcggcacaattcgcgtcactcacgcattcaaacgactcgtaaagcgcgagagggagtcccgaattgtgattatggccagctcctgcggccgcgtggcactgccaacgctcggcccttacagtgtgtccaaattcgctgttgaggcgtacgccgacataattcgcactgaactgattcttttcggtgtcaaagtggcagtgatcgaacccggctttttccgcactccgatcacaaatttggatcgtggcaatgccattttggaaaaaatttgggcgcgactgccggagattactaagcaggaatacgggcccaacttctacaaattctgccaaaattacctcctctttttcctcaatccgaccaggctgaacccaccggaaatggttgttgatgcgtattggcacgctattagctcagcgtggccccggaggcgccgtcaagttggcttggacatgcactttttctattggcccgtgtcaatgctttgtgctgaatttcaggacttgttcttcctgctcagcactttcatcttcagaattc

SEQ ID NO: 87188 - DNA, 669 bp, Heterodera glycines
gtgtggaaggagtacgagagcgaaagactgccccgccaacttttgccgctgccaatgccatcccctttgaccatggatggcactgccgcagttcctggcacgtctcagcagccgcctttcggcacggccactgacatggcgcacttctccaacgcattgcaactgcgacaacttcaactgttgcagcttcagaaacaacagcaggcggcacaggtcaaaaaaaatttgtcatttttggtgcaacaacagcagacggttcggtcgggagagatcggctacttcacgcaagtgatgggccaattgactgttgcgtacaacaacgaccccatctacaaactctgcttccaagtgccgggaatgcaggccaagaccgcctacagaatcttccagatcaagcagttcctcagctatttcatcaacctgatccctgccgaggaccttggcgagatgaacagcgcaaatgcatttgccaattatttcaacggaattttgcagaacgccatcaaagaaaaacagtctcaagaatctgtagaggagaaggccatgattactctggccactaccatcgaaattgcaaggtcccatcagcgatgtcaagcgggaattctgttcatccaacagacgttccccgaagttatgcaacatttgaatcattcccagtgatcaaaa

SEQ ID NO: 87189 - DNA, 602 bp, Heterodera glycines
tgggtgttcgtcttcgtcctgctcttcgcccgttgcttctcccatcggcggatgccaccttttcattgcgcggctttgcctgtgccaagaaagatgccgcagtgcacggcggcacgttcactgttattggagataaacggcttcgtgttgatccatcgcaactgacaactaaagaaggcaaagcaaaaatcgatgcgcttcgtttggacgctgcggacaaacgcttggttatgtcggtgctcttcccaaatggcggcggcatcaattgcaaatcgtccttcctttctcgtgttcaaatgccagacggttgtgacgttgatgagagagttgttgccctcgagggacgtgcgggtcaagatcgcttcggagagaactgtggccaaggcaaatgtgcctttctgaatgtctcctgcaactttcttcaaatgactccggtcgaaggcttgccgaatgcgcgtcatttcacaatgtctttgtggaaaaacatctcggatgatgacgatttgcttcagtgcgaatggaaagcatttattgacgatgtcgtggttcttctgaacaaggcggaaagcggtgctgaattgttggttgagcagtgttggcaa

SEQ ID NO: 87190 - DNA, 651 bp, Heterodera glycines
taattaattcctgcgtattattgcggctgctgttctctgtccgtgccatcatcaaatcaaatcaacgaaagctgagccatcggaagtgtgcacaaatcgactaccaaacgaaactgggcaccacaaatcaacaaaatcatcattatcatcagcagtaaaagtggtgcagaaggaaacgcatggaccaaatcggcggcactttcagcgaccaaatttggctcgacacattggcgtggattggacgtggcgaggtcggatggcacttggcgctggtcaacgcccgcttcgccgccctggtgaacatgcagctgcagcagaggcggtggtgtttggaggagtttcacatcagtgagcggaagccgaaacggactggcgccgaagtgttgagcttggcaaacaacggctcctacttctcgttgccattggccacctcaccgttgccggacagtgtcatcggattcaacggcacattcaacatttggtatttggacgcagaagtgatcaattttctgcaacgatttcggcgcctcttcaacacgtacatctcgctgaagttcaccattccgataacagaatttcgcgcttggcaagccgtggcacctcacatttggcccttgctgaagaacgggctcggcacgttggtcaacgtga

SEQ ID NO: 87191 - DNA, 619 bp, Heterodera glycines
ttgccaagagctttccgcggtggacaatacattgatgaacaaatgaaagcgcatgactttgagaagaactgtgaacgttccacacatgctcaactgaaagatcgcgaagaagcgcttaaccgcatggagaagcgaaatgacgaaatgggcagcaaagtgcgacgactcaaggacaaattgaacgatcgacaagcgctagcgggggatgagaaaagaaatgtcgaacgcattgacaaaattttgttgggggcacagtgcgaagatgacgaatgcaagaaattgtttgcccaggaagaggaaaaccgcaagcgattggacaacaacattgtgaactcaccggaacgcatcatcgaagagctgtccaacatggaggtcgaagtggaggacatccgtcgcaaaaatgatcaagcagtgcaaaacgaccgaaagttggagagggaatacggcgaacaacgcgtgaccagccaatgcgcggagagtctgatcaacggcatgcaacaattggagatgatgcaggaacaaatggtggagatgcgggcgaaggaagaagagcgacgaaagcaaatggacgacttggaaatgacccgcaaaaatttggtggccgaaattgaagtgttgg

SEQ ID NO: 87192 - DNA, 563 bp, Heterodera glycines
cagcagaattgagcagtattttgcagcagacgcatcagcagcaacagcttcaaaatgctggcgttccattgctcggtcttcccgcccaactgctcgcatcaggcatagagaactcgaacattcttcaaccaaatgctctgcgtatggtgcccggcacccaatacgccataatggatggacctggcggagcacagaatttgattctgcttgccaccgccgctagtggacaaatgaacgcgttggccaacattgagcagcaacaacatcataatggcggcgatggtgcaacaacagccagtgctgctgcacatgccgcgatgcaatttgttggacagccgccagacatgcgcagtttgatgaccaatggactgattggtgccaacatttttcacaaccaacaataactgcaacaacaacagcaacgtcaccaccaccagcaacaacaacaacagaggccgacaacagtggccatgaaaatggagtcagttgatggattgaggcgaatgaggtggaataaagctgatgatgacacttcacgccgattgcaacaggagaagaaatcg

SEQ ID NO: 87193 - DNA, 488 bp, Heterodera glycines
cagtcgcttctcgacggcactgtccattaatcgtcgactcgctaaaagatttgcaaacaatccaagaacaacatttgtgggcacaacgtgaagaaaaattgtacaattaaattgcgatggaatttctgatgagaaggaacgccagacaaatgaggacaaagcgattttggagcggattgaccagattgcgcacgagcaacaaagcactttgatctgtgccggtttgcctctgttcaaaagttcggacgacgcgagcgatttgcgcattcaaatggcactcatccaattcattctttcgctgggttcaatttacagggattgaacggccaccaaacaatacgaagggattgggagttccctcccaagcacatttttaataaattggatgaattattcaatcgtttcttcaatagatattatttattgtagtatttgaggagccacacttttgtttaaattgacgtgataaatatttcgatgccaaaatt

SEQ ID NO: 87194 - DNA, 290 bp, Heterodera glycines
cctcccggactccaattggcggggacgtcgaaatcaccggcattcaaatcttctgaaaggatttagaaaactggcgaatgaattgaatgacgatcattcgttgtgatggatgggtgttccgttttaattaatctgacaaaaattagtctctccgggcgatgattgtccatctgtgaattgctgctgttcccaaccgtccgacttttcttccccccccatttctaaaattctaatccctctgccttccctttagtggtgctaaaccaaaaaaaaaaaaaaaaaaaaaaaaa

SEQ ID NO: 87195 - DNA, 583 bp, Heterodera glycines
acatatttttttgcctgtcttctctgctgctctccatcttcccaattgtgtttttggtctgttgcaatgcaatgccaaatttcccgtgctgcccgggcagtcagcaagtggttgctgtgatgtccatttacattgacactttctcttctgctgctgacgagtctacagtatgctttttcgctaaaagtactgtggatggaataaaaaatgaactgtcctctcgcggcggatgccaaaacggaggagaagcacaaattgtggatgaaatcgatcgacagctgaagaatattgcaaaaatggagatcaattatgaggacgagtgcccgtacaatttgggctttgcccgtgccatgttcgacttggccgctgctgctgctggccatgcgggcaacggcacagaatggcaatacatgaaagtacaatttgagcaggaaagccaagcaatcaaagcaattggacaagaaaagaactttgaagttacggatgtgcattttggagtcccaagcaaaggggtttctgcacatcaaaatgtgccgagtccgagccatgtgattgccaatcctggccaacacagttcggttgg

SEQ ID NO: 87196 - DNA, 396 bp, Heterodera glycines
ttatttgaaaaatattttgcgcaaattttttttatttttgtccgaaatgaaactcctttttaccccaatgtttttttctgtattcttaaacaattcttctcctgctgctggtccaacatgtaaatggaggaagagatcgagtgcaagagattcaagaggaagagggtggctacagtagtagtggcggcaacggtaccgaaacaccaacaaaaaaataaagcagtgaaacaatggcagcaagcacggttcaaaattatgcaggaaaagattgtcgaataccttggtggattagcgaaagcaacaagaaagagtaaatatgtgcacaagcttgtggatgacatccagtacacaacaccagaaccgtttgaaggcactgtgaccagaagaactgagaaa

SEQ ID NO: 87197 - DNA, 573 bp, Heterodera glycines
cacgaaggttgtgactaagggtcgcgcgtgtacatcgacgacggattgctgtcgctcattgtggaagaaattttgggcgacgacgccgccatactgtgcaaagttgaaaacggagggaaattgggcagtcgcaagggcgtcaatttgccaggaatatcggtcgatttgccagctgtttccgagaaggacatcaaagacctgcgttttggtgttgagcagggcgtcgacatcattttcgcctcgttcattcgaaacgccaatggcatccgcaccatccgagaagtgctgggcgaggcgggcaaaaacatcaaaatcatcgcaaaaatcgagaaccaggaaggtgtggacaatgtggacgaaatcattgcggcgtcggacggcgtgatggtcgcccgtggcgacttgggcatcgaaatcccggcccagaaggtatttctggcgcagaagatgatgatcgcaaagtgcaacatggccgggaagccggtcatcaccgccacccaaatgcttgagtcgatggtgaacaagccgagaccgactcgtgccgaggtcagtgacgtggcgaacgcagtgctg

SEQ ID NO: 87198 - DNA, 626 bp, Heterodera glycines
gtatttgtgtgaggtacgacagtgcgactcgcaaaagacggaagagtgctggatgaaactgttcgacgcactgaccgcgttggatgacgaggaccgttacgataacatgcgacagtattgctcggccaacaaatcatggatcagatactgtagcaacatggcaatgtgtgatgacattgataaagtcattgtgttcaaaaagaagacggaagaagatgaagtgataatagaagaagacgaggaggaaaaggaagatgataatgaaaaagaaaaagcacaaataaaggaaagagaagaagcaaaagggaaagagaaaaaaacaaaacaaggaaaaagcagtgacaaaaagccgatgcaaaatgaagtctcaagtgaaaagattgctaagccaaaaaaatcatcaacaaagccaccatctgctgctggtgtcaaaaagaagccgaataaagaagtaccaccaattaaccttatggatgaaccgtatgttggacaaccgcaagcgctacagtattcggtgtcaaacattggatacggtaatcaaatacaggaaccgtatacaactcagcgaaatgattcgctcatgtatacaactgggtcaccaatgctaccgcattcgatgtcatcta

SEQ ID NO: 87199 - DNA, 582 bp, Heterodera glycines
ataacgcggcacagtataaatataaaagatccgaaaaaatgccaaacattttcaaaatccttctgattgtgcttttggccgtcgtctcattccgtctctcggcttctactggtgacaaaaaaactgctaatgatgggagtggaaacaactcatcagctgggattggtacgaagatcaaaagaattgtcaccgctggactgctcttcacttccctggcgacgggtggggcggaagcgattgggcgaagcaatgctcagggaggaaatgccgccggattggtgccatcgcatgtgaccaatcgctcaatggctccaccacctcctcctgtgcaatttgaaatgggggcaaatcgattagaaaaaatgagggcacacctacgcgaacttgctgagaaaatgccggtcaatgaatcgaagcgtctgtcaccgagtggacccgacccacatcatcattagggccatggatggatctaacggaggaagaaagaatggatgcttagttttcagattttattctatcctcttttatttattagtttttcaaaacaaatttcttccacaactttttaaactatttgttgtt

SEQ ID NO: 87200 - DNA, 595 bp, Heterodera glycines
cagagaaaaattttactttttctattaacttgcttattattaaattaatataaagaagtcttctgtatacgcccgaatatgaacgtttccttgtcactcaacggactcggggaaatgccattggtgccaattgctgatttgaatggcaccaaaaagtacacggcgggggaggtggaatgccgtaacaaattggccgctctttatcgcctcatcgaccatttccgctggagccagtcaatatacaatcacattacgtttcgtctgcctgggagcgacaatgaaatcctgatcaacccgcttggcatgctatatcgcgagatcactgcgagctcatttgccaagatcagcgttgacggatgcgtcattgatccgggatcaacacctttgggcatcaaccaggctggctacgtcctgcacagtgccatccacgcggcgcgtcatgacgtgaactgtgtgctgcacttgcacaccgcgtccgcagccgcagtttcggcaatgaaatgcggacttttgcccatcatccaagaagcaatgattttgggtccggtggcataccatgaatatcgtggcattctaacggatgtacaagaacgga

SEQ ID NO: 87201 - DNA, 268 bp, Heterodera glycines
tccattggatgttttggtcgtcgaaattagcacatatatcacttgcgaaggaggtgatttggaattgaaacggaaactgcaggaagaagaacgtcaggcgcagcaaataagccaatcggctgttattagcgcccctccgagctccgttgacgattttgataaagagcaacagttaaaactcgatgcaaaggctttatcaaacactgaggaagccattgaacttcaaaaacaagctgagagagcaaaaaaaaaaaaaaaaaaaaaaaaa

SEQ ID NO: 87202 - DNA, 631 bp, Heterodera glycines
  unsure (1)..(631): unsure at all n locations
cgtttttaattacccatcaatcaaaaaatgtgccaatgtttggattgtgaccagcaccaacagcagcacaattgttgttctccaacccagcagcagcgtcgtcggttcactgttgtgccggttaaggaaggcaaagatttgtccaagatggcacaaaatcggcaaataaaatttatcatattccgactctgatagcagcagcagtgatgaagaagcatcttcattttcattatcatcatcagcaacaacaacaataacatcagccataaagtttaacaggcaaagattgtcgttaattttacggaatgccaaaaagtttgaaatgccaaaaaatgcggcatttggcgcgggtcgcgtcgtgcattttgcggacagttgcggacaaccgttggcatcgtttcggctcattccgagctggcgagaggacagcatttcagtggaacaatgaaaaatatggacaaattggaggaaaatgagaaaaaaaaccaaaaatttttgagatcgagtttatttaatcctattgttttctttgtatgatttaatccaattttcgaatttatttaatccaatttttctttctttgtattatttaatccaattttctttgtcaattaaaatatttttaaaaana

SEQ ID NO: 87203 - DNA, 452 bp, Heterodera glycines
ctgtgttatctgtccctccccaatcgtagtgatattattttcccattgtgttgtccctccccttttaagttgtgctccgcccttttaagctttgatcattcatccaacgcaacaattcgattctcctgtacaaattttgatcagtttctttcgtccgatgtcctctctgatttgattacttatgctccaatcgaaaaccctcccattttccatccgattttttttatttgacgcaaatttttagaatttatttttttttgtgttttcttttgacattcacaatttatgtcacaatcagcagaaaattttttgacattttcaaaaaaaaaaaaaaaaaaaaaaaaaaaaaaaaaaaaaaaaaaaaaaaaaaaaaaaaaaaaaaaaaaaaaaaaaaaaaaaaaaaaaaaaaaaaaaaaaaaaagaaaaaaaaaaaaaaaaaaaaaaaaaaaaaa

SEQ ID NO: 87204 - DNA, 607 bp, Heterodera glycines
atttatttacttccacctttgttcggcaacgaccaagcagtcgaaacaaccgacgcagaagtaagcgcaacggcaccagtcaaacgacacagtgacaacaccattcattccttcattatttatcgcaacaacagcagcgacgcatgggccaaatcaatgtatgcgacgacgtttggttggacacattggcatggatcaatcgtgtagaagtcggcatgaagttcgcgctggtcaatgttcggttaaacgctttggcggacaaacatttcaagcagaggaagtggtgcttcggcgagtttcatatctgtgagcggatgacggaagaatcgggcgcagaaatcatgacatcgatcgacggctccgacttcagcacgttgccactgcccaccactccgttgccggacagtgtcgtcggcttccgatcaatttccatttggtgcatcaatgaagaggtcgtcaattttctgcgcacaattcgccgtctccttaccaaagacattgcgctggaattctccactttcttcacggaatatcgcagttggaaagtgatggcacaacacatttggccactgttgaaagatgggatcagcaccttgtgcctgaagaa

SEQ ID NO: 87205 - DNA, 599 bp, Heterodera glycines
aacggaaaatgataatgttttcttcattgataggcatttttgccgttactcaagcgcagcagaggcagaattgtttctatctcaagtgtagcaggacgcgtttcagtgccgggcggggcgccatatgccgtggccaaatatggggttgaagcatacatggatgcgatcaggcttgagctgcaatgttggggaatcggctgtagcatattggagccaggcatgttccgcaccaaattggtaatttctccttattaatgatgaacattaatgccataaatcgcacacttggctatattccaaaattaaaataaggaatattcaaaaaataggatttattgaaattgtcgttcttaatttacaggttacgcgacctacaaaatgacaaattggcatttctaatttgtttctttaaaaaaatcagataaatgccgatgcaatgacggcacgggtggacagagcatggcaaaaaatgaaacccgaaataaaagaggaatatggcgaaaattttaagaacaaatttgttgcttcatggaacaaacttttccaggaactcgcttcagatcggctggaccatgttgtggatgcgtatttccatgcgg

SEQ ID NO: 87206 - DNA, 439 bp, Heterodera glycines
ataaaaatttttctctcaagtagcatgtctcctatgagggagcgtgtataagtttatttaataattaacaattaaacatattaaggattatgcaacattcagatttaaaaaaggtattcagatttaaaaaaggtatagcgcttttattattgctttctacaacaatgctcgcatgtaatgcttctaaagaacgctgccgatcagaaaaacagcaaggatatatgcagaaaaataaaataaaaatacaaaaaacaagtaaagcagcacaagaaagaaaagaagcagcaaaagcaaaagcagcggaaagaagaaaagaagaagtaaaaagaaaaaaagaagaaaaaggaataataaaaggagcagaaagaagaaaagaagcagtagcaatagcagaagtagaaagaaaagaagcatgaaaaaaaaagaaaaaaaaaaaaaa

SEQ ID NO: 87207 - DNA, 347 bp, Heterodera glycines
tttgtgtaaaatccgatcctcgcccgcctagaaccacaacacctctaaaaagcgaaagtagaagcaactcgatgttgaagttgatgagaatgttgctggctttgatagacaagaagcatcttcgccagttgccgtctaaacatttcgacacttttcttgggcaattgcacccccaacggcgccactttcccgtgaaagaggcaaaaaaaatgaagaaataatagaaagcggaaatgaggaggaaagggacgaacaggaagaagcagataaagagcaaaatgatcaaattcaaattggacgaaaaattgaggaaaccgaacggcagcaaaagacgaaagtgggcggag

SEQ ID NO: 87208 - DNA, 634 bp, Heterodera glycines
cattctgctgaagtctgttctattcatctctcttctgtcactgtttggtgattgcatgaaaaactcagatcaaattggagtcaaaagaaaatcagcaggaataagaattgaggaaccaaatgatgtaaaaggcaaaggaaaagtcgtcgaaacaagcagaaaaggcaaagaaaaagtcggcgaaaaaataagcgttatgaacacagctgaacgcattgaaaaaatggaccttgcccaagacaaagctaaaatggaaatagacaatatagacaccaatgccaaacccaaacaaaatgaggataaaggcgttatgaacacagctgaacgcattgaaaaaatggaccttgcccaagacaaagctaaaatggatatagacaccaatggcaaacccaaacaaaatgaggaaaatgctcctccaaaatatgttttcatttggagcggtaacaatgagaagaagaaccttgaggttgacctcagagtgatccgtcactccaaaaaactcagcgaattattccatgccaaaagtgatcaatccgtcaatgcaaaacacggaaagcaggaagcattaccggttccgaaacaggaagctaaaaaaatgctgaaggaagtggaagaatggtacgcacatcacaaa

SEQ ID NO: 87209 - DNA, 694 bp, Heterodera glycines
catttgttaaacacccaatcgtcgctgtctcgggagggaccggcgccacatatttgttgtacacttacattatgaaaatccaagccggccacagatatgaaatcggtgaccaaaccggcaaaacgtacattgttacgggagcgacgtcgggaattggtaaaacgatagcgacggaattggcaatgaaaaacgccgaagttgtgatggcatgcagaaacagaaacaaatgtttggaagtgcggcgtgacattgtgctgaatacgaggaacaaaaaggtcttttgtcgaatgtgcgatttgtcagacatggaaagtgtgcacgaatttgtgcggaaaatgaccaaaggaaaatacgacttcaaaaaaattgatggagttattttgaacgcggccaccaaaagcaaaaagtacagcaccaacaaagacggagtggagacgaacttggccaccaatcatttgggctccttccttctcgttggccttttgcttcagaagctgctcgaccaggacggacaatcgcgcattgtttttgtcgggacggacatagcgacgaaaaacagtctaaaattggagcttgacaaattgaatactgccaaatacacaaataaatttctccgttccaccgaaaaattagacatcgaaaaatgcaaatacgacatgcatggagcatacaaattttcaaaactaacgcagct

SEQ ID NO: 87210 - DNA, 582 bp, Heterodera glycines
ttctgaaaaacacgcgtccaaacggtgcacatttccggggagtattacgagcacaaactgtgcattccgatgcattctttggccttctcggaacgttcggacgaattcttcgacatttgggacgtaaatgaaagtgtcatttacgccgtaaagacagcggaggaaaggggaagggcaaaatggctgcaaaggctgaccaaaattacccttttatacgagcagaaaatggcggagtcggcgcaggagggaattcccatggaaccgttcccgccgtggcacagcaaaaacaacgactcgtctgctactaacaataagtcttcgcggcctcagtcttggacgacgacaagctcatcggaagacggcggcgcgggaacggcgccctccgccgccggcgttttgtccgaccgttcgtcgaccgcgtcttcctattcgacgactgttgaagagaaatgtgcgcaaagccaaggagaaaattcagcagaaaagaacggaggaagggacactcagaaaaagaaaaggacggaagataaaccgactaacagcagaggaagagaagcacagcaaaaggacgacggatgagag

SEQ ID NO: 87211 - DNA, 605 bp, Heterodera glycines
tggatgcgcatattcattagtacctgcccgccttggggcacatttggccgactccttcgggagtcactctcccttcggacgaagaactccatctcgtcaacaccacggggcatcccaagggccgaattcacaaagccatgccaaacattgagcaaacagcagtacccaaccaaatgcattggacagcctacacaaaattgtagtggaaaaaaacgaccggcggaagcctacaaattgtgctcaaatccattctgtgtgcgatggcaccgctgcttcgaattgggctgtttgcagttgatatttttgccatcatcggatctcatttttatgcccatctttcgtctgactcaagcctatctgttatcaccaagtccccagactttaacgacgccgctgaatttgtcgcaacattcaaatccatgacggatgcaagtgccgacgttcttgataagatttccaacattggaaacggcgcctttactctcctcaagtttgcgggcccaataggccaaatggtacacattggtctatccatcggattgaagcagcaagactcgcccgagctccgtgcaatacaggccttacagagacaaatcaccgaacag

SEQ ID NO: 87212 - DNA, 594 bp, Heterodera glycines
agaaaatgtcggacagaatgatgttgagcaattgcgatcttgcacaaattttgctgaacgagtctcaattagcgaaccgtcggatggcgctgaaacagtcggccggtggacgcaatgtccgtccaagggaatgccaaccgccttcacggatgacgcatctgtggccggtgaatttggcatggaagcggcaaatgttggccaatttgggaagatctccaaagaatgtccgctgagtgttggcgaaaagattggcttacgagtagcgatcagagtgcagcagaagccgcagactttttactttctcttcctttacttcgatcagaacggccgttcccgtcagtttcgcttttccgcccgagtccgtcccctctcgcgcattttcgatgccgaccattgcgtacttagcgggtccatcggcttgtcaatgctcacgcttcgctgtttgccgttcaattctcacgaaagcgatgcaacagcaaaggcaacgacagcggtgacattgaccaaattggacttgctcagactttccgtcaaagtgacggatggaaatgcgcggacaaatgtgcgacgagtggaaaacgaaccaatccaatt

SEQ ID NO: 87213 - DNA, 649 bp, Heterodera glycines
ttttattggctgaccgacctttcccttcctttgctgtttcggcacttccttttcactcctttttgctgcaactcaccagtaatgagcagcagccatcgcgagaccggcaggagtccaagaagtgtgctgatgcgccagtacgaaatgctgctgcaaaactcgaacgacaacagcggattccgtgcctggttcgacaataacaatctcttcaaatggcgcattctaatcgacgggccgccgggaacgccttacgcgggatgcaaactcacggcactgctccatttcccggcttcgtacccaaatgatccaccgacaatgaccttcctcaccgacattcttcatccgaacattgaccagagtggcaaagtctgcatcagcattcttcatgcgccgggcattgatccgcttggccatgagcagccgtccgagcgttggaatcccaaccgttccgtggagtccattttggtgtcgatccaagtgctgctggcagagccgaatttcaacagtcctgccaatgtggatgctgccattttgttccgcaacgatccggcacaatacaggaaggaagtgcgacggcgcgtggagagggcatcagcatcgacaccgcgagcgatgtcgtcatcaacaccaccgccggtagcgcagccgt

SEQ ID NO: 87214 - DNA, 427 bp, Heterodera glycines
ttgcataatttattcaacgaaaatgtcttttgcctatggaaagtccattcagcagaatggtggtcccaaccgtgtcacattcattctgcgaaaaggtgcaattttcttcactgggatggttgttggaacagtcgttgtttttaaggcatttaagccaacgcgtcccttcgacgaagcggcagaacgtggcaaaagggagctgttggagaaatacacggaggagtacaacgcgttgcaggaagagctgaggcaggcggaagagcagcagcggaacggagggatgtcgaagaggcggaagcgagaaaggcttagccgatgacaataataatgatcaatttgggtggaagggttgtaaatcctctgaagtaggatcacattgctaattaaacattttgaattccaaaaaaaaaaaacaaaaaaaaaaaaa

SEQ ID NO: 87215 - DNA, 356 bp, Heterodera glycines
cggttggtctttatcgcggctattctctgtcttcttggatctctagttgcaacgcgactattccagaagttgcgtttcgccgaaaaggcgggcgtctggcctgggccttcatgggagccatcgccaccggagcgaccatctggtgcacccatttcgtggccatgatcgcctatcagccgggcgtggacgtcacctatgaacccggtctgaccggcgtgtccctaggcatcgccatctgcggaagcgccctggccctgtggttcggttcgcgccagatgcggttcgcggcgcccattggcggcgtcctgttcggtctggcggtcaccctgatgcactatatcggcatgaaggccttt

SEQ ID NO: 87216 - DNA, 604 bp, Heterodera glycines
gggtttctcctttctggcggcatgacacagttccggcccttatatccgtgtcactgacattgcgcctgggggtggtgtggcgagggacggacgaattcgaattggcgatgtgattctgaaggtgaacaacacggacaccgtcgacgtgccgcaccaagtggctgtgaatgcgttgaaagttgcgggcagtgtggtccgattactcatcaaacgaccaaagacttcccaagcgagtgcgtttcgtccctcctcggccgaaccgctctcgcgcggcagtcccccggagggtttcggtttcggtcccccaccgcccgtccccacccatcagcagtcatttggagaaagtgaggccgtgaaagagttggagcaaatgccgggagtaaggcgaatggatttgatcaaagtggagtcggacggaatacacaagggattgggcttcagcatcgccggaggaaccggaaaccagcactatccgggcgatgacggaatttttgtgacgcgaataatcaaaggaacgccagcttattacgacggccgactccaaaaaggggaccaaattttggcagtggacaataccatctttaaaaatgtttctcatcagttt

SEQ ID NO: 87217 - DNA, 607 bp, Heterodera glycines
tttattttgcgtctttcttaccctttgttcgaatttaaaaatgtcaaacaacgaaaatgaaaatgtgatgaatggagaagccgtgggaggggtggaaatcaaagtggaagccaatgaagaagtgaacacggaatcgcaggaggacggagaggaggcgaaaattccccagttcagcaaagagcaaatggaacgttcggtgatgtgctgcacaaacgaaggcgaaattgtcaatgcgccttggcatttgatggcacagtcaaagacattcatgcaaatgtgggaaagtctcgacatggaagaaaaaacgcaagaagattttacggatttcgtttttccgctcaatgacatcaccagcgactgttttcagcagattctcgcttggatgcgcgaacatcacaaccttcccgagccaattgtcaaggaggacccggtgacgcaggaacgcatttggttcaaattcaccgattgggagcgccaattcttcgacgtcgactttgaaagggtcaaggagtactttttggcttccaactttttggacattcgttcattgtacctctactgtgcccaggaatgcgctcgttgcataatggacaaatcggcagaagat

SEQ ID NO: 87218 - DNA, 597 bp, Heterodera glycines
ttttttgatgtttaattttttttatttctttgctcataaaaatgttttgctgctcaattttcttcttttttcttttataggaagtttctgtgcattgaaagcaacaacccatttgaatttttcaccgattgtcagtgaactcgcgctgaaaattgttgaagaatgtttggatgaatacggacaattggtcgaaactcgaccattcataaaaagaatttcgagccccgaaacgtcgcccgattcggaaatggaaaatgatgagcaaaatgaattcaaatatttgtgggtcgtttttcacagtttgctcaaaaaagttttgttgcataacaccacaaaaaattacgtacaaattgcaatgagttgcaaaaaatggtcaaaaaacgatggaaaggaatctttcttgtcccctttttgcgactttgtcaaatgctttacctttgtgaaatggctttttgtgcaactgaaaaggacgtcgaaattggacacttcggagttggaaagggcccaagaaatgtttaggacgatgagatcagcttacaaaattggacgagaagaagcaattcaaacggggaaaaatgggttaaatgccgaaagatt

SEQ ID NO: 87219 - DNA, 595 bp, Heterodera glycines
gtgggtcgtggagaaaatcttatcttaacttctgctactgactcttaccagacggagggaactatatcaaagaggaaatgctccagagagaggttttttgtgagtgtcttggtggcgaacgtgtttcggtccgtgcttcgcttatgtttcagagccaaacctttgccaatatgtggaagtctttgaacgtggacaccaatgagttgcctgacgattttgtcttcccgatgacgagtgttgcagttccggtctttaaaaagattatcaattggatggagagtcacgtcggacagcaagtgcctgagtttgaagaggacccaaatactcgcgaacgcaaatggttcgtccagactgacttcgaaaaggattttttcaaggtcgaagttgaagagttggttgactttctgaatgctagcaactttctcaatttgcaatctctctatcgtcattcgtgtcaggctatggctgctttgcccaaggaccgctctcctgaggaaattcgtgatctgcttgggattgaggacgatctgactgaggagcaaaaggcggaaattcgtcgcaaaaatgtttggtgcaactattgagagttcagaag

SEQ ID NO: 87220 - DNA, 695 bp, Heterodera glycines
  unsure (1)..(695): unsure at all n locations
tctctcttattcttccttatcccccggtcactttgttgctgcaaatgtcttcagaaattctttggtctactgtttttcttctattggtcgattgtgccaccattcttttttggttcttttttggccatgtcaaaaaacgacgacgcccacataaaaacgaaatctttatctgcggcgactgttggcttttggtgttcgattttcttgcgccttctcaactcggcctcgaaattgcactggtcaaccgccgctttaactgcatcgtcgacgaacacttcaagacacgcaaatggaaattgggctgcatgcgaatttgccacaaaattggagaaaatggcactaagcaattgcaaattgtcaattccgatgcaaagccattgccaattccgcaaaatccgttgcccaacaaagtcctcggattcagacacattcagatctattacatcgatcaaaatgtcatcgcatttctccgccgttttcaccgtcgtattttcgatgtttgttcaatggttttgtacattcacacagacaatgaccgcattttggactactttttgctcaacatttggccaatgtttcgtcattcaatgcgtctgatgaatttgaattccatctctttacgccgtctgcgccaattggccggcccgtcactgctcagcgattgtccatcacttcgctntgtctcttttaatgaa

SEQ ID NO: 87221 - DNA, 690 bp, Heterodera glycines
ttctggactttggcacaaatttggcaaaatattcatctcactctactgtagagcaactgcttggactcgggcaccaacgaactgttcatgtcccatggacgacgaaagcggcgcaacattggtggccaacaactgttggcacaacagcaacaacatgagcagcaaacggaggagacactgtccgccatcattcgcgtgttggccgagggtgaacatgaggaggaggtggaacgcttttacaaccgaacagcgagcagtatcagcaacatcgatggtggtccatcagtgccattctcttacaaaattgccggaaatggaacgcaacaccgacaaaaccaccggcgcaaaaaccatcgccaagaagtgcagcgggaaagcatcagccctggctatgtgtgcttgtccgactcgtggttcatctctacagtggtctccatgtccatggtctgtctgatgttgtccgcgctgatcgtcatttggggctgccattcgttgcggaaaagcaacgcgccgccggaggctaatggggccaaatgccaaaaatgctaattgagggaatgccaaattaacaaagtgtaccaatgccaaacaaagacactgtttcaaaatgattccaaatttatttttttatatttttgtccatcaactttattttctttacaatttttaatatgtattaaatggaaacaa

SEQ ID NO: 87222 - DNA, 480 bp, Heterodera glycines
tgtttgcgatgggctccctcaagtggaccgacttggtgttctgatcgacttgaatggtgatttgttgtccgcctggagcaacatgaagcgcaaagggactgacgccatttcttcactgttattggcccgagtgagggcccgtttttcatcattgcctgaccaacagcagccgctttggatggtgttttaaatgctcgaaattgccaaaatgcgagtcgacacggaaagcaaacgacaaacgctggaagagccaaaagtaacggaaggaaattgcgagacgaaaaacagcccacgcaaaaaggaggacggccggatcagcagcgagttccaattgcacgaacatttcagcaaaatcactgtgcacgacggtgcttttggtgcgccaattagctccacgagacaccaaaaacttttgcaaaaatgcaacaacatcgcctcacactcacaagcgcccacacccacaccaaatggcatgacctc

SEQ ID NO: 87223 - DNA, 533 bp, Heterodera glycines
tttttcttccgatattttccccgatcattttgttgctgcaaatgccttcaaaaattcgttggcgtgccgtgcctcttctgttggtcgattgtggtgcctccattctttggttcttttttgaccgtgtcaaaaaacggcgacgccctcccaaaaaagaaatctttatctgcgccgattgttggcttttggtgttcgatttccttgcgccttctcaagttggcctcgaaattgcactgatcagccgtcgatttgacttctacgtggatgaacatttcaaaacgcgcaaatggatgttgaacaaacaattgctaattacatggaaaattgtcggaaatggccccaagcaaatgcaaattgacgatgccgatggaaatccattgccaatcccgcgaaatccgttgccgaacaaagtcatcggattcagacgcattcagatcatttacatcgatcaaaatgtcatcgaatttctccaccgttttcaccgtcttttcggcacttgtgcaacagctttggacattaccactgaaaatgtt

SEQ ID NO: 87224 - DNA, 368 bp, Heterodera glycines
agcataagaagagaagaaggactaacagcgcctgccgccgacgcaccaacctggtgaaaagagagagaaggccaaggatcgcaagaagcaccggtccattaatggaggagcgaaaagcagctgaagccggtctcggaaggacaaggatatgttctaatccgccaagaaggatgagagcggcgccgctgcgacaaaggagcagccgagcgcggagacgaacgaaacaaccggagacgcacctgccgccaccgaagaagcgcccaatgaagaacaggcgatcgcggagacgaaggaaacaaccggagacgcacctgccgccgccgaagaagcgcccatagaagaacaggaatgaccggccggcgacttat

SEQ ID NO: 87225 - DNA, 588 bp, Heterodera glycines
tggctgctttctcgtccttcgctttgtcctcccttctccacttttcctcctttccctttcgtcctttgtgttttgtcactttcgcccccattttcctccgttccttcaaaaagcgtcggttgaacaacgtcgtcagtacaacagaatcgtgaccagccaaaacgacaccaaagcacaaatcaacagcaatgtgcagaattgggcttcaaatgcgggagttgcgagcgattacaacaatttcacatcggagcagcagcagcggtctcaacaattccatgacgcagtctccggcaatttgacaggccaagcgctgcaattattcaacaacctctggagcattcgtcagaatgatcaaatcactcgccttgccgagtgccagcaaattcgtgccgctttgaatgccaccggacgggaccacgtccttcaccttctcgtccccattcctcctccatctattgttggccctccgccttccggatgttttcctcggcctccttactcgaagccatttggcgggggatttgggccaaagtccggcggagcagccattccgggaagaggaggaccacagacaccggagagaagaat

SEQ ID NO: 87226 - DNA, 683 bp, Heterodera glycines
ccgtgacgcattgacactggactacggcttgggacgcatacgccgaagacggtccaattatggagcgatgtcaccgaccaagagtgtccaggaagtgcaacccgtggcattgtcttggcacggtctcaccgctgtccatgccaagtcgggacggaaaattcttgacaatgtgcccggtatggccgacgctggccaactcgtggcactgatgggcgccagcggggcgggtaaaacaacgctgctgaacacgttactcaaccgaaatctgaagagtctgagcgtggagggccaagtgctggtcaacggacattccctgggccggtccatcacttacgtcagcgggtacgtgcaacaggacgacttgttcatgggcacgctgacggtgaaggagcatctgatggcgcaggcacagcttcgcatggtcggacactccaaacggacgatgcgcagacgcgtcaatgagatcattgatgagcttggcctgcaagagtgtcgccatgcgcgcattggattcagtggggtcaaaaagggcatttcgggtggtgaggcgcgtcgtttgctgttcgcctccgaattgttgaacaacccacaaatcatttttgccgatgaaccgaccacgggcctcgactcgtcaatggcggaaagtgtgatcagcgtaatgcgtgccctgaccttgtccggcc

SEQ ID NO: 87227 - DNA, 633 bp, Heterodera glycines
caatatggcacacataatagtggtgaataaattccaggatcggacaatgatccgtggcacgacattgggccaaaacatgtacaagattggcggagaagaagcagtcccggtcagggaagcacttgtgatatatatgcagcaaaagaacgccaaaacgtgtagagcagcagaatatgttccaaaaaaagctgctattggatgcactggagatgaactggatttgttgagcttgctgatcaagggtgatcgaagcaaaacaatcggtgaggacgggttcgatttggagctgttcgaccaggacgacaacaacaacaacgacggggaagagcagggcgtgaataagggcaaaacgacgacggcaccgcagaaagccaagcgaacaccgtcccagccgaaggaatcgtcgttgagcaaagcgatgaaagagatggacttagaccggagcaagcaaacaccatcatcaacagaaaagccgccgtccagaaaaggttcccgtaagggagcacatctgctggagatgatggaccaagaaactgcagccccaaaaacgacccaagcgagaaaggggtccgttaagcggggcaattaacacactaattgcgtcttaatcattggccattgtgaaaaaaaaac

SEQ ID NO: 87228 - DNA, 361 bp, Heterodera glycines
cctggacgcctgtggagcgttgaagcgagaagcgaacacagcaaagcattgttcaggcgagccttggcattgaacagaatgggactgaaaggacgggcgagggattacgcgagtcgatgcgcaaaattagtgggaggaggggacagcggattgaaggaactgctggacacactccgagacgaaaacgatgccccactgattgacctcaccgtttttcatcgttcagaagcactgcaatcgcagcgattgttgaccaaaaaaggaatcattttatgcaagggaaaatgctaaacaaataactgtgtcaatactttatgtgatcaaataaattccattttgattgtttgataataaatgtggt

SEQ ID NO: 87229 - DNA, 619 bp, Heterodera glycines
ttgagaaaatgctctttttcccattgccactgttttgctcggtgtcttcgttggctcccttcaggggaaacccaccgaacaaaatgccgaaattaagccggcagcacccctcgaggcaactcgcaacgaaatcaaagacacgccgcaacgcacagagaacaaagaaatttcgcgcagcgaaatcaacgaaatcaaagagactccgcgcaacgaattcaaaacggcgccaatcactgagagccgtgaaagaccgttcattaaaagcgaaatcatccgcgacatcagctccgcaatgaacttcttgaacgagcaaatccgggagtactcggaacgaaccaaggacagagaggaattcaagggcatcattgaggccagaaacaaactcgagacggccatcaaaccattgcacggagtgatggagtccgacatggcttcttcgagcctggagacgtcgatgaccaactcggccaacatcgcccgacaagccctggaggagttgcccgtgaaacaggtccgacaaatggaacaaattgcggaggagggaaagagcaaaacggtggaggagcatgagagggcactgcgcgagtacgcggagaagaacagcgaaagtgtgaagaat

SEQ ID NO: 87230 - DNA, 298 bp, Heterodera glycines
catcctcgtccctccgcttcaatgcaaatgctccgttcactgctcttcgctgccgcgttcgcttcactgctcatcaattgctacgaggcgcggacgatacgcctggccaacattttcttatgtgccaatagcggtttcacagtcgaagaaagcctcacttttttcgaggcgaacaacattgaagtcaaaggcgaagatatatcaaacacacagacggagccagtgcccattgtgctggtgacagcgaatgtggagttcgacgtggtgttccacactaacagcaaggactgcaaggagc

SEQ ID NO: 87231 - DNA, 610 bp, Heterodera glycines
ggacggaattggaaatttttggaaaacattgaactccgaagtgtgctatccacatggaccaacaacaagccgctgccgctgctgctgctgctgctgctagcgggatttcctctggttttttgcgcactataatttcgctcaaaggcagtcagtctcaactttcgctgctcatattcttttgttgggaagcgacgatctcatcgctcttttcgatctcagcggtgcgtacaaccgctactgtggtgttaagaagccgcgagaggacctcgcctcgtttttgccacatgtttgtgccggttcgcacataaacaaaaaggcggattcgcaatgttctcttcggaaactgatcgaagacccgccaataatgggacgagaaataaacaatttgaatgccagccaaatggtcggatttaaattgacaccagaggacacagttctttaggcccaattcccaacgccaatcgcttcttcgatttgccggagcaaccgacgagcagcaccaccagcacaacgacggcatttctgtcccactcaacatctgcgccacaatttgagtccggggccaaaaccaccgacgaacgccgacagcgaaagcgcgtcaaacggtcat

SEQ ID NO: 87232 - DNA, 567 bp, Heterodera glycines
  unsure (1)..(567): unsure at all n locations
tcgaaatatttttntaaaaaaaaccatttaacattccgaaaattattgaatttttttttattaagcaacaaaaaatttataaaaaaattaaaattaaatttttaattatattttaagttaaaaaattattttaaaatggaaattggcattgcacgttctttgcaattgcttcttattttagtgctgctcatcagtgctttatacctttatttggtatgaaatttttaaatatccaattaattcacctaatttttaatttgaaaaattcatttaaattaattcaaaattttcggccgtgcctgactggtggatttacgcaatcccatgcattgtgggcggtgttttgaacgtttttccgcactccggttgtccattttggcgcttttttgccagtgcattaattgttctcggcacaattgagacgtatgtaatttggacatttttatttaatttaaaaattaataaacaaaaaaaattttagccttttcctcgtttggtccatacggtaagaaatcttttggtaatctattttaacaaataaaatattttctaaattgtgcaattatt

SEQ ID NO: 87233 - DNA, 607 bp, Heterodera glycines
tcattcccttgccgacaattcccgtgttttcctatggatttggccctctttcattgtaaaatgatcgacactttggtcatccttcacaggttgaatgggctacaacaccctccgttttgctcatcgcctgtcattttggcgtcgtttcgttcgactccgatgccaacactttcccttgggtcttccatcacccaaaacctttcaatcgcttctaatcatttggccactttcgcatacgatggacactttgttttcgttatcaatgctttcaatgggacattgaaaactgaacctttgcgtttttcggaacgacaaaaggaagtcgttgccgtgggcgaaggagggaatgttttgttcgttggcatctccgaacggggcgctctttccgtgcttacgccaaactcaccccaaacaattggtcactctgccgaactccccaaacagaagggcaccgccttttcacatttaatggcagctaatgggcggacaacaaaaaggagcggagaacaatcggaagaaaggggaggacggacgaaccacgcggttgttctgctggaaatgccgtccataaaacaattcattgatggccccgcgcattcgcttccgc

SEQ ID NO: 87234 - DNA, 419 bp, Heterodera glycines
accttccaattcttgctcttattttctgcttgttgctacttacaacggaaggaagtatattctcgccgaaaaaaacagaaagaaaaattcatcgagcagcgaacaaaaaacacaaagaagaaaccgagggtatggccgaagtcgcactttttcaaatggcaatggcatgtatggccaatctaatggattttcaaatggccgatttggcggctccagtgtctattcaaatagcggccggtcgaatagctttccaaatggtggatttggcggctccagtggcttttcatcgatgggacataactcgggcggactccacggctttgggtccggcccaccttctggaggctacggatacggaagcggttttggtggaagaaaatgaaaaaaagaccgaaagtgatcggcgagagaatgattcg

SEQ ID NO: 87235 - DNA, 468 bp, Heterodera glycines
aaccctacctttatctgaccaacgaagcaatggaaaagacggagaaggagcacaaagaaaaggattccgctgaagccaattcggacacgaccaatgccaattcgttggacaaagaaaagcagccatctgcacccatccaattgggcaacaagcgcaaattgggagacggagtgattattgacaacggcgaagaataccttatgaagctgagcacgcacaactcggaggaaccagttgacaatggaaatgtatcatacgtctcttcgttctcgtcccgctcctccacgactactatgtcttccgttgaggacgaggaggacagtggcaccaacgcgggtgacgacggttggatggtggtgaagaaggagtcgttcaagaagttgtgcgacttctacgagaagcgtcgtcgcgtggagtgcggcggtggcaccgtcgccgctgacccattcgcggaacaattggaacgcg

SEQ ID NO: 87236 - DNA, 663 bp, Heterodera glycines
gtgattgatgaagcgggtcttatacccccactttacggacgcattcgaaattggatcggcgccaaaaaggattggcccaatccgccgttgccactgcccaagaacagaactggcgtttccatccaaaatgtttttgccgttaaattgggcgatttcatcgctctgaccaattcgagttcgctgagttcttcggacagtcgccagcggtgcattcactcctccgatgggccgttgaattttgaggcgttttaccgggaccatggctttgtttggtacagcgcatctctcgagacggacggaaaaacattggaagtgcctgaacttcgcgaccacgcttatgtctttttggatgggatatttcagggcaatttgagtgtcaatgacaaaacggggggacagatgaaaatggaactgaaaggaggcggaaaaaggggacagagaatggacattttggtggaaaacatcggccgacttacgtaccctctgaccaaaacggaccccaaaggacttttctcgccacctttcatcgatggcaaagtgatcagcaaacgatggattcagtgcggggtgaatttggacaatgtttacgccgaaatcgaaaagcgaatggccaagtcaaaaaatcgaaaagagcccaccgacacaattcgttctgcgcttctc

SEQ ID NO: 87237 - DNA, 522 bp, Heterodera glycines
gacggaaccgccgcacgtgctattcgtcatttgggtgtgccaccgtctgcaccactggtggccgaggttgacaagtcactgcaacaatcggcaaaaactagcaacaacgacaacaacaaagccaccgcaaccagtaacaacggaaatggaagtggaaatgctgcgcaacaaccgcagcactcacaaccattgcatggaggcgtggactatctgttgggcattggccaaagcgttcagcgtgcgttgatgaattttggtattgaatgcgatgcggaagtgcgtgacgaacgcggcattgtgcgtggcgctgtgccatttcgtctgccgacccaaaagagtgacaccaacgggacaaccaatggcaaaacgaacggtggcattgaaacgcaaccgaaaaagacgacggaaaaaacttctgccttttgccctttcgttgtgaatcaggcgcctgttaaggaaggcattcttcaacgccctcagtggtgctccaccaattcttcgcgcgggtcgaatgcaaatccg

SEQ ID NO: 87238 - DNA, 536 bp, Heterodera glycines
cgatccgaaaaaatgccaaacattttcaaaatccttctgattgtgcttttggccgtcgtctcattccgtctctcggcttctactggtgacaaaaaaactgctaatgatgggagtggaaacaactcatcatttgggattggtacgaagatcaaaagaattgtcaccgctggactgctcttcacttccctggcgacgggtggggcggaagcgattgggcgaagcaatgctcagggaggaaatgccgccggattggtgccatcgcatgtgaccaatcgctcaatggctccaccacctcctcctgtgcaatttgaaatgggggcaaatcgattagaaaaaatgagagcacacctacgcgaacttgctgagaaaatgccggtcaatgaatcgaagcgtctgtcaccgagtggacccgacccacatcatcattagggccatggatggatccaacggaggaagaaagaatggatgcttagttttcagattttattctatcctcttttatttattagtttttcaaaacaaatttcttccacaac

SEQ ID NO: 87239 - DNA, 160 bp, Heterodera glycines
gcgccgcagggacacgaaatggaagacaagaattgaaagcgaaagccgtggcggaagagacacgcacaacgaacagggcaaaactgagacaaacgtcgcacagagcgaaaaggacgggccgtttatccgaccgaaagggaccgactgatcggcccgaacg

SEQ ID NO: 87240 - DNA, 312 bp, Heterodera glycines
aggagatgccatcgtccagcgggtcggaaaagggtaatggacgctttggcgttcgtggcgaggaagaagtgaagggaggaaaagaaattgctagcaagacacttaatattcaatcgaagcgtttttatttggacgtcaagcaaaatgatcgtggacgtttcgtcaacttggtcgtggttgctatgaatggtcgaatgaatcgtttgttcatgtcaatgcgaatttgcaagaatattaaggaattgttggggaagtttgaggggcacgtgccagcgtccgaggaagtgaatgggaaagcggagaatgtgacca

SEQ ID NO: 87241 - DNA, 384 bp, Heterodera glycines
gattgtggctttaacagcccggataactcggaccgagaatggatgacgatgttcgagcgatgcgtcaacaagcacatccaattcatcatgctggtggatgaaaagcgcaaggacacccatcggactgctcaagctgtcggaggcaatgcacaaagtcaccacgcattttgtgacgctggagaaagcgaatgacgttgtgcggaagaaccagcgccaaacgctggagaacatcctgaacaagctgaacatgaagaactttggcctcaactacgtgccggtgatggagccgtcggcgtgccgtcgcttttcgctcgaaaacggaaatgtgcttgtgatcggctacgatgtcaaccatcctgctcccatgccgcaacagacccgtcg

SEQ ID NO: 87242 - DNA, 589 bp, Heterodera glycines
gaccttgcagccctccccacggtgacgacgttcctcgtgccgagccatgcccatcgcgaccgtgtggtgacgatctcgtcgcctgaaaactcgaactttattcagtgcgcccctagctatgcattccgcaagacgggtgttcttgaaatcgccaacttcgagcctcgttgggagcaaatgctgtacacgcttttcctggcggaaggctggatcgtgaatgcccctgaccacgaaggtcccgagagcgctttctcggctggccgctttggtggtcacatggtgcttgactcgatgcgcgctgcgaacaactttaagccgctccaactctcgaagcgccctatgcacattggtcacggctactcgggtggctcgacgcccaacggctgggctgcgagtctgcacgagacgtacgccaacgagctgaacgtggtgggctggtcgctgggtggctcaatgactgacccgctgtacacgctcaactccctcgacggtaaacctacttcgtcgctggtggtggccggtgccattggcttgatggacgcctacagggacgaagtcggcaacctgcccgatgacgatgtctggaccg

SEQ ID NO: 87243 - DNA, 363 bp, Heterodera glycines
gcacgaattggcgaggcacgagttgcaaagcttaaccatttgatggaaatttgcacgagagaggaaaatttggagaggtcaaagcgcttggcgcaggccggcggctattcttttgacgccaatgcgtcggtgccgacaacattcagcttcagctgatcgaagagagagaaagaattctaatccattcattcgtttgtctttgatcactttgggtgtaaaataattccattatgccttttacaccgcaccacttttgaataccgctcaatgttccaattatttttatttttcgatgaatggttcgactgttgaaatttgattatattgttgacaatgaaaaaaaaaaaaaaaaaaaaaaaaaaa

SEQ ID NO: 87244 - DNA, 669 bp, Heterodera glycines
acaaccgcttcagtgcgcaacgcaacgcaatggccacttacctattcatcgccgctgctgccttcggagcaggaatttactgttggaaggcgtacctcggcccgatgctcgaccaaccgaagagcgacgacgaggagaagaaggctggcagcaagggcgacaagcacaagaagaaggacaagaagggcgaaggcgcagcagcagcaccagcggcggacaaaaaggaggagaagcgcaaggacaaacaccgatcgaaggaggcggggaagagcgacgacagcaaagcgggcaagaaggacaagcacgggaagaaggacaagaagggcaagaagaaggacaccgccgatgcatccaccgtggacgaagcgctgggagaacagagcacagcggagacgagccaagcagaggaatagccaggccctgctgcgtgcaaatgacagtgttcgacgacgacgtctcgcgacaccaacacacccgtcccttgctttcgaccattcccttcccatccgattgctgtgttttgtctgttccaatgcttcctaaatgttccccttgtgaacagtgatccttcctcatgtgacctgaatatgtatatattgtatacccattaatatattgtgcttcgcttgttcgatatttgtgaaatctcattcatattcatcgtcattg

SEQ ID NO: 87245 - DNA, 678 bp, Heterodera glycines
ttttaggtggtgacattgctggagtggccgagacaccgtcgaatcagtgaacgatggcaaaactgctgcttggcatatgcaccgttatttgcagaaattgcagggctaccaaattgaacgagtgccaaagttaccgctctttcacacgccaatcgactacgttgatttgtcagtgcagctttgcggacttcgttttgaacatccgtttgggttggcttccgctccgccgaccaccaccggtgcaatgtgtcgccgagcgtttgagcagggctgggcctttgtgttgaccaaaacttttgggatggacaaggacttggtgacaaatgtttcgcctcgaattgttcgtgggacgaccagtggtccaatattcggcccagggcagggctcctttctcaacattgaattgatttcggagaaatcagctgagtattggctgacttgcgtgaaggaattaaaacgtgatttttcacaaaaaattgtaattgcatcaatcatggcatcgtttaaccaacaagattgggaatttttggcatcccgttctgaagaagcagacgctgatgctttggaacttaatttgtcgtgtcctcatgggatgggcgaacgtggcatgggccttgcctgtggccaaaatcccgagatggtcaaacaaatttcggaatgggtccgttcagcagtcaa

SEQ ID NO: 87246 - DNA, 601 bp, Heterodera glycines
ctggagctgaatggcgacaaccttttcgccgttctttatgcggctaaaaaatatggcgttgttgggctcgtgaaggcgtgtgttaactacccaaaattggacccgaccaatgtgttccttgtgctagcacaagctcgcttttatgaggaggaggacctttcacggcgttgttgggaatacattgacctttttgtgggcgctgtgcttttctccaaagaatttttgcaaatggagcataaattgttgtgtgaaattttggaccgtgatcagctgatcatcagcggtgaaattgtcatttggaatgcggtacttcgttggtccgatgaacaacttcgccaaaagggcaaagaatgttcggtggaaaatcgtcgcaaaatgctcggcccagcattctttaaagttcgaattccgctcatcccaatgcaggactttgcggaaaaacttgttccgtccggcatgttgaacaaggacgagctgatcagcgtgtatctgttccattcgcatccggcccgagcgctccctgaactctaccctctacagtttcccacccaacgacgggcacagcccaaatcgcaccgtgaacagctacaaaagccgacca

SEQ ID NO: 87247 - DNA, 100 bp, Heterodera glycines
cagaagagcaaaaggcaaacgaaggctgtgacccgggggagaaggagcgcaaggaacgtgagagtttgatcgaggaagcgtacgctttgtcacaagaggg

SEQ ID NO: 87248 - DNA, 474 bp, Heterodera glycines
atcctctaagaattcacatcctctcagaaaatggcttcatctttctgctcctcaatcatttccatcgtcgcaattgtctgtttgctgtgcaaatgctgcttttcggcaccccatccatgctgtcctggcagccaacatgttgtttcgatgatgaaagatcacaccggcacattctccgcttcgatgccaaagtcttcgctttgtctgagtgccgaaagagtcgccgctgcggtggaaaaccaactgaaaacaatttggtgccctggcaatggtggtcaaacactcatcaacgagatcaacgcagctcaatcatcatctgatgagtgtgctcgctctctcggcttcatccgtgccatgttcgaaattgccgcttccgccgcttcccatgccggtgccaacgccgaattggccaatttggctgtccagctccgagaacaagttggcacaattgacaccaactgtgctgcgctgggc

SEQ ID NO: 87249 - DNA, 530 bp, Heterodera glycines
acaacgatgttaagcgaaaccgtgaaaatcggatttatcggagccgggaaaatggcacaggcattggcgagaggacttatcaattcggggcgttatccagcagagaatttgatggcgagttgtccaaagacagatgagtcactattggagcaatgcaaaaaattggggattggaacgactattgacaacacgagaatcgctcgagagaatgacgtcatcattttggcggtcaaaccgatgaatattagcaaagtgacgtccgaaattgcacccaatttccgaagggagcatttgctaatttcaattgccttagggattacacttcgctacatcgaacaacttttgccttcaaagtcccgcgttgttcgcgtgatgccgaataccaccgccgttgtcggggccggtgcctcggcttattccatgggctcggcgtgccaagatggcgactcaaaggtggtccaagatttgctctccaccgttggatattctgttgaggtgcccgaaattcacttggacccaatcaccggatt

SEQ ID NO: 87250 - DNA, 460 bp, Heterodera glycines
gctctcttctttttgcttccgactttggagaagacgacgacgaaaagtcaattgattggccaacaaaagctgactcatgacttgaagaaaatgatctgcaacgacattttggtggacattttcccttattttgaccgtcctcagctcggactcaaattggcacatgctttcaccacgttttgaagcgctggtggacaaatattttgacggcaaatccgaactgacactttggcgtacgatctccgctcacatggacacggaggcggggaaagcgcaactttatgccaacaatacggttacatttccgctgcccgagcgtccgttgccgagaaaaattcgcttccaagccttggaaatattgtacatcgaccactctgtcatcgaatttctgtgtgccaacaatcaaattttcgacaacaaaggcaccaacttggtgttcaaattgtcatcgtatttggcc

SEQ ID NO: 87251 - DNA, 644 bp, Heterodera glycines
gaaaagcgtaagaaactgctcaaagcacagcttaagtcggcgaaaatggtcgtgccaccggcgcctcaaattccgaaaaaaatcgccgaagagcacaaaaagaatggcacccaaccacaaaaggaagagtcgaagaaggacattgggaagaagaagcagccgcagatggcagagcgaagagagtcaagtggctatagtggcaagaggggaagaggcagtgggatgagcagagagagcagcaagagagcccaagggaacagccgaaagaggggcagagagaggagcagagaaagcagcggcgacaaaggcagaaagacaatgcgacgttcgtcgcgaagtcgctcggtgaaacggcgcaggcgcgactcttcctcctcctcctactcgtccacttctcgctcccgttctcgctcccgctcctatcgccgcagtccaaagcgatcgcccgccagggatcgctgccgcgacagaacaaggcgttcaacttcgaattcctctcgctcgtcttcatcctcttccgcctcgtcctcttcacagtattcttcgtccgaacggtcacactctcagtcgcgttctttcaccagcgaccgggacgaggaggaggagcgcattcgcgatcgaatcatcgcacgaacgctttccac

SEQ ID NO: 87252 - DNA, 348 bp, Heterodera glycines
atagctcaaaaataatcccccgtaaagcgaacacaatatgagaatgacccaagacgcaaatttgagcactttttgtgcccttttcactttccttctgattgttgaaggaactttctgtatttttggcattggcagcagtgacaatgacacaacgacgactattatctcagggagggggagggacatcgacgacgactgctaaaccaaacggaggagggacggcgcactgacgaaaaccattccgatgactcatcaattcgcggcaaagcgcgcgagaatcgacggcaaacgaaccaacagcatcatcagccgaacttggagtttttgcccgtatgtgctaccggacag

SEQ ID NO: 87253 - DNA, 367 bp, Heterodera glycines
tagctttattggcagagaaagaaggcggaaatgaggagcggaaacagcgggcggaagagttgcgcaagcgcacaaccgaattgttggcaaagattaagcggagtcgggaagagaaaatttccctgattgaacgtgctgattcattagacgtggaactgaacaattttcacacctcaattgaggaactcattgatcagattgatcaggtgaccagcgaaattgatcgacgcgttgagttccatgccacatgcgatgcctaattaagaattcccatcattttgtttccacaattttgcctttttaatttataatttaaaaaaaaacgaaaattaatgtttgaaaaaaaaaaaaaaaaaaaaaaaaaaaa

SEQ ID NO: 87254 - DNA, 521 bp, Heterodera glycines
accgggacaaaaattgaccttaaaatgcttcttctacgtcaactttgccttctgttgttcgctgtgttttatttgattgatgcgcgaactcaatccgtcgcggtgaaaggacgtctgctgtgtggtacggcaccggcacgaaatgttcgggttaaactgtacgatgaagacgctggtgtcgacccggatgaccaacttgatgccggatattctgacccaaatggcaactttcaactttctggccatacctcagagctgacggacatcgacgttgtttttaaggtctaccacgactgtgacgatgggattaagcccggctcgcgcaagttgaagttcaaaattccgaattcatatgtcacggacagtgcgacgccaaagaaaacgtttgacatcggtgtgctcaacttggagactgtgttcaaggacgaggaacgcgagctgatcgtgaccatgaagaaggagcggagaagccaccgttaccaagactttttggacattttgccatgaaaaagtttcgagat

SEQ ID NO: 87255 - DNA, 274 bp, Heterodera glycines
  unsure (1)..(274): unsure at all n locations
tccccccatcgccggatgccctcattttggnaagcacaggccgatttcgcattgaatttgatgcgcgaactgtccaagaacggcaattcgtgcattgtttcgccgttttctgtcgccatcgctctgtccatggtttatgtgggcgccaaggaaaagacgggcaaagaaatgggccaactgctggcaaaaggcgcgcccgaggcggaaatgcacaaatattttggagctttgctcaacgccatcaaaaatgggcagaacaattacacatttggag

SEQ ID NO: 87256 - DNA, 479 bp, Heterodera glycines
gtggaggcggttgttcatgagtttattgtaactggggagcaccgcgagcagaacgacagcgagttcgtccaccgtcagttcttgcgccgtgtgctcattccggagggcatccaaaaggagagcatcaagtgcgagctggacggcggtcgtttgctcatcagcggaaccaaaacggctggcaaaggcggacgtaccattccaattgaaatgaagaaggcggccgtggaacagcagagaagacggaagaggcggagaagcgcaagagaaaagagcaggtccaaaggagccatcgtcaaaaagaaaacggttacgaaaggcggtaaaaatacaactcaaacggaaaagaacaaagagccaagcgacaaaagaactcattttgaacgccagggaggttattccttttggtgaccgcgtcgatgctcccccgacatttaccagtgaattggctcgaacaattcgacctcttcatgaacgggcag

SEQ ID NO: 87257 - DNA, 576 bp, Heterodera glycines
agaaaatgcccctcggcaaagggccttatgtgcgaatgccattacggagaaaagggccaagacatgggcaatgaaccatttgtgcttctgcccatcccaaatggattaatgtgcaaattggggcaatttgatgtgaacggaattggcagtttgttggagggcaaatgcctgcacaatgaccattactgcttcatggccagatgcaacaaaggcaataagtatttcaaaactgaatggggttgcgctgttagtcaagaccgtgttagcattaaccaacaaattggggaaactgtcaaggccgtggtggcctgtgaagcaatgtttggccaaaaggacgtggctttttcaaacgaaaacttcacaattgatatgttggatgtggaaacgagcacgacgaccacgacgacgacgaccagacaattggaagttattaccacggcacaaccaaccacaactaccagcagcagcaccaccaccaccaccaccaccaccactaccacgaagccaacaattgaggaatcaacaaactcaacgaatgggggaaacatcgtatgtgtgcaccacacgtctatttct

SEQ ID NO: 87258 - DNA, 242 bp, Heterodera glycines
tactgttggcttctccggagcagacatcactgagatctgtcaacgcgcttgcaaactcgccattcgcgagtccattgagaaggctgttgccatcgaaaaagatcgccaggccaaggaacagcgtggcgaggaagttatggacgtggccgaggatccggtgccgcagctgactcgcaaacattttgaggatgctatgaagtttgctcgtcgcagtgtttccgacaatgacatccgcaagtacc

SEQ ID NO: 87259 - DNA, 617 bp, Heterodera glycines
tgtttttgctgttgtgtcaatggtgttctgtcattgctctgctgattttcggcataatttgcctttgttttggcgttttctctctcatttttgtgcccaaattggtcaacaaagcgatcagagaaaatgtttttgttggtcggtttccaaacggaagtgataatttcgcaatggaacagtacagagacccgatttacgacgtaaagatgcagatttgggtcttttctgtgcaaaaccctaacgaaattgtgaataaaggagaaaaagcgaatgtgacggagttgggtccgttcacttacgatattcgaatgcacaaaaacaatgtgaagtttggctccaatgactcgcgactgttctaccgaaatgtcaagtccttcttcttcaacccccatttgtcctgttccgagtgcaatttgtcctcttcggtggtcgtccccaacataattttccaaaaacttgtgcatgcttgtggcaacaacacctttctcatcccattcattgagccttttttgatgaataaggaaaaggtgtttgtcagtgtcacattggacgaactgctcttccaaggctatgaagacaaatttgtcaatgacatctgctcaaatccattaacgaaa

SEQ ID NO: 87260 - DNA, 473 bp, Heterodera glycines
  unsure (1)..(473): unsure at all n locations
tcaaaagcgtcgtaccataacgtcacacacatcataaccctcattctcggcgagggcccggagtgccaaggcgaagctgcgcgatgccaagcggaggagggcggcagttggacgcgcaggtctacaagaaaagcgcagcggggcgagcgatgtgccatcagcatgactcctccgatcgccatcacgcggactattctcggctgcacccatccgttccatcgccgctgcttgtatcgctggatccgctaccacaccaattgccccgtgtgccgctacaacttcacccgcactattccgcgccgtaactaaccgctgtaagatgccatgtgttgtgatcgccatacgatgtcatttgttgtgatcatatttgtatcccattgttaggttatgcgtatgtatttgtacaatggaatgtntgctcttatatgcattctgtatgtctatataatactcgtcagtnaataaaatacgtt

SEQ ID NO: 87261 - DNA, 593 bp, Heterodera glycines
tcggatttgttgaagaggaaggcagggagaccatattggacaatcatcggcaaattcaccaaaatcgacgggccccctcaatttgcggctcaaaagctttggattgtccgccaaaatcccactatatatgtgcgctgaaggcgactaagctcagtctgaagaacttttccctttccgtcgccgctttcactttgctcaaagtgttcaactctctcagcagatcaaacaccaaaacgccaagggttgtttcttcaaataaaagcatcagaaaactgtttgaacttctccgagtgccaactttcatcggcactttgccgttgctttgtcagttttcccagtgcttttgtgcccacttcttcccaacaaaaagtgtcaccatttgtcggccaattggcgtcggaatcagcgcaactgttgcaatggcatttctgtggcccaacaacactttggcactgtacgcattttggaaaatggttgagtttgctttttttcggttggccgatgtcggcactttgcccgttttgccgtgggccgatgcccttctcttctccgtgctctcctcctatttgctcggccttgcggtgctggaacca

SEQ ID NO: 87262 - DNA, 574 bp, Heterodera glycines
caatttggtacgattttcctgctcatcctcccgattcgtctgcatcttccgacttcaatgagccgaggacacatcgccaagcgctgttcgccgcccaagaccctctggtgggcaatctcatttggtttccgatggtggcacgggagtacgaggcgtgccgggattgtgttggcatcatcgacatgacctgcttcgccaagttcgacatcagtggccctgacgtggttccattgctgcaaaagctctgttctgctaacattgaccgtgcggtcggaaccacaatttacaccggaatgcataatgaacagggcggttatgtgtccgatgcaacggtcagccgaatgggcaatgattcgtatttcatcgtggctcccactgttcaacaagttcggttggccctttggattcaacgttgggcagacgagtgggcgatggacgtgcggttacaggacgtgacgaacaacttcatcgctttggacatcgttgggcccgcgtcgcgtgatttgatgcgggcattgaccagcgaaagcgtcactccgcacgactttccctcatttgcctttcggactatcca

SEQ ID NO: 87263 - DNA, 615 bp, Heterodera glycines
tcccgggcaacgacgcagcagtcgaaacaaccgacgcagaagtgggcgcatcggcaccagtcaaacggcacagtgacaacaccattatttatcatcagcaacagcaacagcagcgacgcatgggccatttcaatctctgcgacgacgtttggttggacacattggcatggatcattctcttataagtcggcatgaagttctcgctggtcaatgctcggttcaacactttggtggacaggcatttcgagcagaggaagtggtgctttggcgagtttcacatctgtgagcggatgacggaagaatcgggcgcagaaatcatgacatcgatcgacggctccgacttcagcacgtcgccattgcccaccactccgctgccggacagtgtcgtcggcttccaatcaatctccatttggtacatcaacgaagaggtcatcaattttctgtgcacaattcgccgtctcctcgccgaagacattgcgctggaattttccacttacttcacagaatatcgcagttggaaagtgatggcacgacacatttggccgctgttgcgggatgggatcagcactttgttcctgaagaagtgtgacttggccatgctccgtaaacacgtgt

SEQ ID NO: 87264 - DNA, 549 bp, Heterodera glycines
caactgaaaattccttctcaaaaccaatgtttggcgggttgccctgccgatggcctggctatcggatctctttgaagccgcataatggcctttatctttggcaaaattgtcctcggacatttttacgcctcgtctctccaaagaacaggtgcgcaattgctcaaaattgccatttgagtaccgaatggatttggttaaacgaattgtgaattgtctgatcgaaattgccccaggagaaaacattgatgggtggcgttgtggcggaagcatttctttacaattgttggcccaaaaacttctcacggccgacgaccggcgaatgttggccaaccaggacaaaggacttcagactttcttacgcaatcaacaccaaattttctgtgtcatcaaaggcattgtttcaatgcgaaaatggagcactgtaaacgaagaattcgcacggaaaagtggaggaaagcccccgcggagccattgctttttccaccgattgcatcccgacggttgtccgttggaagcgcacatttgttcgtacaagccttaatattacat

SEQ ID NO: 87265 - DNA, 464 bp, Heterodera glycines
atagcccggcagcaatcaccacaagcaataataacgaagagaatggcggcacaacgattcgtcaaaaaaatgccaccaaaaccagcaatggcattttgccgccaaaaacgccgaaagaaatgaggctgattgttggcacaacagtgccacaaaagagccaacaacaacaaccattgaaaggaaatagcagcgcaattagcaaagcgcttacttctccggcgcctaaaaagaaagatgatgagtcatcgatattgcctttttaccgtctccaacattcaaaatcattgccagtggaccggacaccgacaccaacaaatgaacaagaagaaaatgtaacgagcaatataaagatagccaaaaaaattaatgtcacagctgacgggaactgtttgtttcgttcatttgccgtctcattgtatgggcgtgacgatggatttgagcacaaacggttgcgcaaacaagcg

SEQ ID NO: 87266 - DNA, 466 bp, Heterodera glycines
ctctctaaaaaatgtccttggttgtggtcaagataaatgatcagccttgtttagcggtgattgccacaaatttcactcattcattttgcgggtcgggcatcgtcaattcgctgaaactaaacgtgattgttttaaacgacgcaccaacggtcacaacgagtgaagggacaccgtactaactccttggccaggctctctttcaattggagttcggcccgtggcacagcgatggctttacaccgcttttaatcgcttacgattgtcctgccgatatgctaattggtcaggatctgatcaacgaaatcagtgcgacattgccaataaaattcgaataccacaaaaactcggtgaatgttgggggtacccgagtttcaatgcttgatccgatggccgccgaagagaaattcttttccgtgcgcgtggttgatccgcgaactaacgaggaaattggactggagacatggaa

SEQ ID NO: 87267 - DNA, 493 bp, Heterodera glycines
caagctgatacaagcgatgtgcaactacgcgtccaaagcacgccgacccgggctcagtgaaaagatcgcttcaattggacgcgaacatttacaagcggttgaggcggaacagcagcgaaaaaaagcagcaacagcagagcgcaaatttaaattatggcaattccattttataccatcggagggtggaaaatggagctaaggatgggactgaaaggaccgtcgctgatacggtggccccaaatgtgaacaaaatgttggtaccgaagcgaaaagtcactgctgacgcattgttggattctttacgggcagaagacggagccaaaaagcataaacaaaatgccaaaatgtgtccccctccgccgtcggtgccatcatctttgtcctcctcatctgccactctttcttccgcgctttgggaccatgaaaatgatgagaatgcaattgttgtcatcgacaataacacctctaccactgcgcaatcgcaagatgccag

SEQ ID NO: 87268 - DNA, 439 bp, Heterodera glycines
tcgtcccgacttcctaatgcaagttcatcaccaccaccaccacaagagccaccatcaacgccacaaacgttcttattcttccgcccgccatgtgttgatcaatttcggcttccaatttccgcatgatttcaaacttggcagtggtcgttacagcaaagtgtacaaaggattttaccgcgaagcaaatcgttattttgcaatcaaaattaccgacttggaagccgtttctgacagattcaagcataagtttgtgccccgtgaactcaaagtctggcgcgagttgagtcacccgaaccacgtccgtttgtacaaggatttcatgaagaatgactttctgttcgagatcatcgacttggctgttggcggtgatatggtgggtcaaagttaaagtttggtgcgttgtccataccttctttcagctcaattatttgcggaacca

SEQ ID NO: 87269 - DNA, 603 bp, Heterodera glycines
ttattgcgcctaattttatttgtgacgtcggcatttgtacatattacgacagttcgtcgtcgactgctgcgtattattatttgttgtcttcaccacacactcgtcaagctgctggttgagcgcaatgtccaagagacggcttcgacaggaactccaggacatggtgaagaacccattgcctgatggatgcactgcacggccacttgatcaacggaccatgaacagctggacggtaaccatccgaggccgggccggcacaccgtacgcaaacggcaacttccaactgagcatggcatttccgagggactacccgttcaaagcgccgcaagtcacgttcaccacgcgcatcttccacccgaacatcgacacacggggcaaagtgtgtctggacattctgcaaacgcactgggcaccgacgctgaccatcgaaaaagttgtgatctccatcatcgttctgctgaatgacccgaacccggacaactcgcctatcaatgcgcaagctgccagtttgtaccggactgaccgtgcggagttcaacagacgcgcccgtgagatgacgctcgcctatgcacgatgagatgatcagcacgtctttctgattcc

SEQ ID NO: 87270 - DNA, 664 bp, Heterodera glycines
tgaacaccttccgtctatctcgatatttggcaacttctgcgttttccaaagctcgctatggtttccggccttccggtggagcaggacaatatgcatttcgctttaaagaagcttttgctgcgcgtcaggttgcgccggctcttcgtgaacgccttctcggccctaccactggcaaaccatttatcgtcggaacttacgcacttgccggggcttcagtttttggcattggaatgttgtgctactacggacttaccacgactgtcgacagcgctgctgttcgttccaatttatggcctgattatgttcgtcagagacttcagtcgacctacgcttatttggctggtagccttgccttgactgcgggtgctggagtggctgctgcccgtagtcctggaattttggctcttaccagcgctccatcacttctggtttggtttggttctctcgctgctattattggttctggtatcgttgttcaaaaaatcgactaccatggcaactcggctgccgaacatttggcttggttggctcattgtggcattcttggtgcagttgtggctcccctttgttttgttggtggacccgcccttatgcgagccgtttggtgtacggctggacttgttggacgtctatccgccactgcgatctgcgctccatctgacaa

SEQ ID NO: 87271 - DNA, 576 bp, Heterodera glycines
caatttgagcaccgtatgtcacccgacagtgtccgatcgctggaggtcaacggcgatgtggtgttgcaccgtgtcaatttggtgaacatggcgcaaccagcgtccgcaccagcaccaacattgcaaccgatggctccggcaccacagtttggccaaccgatgtatccgttttcgccttcccaaccatttggctatgcggcaccgcctccggatgttggcttttcgccttccattggcggcggtcattatccctcaatgccaccgtatccatccgcttcagtgccgcagccgaatgctcctgccgacgcatcacaatggcaccagccagattatggcacgcccaagccaaatgctacatatccgccatatggccaccattgagatgctgtgccaaaatgaaacgggcaatggatgaattttaccgtgataaaaaatgagtgtggggaaattagagtccgtaatttttaaaaatcggggatgggattgggtatcaggccgggatgtgatttaaaatccaatttttgtccgggaaaatccacacgtcctatcccatccgggccctattactcataattg

SEQ ID NO: 87272 - DNA, 506 bp, Heterodera glycines
attctcaaaagcgtcgttccataacgtcacacacatcataaccctcatgaccactccagcaaacgcggcgagggcccggagtgccaaggcgaagctgcgcgatgccaagcggaggagggtttcagttggacgcgcaggatacacaagaaaagcgcagcggggcgagctagtgccatttgtatgaccaacgtgatcgccatcacgcggacgacgctcggctgcacccatccgttccatcgccgctgcttgtatcgctggatccgctaccacaccaattgccccgtgtgccgctacaacttcgcccgcaccattccgcgcggtgagcgtaaccaaccgctgtaagatgccatgtgttgtgatcgccgtacgatgtcatttgtgtgatcatatttgtatcccattgttcggttatgcgtatgtctttgtacaatggaatgtatgttcttatatgtactctgtatgtacagtatgtataatactcgtcagtaaaatactctccttaaagg

SEQ ID NO: 87273 - DNA, 630 bp, Heterodera glycines
  unsure (1)..(630): unsure at all n locations
taataaataagtttttttgttcaaaatgagcaactttatatttgtttcctttttaactgcagcgttttttagctcaggcctcgctctaccggctccttatgatgctgaatcggtggtatcttttgttttaaatgttccactactttcagctgacgcaaatgttgaagcatctcctcccaatgaaagtgatgctgtttttgagatacaagctccatcaattccggtaccaattgaacatcaaactgctgctgacattactcatccaactgaaactggcaatgagtcttctattgcatcatcatcatccacgccgaaaagtgagcagacgccaaaaaaagtgatgaacatgaaaagcgcgctggaaggcgcggcggccaacgtgtacggggggcttccgttagacaagcagcccaagacgatcgctgaagcggcngcaaaagcaaagcagacgcccgccaaacttccggctgactacgacgtgaaccgcgtggcggaacgcgcagcagcccgtgtgtacgggtggcttccggaagacaagcagcctaaggcgatctatgacgcggcggagaatgcaaagaacacgcccaaaccgccgggcgactacgacgtggagcgcgtggcgcaaaatgc

SEQ ID NO: 87274 - DNA, 530 bp, Heterodera glycines
taatcttctctgtttctctctacatatcccaaaattgttccccaatgctgcaagctcatcagtaccaacttcggcaaggtcatcgtcgcgtttctgctcgcagcattttggcccatttcggtttcgaattctcgaacgactaccgacttggctgcggacattacagtaaagtgtacaaaggctatttcaaggaagcgcaacgcacttttgccatcaaagtcaccgacttggaaagcgtttccgagaagttcaagcaaaagtttctgccacgtgagctggaagtttggcgggaattggaccacccgaacctcgtctatttgtacaaagatttccagtggaacaattatcagttcgcagtgatggaattggttgttggtggtgacttgctttcgttcctccaaaaatgtggccacgtcagcgaaacgacctgtcacaattggatgctccaaattgttgctgctttggattatctccaccgtaagggaatcgctcatcgcgatctgaagctggaaaacgtccttctttgtgaa

SEQ ID NO: 87275 - DNA, 137 bp, Heterodera glycines
gcgacgggtggggcggaagcgatagggcgaaccggtgctcagggaggaaatgccgccggattggtgccatcgcatgtgaccaatcgctcactggctccaccacctcctactgtgcaattggaaatgggggcaaatcg

SEQ ID NO: 87276 - DNA, 670 bp, Heterodera glycines
ttttctccctatactttccggtcactttgttgctgcaaatgtcttcagcacaaattcttttgtgtgccatgtttcttctgctgttggtcgtttgtgccatcattctttggatcctttttgaccatgtcaaaaaacgactacgccctcacaaagaaatctttatctgtggcgattgttggcttttggtgttcgattttcttgcgccttctcaactcggccttgaaattgcgctggtcaaccgccgctttaactgcatcgtcgacgaacacttcaaaacgcgcaaatggaaattgggcggaatacgaatttgccacaaaattggagagaatggcaccaatcaaatgcaaattgtcaattccgatggaaatccattgccaatcccgcaaaatccgttgtcgaacaaagtcatcggattccgaggcattcagatcaattacatcgaccaaaatgccgtcgcttttctccgccgttttcgccgtattttcgccttttcttcaatatacttggtcatcactgaaaatgtttgcgtttcggaatttgttttgctcaacgttttgccaatgctccgcgactccattgttgtgatgatgttgaatactatcgcttttcgccgtttccgccaattggccccgtcaatgctcaacgattgtccatctcttcacactgtcat

SEQ ID NO: 87277 - DNA, 670 bp, Heterodera glycines
ataaaatgcttaatttccccgtcaaattatcgccatttttcttgtttcattctcagtttcgccatatttttctacgacctctttcctcttctgttaaatcggcgaacaaattccgaaaagatgttaggataacaactgaaaaggacaaaaacaacatcaccagcggttctgccacttcttctccctctgatgataattttgcacattttgttggcgctcgtctctctttgaccgtcgacccaaaatttgctgctgtcgaacttatttcacgcgacagttttgacgggacttcttcaaaaccgcttcgaattccgttggtttggcttcgcgatcactgccgaagcaatgcgtcatataattcacgcacaaatcagcgccggtccgactgcacaaatttatttgccggagcaactcttgcggatgattgttatccaatccattttgacgccgacaggcaaaggctgacattgagttgggctgatggacatgaaagtgcatttggagtccgggaactgctcagttgggcaatgttctcacaaaagcattatggcgaagaatgggaggccggcgcggaatgtccgtcgcgttcgctttgggacgccagaaggttgcgtgaagtgccctccgtgtccagttcagaattcgacttcgctctattcgctcgtctttt

SEQ ID NO: 87278 - DNA, 647 bp, Heterodera glycines
ataataagggcaatttcagaataaatgtaaaaaaattgctacaaatttctggaaaaaaatttttctcattcagtacaaaagtctatgattcttaagttatagctaataaaaacatataacttatttgttaacataaacaaatagcgatttcaaaaaattaataattattctgttctgagatttatttgtttgtttttcatgaaaaattttcaaatttatgtaaagcaacaaatttatttcgatatggcgccaaaaacgaataaaacgataatttaaaattgtataagtttaaaagcaaattattttaccgatgaatttaatttattcgcatttaatcaaaaaataaaattttaatattcccataaacataaaacagaacaaaaattcataccaaaagcatatgtactgcaaacaaaaaaccagctcggcaccccttttaaggccatagccatcgcaaaagtgttttcttctggccaatgccttcccccgccgaatttatcgtttccatcgcttccgctgccttttccctcatcatttcgtcaaatttcttttgaatttccttttgtttgaccttttccgcctttttttgtccaattgtttttccattttttaatttgtcccatttcttcggcttctttgatttgttg

SEQ ID NO: 87279 - DNA, 704 bp, Heterodera glycines
aggcgatgcaggcttcttctcggagtgcgtgtcctcgtggaaaaaaggcgccggtcgagaagagaaccaagcgatgctgagccggtcactcttgaccttgtgcagttgagaacgcagaccattttcattcagcagacggtcacaatcaaaactcattctcaactgatccttttgtttcaaattgagcacggtctcttcacggggttcacctcccatccgcacctcgtccaaattttgaattcgtccgtccatttccaagccgggccccgcgtcagtttctccgccgttcattttgtgctttccaatctgacgaaggaagaagcaatcgtttacactgtcgctttgatcgaacccgacaatccgtactcccccaccgatttggctccaattgcaatcactgccaattatcaccagctcactctcgggcagttaattgcactgcccgacaatttggactttgtcagtacgagtgccgaaatggattccctcgactctttattgaaacgcgcgccacggcaccgtcgaagcaaaaagcaccgacggagcagaggacatcaccacgccgaacaccagcatcaacgggggggatgtgttcggagggggaagccgaccaaaatggacaatttgcttcatctggaccccacgcgaagtcatttctgacgcgactcgattctgcgcattcgccgggctctccaaattcgcgg

SEQ ID NO: 87280 - DNA, 683 bp, Heterodera glycines
caccgcgggttgctgctgcccccgtcgctgttgaatttagtcaacccatatgcgatcaccgccgccattcccaccgagcggcgctgaccaacaatcgccatccaatcagcagacattttttgtctcttctgccgcacagtcactcaacgcgggcaaacagccggacaaaatgcctttcttacacaaattctacgaatattacacgttgggatgcatcagcatgcgcactgagagtttggcattgtgtgtggctgtccaatttctgctgaccaatgccttccttatttggctgtctctgcagggatggcacccgtattggcgtttggcactgccggcggtgttcaacgcgggcgcttcgctgtcactgatttacgcctggtgggcggacaagtccagctacagcttgctgttcctcattgtcaatggtttgtccatttgcgcgttggcactttctctctttgcgttgctcctcgccgagacggacccggctctgctgaagcagttgatcaacaacaacgacgagacggagacggaacagcaccagtgggacaattacgcatatgaagaaaaaacagtggtgaagacgaaggacggctctgagcatgagcacgtgcgccaaaatacaattgcgactgcgtggcgccactacgctcggcggttggagctgagcggttggctgcgcg

SEQ ID NO: 87281 - DNA, 281 bp, Heterodera glycines
aggagacggggccgttaagacaacaggagggcaaactgctgattgccgacttggacaagaagcagcgaaaaagagggaacaccaaaagggacgccattcctaagaaaggggcgaaacggagaaagggaggagaggaggcaaagcatgacgaagatggagggggaaggaacagcgatggtgagtcatccgccggtggaagtcaatgaacgaacaaacgaagaaccatcattgcgcttttgttgttgttatgtttattaaggaacaaataaatttataacaca

SEQ ID NO: 87282 - DNA, 472 bp, Heterodera glycines
agcgttatttgatggacacgaaccgtgctggcacattgataggcgaggatcagtttggcaaccggtacttcgaagacacacttatttcgtgccccggaatcgctacgtcgtctacgccgagagggtttggctcgactacgacgcctcgcaaatcccgcccgaatggcaccgctggttgcaccacatttgcgacaaaccgccgaccgttgagccgccgccggagcgcaagaaatggatgttggaacatgagccgaacaattcgattgtaatgagcaaaaaatacgtgccctattcgaccacacgcccaaaagtggagggatgggtgccggggaggaagagaagcgaagaggggacgcactgagtgagggcgaaggaatgggacgaatgatcgacggacggacaaaagacaaacggacgaacgaacgcaccaccaacccattcagttgtaatatttgtgagaggacaaggaata

SEQ ID NO: 87283 - DNA, 561 bp, Heterodera glycines
  unsure (1)..(561): unsure at all n locations
aggcattgaccgatgcgctcatcgctggnacacgttaatctaaacagaaaacgctggtgtccaaagttgagcgttcagaaacgaccggcaaactgactgtccatatgacggacgaaagcaaattggaggatgtagacaaactgatttgggcaattggacgtgacccgttgacagctgagctgaacttggccgatgttggggtcaagctaatagctggcgactacatcaaagtggacgattaccaaaacacgaccaaggagggcatttacgcggttggcgacgtctgcacaccgaaattcgaactgacgccagttgcaattgccgctggtcgccgtttggcccatcgtttgttcaacaaggaagcggagaaccgtctcacctacgaaaacattcccactgttgtgtttagtcatccgccgcttgccacaacgggcctcagtgaaaaggaggcagtggagcgcttcgggcgtgaccaggtgaagacgtacaatgccggcttcacgaacatgtactttgccatgactcaacacaaagagaaaacccacatgaaaatcgtgtgcc

SEQ ID NO: 87284 - DNA, 487 bp, Heterodera glycines
tgaagggaatttacggacatttgacgggcttcagacaaaggaggggcgtgccggaatggggccttcttcatgaagcagaaaatcacaacgcttgcggcacttttgctctttttcatgctctgacgaataacaccgaccgaattgacattggaaacggcgtcttctatgattggtttaaggcggcaaaacaactcaatgttgaacaacgctcggaccttttggcaaacgattcggagttggctcatttgcatgaacactgtgctttgagggaatcggagacagatgtcccaaggaatgttgctcaccacttcatctcatactttacacatggaggacgtcttttcgaatttgactcgggacaggaatttccgcgcgactgtggaccttccagcgaggagactcttttaactgatgctgggaagatttgcaaagagctaatgggccaattggaggacatttcatgcaatgcaattgcactctgtgccaa

SEQ ID NO: 87285 - DNA, 621 bp, Heterodera glycines
gattagtatttgagttgtcttaattttaaaatgacgaagaaacaagtcaccatcgttggttctggaaattggggcacggcaattgctcgaattgtgggcaaaacagtgcaaatgcataactcagaatttgatgactcggcggtcaaaatgtgggtctttgaagaggtggttgaaggacgcaaacttagcgaaattatcaacgagaaacacgaaaatgtgaaatatttgcccggaaagaaacttcccactaatgttatcgctgtcactgatgttgtcgaggcttcaaaaaacgcggatgttctcattttcatcatccctcaccaattcttgcacaaagtttgcgaacagctcaaaggaaacatcaaaaagagcgcaatcgcaatttcgctgattaagggcttggccacttttcacgaaaaagacattgggctgcgactgatctctaatgaaatcgcgacctctcttggcattgacacttccgtgctaatgggtgctaatctcgcgaacgaagtggcagaagaccacttttgtgaagcaactattggaaccaaaaacccacagcatggaaatgaattgaagaagttgtttcacaccgacaatttccgaataaatgtggtcgaa

SEQ ID NO: 87286 - DNA, 364 bp, Heterodera glycines
tcgactcgaaaaacttgaaatttttgctttccaaatacctcccaaaaatgtttgccccaaaatttttgcttgctttactggtctgtgttgcttttgccattggaacaaagcatggaaaaacggcacgcaaaatggcaaagaacaatgtggcaaaggacgagctcgaacaggctttctccccattggtgcccgttgaacttgcgcagaagaagttcgagcgtcgcattgaccagatggagaagcagctttcagaagtgatcaacagtgttcgtggagactgcatgccgaagaaaggagatgacgaagaggaagaagaagaagaaaaaaagtgaagatggaaaaaaaaaaaaaaaaaaaaaaaaaa

SEQ ID NO: 87287 - DNA, 372 bp, Heterodera glycines
gtgagatgagtgtgctcgcagtctcggcttcgtccgtgccatgttcgaaattgccgcttccgccgcttcccatgccggtgccaacgccgatttggctgtccagttccgagaacaagttggcacaattgacagcaattgtgccgcgttgggcattcatgttgggcaaatcagcttggatgcccccaggggagaccatccgcaagtgcatgactctgagagtgtgcttagtaaccctggcaccagcgggtctcacaagcgcttttaagtgaatttcgtagattcgatgatgtcatcatttgttgattgatatgcaatagaaattatcttattcgaaaataattattcatctcttttattaaatgaatgtgatgc

SEQ ID NO: 87288 - DNA, 628 bp, Heterodera glycines
ttattgacctgtttttggagacggaacagaacgaacagcagcagctgacggagcaatgccaaaacgagggcgaagcaatgctaagcaaaacggcacttcagagagtagcaaagcggtgcactttggaagagattacgtcgcagcttttgatgtttctgcttgccggcttcgacacaagcgcaaatacgctgagtttggtttgccacgcgttggcccttcacgcggaagtgcaagagaaagtccaagaggaaattgactcggtgtgcttcgacgaggacccaacttatgagcagctgagccaattgaaatacaccgaagcggtggtcaaagaaacgctgcgccttttgcccattgcgacgaatgttatgaatcgaacgtgctgccaaaccacgacattgggcgacataaccgtggagaagggcaccgtcgtgatgtgcgatattctttcgctgcaccacgacaaaaccgtgtggggagaggacgcggacgaatttcgaccagaaaggtggctcgaagcagggcatcaattgccgccgttttacgcgttcggcggcggtccgcgcatttgcattggcatgcgattcgcaatgattgaggagaaattggcattggtccgaattttgcgcaa

SEQ ID NO: 87289 - DNA, 259 bp, Heterodera glycines
cgctcctccgaagcaccaaagctatgacgattgaggcatcgatgttcgatatgggcttgggttgtgtggcatggtgggaaccgcagtgcgcaagtgaattgaaacaggaagcaaatgatccaagcgaagatgaatagtaacaaacgaattgaagattttgttattgttttatttgttctaacggattcttttttaaaaaaaaaaaaaaaaaaaaaaaaaaaaaaacaaaaaaaaaaaaaaaaaaaaaaaaaaaagtcct

SEQ ID NO: 87290 - DNA, 621 bp, Heterodera glycines
tcaaattggagagtatgtgcgtgacctttgcgcaggtttacggcactttggcactgacaatgctttctgcaatccttggcattgtggtcaacgcggtgatggacttctcgtcgttgctgccaatcttttcgctgatggaactcggcttcttgatcgcccttatggtcaccaatccgtcgcaccaaaatgagaacaaacgtttgggcttcatgtacgcttttgcctttttgtttggctgtgaggttggcccgttgattgagtatgtgggcatcgatgatccgaccattgtattcaacgcgatcttcgtcaccatgctcgtcttcggctccttcaccatgtccgcgttgtacgccgattcgaccaaataccttcacttgggaggtatcctctcatctgcactgttttgcatgctgatcgtcctgcttttcgccccgtacactccgttcgtccgctcgttcatgctctgggccgggttggcgatcaattcggcatttgtgctctacgacactcagctgattgtggagagatgccgccgtggtgacaacgattacatttggcacacggtcatgctgttccaagaccttgcctacatcttccgctacgtgctcattcttttgaagg

SEQ ID NO: 87291 - DNA, 268 bp, Heterodera glycines
  unsure (1)..(268): unsure at all n locations
gtgattgcagtgcgcgggagattcggcagggttgtggcagagttacgtcacaagatccgcattcagttcgcaaatgttgaacaactcacaaaacatcgaggaattgcggcataacactgagggctttgccaaagcgcttggcttttcgtcgactgcgcaccaccgaatttcttccaaaatggccgggagtccccaaactgtccgcnngtctttgtcgacgaaaactttccagnngcgctttcgtcccgtgtttnttctcccgactcga

SEQ ID NO: 87292 - DNA, 537 bp, Heterodera glycines
  unsure (1)..(537): unsure at all n locations
ggaagctgcagaacaaaatggccaagncttcagaagcttggctcaacaaagtgccaaggggcttcagagcctgttcaacaaaatgccaaagcatcagagcctgcaatccagcaacaaaaggccaatgcgcaacaaaatgccaaagcatcagagcctgcaatccagcaacaaaaggccaatgcgcaacaaaatgccaaagcatcagagcctgcaatccagcaacaaaatgccaaagcatccgaagctgcagaacaaaatgccaaagcttcagagcttgctcaacaaagtgccaaggcttcagagcctgttcaacaaaatgccaaagcatcagagcctgcaatccagcaacaaaatgccaatgcacaacaaaatgccaaaatggagaacataacttcaaaagatgcgccaaatgtcaaaagtgataacagcattaacaaacagtctatgaatggctctgatacaaatgagaaaaatgccatggaaacanaatttgttgtgccaagctctattgagtcacgggttattgagcctgttcga

SEQ ID NO: 87293 - DNA, 532 bp, Heterodera glycines
gcctttccttattctattattttattagatttaccacaaatggctaaaataaaaataaagtggggtaccaaagaacttaatgttgacgccaatcccgaagaacctcccctattgctcaaggcgcaactattcgggttgacaaatgttccacctgaacgacaaaagttgatagttaagggcaagacgatatctgacgaagcatggaacggaatcaaaataaaagatggaactgttataatgcttattggaagcactgaatcgatgttgataaaggcagaaaatgctgagtcgtccggccatacaaattcgacagagacggaaccgcgccaacagttccccattggtctacgaaatttgggcaacacttgttacatgaactcgagtttgcagtgtttgaagattgtgccggaatttgaaaccgccttgaagcaatacaatcccaaccaatctgttgacgggtcgaaccaacgcataaaactcttcaccaattctatgaagaagctctacaacgagatgaatgttttggcgaagg

SEQ ID NO: 87294 - DNA, 514 bp, Heterodera glycines
gatgtaaacgccgaactcccgccggacttcgaatggtatcaaaatcaaatagcgggtcatcttccctctgttatacgtaatggcgtaaggcaaattggcattttgcacgaacgtggccgaaccgatgtaattctgaagttggttcaggagggaattcgcggccaacgtgagataggattttaccgacggatcgcagcaatttgtgagggccaagggatcaattgcgaagaaacggacgaagtggagggcacactgctgaaggagttggccatgttcatcccccgattttacggatgccgacagattttattggacgaaaatggtccaccgaaggaattcattcaattggaagatgtcactgagaaattcaaatgcccctgcataatggatgtaaagatgggccgcgtttcggccgacccattggccagtgaggagaaaagaatggccgaagaagtgaagtcgccgttgcagaagaaaattggatttcgtatactcgggcacagagtacaaaatg

SEQ ID NO: 87295 - DNA, 548 bp, Heterodera glycines
attatggaacgttgtcgtagctgtaactgtgccgttgaattgggtgcctcccccgatgttctgatggtgttcagttgtcccgattgtcgtcttaagttttgtcgtttgtgtgacgagccatggcaagacgaacacaagggcgtcagctgcgagcagttcgccaagaaacagaaccgcgaacgattgttggaaaagcgtctgtctgaagctgtggtgcactgttgtgccaagtgcaaaatgtccttcgtgaagcatgacggttgtaacaaagtcacttgcccttgtggcgccactcattgttacatttgtcgtcaaaataatattacatacgcccacttctgcgcttgtttgcaagaaaaagctccgaaacatccgttcaaatgtgcgaagtgtggcaaaagctgtcttttgtggcaaaacagcgtaacggtggagaaacaacagatggacaacattcggaaggagatggtggaggaggaaaaacgggagaaggcgaagcaaaaacgtcccaccaccggcaacactccgaatgcgaacaaaaagaaatt

SEQ ID NO: 87296 - DNA, 344 bp, Heterodera glycines
agtttgagcaagattgtgaaagaatggctgcgcacaaaacatttatcatcaaacgaaagttggccaagggctgccaaacaaaatcgtccgcttccccactgggctcgaatgaagacgggcaatcgcattcgctacaacgcaaagcgtcgtcactggcgcagaaccaaactgaagttgtgagcgatggacgccgagaaaggaaaagcgaaaacatcggaagacggcggacggacgatgattttcgacttttttgtttgttcatggagttaattttcatacatttttgtgtggactattgttggtaaaattgttgaatttgcaaaaaaaaaaaaaaaaaaaaaaaa

SEQ ID NO: 87297 - DNA, 624 bp, Heterodera glycines
attttttttgttgccgaaatgagcacggaacgctattccttctctctaccaccttcagtccctcggggaagttgatgcaaattgagtatgcgttgaatgccgtcaagggcagtgcgccatctgttggcacccgagcaaaagattgcgttgtgttcgccaccgaaaacaaacactccgtcctcacacagcccgtcagcaaaatctccaagttgtccgaccatattgcatgcgtgtacagtgggatgggcccggatgcacaacttctcgtgaagaaagcgcggaaaattgcgatggattaccaagtgctgtacggctatgaaattcccgtgcctcaactcgtttcccgggtggctgcggtcatgcaggaatacacacagtcgggtggtgttcgtccgtttggcgtttcattgctcattggcggatgggacagtgaaaagggggcgcttctttttcaagccgatccggcgggttcctattttgggtggaaaagcacggcgatcggcaaaaacgaccaattggccaagaaattgttggagaagcggtacaatgaagacattgagaaggtggacgcgatacacatggctctgcttgcaatgcgcgagacttacgacgttgccatgactg

SEQ ID NO: 87298 - DNA, 673 bp, Heterodera glycines
tttcttttgccctttgtgacacacaaataaattgaaaaaattggtgagacctgtgctgattgaacccaaaatgaaccgccgacgttggatttgtggtgacgtttggatggacattctgccatcttttgaccatgctcaacttggcctcaaaatggcattgctttccgaccgtttcgatgttttggtggacaaacatttcgatggcaaaacgacgggattcacaatttggagacgtatcagaattcgcaaggacaaaggaccaaaagcaaaagtgtctgtgcggatcgatggcaaatttgtggattttccatttcctgacaatccgctgcccaacaaaattcgctttaagaaccttcagattcgctacattaactattccgtgatcaaatttctccgttccaacaagccaatttgggacagaaatggcaccaaattggaagtgtttgtgcctttatatatgaccgacgtcaagctcatttgggatgtttttacccgcgaaatttggcctatttttgcgaaaagcattcgtcatttgagctttcataatgccgatgctttggacaatttgcgtcgtcgcacttcaccaacgattctcaccgattccattcaattgaattcaatctgttcctatggtctgttccccgatggaattgctgacgatggaccaaatgca

SEQ ID NO: 87299 - DNA, 517 bp, Heterodera glycines
ggacggaagtgcgacgagtgatacgcgacagcgaatgcgccgattcggaaagacatatttgtgctcatattctcgactgtgcatagatgccaagttgcgttgcaacggcgaagacaattgtggcgaaaacgacgacagtgacgaggcgcattgctcccgaattgaggccctcgcctctcccaccacaattgtcgtcgcttacatcgtttcgggcatcattttcttcttcattttgtctctgttctgttttctgttcaagtcaaagctcgaaaagaaaaataacgcaaaaggggaagagaaacgaagtcggagagagagggaaaagcggaagagagcgcagagaaagcggagggaggggcgaaagagtgggcggaaggcggagggcgaagcgcagagacagacagcgcgacaacccagcagacagccgaggccacgcagaacggtggcggacggacacaaattgtccggcatttacggaggcgtgggcggcactcagtcggtgttcggcagaagaggg

SEQ ID NO: 87300 - DNA, 523 bp, Heterodera glycines
  unsure (1)..(523): unsure at all n locations
ccagtttgagaaattcctctaaacatggcattattgtccattttttgtctgttgttggcactttgccccgttttgtccattaattccaccggccatttccttcacatcaccgacgtacacattgacccgaattatgacctcagcggagacccccaaaaatggtgccatgggagcggcgacagcagaaacaaatcgccaaagttgggagtgttcggcgaccacaactgcgactcgccaatggcattgttagaatttatgttgaaagaagcaaaggccaaagtaccaaatccaaacttgatcatttggacaggcgactcactgccacacgacaaatacgacaaaaaggtgttatttgacatattgcaaaaggtgaccaatgcgataagtgcccaattccccgacgccgttcttctgcccgtgctgggcaaccacgactcggcacctggcaattcgttcactgaccatcccgcanaacagcaaatttacgagaaaatgttcataatatggaagcaatggattggcc

SEQ ID NO: 87301 - DNA, 577 bp, Heterodera glycines
gtggcgttttgtgctaaacgaacagaagaaattcccggatgcaaccggcgacctgaccactcttctgaccagtctgttgaccgctgtcaaagcgatctcttcggctgtccgcaaggcgggattggcacaattgtacggagttgcgggaaatgtaaatgtgcaaggggaagacgtgaagaaattggatgtgctgagcaacgaactgatgattaacatgttgaagtcgtcatacaccgtttccactttggtttctgaagagaacgaacaggtcattgaggtggaagtgagcggcacccaaggcaaatacatcgccacgttcgacccgctggacgggtcatcgaacatcgactgtttggtgtccatcggaaccatcttcggcatcttcagaaaggcgagcaacacttccaccaaggaggaggacactctgcagacaggacggaaaatggtagctgcggggtacgcattgtacgggtcggccactatggtggtgctgtcgaccccgggccgtgtcgatgggttcactttggacccgagcattggcgaatttattctcacaaatccggcgatgcgagtgccg

SEQ ID NO: 87302 - DNA, 398 bp, Heterodera glycines
agccggcgtccgggctgagctggaacgcgactataccttttaaggagggcatcaaaccgatgtgggaggacaaaggcaatttggacggtggtcgttggcttgtgctggtggacaaacagaagcgccagaccaagttggacatgtactggcaggagatgatgatgtgcatgattggggaacagtttgagaaatggagtgaccacatttgcggtgcggtggtcaacattcgtcaaaagggtgacaaagtttcgttgtggacgcgcgacgcgaaggatgacagcgccaacatgcaaattgggcacattctgaatgccaaactgaacattccggacaccgaaaatttgcgctacgaagtgcacgcggagtactcggcacgcacgggcagtgcggtgaaatcg

SEQ ID NO: 87303 - DNA, 617 bp, Heterodera glycines
atttccctatttgtaccagtacatttattgtgcctaattttatttgtgacgtcggcatttgtacatattacgacagttcgtcgtcgactgctgcatattattatttgttgtcttcatcacacactcgtcaagctgctggttgagcgcaatgtccaagagacggcttcgacaggaactcaaggacatggagaagaacccattgcctgagggatgcactgcacggccacttgatcaacggaccatgaccccctggacggttaccatccgaggccgggccggcacaccgtacgaaaacggcaacttccaactgagcatggcatttccgagggactacccgttcaaagcgccgcaagtcacgttcaccacgcgcatcttccacccgaacatcgacacacggggcaaagtgtgtctggacattctgcaaacgcactgggcaccgacgctgaccatcgaaaaagttgtgatctccatcatcgttctgctgaatgacccgaacccggacaactcgcctatcaatgcgcaagctgccagtttgtaccggactgaccgtgcggagttcaacagacgcgcccgtgagatgacgctcgcctatgcatggaggagatgatcagcacgtc

SEQ ID NO: 87304 - DNA, 576 bp, Heterodera glycines
acaagaaaatctttcgtccatcgattgacagatcagctgggaaggaggacattgtgataatttcgccatttttttaccgattggaaataattaaatgtttgaacaggattattgcgatgtgatcaatcacttccccgcccccttctgtttgctcgctttctttcttcgggtttcctcttattcgagtttgtaagtgatctgctcgaattgttcccacggtttctcccaaatcgttaccaaaaaagtctgaaaaattagctaatttacagtaatgatttgcacagtgtcacctttcgcgctgtctgatcatcctccgttgcacagtttgcgtggtcagccaagtttgactgcttcgaggggattaatcatccttttttgattattccattaaataatcctttcccattcccttaatgggccggccgttcattctttttgagaaaaattttaggttttaaatataaaaaataaaaatatttattattggaagggaactgctgaacttgggttgctgaatttgccctttcacttacattcttcgaacagttcgaccttccgaccttaatgcgcaattgg

SEQ ID NO: 87305 - DNA, 597 bp, Heterodera glycines
cactgaattttggcgatggcagtggcttttgcgctttgaaaacgctgattctgcaggacaatccgatcagtcggtgggaatcgctggacggattggcccgtctccccgctttggccaaactcattctccgaggcgctccgctgcccggcgcccgcggcgcggacagtcgcgagatgatcatcgccaaactgccccaaattactgatttggaccgttgcgatgtgtcgccggtggcacgacgttccgccgaattgctttttttgagccgattcggtgccgaccccgtcccggccgaacaccgcgcggcgatcgcacggctggcgaccatttactccatttcaaatgatggcgacccctccagcgccgtttccgtccctcgccctgcccagcccttctccaccattcactccaaaaaggtccgacttgagcacgcgggtcgcagcatggagcgcagtctgtcccttgcgctgcccatccacaaagtcgtcggtttgggcgcccgactgttcggttttgctcccgacacattaacaggggtcgaacttcgacgagcggaccccgcgtatccgtccgaattgctttgtcgcaccagggaca

SEQ ID NO: 87306 - DNA, 360 bp, Heterodera glycines
attctctctctctctctccctcttttaatgtcttttccaattacaacaggtgagtgtttgtgtttgtttgttgttctctgacctgactgtgactgacataatttattttttcttttctctccctctatttttcaatttttgctctttttctctgtctctgtactattttcataatttacgtgcgctctctccccccttactcttccttttgcatttacacaaaattcaagttgtgatcactttttatgtgttctctatcacacaagccttctcctcaatatagaagatttttacatcaagctaagaaaagccatttttcaaaatttgaggtcaaattaaaaaaaaaaaaaaaaaaaaaaa

SEQ ID NO: 87307 - DNA, 529 bp, Heterodera glycines
  unsure (1)..(529): unsure at all n locations
gattctttagaatagaatttttagttttgaaaatgtccaaggagctgaaaattacaagagaagacgagcttcttctccaggacttttcatccgctgtttcgaaaaagggcactttgattttctatgggatttccgcatttgtcggcctaacacctgtttatctcttttatggagcacatcaaatggaaattgccgattcgtggttcatttggcttgctgctgcaattggcgtggcttaccttttagcccagtcttacaagaacatgaagcatgtgttgaagcatcaaatcgtaattaaacgtggtgacgccattgcccgtgagatgaaccgaattctgtcggatgacaaaaagatgtccaagaaggaaaaggacgaacgcattttgtggaaaaagaacgaagtgggcgactacgaggcgactctntttgccattttctacaacaatttgctctttttcgtgctgctcgtctntctctcattcttcattctctactccatttcgcccatcttcaactgtcttgtctcgat

SEQ ID NO: 87308 - DNA, 483 bp, Heterodera glycines
attccttctctcattcttctccctatattttccggtcatttgttgctgcaaatgtcttcagaaattctttggtctaccgtgactcttctgttggtcgattgtgccaccattcttttttggttctttttggacaatgccaaaaaacgacgacgccctcacaaaaaagaaatctttatctgcggcgattgttggcttttggtgttcgattttcttgcgccttctcaacttggccttggaattgcactgattagccgccgctttgacttttacgtggacgaacacttcaagacacgcaaatggaaattgaacaaacaatttcttattcaatgggacattcaagaaaatgggacgaagaaaatgcaaattgtcaattccgatggaaatccattgccaatcccgcaaaatccgttgccgaacaaagtcatcggattcagacacattcagatcatttacatcgatcaaaatgtcatcacttttctccgc

SEQ ID NO: 87309 - DNA, 435 bp, Heterodera glycines
gagaattgaattttccgacttaaaaaattggagggcgaagcgacggcgaacaatcggaaggcgaaactgattttcttcttcgagtggtccatcgacgtcaatttcattgcaactgtttctggttccgaaactgagtacaaaggaagtgtggaaattctgaatttgagcgatgagaacgaggcgcacgaaattgagatttccgtgcacattgaaacggcgggcccacatgaaaacgaaattcggcacattctctccaccgatgggctctcattcgtccgttccaaagtgggcacttacgtgcgcgagttgaaggaggagttcagcaaagggatcattttgccggtggacagcaaaggcgccattcgttcgcaggcggtgacaacgcaagggaaaacggtggtggacaagaggcgctttcagaatgatatcattcag

SEQ ID NO: 87310 - DNA, 485 bp, Heterodera glycines
atttgttcctcggggattacgttgaccgtggcaagcaagcctggagaccatttgtttgctcctcgcttacaaaatcaaataccctgagaatttctttcttctccgtggcaatcatgaatgtgcttcaatcaaccgaatttatgtgcttctacgacgaatgcaaacggaggttttctatcaagttatggaagacattcaccgattgtttcaactgtctaccaattgctgctttaatcggcgagaaaatcttctgttgtcatggaggattgtctcccgatttacaaaatatggaacaaatccgcagaattatgcgaccgacggacgtcccggacaccggacttttgtgtgatcttctctggtctgacccggacaaatatgtgcaaggatggggcgaaaatgaccgtggcgtttcattcacttttggcccggacgtggtagcaaagttcttgaaccgacacgacttggacttgatctgccgtgcacat

SEQ ID NO: 87311 - DNA, 562 bp, Heterodera glycines
  unsure (1)..(562): unsure at all n locations
anctggctgtgtaatgacgtttggatggacattctgccgttttttgaccgtcctcagctcggcctcaaattggcaatgctttcgccccgtttcgatgctcttgtggacatccatttcgatggcaaaacggaattgacgctttggagaccaatcgcaattcgcaacagtgccgcagcagtgccagaattacatgtgtttttcgacggtgccaacaattccgtgccatttccattgcccgacgtccattcgccgccgatgccaaacaacattcgttttaaggaccttcgaattaattgcattgaccattccgtgatcgcatttcttcgtgccaatcaactcattttccagaagggcaccaatttgcgtctgtcggttccttttggtccattcaacattgatgatgtgcagccaattttggatgattttgcgcgtcaaatttggcccatttttgcgtcaaccattcgccatttttggtttcccgattgccgtattttggacacattgcttcgtctcgtttcgccgacaattctcacggatgatcagatcaacatccattcaatca

SEQ ID NO: 87312 - DNA, 433 bp, Heterodera glycines
  unsure (1)..(433): unsure at all n locations
attaagcttttgcttcttttaaatttactttgacttcaataaagaagaaaaatggcttcatctggctttagcgtctatgttggncaacattccgtacaacgcaactgaagcggacattggcaatttgtttagtcagtgcggagtggtcaccaatgttcgcattgtgtacgaccgcgagaccaatcgcccaaagggctttggcttctgtgaattccaggaccaacaaggagctcagaatgcggttacaaatctgaacggagccgagctcaatgggcgtgcctgcgtgtcaattggaccaacaaataagaaggttgtgcttgaactggacggatgatgatggatggattgtcatttttgaggatcgttttgacaattttcatttttctttgttgattggttttttgaaataaaggaatggttcgttcaaaaaaac

SEQ ID NO: 87313 - DNA, 436 bp, Heterodera glycines
gcggaggaagagagggcgacggaaaggaaggaggcgagggaggacactctaaccgacaaaaacgattttcttaatcaatcttccgagccggaggacagtgaagacagcaatttggttgaacctgccggacaagtcgttaaggaaaggcaaaaagaaacgcagcaccaaccgacaagcgaaagcttatttgcgaacggactgaacatcacgcaaagaagggacagcggaacggacgaattgcaaatggaggaggaagaacagagagagaaggagcaaaaagggagggaagaggaggaggaagagactgacgatgacgaaataattgtgattgagcagagtaagagcacaggggaagagaagacgaaaagcggaaaaggaagaaaagcaaatcgatgagaaggaagaagagcaaaaaaaaaaaaaaaaaaaaaaaaaa

SEQ ID NO: 87314 - DNA, 566 bp, Heterodera glycines
gtagactgatccgctggcggtgctcgacggtggcggactgttgccttgggcggagtgtcggaggaggacggctcacacaaaggcaccggaattgcgatgatgggcgaacttttttgcggtcttttgggaggcgcaagttttggcaagaaacggtgcgatcgtggcgagaagtgcaaaaggcagccaacctgggccaatgcttcgtggccattgaccccgaatgctttgctccaacatttgtggacaatttgcagttgttcctggaccaaacgcgtgggcttaatccgcgcgacccctccaaatcggtgttagtgcccggtgaccccgaaagaatgaacatcgaacggagcgcaaaggctggcggagttatttactcagaacgacaaattcgggatttggagaaattggcaaaaaagcaaaacgttggcatgttcccttacaaggcaaatttgtagcagaacaaaaaaactgttttctttttgtttcaaagcgatgactttcaattgaattgcattcattgccattattgaacaattaattcgttcccatttgctgctgctgataaa

SEQ ID NO: 87315 - DNA, 529 bp, Heterodera glycines
  unsure (1)..(529): unsure at all n locations
atattcccgcagaagaagtgccgggccttctcttactgcttttcttagtctccctggcgttgtcgacaaattttcggagttcacaaagatgtacaaccattggcgtggactttggaaaatgttttacagaaccacttttgctcaatcacaaatgctttttgctattgaggagaaagcgtctgattctgaccgcttccgtcgtgttctgccaaaagtgctttactttttgagtcaggaagttaaggcaatggacgatgctttaattgttgattggtactccaatttggaagaaaagtcgcaactgaagaaagaagagaaactggctgaattggtcacgtggtttcaaaatgcggaggaatccagtgaaacggacgacgaaggagaggattaaaaattgggaatggaaatggaaacacgcgaagggcaagacaaaagggaccatctttgttgttatttggtcaaaattgtttactttaatgtgatgtaataaaacttttaaatctgtnnaaaaaacaaaaaaaaaaaaaaa

SEQ ID NO: 87316 - DNA, 537 bp, Heterodera glycines
aatagaaaaaatgggcgagtgctgccgccaaatgaatttgatttttgaaatattcgcctttggaatggacgatttctcatcggaaaaaaatgtttctcttcttcgtcttttcttattctttttctcgaccgtagtattatttggaagcgcacaccctatggtaaacaaattatgcgaagacctagataaacctgaaggttggcaattattgaaaaagtataacaatcgaaaagtgccggatgagtataatgtggaattccccaaatggaaagacagctacaaaagcattaaaaagtttataaaatattgcaactatcttcagaaaaacgaaaaacccgtccaagaaaacgatcaatataaacttttggcactaaaaccaaagtttctggatgccaataaaaatgagttaaaaatcagtgaagcaatgtctgaaattgttgaagcatacaaaataatgctgagcaaattagtaaagatgaaaatcaatatcactgaaaaactagaagaaaagatgctgaaaaagcttcatttgtatgc

SEQ ID NO: 87317 - DNA, 434 bp, Heterodera glycines
cagcgtctcatcttcgctggaaagcagctggaggacggtcgaaccctcgcggactacaacatccagaaggagtctactctccatcttgtcctgcgtcttcgtggaggaatgcagatctttgtgaagactctcaccggcaggacgatcaccctcgaagttgaggcgagcgacaccatcgagaatgtgaaggcgaagatccaggacaaggagggcatcccaccggaccaacagcgtctcatcttcgctggaaagcagctggaggacggtcgaaccctcgcggactacaacatccagaaggagtctactctccatcttgtcctgcgtcttcgtggaggaatgcagatctttgtgaagactctcaccggcaagacgatcaccctcgaagttgaggcgagcgacaccatcgagaatgtgaaggcgaagatccaggacaa

SEQ ID NO: 87318 - DNA, 508 bp, Heterodera glycines
cagcggacggaactttagcactcaggcggaatggctactcgaaacggacggaaccgcacttctgagagtgctaagcgagccggacgtcgatttcattcgtacacacagcaatgacatttgtgaaatcttcgaggtgttgggcattgaagctgtccgcaaggcgattgagcgtgagatgaaccaagtgatttcctttgatggatcatacgtcaattaccgtcacttggctttgctttgtgaagtgatgacggcgagagggtatctgatggcaattaccagacatgggatcaacagacaggaggttggagctttaatgcgatgctcatttgaagaaacggttgacattttaatggaagcggcagttcacgctgaaactgacccggttaaaggagtttctgaaaacattatgcttggacagatggctaaggcaggtactgggtgttttgacctcgtgctagactccgacaaatgcaaattggcaatggatattcccgattttattatggcg

SEQ ID NO: 87319 - DNA, 562 bp, Heterodera glycines
tcttggagtcttacgttccccgccacagtcgaaattaccggggcatccaaccgaccattgacagtgtgcacaaccaccagcaggtcgaccccttcctcccgctatcgactattccccccgcctcgacggtggaaaatgccgacttcgaacggcagcccattcccctcggaatgcccattcagctgttgccgacctctcagaaaacgcctccgtcctctcagcaggttcttctgatgagtgctcagccaacgccgaatcagcctttggtcctccccgtctcttccgtccccactttccaattcgtccaacaacacatgttcccgtccatgtctcagcagcagcctctcatgcccattcgtcttcagccttcgtccatgcttcaccatcagattaaccagcaagcggagcattcgcagcaggacgggacagtcagcgactctcccgacagcggacatgttgttactccatcctcttatccgctccaacaaattggaaatgggatcgactgcattgacttgacacaccaccgacactcggaaagaatgggctcagatgccatgga

SEQ ID NO: 87320 - DNA, 432 bp, Heterodera glycines
atgttcgagacgtctaacaacagccggcctgtacgtggccattcaggccgtgctgtcgctgtacgcctctggccgtaccaccggtatcgtgttggactccggcgacggtgtcacccacaccgtgccaatctacgagggttacgcgctgccccatgctattctccgcttggacttggccggccgtgacctcactgactacctgatgaagatcctcactgagcgtggttactccttcacgaccaccgccgagcgtgagattgtccgtgacatcaaggagaagctgtgctacgtggccctcgacttcgagcaggaaatggccaccgccgcttcgtcctcatcgctggagaagagctatgagctgcccgacggccaagtgatcactgtcggaaacgagcgcttccgttgccctgaggcgttgttccagccatcttt

SEQ ID NO: 87321 - DNA, 558 bp, Heterodera glycines
acatgatgaattcgatgttgggcgatgcgtgggacatgctgaacggcttcggaatgatgggccccccgttccccaaccatcctatgctcaccgatggtctgaatcgtcaaaaccaagctcttcgtcgtcagcagcctccacagcatcactttggtcctgatacgatgatgagtccgtttggaggatttggccttttcggcggaatgatgcagcaaatgcaaaatatgcataaccatgcaattagtgatccgaattctgttgttttctccgaatcaacaatggtttcttacgatggaaatggacaaccgaaggtcgtccaacattcgacccgtaaagccggcgatgttaaggagaccaggaatgctctccgtgacggcgtacgtgaggagatgacagttggccattcgatcggcgaccgttcgcatgtgatagaaaagaagcgggacaaagacgggaaggttcgccaacaacagaagtttttcaacctcgccgaagatgaagccgaagatttcaatcgacaattccaaacacgggccagggaaaatatgggaggccttt

SEQ ID NO: 87322 - DNA, 339 bp, Heterodera glycines
ccgcttttctctttctttcttttctctgtatttcccacttttcccttccttttttcttgacatggtccaaaatgttgatgattgttttcgtaacaaaacttcaaattgtacaaatgcgacatttctcatttatagtaaattattttgttttggttttggaccagttcgggcaaattgtctatgttttgatgatgcgagatgccattttggttgatgatgacggtgatccatttttaggattgaatttgcctctatttgtattagtattttttataatacattatttttcgttttgctgaaataaaaatgtaaatattgaaaaaaaaaaaaaaaaaaaaa

SEQ ID NO: 87323 - DNA, 233 bp, Heterodera glycines
gtgatcggagtggacgtgcagaacaggaggaaacgggccccaaagaggcggcgggaaaagaactgacgagtgccacgcacagtcagctgattggcatggcatcaaaggcggtgactttggacatggacaaatggacggaaaaagcacgcgaggggaggaaattgaaaagggaggcatagaggaggaggacgactcggacgtgtacacactgtcatttggggacaaaacgatgt

SEQ ID NO: 87324 - DNA, 515 bp, Heterodera glycines
ataatatctgtaattgagtaataattgcctcattaattagtctttatgatgatgggccatccccatgcccatggtccctctgtgcctctctcctccgctctctctgtcgctgcctctgatcagcaagatcactgctgtgccgtgtgcggctgcgtcggtgccaccatttattgttccgttttttcgtgccgtccctgcgcttctttctttcgccgttccatcaaagaccaacgcgagtacaaatgccgcgcgaatggcgactgtccaattgacaaaggtgagagagagaaagccaagagtatgaatggcaagtggttattttgataacactttgttcatctttggattaggtcgatcattttcaatacttatacttttgtgctgttttctttctgtactcagatggcatgcgcaattgttgtcgtgcctgccgccttcggcgctgttttgaggccggcatgcgactcgatttggccccaaatgcccacggcaacgattggccttacgctgagctt

SEQ ID NO: 87325 - DNA, 444 bp, Heterodera glycines
attttttttgtcgccgaaatgagccggaacgctattccttctctctaccaccttcagtccctcggggaagttgatgcaaattgagtatgcgttgaatgccgtcaagggcagtgcgccatctgttggcacccgagcaaaagattgcgttgtgttcgccaccgaaaacaaacactccgtcctacacagcccgtcagcaaaatctccaagttgtccgaccatattgcatgcgtgtacagtgggatgggcccggatgcacaacttctcgtgaagaaagcgcggaaaattgcgatggattaccaagtgctgtacggctatgaaattcccgtgcctcaactcgtttcccgggtggctgcggtcatgcaggaatacacacagtcgggtggtgttcgtacgtttggcgtttcattgctcattggcggatgggacagtgaaaagggggcgctt

SEQ ID NO: 87326 - DNA, 457 bp, Heterodera glycines
tttttgtcgcattttccgctgccatttacgtgcgaaggttacccggtgaggaagtgaagcggtttgacatccaaattcaggggtatactccgacgctggacgacgattatgtggcggtggcagtcaaagccgagcccggatacattggtgaaattcaaaataatgggaaatggacaatcgtttaattgtgtacaatatttatagcaaaaccaaccgtatatccgtggaatatttcattttttgttcctttttcagttgaattcgaaccgttcgctcatgccgaccgagtccatcacatgctcctttacggctgttctacgcccgcttacgccgacagaaatttttggcaaggaatggccacgtgtgggggcaactcacacattctctacgcatgggcacgaaatgctccgccgctggaattgccaaaggacgtggcatttgccgtcggaaatgaggg

SEQ ID NO: 87327 - DNA, 490 bp, Heterodera glycines
cactgataaaacttgcggggtcggcagaatcaaccaaagagcgtcggaagggggttatggctatttgaaggaatggctatggtggatgggtgtgataacaatgggagttggcgaggcttgcaatttcgccgcttacgccttcgcccccgcgagtttagtcactccgatgggcgctttgagtgttctcgtcaccgccgttctctcttccaaacttttgaaggagcggctcaatttgctcggcaaaatcggatgtgccatttgtctgctcggctcaacttccattgtcattcactcgcccaaagaggaggaagtgtccacgatggccgaattggcagagaaaatgaaggcttctgtgttcattctttacgttgtgctcgttttgctgttcacttttgtgctcgtcgtttacgttgcgccccgttatggccacaccaacattctggtgtacatcgccgtctgttctttgatcggttctctgtcagtgatttcg

SEQ ID NO: 87328 - DNA, 172 bp, Heterodera glycines
gattcgggaagacattgtacgacaaattgctggagggatggatggacaaattgcaattcatcgacgacgacaaccaaaactggctgctgctacgagccgagaaaccggtccatcctcacgcgtatctgaccgaagcgggcgcttagggagagaaaagagcgcagaggacggg

SEQ ID NO: 87329 - DNA, 552 bp, Heterodera glycines
ctttctccctacattttccctggtacttttgttgctgcaaatgccttccgaaatgcgctttatctctgccgattgctggcttttggtgttcgatttccttgcgccttctcaacttggcctcggaattgcactgatcagccgtcgatttgacttctacgttgatgaacacttcaagacacgcaaatggatgttgaacaaacaattgctaattacatgggacattgaagaaaatggcacgaagaaaatgcaaattatcgatgccgacagaaaagaaacattgccaatcccgcaaaagccgttgccgaacaaagtgatcggattcagcggacgcattcagatcatttacatcgatcaaaatgtgctcacttttctcggccattttcaccgttttttcgccacttctgcaatggatttggacattgtcattgaaaatggtcgcattttggaatttgttttgctcaacatttggccaatgttccgtgattcaattcgtcgcttgtttttgaacgccatcgcttttcgctgtttgcgtcaattggcgccgtcaatgct

SEQ ID NO: 87330 - DNA, 570 bp, Heterodera glycines
caaaatgtcttttactgtcgtgcacattcttttttgcttctttttgcctgctctttcgatttataagccaaattgggactcaattgactcgcgccctttgcccaattggtacgacgaagccaaatttggtattttttcgcattggggagtttattcggtgccggcatttgggtcggaatggttttggtggtattggaagggacaacgtgacgcaaaattcgaaagatttgctcaaaaacactacccaaatggcacgacctatgcagactttgccgaatccttcaccgccgttgacttcgatgcaaataatttcgccgaaatcgtaaagtcctcgggcgcacgatattttgttttgacttcaaagcatcacgaagggtttacgctttggccaagcgcgacttcgtggaattggaatgccgtcgatatcggcccccatcgggaccttgtgaaggcactctccgattcgattcgtgcccaaaatattcgtttcggactttatttttcacttttcgattggttccatcctctctttctgaacgatgttaaaaagcacagaacggacttcgttca

SEQ ID NO: 87331 - DNA, 606 bp, Heterodera glycines
  unsure (1)..(606): unsure at all n locations
agcttatctactgatattttgctttantctctctctctatatcttcaaccaacaacaacaactcaatgtctgacaaccgtggtgcctccgttgcgtcgaccggtacgaccaacagtcaggagtctcaagtggcgtctccagtgaaagccggaaaagctactacgaagacgacggctagcggaaagggcggcaaagcgaaggcggacggaaaagtgaaggcgggcggaaaaggggcgaagaaggcgggcggaaagggtggaaaagtgaagattgctgcgagcggaacgtacagcacgcgctctgctcgtgctggcgttgcatttcccgtcggacgtatccatcgtttgctgcgccacggtcgccatgctcagcgcattggggccggagcgcctgtctatatggcatcggtgttggagtatctggcggccgaagtgctcgagctggccggcaacgcggcgagggagaacaaaaagttgcgaatcaccccgcgccatttgcaattggctgtgcgcaacgacgaggagttgaacaagcttctctcggaggtcaccatttctcgtggcggtgtgttgcccaacattcacacggaacttttgtcgaagatgc

SEQ ID NO: 87332 - DNA, 570 bp, Heterodera glycines
gtgtcgcttcgcgaatgaaaggcatcgatttcgaaactgggcaacaaatcctttgcccttctaatttgctttggttggctccggctctgatgaacaactcggtggctatgctcggcaccaaactgttttcaaaagcaaaggattggacggagttgcggaggaattgtccatggaaatgcatcggatcggagcacgcaattttggcagggacgaccgaattggcacagtgaatggcaaaagccttctggcaccgttccttgaggagccgttggtctgctggctgaacactttgccgaccgcgttgaagaccggcttcggactgccgaccaatgacggcaccgccaacaaatttttgttgcgcaacgccctccgctctttgggcgtgccggaatgttttgtgcagcggcctaagcgtgcgatgcaatttggcacacggatggtcaaaatggagaacgcggagaatggcgacccaaagttaagagggcccaaatttgcgagaaactggtgctatgatttgctgtgctaatttatatttgttattgaaataatcaattttatttcaaacgacaa

SEQ ID NO: 87333 - DNA, 197 bp, Heterodera glycines
agcggcgtcgactttgcctcactttcgtgtctgtcgaccattactcaatcgacctctgacgaattgggcaaaaagtcgaaaggctctcccacaattgaattgctccgtgccgagtcggactgtcttcctcccgaatggcttttgcccaactcttccgacatcattttgaagccgctgattccaatggccgagcacag

SEQ ID NO: 87334 - DNA, 566 bp, Heterodera glycines
  unsure (1)..(566): unsure at all n locations
cattgaaatgaacgaactttcccgctcgcttggtacccggctgccgaatttttggaatttgaacgaataacaaagcgtattcgttcaacgtcccagccttttctgtggacacttcgacaacggatgggnccgaagtacacacaaattatgaacgcactgtcggaacaattgcaacagcacgtggccaaggcgaatttgctgatttctctcaacgagaaaatcccgcaattcgatgttgaagttgaggaaatgatgcgcattgcaattggccgtacgcaattgctgctgaacaaacggatgaagcaatttcgggaacatttgagccgtcatttgaaaccaattcctggccaaaaagtgaccaaattgaacgatttgcacgctctttgggtgcctatcgacatgcaattggatgacatccgatccattttcaactccatcgagcagttccgtcttcgctgttgggctgtcgctgaaccaaaggccgccgcgactgccgcttctggcaattaattaatcctcagtctttcatcatcatcgcatatttttgtttttaaagtgccttcaat

SEQ ID NO: 87335 - DNA, 517 bp, Heterodera glycines
cattttctgagccagttatcttctccatatcctcctattctctcccaaccaaacatgtaagtgcgcaacacacaaagtgtccaaccaattatggtacaaatcagcagaaaatgacgaactgatcaatttgatggtatcggacaaaattgaagagggcggaaacggcgagttctttgtcggcttcaccctctcagagcatcgcttggaaaatctgccgaggaataaatgtgtggcagtcaaaaaaatgaaatgtgccaatcaggaccaattttgtaaccccaaatatcgcaatgccaaatattgcaatgccaaatattgcaatggcaaacattgcgatgctaattactgcaataccacccgagtgttgaaatggcttcaaaggcacattgacggcacaaaaaggggacacatcgccaaactatttgatacaggtttcgaagaagcaacgaattcctttgtcattgtgtccgaattgggcgacgaaacattgaaacatcgtttatatgcagaaaatcgg

SEQ ID NO: 87336 - DNA, 522 bp, Heterodera glycines
attggtgaaaatacgcgcaatcgttgggttacgttgtgacatcacttggacaaagtgttcgcctggccacgaaaatgaacagacgttggatttgcaatgacattttgatggatttgttcccattctttaaccgtcctcaactcggcctcaaattggcacttctctcacctcgtttcaatttgctggtggacgcgcatttcgatggcaaaagcgaattgacaatttggagacaaatcagaattcacaaaaatggacccaaaacacaactatccgtggatacggctaacaatgccgattcggtgccatttccgttgcctgaccgttcgctgcccaacaaaattcgctttcatttcctccgcattggatgtatcgatcattccgtcatcactttcctccgttccaatcagcaaatttttgacggaagaggcaccaatttgcgtctgtggctccgtccggacgccaatgattaccagccaatttgggatgctttcgtccgtgaaatttggccgattttcgtgccaa

SEQ ID NO: 87337 - DNA, 441 bp, Heterodera glycines
aaatattaaaagatccgaaaaaatgccaaacattttcaaaatccttctgattgtgcttttggccgtcgtctcattccgtctctcggcttctactggtgacaaaaaaactgctaatgatgggagtggaaacaactcatcagctgggattggtacgaagatcaaaagaattgtcaccgctggactgctcttcacttccctggcgacgggtggggcggaagcgattgggcgaagcaatgctcagggaggaaatgccgccggattggtgccatcgcatgtgaccaatcgctcaatggctccaccacctcctcctgtgcaatttgaaatgggggcaaatcgattagaaaaaatgagggcacacctacgcgaacttgctgagaaaatgccggtcaatgaatcgaagcgtctgtcaccgagtggacccgacccacatcatcattaggg

SEQ ID NO: 87338 - DNA, 539 bp, Heterodera glycines
tttaaaatccttctgattgtgcttttggccgtcgtctcattccgtctctcggcttctactggtgacaaaaaaactgctaatgatgggagtggaaacaactcatcagctgggattggtacgaagatcaaaagaattgtcaccgctggactgctcttcacttccctggcgacgggtggggcggaagcgattgggcgaagcaatgctcagggaggaaatgccgccggattggtgccatcgcatgtgaccaatcgctcaatggctccaccacctcctcctgtgcaatttgaaatgggggcaaatcgattagaaaaaatgagggcacacctacgcgaacttgctgagaaaatgccggtcaatgaatcgaagcgtctgtcaccgagtggacccgacccacatcatcattagggccatggatggatctaacggaggaagaaagaatggatgcttagttttcagattttattctatcctcttttatttattagtttttcaaaacaaatttcttccacaactttttaaactatttgttgttttgaatc

SEQ ID NO: 87339 - DNA, 531 bp, Heterodera glycines
  unsure (1)..(531): unsure at all n locations
ttggagtgaagcttatcggtggaaagaatgatgtgaaaattggcatgcatgaaatgccacagatcaaatttggagggaatgtgatgggctatttccaagacagagtgaatccaggtgttcgttttctcgagacgagcactttgatgaaggcatgggtcgttggttttacgcgccaagttggagagggagatgtccgtaactttattcaacaaattgtggttatgggtcgaaagaggggcatgaatttgccagacccgcaatacgagtgcatcgaattggagaacatttctgaacgtatgcagcaactctcggaccgccgaattcagtttttgctctacatcgacaaaaaattcgtcaaatcacacgcaattttgaaactcaacgagaagaagtatggtctgctgactcaacatgtcacattcgaagtggccagcaaagctcgtgctatgactctgtcgaatgtgctgaataaaatgaacatgaagctnttcggcttcaattacatgcctatgttcccgcaagcgtctaaga

SEQ ID NO: 87340 - DNA, 498 bp, Heterodera glycines
atcggcgtcggtgtgctacttatttggtaataaacgtcgcgtggaacgcattggccttgttgatcagttcatcatgggttacggagggattcgtggtgccgtttgctacggtttagtgatgtctttggaccccgaattggtcgaatgccgcaatatgttggcaactaccacaattatcgtcatccttttcacagtttttgtgcagggcggttccattgaaaagttggtcacttacttgaaggtcaagcaattcgaagcacacaaaaagaccgtttttgagatgatcgccgataatgtcagcagtcacatggtcggagggatggaaagtatcgccggactgcgcggggattattggtttcgaatgaagcttgaacgctacaacaaaaagtacataaagccgttcattatgctcaatccgaatgacaaggacatgaaaattgtccgacacaatgaggagattcaggtcaaagaagcggtcatttacttgaaaagcacggg

SEQ ID NO: 87341 - DNA, 560 bp, Heterodera glycines
gcatagagaaaaataaaaagagagagtgaagagaggaataaaggaagagagagagagaggggagagagcgataaagcaaaaaggaaaagtcagacaacgggaaagagagaaaagcaaacggagaggagagaaaagaaaaacggccattccttctgctgtcgggacgaaacgggccaaaccaagttcaaggtgccagtgcgacggtttcgttcaatgctaatcagctaattgctcactaattaccccaaataacaaaactgcccctgcatctcccaacaatggccaccaaatgccttccgctcgaacttttgttcgaaattgtgcctttcatccctgccgaaaatgccgccccgaatgcgctctcgtcctgtcggctgctgcacaaacttttgctgccacgtgtcatcaaatggaaagagataatgagtgaaaataccggcttccaacagcaaattcttgaaatggtaaaggccctccaaggcgatgtggctgagctcagttcgcgcgtcacagtcattgaaaaaaaagtcaccgtcattgacgaaaaagtcaccgtcctt

SEQ ID NO: 87342 - DNA, 345 bp, Heterodera glycines
cattctgcgaaaaggtgcaattttcttcactgggatggttgttggaacagtcgttgtttttaaggcatttaagccaacgtgtcccttcgacgaagcggcagaacgtggcaaaagggagctgttggagaaatacacggaggagtacaacgcgttgcaggaagagctgaggcaggcggaagagcagcagcggaacggagggatgtcgaagaggcggaagcgagaaaggcttagccgatgacaataataatgatcaatttgggtggaagggttgtaaatcctctgaagtaggatcacattgctaattaaacattttgaatttcaaaaaaaaaaaaaaaaaaaaaaaaa

SEQ ID NO: 87343 - DNA, 636 bp, Heterodera glycines
tccaaactgttggctccggaacctgccgatagaccggacatgcgatacgtgcttgccgttctgcaacagataggcaatgatgccgaattgcaacgcgaagttgcgcagtttttggtctttcgcaaggacgaatggcgggaaatgattcgcgagcagaccttcgcattggaagaattgaagttggatttggcccgacagatggaggatttacgaaggcgggaggccattgtccgaaagcgggagaacagccatcgtaattttctccatttggtggacgtcatgaacgtggaggacgtttgcgaatggaacgaggattgtgtttgcgaatgggtgcaaaacattgcggcaagtgccatggaagacttcagcgaggcgattgtcgatcagctcatttcgtgtattcttcagtatgaaatcaatgggtgtcgtctgttaaaaatcaccgaaaaagacttggagtgtcttggaattgaatccgttgctgtgcgacgatactttggtcttaaattggacgagctcagggctatgaatgtgcagctttgtaatttcggctgttcgtcgttggcagatgaacaaaacgactcgttttcttcgcccgttgaaaagccgattctcctccatgtcggcctttacagc

SEQ ID NO: 87344 - DNA, 586 bp, Heterodera glycines
caaataagggttacacaatccagtcaaacgtgccgggcaatttgaaactgaaatggacatcaaacacactgaacaatccgtacagtcgtccaaatttggacattgaagtgcaatatcaaaaaatgggagatggaatttatgtgcgcattggaacagaagacagatggcttcccccactgaatgagcttcgcaatccgtccaattttgaacaagtgatttcatcaaattcactgagttttgaacttggtaatgccaatgagcctttctcatttaaaattcaacgaaatgattcaaacaaacaaagcatttgggacacatcgattggtggccttgtttttggtgaccaattcatacaaattgcaacttttttgtcatccgatcgcctttatgggttaggagagaatatgcaccatgaattaaagcatgatttttccatctataaaacgtggagtgcattttcacgcgatcaaggaaatgaatattatgtaccgggctcatacaatggatacggggtacatcccttttacgttggtttggagccaagcggaaaagcccatggtgttctgattttgaattcaaatgcaca

SEQ ID NO: 87345 - DNA, 627 bp, Heterodera glycines
attttaaaatttattaatggagaaattggcaccgcaaaattattgtctagccgattcaacagcatcatctttggcaaaagctgcccaaatggaattggacttcatccaaagcgttttgttgggcccacagcgaggaaatttgacggcaattgaatgtttattggcacaaaactttagcaaacagtcatcaatgatgccaaattatggcacggaacgtaaaaatgcaaaagtaccaaaattagaaatggaaaaggctggtggtggtgatgaagccaaattggacaatggaagcgagaccgatcaaagtgatcagaagcaaaagagaaaaggggtgggacgaccgaaaaggcatccgagtgaatgcaaagtgtgcgggaggaagagcttttactgttattacagtgtccgatgttgtgaaagctgtaagcaattctttcgtcgtattgttgcaaagcgaacattgttaaactgttttggagcgaaaaattgtcaaattggaaaagatggcattcgatgccgcggctgtcgcctggacaaatgccttttggccggcatggacccgacaatgatcaatgcaatgcaacaggaaggaatggcccaatatttggacagattggaattgcgaaa

SEQ ID NO: 87346 - DNA, 630 bp, Heterodera glycines
ggatttctaaattgaaaatgaaatttctaattttatgcctcttttttgctgtcttattaaaatattcaatttcacaaaagccacaaaaagggaaaaaaagagagtgatggtgacaaagaaggcgaagttccaagtcaaacggaggacaacggcaccggtttaatgtccaatattttaaaaaagacagctgtggcactcgccctgcaaagccccttcattacgggttcagcaataagattgccatcctcctcaacaagtaaagcaccgccgatgttcaaccaacgtaccaataccaaaaataatgtactcgagaatgcggtcaaaatcccaccgttcaaagagctgcatgcaaatccattgggcaatggcatcgaattggcaaaacatgggcaaatggaaaacgaaatggcggcacactttcacgaccagcgaaaattgtccaccaaatcatcagtggcagaaggaaagtttaacccaaagatgaggacgatcgacccaaagttttatccgcaggcgccacgaggcaatgtcaaggacacttacaaaagtcaaagtggcaaagaagtgaaaaaagtgaatgtttagcattggcacttcccactgatagggcggcacttttaatctgatcgg

SEQ ID NO: 87347 - DNA, 559 bp, Heterodera glycines
  unsure (1)..(559): unsure at all n locations
attaaaagatccgaaaaaatgccaacattttaaaatccttctgattgtgcttttggccgtcgtctcattccgtctctcggcttctactggtgacaaaaaaactgctaatgatgggagtggaaacaactcatcagctgggattggtacgaagatcaaaagaattgtcaccgctggactgctcttcacttccctggcgacgggtggggcggaagcgattgggcgaagcaatgctcagggaggaaatgccgccggattggtgccatcgcatgtgaccaatcgctcaatggctccaccacctcctcctgtgcaatttgaaatgggggcaaatcgattagaaaaaatgagggcacacctacgcgaacttgctgagaaaatgccggtcaatgaatcgaagcgtctgtcaccgagtggacccgacccacatcatcattagggccatggatggatctaacggaggaagaaagaatggatgtttagttttcagattttattctatcctcttttatttattagtttttcaaaacaaatttcctccacagcaaanaaaaaaaaaaaaaaa

SEQ ID NO: 87348 - DNA, 449 bp, Heterodera glycines
aattttgcaattggcattgtggcggggcagcaacggttgcagagattgcaaaaacggtgttgaatgaggagcaccgtctttttctgtccggcatccgtcgtggccttttgacctttttgcacatccaacgccaattgttcgtcctctcaaatggcacgctttcgctgcgcttttggcactcggactatcagcgatttgagaaggaaattggacgagaaaaactgcgcactttccaatgccttttccaccaaaaccatccgaacggatgcccaattggtccggaggagtgcccatttaaacacaattgaaggaaagaaagaaattatttttttgttgttgttattttacaagttattttaatatttatttacgactgtttttaattatttgtaaaaaatgaattaatttaatgattaaacagtaagtcactctcaaaaaaaaaaaaaaaa

SEQ ID NO: 87349 - DNA, 477 bp, Heterodera glycines
  unsure (1)..(477): unsure at all n locations
acgctttggttgcccttgccattaaatggaattgcgggtcggaggtcgtaaccggccttgggcgtaaaattggcggcggctccttcggagatatctatttacgcgagaacattatgacacacgaggaagtggcactaaaattggagtgcgtcaaaaccaaacatccacagcttcacattgaggccaaactgcacaaaatgatgtccggcggagtcggcattccacaggtgcggcggtgtggttgtgagggtgaatacaatgagacggtgatggaactgcttggcccttaggtctacgatctgtaccacaattgctcgcagaaattcacactgaaaacagtgctattgctcgcacaccaaatgttggccaggatccactacagtcacagctaagatgtcatacatcaatacatatagtcatacaattgtctgatgggtctcggcaagcggggcaatcttgtctacattattgactntg

SEQ ID NO: 87350 - DNA, 458 bp, Heterodera glycines
taaattggcagcaatgcgaattaaactcgacgttagcgatgacaaaacttattgtaaaaagtcactcgttttagattgaccaactgcttgacagtttggaacgaaaatgccattcaccgcaaagtgacgaagaaaagggagcggcaaaggaaggcaaaagcgaattgacaattgctggtgccgaaaataaacaaataattttgccatataattaattaatcactctaatttgcccaattaaaagtaaaagtgaatctcatttgcccatttcagaggttcaaaaggacttcttccccttcatttacgcaaaggctgaacagttattggttgaccggcgaatggcaaattcattcacgcgaaaattatccgacaaaaagtgataaattgacgggaaataaatgaatcaatacaaataattttgcacattatttatttttgctcttttaaaatgccaaatt

SEQ ID NO: 87351 - DNA, 556 bp, Heterodera glycines
ttagagaaaaataaaaagagagagtgaagagaggaataaaggaagagagagagagaggggagagagcgataaagcaaaaaggaaaagtcagacaacgggaaagagagaaaagcaaacggagaggagagaaaagaaaaacggccattccttctgctgtcgggacgaaacgggccaaaccaagttcaaagtgccagtgcgacggtttcgttcaatgctaatcagctaattgctcactaattaccccaaataacaaaactgcccctgcatctcccaacaatggccaccaaatgccttccgctcgaacttttgttcgaaattgtgcctttcatccctgccgaaaatgccgccccgaatgcgctctcgtcctgtcggctgttgcacaaacttttgctgccacgtgtcatcaaatggaaagagataatgagtgaaaataccggcttccaacagcaaattcttgaaatggtaaaggccctccaaggcgatgtggctgagctcagttcgcgcgtcacagtcattgaaaaaaaaagtcacccgtcattgacgaaaaagtcaccgt

SEQ ID NO: 87352 - DNA, 652 bp, Heterodera glycines
gtgaatttgctgttggactgtctgatttcgacaaaaacgccggcaaagacgcgatcaatcgtggcctttccgtggaacaggccatcgagaaacgcatttatgccgccatcgaggcaactcaagaaatagccaagaacccttctgagaagttgactgcccatgcgaattccttccttgacattgcgaattcgctcagcgaaagcattttgggactgccgcgtgctgtggaggaccccgagtgggggctgaaggagcgcgtcacgtttctcgcgtcgcgtatcggtcaccgaatcagctcaaagaccaacgaacgcatcgtggaaccgctgctgcagcagatgtgtgtcctcacagagcagttgtcgaagtgcattgtcctcgtggactacgccaagcagcgccaggaatggactttcaacaaagtgagccaattgtcgacatcggtcgttgagttgcgcaacaaaatcgaaaccgaggcaacgcgaacgcgaaagaacccgggagaagtgctgctgaagatcatccgcttttactcctccaagctgaacgttcagatgagcaaactgcgcgaccgcagttcggagttgctttcttcttcgatgcagaaacaaattctgacattgactgcgtacgttcagcaattggatgacaa

SEQ ID NO: 87353 - DNA, 538 bp, Heterodera glycines
ccccagttaattacacatataattaactccttttatcgtgcattcctccgccgttctttcgtcccttccctttcccttttttctctctttttcactctctcttctgtccctttcccttccccaatcattcaattgcctgccattcttctcacattcattcattgttttttgactgatgaaggtcatcttttcgtcacacagtagaagtgggaaaaaaatttgccacccctcctttgtcggcacatgccattggctgctgcacggcaccgaaacggtgccaaagacggcggagcagcgcacctttacactccgttgtaggcacgtcgtgttggcatgcggacgacaacagcccaaactgttaggggtgcccggcgagtcggccgccgctgctgacggtcgcgtggtgtacagtctcagctcgttgaagcagcgattggaggagacagagggcggcgattcgggcgcgacagagacggcaacgacaatggcaccggcgaccgaagcgacggcgaccacaatggcacgagcgactattgcc

SEQ ID NO: 87354 - DNA, 576 bp, Heterodera glycines
gcatcgtaatgtcataaacttggacaaaaacctggagaacattcgccgaattgaccaattcgcccgcaaagtgatcgaacattgcacccatgcggcactgttcaatttcagcattgagcagaacaaatggctgaagacggaggtggacggcccgctgttcatctacgaacggcttgaccagccgctgtactcgatgattgtcgtcaatcgccagtcgcccaaaaattttgtggaaccaatcacggacgggctgcagttgcgctacgagccgccctacatttttgtgcatcgcgaagatggctgtattcgcggtctttgggtgttcggcgaagacgaatgcaaacgagtttttgacactctggcgaatctgagcatggagctgaagatgaaaagtgccggtgccactaccagcagccccaaaaacagcatctccgccatcaacaacgacagcggtgccgtcgccgctttcgctgccgcaacgccgccgacgaaaattgtcgctgccgccaaaccgtcaccgccgccaccgtcgcagcagcaacagcaacagtcgatccgcgtcagcagcttcatctc

SEQ ID NO: 87355 - DNA, 387 bp, Heterodera glycines
  unsure (1)..(387): unsure at all n locations
catttcgtccgattacacatttccttctctccgttctgtcgtccaactgctgccactttcaattgcccttcacggcaatggctgacactcctcctcctcctccgcctcctnctcctgctgctgctgctgccgctggtggtggtgatgaagccgttgatttggagcaacgtgttcgccaactcatcatgtccatcggcctgcgaaacgaagacgcactgcgcgagatttccattctgatcgagtcattcaaccgggagcacctcctccactttgtggagatcatggcgagaatgcatgccgagagcggaaccagcattgacatgccgggtggccaaaatggaaccaccatgttgatgatcgctgcggcctctggaagggtggactttg

SEQ ID NO: 87356 - DNA, 435 bp, Heterodera glycines
caacgagtttagcggtgacattcgtgatgccaatttggctttggtgaagagtattcgcaaccgtgcctcatatttcgctgagcttctcccaattcgatgaagggcattggcacccgcgacaccgatttgattcgcctcgtcgtcacccgctccgaagtcgacttggccgacattcgccaggcatatcaaaatatgtacggcacttcactggaaaatgccatcgctagcgactgctctggcgcttataaggatggtttggtcgctattgtgaagggatattaccactgattgcgatggcactgctgtgaagaacttccaaacgataaaaaagagattaaaataaaatagcagttgctaattactaataatttaagtgtgtgaatatgtatcactttgtattgtaatgacccatttcgaaaataataacttgcctgc

SEQ ID NO: 87357 - DNA, 437 bp, Heterodera glycines
caacgagtttagcggtgacattcgtgatgccaatttggctttggtgaagagtattcgcaaccgtgcctcatatttcgctgagcttctccacaattcgatgaagggcattggcacccgcgacaccgatttgattcgcctcgtcgtcacccgctccgaagtcgacttggccgacattcgccaggcatatcaaaatatgtacggcacttcactggaaaatgccatcgctagcgactgctctggcgcttataaggatggtttggtcgctattgtgaagggatattaccactgattgcgatggcactgctgtgaagaacttccaaacgataaaaaagagattaaaataaaatagcagttgctaattactaataatttaagtgtgtgaatatgtatcactttgtattgtaatgacccatttcgaaaataataacttgcctgcc

SEQ ID NO: 87358 - DNA, 550 bp, Heterodera glycines
tgatccgccgagaatgcttatctgacatatggagccgaatgatgggattactgatcagccaactgatcaagatgggagtgatacagaagcaaccgattcgacgacagttggatcggattcaggaccaaatgacaatgatcagaatgccactgggccaactgatgaagatgaaacaggaacggaagcaaccaattcgacgacaacaacaactgaatcaaatgcaataggtgaagaaggtactgatcaggatgctacaaactcatctgatcagggagaaagtgatgcagaagcagaagcaaccgattcgacaacaaatggatcggatctggaaccaaatgatcaggatgaaaatggtgcggatgctgattcgacgacaacaaacggaatttgatcaaaatttactgaaaccaaactggcaatgatcagttgaattttttgatttgcagcgtggttgatcaattaatgacgaatgtcaatatcattttgatattgcaattaaaaccgatgtagttcatttgcgatacaattttttttcatgtgtacaacgaaa

SEQ ID NO: 87359 - DNA, 462 bp, Heterodera glycines
cactacaaaaatggttccttggtggagttccaacccgtccacattgaacagttcaatggagagcattgaagctgctgctgctggtgaacaacatcgtcatgttcgaccagtgcacgcaacaccaccaccagccgatgaatttgacggaattgttattgttgggcaaggagtaacagcagatgtaacggcagcaggagactttgtgccatgttcaacctctactttggcacaatcaattgaacgcgtttttggcaatttgcaacaccagcaaatccatcctgaaagctatgaagaagcgaagcgactgttggtctttgctggactgtttttcctgctaatgtgcgcatttgtactaatcaaattccaggtggcattcgatgatgtctttcgccggtcaccagcagtttggctggtcggcgtaatcatttgtgctcttctgatgaatatgtctgtgcaaattag

SEQ ID NO: 87360 - DNA, 601 bp, Heterodera glycines
caaattttcgggctttttattgcatttacaggaacttaagcattttgatggacaaaatggcaaattaattggcaatgacagcgacgagtcattggaatcattggtttcatttatttctaaaaatggctttggtctcataaacgacgaacggagaacaaaaattgatcaggcaattcaagaaatagaacaaattgttaagaaatggaatcgcaaagcgaaaattattgtcatgggttcctaccaattgggcgcactcaccaaacaatcagacatcgatgccatttgtgttgtgcccgaattacgcacttggagagcggcaaaattttttgggaaggcaaagtgccaaattcaatggaacgggttcagaaggtgcgcggatgattcactgttttgccacttttgtttggcggcccaagtaacggggctcaatcggatccaagacgcgtgggtgccgctgattaaattcaaattcgaaatcgacccgaaaacttccgtcgattttgacattggactagaaacatttgcaatccgtgacgacatttttaaatccgaagagccaataaaatacgaacaatgcgacgcattgtcagcgaaaatggcc

SEQ ID NO: 87361 - DNA, 509 bp, Heterodera glycines
agaaactggcattcctttgacaaagtcgattcgaccattgaaaagaagctgccagatgaatacgctgtgaaaggatttccaactctcaaaatactccgaaatggccgaaggttcgattataatgggccgagagaagccgacgggatcgtttcgtatatgttggaccaggccaagccggccgccaaacggctcaattcggcgaaggaggtgctcaagttcatgtccccctctgatgtgacagtcgtcggctttttctcctccgaaagcggcgctttttacgaagcttttgctgacgcggcggaaaggacgcgcggtgattttgccgttgggtacgccttggacggtgccattgcgcagcattttggcgcaaaatttggcgaagtagtactcttctggccagagatattccattcggagtacgagcccaaacggaagattttcccacgagagacggccacaagcgaagagttggtttccttctggcgcgacaatgccattccgttggttgg

SEQ ID NO: 87362 - DNA, 536 bp, Heterodera glycines
  unsure (1)..(536): unsure at all n locations
tttgccacggaagagcggggcaaaggcatggctttaattggtggctccttctccctggcttttttgattggcccttccattggcgcctttttctcgatcggtgcccgggaaagtggcgagttcgacccgtccccggctctactggcaattgcactcacactggcagaattggcacttttggtgttctttttgccggagacattggccaaggcaaagaatgacgattgccataaacaaagtgggcatagccttcggcatttgttgtcccctcgggcgctgttttccttcgacttcttgtctccggcatcggcttcctccccgccggtttcggtgccattgctccaaaagtattcccgcgtctactttctgttcatgctgctgttctccgccatggaatttactctcggctttctcacccatttgcgcttcaattacagctcaatgcaacagggccggctntacctgttctccggctnttgtatgctggtcattcagggattcgttgtgcgacgcattccgtcaacactcaaagcaca

SEQ ID NO: 87363 - DNA, 352 bp, Heterodera glycines
ctagcgcccgttgtacttgtgtacctgctaaatcagaatggctacgagctgtaccggagcaaggtacatttcggaccaactccgcgtgtgcatggcccgtgtgctgttcgtcatcccgttgctgcttggcacggtcgaactgttggcattccgtcactattccctccggcacaaacatcggccgaccagcgcattgcccatttgataaaatgatagtgcaaattttgtgatttaactctctctctctcccccattttctgtttttgttcagcttaattccttcctttctatgcacagggttttttccatataaatttttgtttttcccaaacaaaaaaaaaaaaaaaaaaaa

SEQ ID NO: 87364 - DNA, 641 bp, Heterodera glycines
gtggatcttattttctatacccgtaataccgccatgttatctcgtccgcttctattcattgccgcccttctcttcctcttcggctgctgtcgtgcggatggaaatgttgtgcatctgtcgagcctcaattgtgccacgaaggacggaggaatcgatggcttcaaagctgtggacgacggtctgatcttggattcctcatctgtcaccgctgatacgtctgacctgcccctcatcggtttccagaagaacggaaaggaggacttgatcttcaaactctttgtgcgcgatggaggatgcgtctcaaaggccaatttcttcaccaacggtcaaccgtgtacactcggagagtcggaggacatgactgagtcggataagtgtccgggcgagggcggcacctccaactgcacatcccacgaagtcacctgtacgggcatcggaatggcgaaggtcgcggaggagtccaatggtcacgccttcaaagtcaacctggccaatctcaccaaacttaccaatccgtgcgcgcaatggaaggcacattttggcggtgttcatcaagtgctgaagggttcttccagcggagagaagtgcgcgagtgcaggattccccgtctggatcattgttgtgatcgtcatcatcgcttt

SEQ ID NO: 87365 - DNA, 609 bp, Heterodera glycines
cagtcgcccaccggcacaggcaaaactttagcttttatgcttccaacgctgcaaattttggtgcaaaagaaactgaccggcgcaggagagggaaaagaacagccgacgtctgtctccgattcgtgtcgcattttggcacttgtggtggcgccgggccgtgatttgattgtccaacttttccatcttttttcaccattgtgcaaaaagcttggccttagcactttgaaattgcacggggctggcggaaaacaaaagaaaaagagcccaaagaagcacatgaagggcaaatgcattttgatctgcactccgggaagctttgagcactttttggagaaggaggccgagttgaagcagtacctgaagcacttggaagtgctcatcattgacgaggccgaccgctactcggacagagagtcaatgagcagtttgaccactttgcttgccgctttgccaaaacagcgtcggactgcgctgttctccgccacccaatcgtccagcattgagcaactgttgcgcttcggactgcgcaacccaactcgcgtgcacatggcggccgacacgggcgaagtgtgcacggactcaacgggatttgatgtgaaagtagcggag

SEQ ID NO: 87366 - DNA, 661 bp, Heterodera glycines
  unsure (1)..(661): unsure at all n locations
gagcgtgcgcacccgcgagcatgcatttgtacacaaaatcatggccaaccgagaggacatgatggaactgatggtacgcgtcaagaagaaggacgaagacattggggagcaggagagacagatgattctgaaggggctggcggtactcaccgaggagaaattgcgctgtcaccgctgctcacgcgtcgatttgagtgttgcggaggcatccaaaattcggctttgccccaactgcaacgccatttactgcattgactgtttcaccattcggaagaattgcatgcgcaaagagtgccgggcaccgcttcaggcgttgacggaggatatcgacttctacgttgattcgtcgtgtgaagaggatgatgatggtgacatcgtcctcgaaccgccggttgctgctgaaactgaacctgaggaatcgcagaaggaggatgaacagagggaggagggaaaagccgaagaggaggcggccaatagcaaagcaatttgagagtgacaattaatgatacgataatattttgataatgtttctaggcagtttattttatgttgtgtatcttttgctgattgtgaacagatttctttctcctttttgctntaccggtgatcatttatttattttattttcccctaaaatatggcgatttattaaaaattttcg

SEQ ID NO: 87367 - DNA, 442 bp, Heterodera glycines
tatatggcacgccgccaaagcaatgcgctgatcgaagcggccggcaagttaacaaactgttcattatgccgcccaatcggccgacacgcatcaaaaaagcgatgaacattttgtttggccgcaccgaggaggaaaaacgagtgaccggcaattttgtgtcacgcattgcggaacgcaacccccgtcgtgaggacatgtcgaccacgcaggactggccaagtgtttggcccaccgcgcagtccttccgttcatcggtggtgccgttgcccgtccgcatgggcttccgccgtaggccggaacggttcgcgccaaaagggccgtacgggaacttggaattgatgaaaattcccaactttttgcatctgacgccggcgcatgtgcatcgccatgggcaggcaatcaaaaaattttgcaccaaatttcccgaggagttgaagcatgc

SEQ ID NO: 87368 - DNA, 496 bp, Heterodera glycines
tcgtcgtgctttcctgcaagactttgtcgaatttggcgaaaaggtgggccaatgccgagagatcgtcgacgaccaaatgccgggacagatcgatgtccaggaaatttgtctatgcgagggtaatttgtgcaacggcgacggccgtctcagagtgccaccgtctccgctgctgctgcttctgtcgctggcattggctgtccccacctttctttggtttctgcccgccgccgccgtgtgagccgacgaatggacggcacacgaacacgctgacggaacgtatcgcgactgacaccatcgaactctccgtgttgcctcgagactctcgccccccccccaattccctttgtttatattccccctttcgcgtgttaacctaatacattaagtgttgtttgtcgtctcttaatgaattaattgcttcttttgattgtttgttctctctcgacaatgcattttgttccaaatttgcctgtctctctcaagtgatattcctttc

SEQ ID NO: 87369 - DNA, 555 bp, Heterodera glycines
ccgcggtgtcctcttctacggtccgcctggttgtggaaaaactttgcttgcgaaagcaattgcacgcgagtgccaagcaaacttcataagcatcaagggccccgaactgttgaccatgtggttcggcgagtccgaggccaacgtgagagatgtgttcgacaaggcacgtgcagctgctccatgcgtgctgttttttgatgagctggactcaattgctaaatctcgtggtggaaacgttggcgatgcgggaggggctgccgaccgtgtcattaaccaagtgttgaccgagatggatggaatgggatcgaagaagaatgtgtttatcatcggagcgacaaatcgtcctgacattattgactccgccattctgcgcccgggtcgtctggaccaactcatttacattccgttgccggacgagcccagtcgcctgcaaatctatcgtgcttctctacgcaagactcccattgcaaaggatgtggaattggaatacttggccaaagtcactgttggcttctccggagcagacatcactgagatctgtcaacgcgcttgcaa

SEQ ID NO: 87370 - DNA, 510 bp, Heterodera glycines
tggattgatccgccagccccaatgtcggtcgctttgaagcagtggagtttatcatccaatcgttccggggatggctatttagtagtaggatgattctgcccgcgttttattcctttacctttggccttacttcatgcacttcggctacatttcgcgatgaggacgattcgtggaattggatcgcagcaagcgccatttgcggactcgcccatgccactataagaaataacataccgcaaggatttgctttggctgctatcggctctttgttgggcgtctcctttcaagctgttcgaatcagtcacaacggctttggaatggtccacaaccgaatgactcaaggctttcttccgtttactggcccattggactggaagcatattccaacggatgccgttgatgtgttcttcgaatttggcgcagaatcattcacttttaggcattttttgcccaaagcttaaaaagaccaagtcaagttcattgactgtatttgtatggatttaggaaatg

SEQ ID NO: 87371 - DNA, 519 bp, Heterodera glycines
atcctgcttacgtcgtgctttcctgcaagactttgtcgaatttggcgaaaaggtgggccaatgccgagagatcgtcgacgaccaaatgccgggacagatcgatgtccaggaaatttgtctatgcgagggtaatttgtgcaacggcgacggccgtctcagagtgccaccgtctccgctgctgctgcttctgtcgctggcattggctgtccccacctttctttggtttctgcccgccgccgccgtgtgagccgacgaatggacggcacacgaacacgctgacggaacgtatcgcgactgacaccatcgaactctccgtgttgcctcgagactctcgccccccccccaattccctttgtttatattccccctttcgcgtgttaacctaatacattaagtgttgtttgtcgtctcttaatgaattaattgcttcttttgattgtttgttctctctcgacaatgcattttgttccaaatttgcctgtctctctcaagtgatattccttttaaacgattctttgg

SEQ ID NO: 87372 - DNA, 521 bp, Heterodera glycines
  unsure (1)..(521): unsure at all n locations
aggagaagacaagcggtncttcccgcaggagcaatttgcacttcaattggcgtccatgccggaatttgccgcctgcggtgccctgttcaagtcgtgtgccgcggttgagctcaccgaaaccatcactgaatacaatgtgtcatgtgtgaagcacattttcaacgacgactttgttcttctgcagtttgactgtcgcaacactttgaatgaccaactgttggaggaagtttttgtcgaaattgagccgcaggatgagggcgaagattgcccttggcatgtgcaaagtgttcacccgttggcccagttgcccttcggccagccttgcaccacttatgtgctgctcaaaatgccggaggacggacgcattgccggcacattcggcgccaaactgaagttcaaaatttgcgacgtcgacccggcaaccggcgagccggaaagcaacgatttgtacgacgaagtgtacacgttggagcccatcgaagttggccttgccgactttctgttggccaccgcgccganag

SEQ ID NO: 87373 - DNA, 508 bp, Heterodera glycines
cacggcgttatgggcgcaatgccaccgcacatgcaaccgggaatgcctcctcctggcatgatgcgtccaccgcatggctctttcatgcttcctcctccgcccccccggcgcctctgttggcgatgagccgccaaacaaacgcccgcgcgaagaaacgctggaaccggaagaacgttggcttcaaaaggtccacggtcaaatcgctgtgcaaatcgctacgccgcaaaatgatgaatggaacctgaaggggaacacagtacaaattcagttggacatcagtccatcggtcactgcgttaaaatcgttaatccaagagcagatcggagttcctgcaaccaaacaaaaattagtctacgagggcattttcatgaaggacagtcagagtttggcctactacaattttatgccgaatgcttcagtgcaacttcagttgaaagaacgcggaggacgaaaaaaatgaaatgtttttttgggaagtgatcacagaatgatgaatgaattggattac

SEQ ID NO: 87374 - DNA, 565 bp, Heterodera glycines
ggatttacttgcgtggcatgttcctacaaagtcgtccatgctttgctgagttgggaccagttcgaaaaaattatcctctacgcaaagaaagtgaatttcgagccggattatcttttccaaatgcgccaagttcttcgcacacatcccgaaaattcctcaaaattcgctctgatgttgttgaatgaaggtccaagtggcgaaccattggcggacattaatcagattgttgattgttttgccgaggctggaaacatccaacaatgcaccgcttttttgcttgaagcgctcaaaagtgacgacgagtcccaagggcatttgcagacccgtctgctggaaatgaatctgatgtcaaatcctcaagtggccgatgctattctgggcaaccgaatgtttaatcactacgacagagcctcgattggtcaattgtgtgaaaaagctggtcttccgcaaagggcgttggaacatttcaccgatttgtatgacatcaagcggaccgttgtgcacacacaacatttcaattcagagtggcttgtcagttattttggccgtttgaatgtgcaagatt

SEQ ID NO: 87375 - DNA, 260 bp, Heterodera glycines
tcaaagaatgtttcacgaatggatgtcttcattgcgttctgttttgcctgaacctctctgtcattttgaagacactggtctcattgtgctcgcttttgtgattacagcacttgtcgtccatttggtcaatttgctgtttgcctccaattcgggtccggctcccttcaatcatcgccttctccatgattgtatcacccgactgaaggagcaggaattgatcatcgaaaaagcgaacaaaaaaaaaaaaaaaaaaaaaaaaa

SEQ ID NO: 87376 - DNA, 523 bp, Heterodera glycines
acgacccgtttttctccatcgactttccctgcccaataaaatgcatctttttcctcttttgctagtgacattcgcagttgctggcttcctctcattggcttctggccaacaaaatgccaattccacggatggcccagcagacgacgatgatgaagcggcgcccgttgacgcggaagaacagttcaggcagttgttccaggcagtagacgcggacgacaacgggtcaatcagcggggcggaggcattgcaattttggcagaacaaatcgaagacgatggacccagcggagttgaaaaagaagttggatacgttcaacgccaaaacattggacgaggcggtcgaacggggtttcaaaaaggtggacaaaaatggagacagtgcggtgagcccggaagaactcaaagcgtatattcaaagctgagaaaacagaggccagaggaggtcagaaaggcgaagcaacgatcagacgaattgaattcgtttaattcatagacggactttcgtttcaccccttattcggcta

SEQ ID NO: 87377 - DNA, 511 bp, Heterodera glycines
caaaatgaacttatcattgagtcatccatgaacatgttccttctcaaatgagaattacaaaagaacgcaaacatttcctattttattggaaaaaatggaagaaataaatcaatgggtgccaacgtacttcatcgaatttggcaccgaagaacaaaaaagttcaatccgagaaaaggcaagcacagaaaagataattggaaaaagtgataaaaggaacagtgccattggaaatattctaaatgaaatcgaaccggaaaaggtcaatgataaatgggcaaaagtgattcattttgtgccagcatcggatgatgaaaatatgcttatctttttccaaatcgaaaatcccaaattttcaaaatcaatcagcaagaacacggaccttttgccttatgaaaatgaccccgaaagatttgaaagtctatcaatgtgtgaactttatggcgacgattgtcaaccaatcagagaattattggtgaaaattgaggagttggaatactgtggaaacgaagcc

SEQ ID NO: 87378 - DNA, 506 bp, Heterodera glycines
aagatccaaaaaatgccaacttttcaaatccttctgattgtgcttttggccgtcgtctcattccgtctctcggcttctactggtgacaaaaaaactgctaatgatgggagtggaaacaactcatcagctgggattggtacgaagatcaaaagaattgtcaccgctggactgctcttcacttccctggcgacgggtggggcggaagcgattgggcgaagcaatgctcagggaggaaatgccgccggattggtgccatcgcatgtgaccaatcgctcaatggctccaccacctcctcctgtgcaatttgaaatgggggcaaatcgattagaaaaaatgagggcacacctacgcgaacttgctgagaaaatgccggtcaatgaatcgaagcgtctgtcaccgagtggacccgacccacatcatcattagggccatggatggatctaacggaggaagaaagaatggatgcttagttttcagattttattctatcctcttttatttattag

SEQ ID NO: 87379 - DNA, 510 bp, Heterodera glycines
  unsure (1)..(510): unsure at all n locations
ataaaagatccgaaaaaatgccaaacattttcaaaatccttctgattgtgcttttggccgtcgtctcattccgtctctcggcttctactggtgacaaaaaaactgctaatgatgggagtggaaacaactcatcagctgggattggtacgaagatcaaaagaattgtcaccgctggactgctcttcacttccctggcgacgggtggggcggaagcgattgggcgaagcaatgctcagggaggaaatgccgccggattggtgccatcgcatgtgaccaatcgctcaatggctccaccacctcctcctgtgcaatttgaaatgggggcaaatcgattagaaaaaatgagggcacacctacgcgaacttgctgagaaaatgccggtcaatgaatcgaagcgtctgtcaccgagtggacccgacccacatcatcattagggccatggatggatctaacggaggaagaaagaatggatgcttagttttcagattttattctatcctcttttatnta

SEQ ID NO: 87380 - DNA, 354 bp, Heterodera glycines
caccgcggcggagaaatggggagcagaggacaaagtcagccacgtgagcaccggtggtggtgccagtcttgaactgctcgaaggcaaggttctgcccggcgtcgccgctttgagcgatgctccgtgaacaaactgaattgcctcgactgactgacaattgaattggctgtcggacgaacgaataggcggaccaaaaaataagaatttgaaataaattattttcttaggttgtttttttgtgatttttcacattcactttgacaaaatgattgattgctcttaatactatttatgcctttgataatttactaataaaatgcaatttaattttccaaaaaaaaaaaaaaaaaaaaa

SEQ ID NO: 87381 - DNA, 613 bp, Heterodera glycines
aaacgccgcgttgtcgaaagtgtggaaaagccgtcgatgtccatcgaccaaatcgacgaccctttgatccgtgaattggtcgtgaaagagcgccaatttctcaaattgctcacttcgaccaccgccccaattcatccgtccgtcactgacgcactgtcaaaaccgagctgtttccgacagtttgtgcagcacgaacataaccaaatgaaattcggggaccaaatgaacttttcatattggcgagcaaagattctgtccacttcaattgaatgggccaaatcgtttgaagaaatcgagaggatggacgactcggacaaagaggcgatggttgtgaactcggccttttcaattctcgtcttttctgaagcgtttcacacccccgagcggttcaccgatcgcattatgttcccggacggactgtctgggttccgcaatttcagtgccaacattatcaaggagcgcagtggtctgatccccacggttgttgccgttatcaacaacattttggtcccaatccgtcgaatgcaaatgactgaaattgaatatgtgctccttttggccattgtgcttttcgactcagaatgtctttccctcagcaagtcggccgttgcca

SEQ ID NO: 87382 - DNA, 183 bp, Heterodera glycines
  unsure (1)..(183): unsure at all n locations
ccccccccccccccccnnnnggaaagggtgagngtaaaaaccggntattttttagtnntnaaaagcattcatctatgtctttactgaacattctgtgtcttataatttctgcttttggtggttgctaaatgattgttgcaaatgaaagttccttgtactgaggcaaaagattaatttgttgtt

SEQ ID NO: 87383 - DNA, 467 bp, Heterodera glycines
ttaaaatgcgcgccgttctcttcctggccatggtttgcttggtgatggctgttattcttgagacagccaactcaaaggcagtgaaaaaagacaataagaaaggagcaattacaacgccagcaaaaggaaaagcggcgccgaaaggagcagcgaaaggaggaattaaaaaagacgcaaaatcaaagggaaaaggaaaaaaggacgccaaaggcaaaaaggacaaaaaagctaaaccagccaaagggaaagcatcgcctaaaaatgacaaaaaacccccagctgccaaagcaaatgacaaaaagagcccaaccaaaccaatggcagcagtgaaagccgtgccaaaggcggcggagaatgctcagaagggaccgtcgagtgcggaagtggtggcggaggaaagcaacttggacactgaggcggtcgacgacttgggggcggaagagtcggactttgaccaattggcagag

SEQ ID NO: 87384 - DNA, 575 bp, Heterodera glycines
tttttaaagccctttttactatcggaaatgaatccaacggttttttctttgttttagcggtgctctttcttgtcaaagtcgactttttacagtgcaaatacaatgaaccaatggcacgacaggtgctgcaaaagcatgcttcacaatttcagcagcattgtaaaaatgcccgcagaggaagtgccgtggccaaatgttgcagtgccatcagaagcataatgggccgattcacaagccaaaaaaaggcaatgaaccaaatgctggccaagtgtaaagcgggcacaacgccaagcgaagcacagcaaatgcgaagaaaattggaaggatcgaataaactgaaggattgtggccagtttaaaagccaaattcagcacaagttcagcgagttgaagcagtactgcaacaatggggcagaaaatgaggaggaaaacgacgaatgatcagagagggagagagaagaggagagagtagagagagagaggaacagcaaaattctaatcactagtgatcactgataattgccgattgattgaccggtacgactcatttggctgattgaagtttttttatggcat

SEQ ID NO: 87385 - DNA, 125 bp, Heterodera glycines
  unsure (1)..(125): unsure at all n locations
ggaacgaagaggaggcgaaggacaaaaaagagacattcattgggggggggcgaccgcgacttgacaatgaatcgccaaacgactctctcaatcgtgttgtgtctttttctgtcccttcctttant

SEQ ID NO: 87386 - DNA, 674 bp, Heterodera glycines
attttttcttccttctgccattttgtgcatatggtcgttttcatttccacccctctttattcgtggtgtgtcgctattgcgctcgtcttaatgatcatctctcaatgttgcggctgttctaaaaagaaacaaaagaaagctaaagagccgctgaaagcaatgcctactcagaaagcggaagaggcatctacagggagcgagaaaacgggtcaaagcgttgtttctgttaggccacccaatgtgccgacaactgctccagtcgcttcaaacccacccatcagcgcggaacagaatattgcttctattacacttacaccttcagatgtgaagacacctgcaccagtgggcgggaaaacgggtcaaagcgttgtttctgatacgccaccaaatgtgccgacaactgtgacttcaaaaacgccgatcaaagcaggacagaatgctgcttctgttaggccaccagtgcctgcaaacacatcaacaagttcaaagcatgtcaaagctcagggcactgtttctaaaaaaccttcgaaagcatcgtcatcacatacctcactgaaggtacccgacgacctggtttctgcaataaaatcgcatgtgccctcgtttctccatgatctagcatcacaaattactggaaggatggaccaaagcagtgcttctgccatgtcaagtga

SEQ ID NO: 87387 - DNA, 503 bp, Heterodera glycines
gtggtggcacaagccggggggttagcgactgtttagcaaaaacacaggggctctgcgaagcagcaatgcgacgtatagggtctgacgcctgcccggtgcctgaaggttaaagggaggagtgaaagctccgaactgaagcccaggtaaacggcggccgtaacaataacggtcctaaggtagcgaaattccttgtcgggtaagttccgacctgcacgaatggcgtaacgacttccccactgtctccagcacaggctcagtgaaattgaattccccgtgaggatgcggggttcccgcggtcagacggaaagaccctatgaacctttactatagcttcgccttggcgttagcgaccgtatgtgtaggataggtgggagactatgaaaccggggcgccagctctggtggagtcgtccttgaaataccacccttactgtcgttgacgtctaaccgagggccgttatccggtcccgggacatggcgtggtgggtagtttgactggggcgg

SEQ ID NO: 87388 - DNA, 511 bp, Heterodera glycines
atgtgtcgtgttcctgtcgctaactgtcctcccttttcccttttttatcctcatcgttgtcctgaaccaaaaatgctttatcctgcacaagctaacattgtcaaccgtctgctgtctcgtccgagtccatcctaccgttgcaccatggacacacttcgtcgagctgatcgacgattagtgttcagtagattcagacattggaagtcattcagcgaagagtctgaagcacttacatgctgtgctttttcgcccacagataatcatgcttttctgggaacatatgctggtgacattttcgtcttcaacattcacactggaacagtcgaaacgaattacaatgcacagcattccgcgatcaggacaattcagccatcgaaggaccggttgatgctaacatcgtcagcctatgtaaagccttattgtattctttggaaaatggacgaaaagggaatttccatccatgagcgcttgattgatttcaatgaggaagaatcggtcgaatttgctaatt

SEQ ID NO: 87389 - DNA, 491 bp, Heterodera glycines
atgaacttcctcccgggcgtgcccaatttgcccgaccctttcgttcgcattttgcatttctgcaacagcgaagaaggcgaaaccatcgaattgcccgaattccgaatttttgtgccggacacttatgacttgggcatcctcgtgttggaccagaagactttgcccaattccaccgttaatttccccgtgcccgagaacccccgtcgacgcctgcagcaggcaaaaagaccgacggaagtcggcactttggacgaaagcaatggcaaaaagggggcggaagatgggtttgtgactgtcgacgcgccaaaaagtcacaacgccaaaggcctggacgaccttttgccgcccggcaaaacggtgaccaaaacgaacggcgatttgttgtgggagacgcaatcggtggagatggaggaagtgccggccgaatacgacacgtcgatacggcaaagtcagcagcacaattgggaggaagagtccaacgatggaaatga

SEQ ID NO: 87390 - DNA, 545 bp, Heterodera glycines
ggtgaggcagacgatgcacaaaacgagaacatagcgaagagggaagagagatcgaacaaacgcaaaacaccaccggagaagaggaagaagaagacaacgaaaccgacgacaatgtcggcatgagttccactgaaagtgatggccaagacaaaatgaaagccaacaacggaaaagggacgtgtaaaaatgaagacgaatccaagccaagtccaacggttgaaacagaacagaataaagtgcatcagtccgcttctgaaactgtgataagtcaaaaggccaatgccaacaattcggaggaatgtaaggaaagcaatggagagaacggcacgcgcatttcaatgaaacgacaacggcgttcacattcagtggacagttcgccacagcaaaagcgagtcttttcacgcaaaaattttactgccgaggacaaaccgtcgacaaacaaaaactctgctgaacattcaaattcacgagatgaaccagctaaatgtgatggagatgaacagaagtgcagtgtgagtgatgagcaagtcgcagcggacaattgc

SEQ ID NO: 87391 - DNA, 504 bp, Heterodera glycines
gcggcacagtaataaaatataaaagatccgaaaaaatgccaaacattttcaaaatccttctgattgtgcttttggccgtcgtctcattccgtctctcggcttctactggtgacaaaaaaactgctaatgatgggagtggaaacaactcatcagctgggattggtacgaagatcaaaagaattgtcaccgctggactgctcttcacttccctggcgacgggtggggcggaagcgattgggcgaagcaatgctcagggaggaaatgccgccggattggtgccatcgcatgtgaccaatcgctcaatggctccaccacctcctcctgtgcaatttgaaatgggggcaaatcgattagaaaaaatgagggcacacctacgcgaacttgctgagaaaatgccggtcaatgaatcgaagcgtctgtcaccgagtggacccgacccacatcatcattagggccatggatggatctaacggaggaagaaagaatggatgcttagttttcaga

SEQ ID NO: 87392 - DNA, 552 bp, Heterodera glycines
  unsure (1)..(552): unsure at all n locations
ggtcgttgcgtcggtcgttcgttgcttttttcttttcccgctttttttctgattcgtccatttgtttctctgtccgccgttggccgactcttcgaataaatttatgaattcgctgaatattttcttgcattgtgccaactttgtgatcttcagtgccgttattgctctgattgtccaccaccaaactgtccttttaaatgccgagtccaattcgacttcgaaagggcaaaatgaagcgaatgagacggcactttttaagaagataaacgcaactgataagaaggacgagggacagaaagtgttgttattgttgaagcaaaagcaacgacaacattttggagaagaaaaaaccgttaattggtcatcaaatatcaccagcagcaacagcagcagtgcgtcgtccattccttttagcgaaacaaaaaaagcaaatcgcgggaacaattgcacaacgacaacggcacattttggagagaaaaattcgacaaanaaagacanacagaaaagagaaaaacgaaggaagagagaagccgattcgacggtatccgtcga

SEQ ID NO: 87393 - DNA, 576 bp, Heterodera glycines
gattcgagccatttcgagcgtacggcctttgggacggtcgctttttgggcgttgttctggccgactcttcgcagcccaaactttggcacaatttgaccaccgctggcacaatcgacgcgatcatcaccgaccctccttatggcattcgggaaagagggcaaagattgggcagtgataaacggaaaacgccgaaagagactgaaattgagaatgatttgcacaaaaatggacaaacggaaagtgcagagaaagacaaaaagggaaatccaagcgaatcactgacaaaatcagccataaagaaaaatgtcggaaacgaggaccaaattgaccatttcggcgtcggattcccggagaagcagaaatatgccatgtccaacgtatttttggatctaatggatttgtccgcccgtttgttacgtcccggcggtcgtttggccttttggttccccgtttgcagatccgaatattccgaacgtattttgccccgcatggattgcatgcgattggtgtgcaactgcgaacaaacactcgcgaaggattcgtcccggcgccttttggtctatgaaaagcttcgcc

SEQ ID NO: 87394 - DNA, 670 bp, Heterodera glycines
gtgtgcctctccaatcgccaacaacacaccgtttgttctgaaagctaggccgttgcctgagggactgccggaagccattgaacgcggcgatgtcaactcgacggacgacccgaaaaatcgtgctaaaatactcaccgagaaattcgaaatggacgcgaccgactcgcgcaaaatttggtgcttcggaccagagggcactggtgccaatttgctgattgacgtgacaaagggtgttcagtacttgaacgaaattaaggattcggtggtggccggtttccaatgggcaaccaaggagggtgtgctctgcgatgagaacatgcgcggcgtccgttttgacatccacgacgtcacgctgcacgccgatgccattcaccgtggcggtggccaaatcattccgacggcgcgtcgtgttttctacgcttcggtgttgacggcaaaacctcgtctgcttgagcctgtctatctcgtggagattcaatgtcccgaagcggctgttggtggcatttacggagtgctgaaccgtcgccgtggtgtcgtctttgaggagagtcaaattgctggcacaccgatgtttatcgtcaaggcacatttgcccgtcaacgaatcattcggattcactgctgatttgcgcttcaacactggtggtcaagcgtttccgcaatgtgtgttc

SEQ ID NO: 87395 - DNA, 615 bp, Heterodera glycines
tatcgcattctttcgagagatgaattgttgagcagtatgcataaaaccggcaatttgaaggccctttttccatgcagtgaacaactgattttgatgctggacgacagacccgacgtttggatgcattccgacgctctcatccgcgtcaacccatatcgttttttttgcggaaattggcgatatcaatgctccaccacaggaactgctcgactcagtgcaagcgtcggaagaaatggaaaatacgcaagctgataaatggactttaaagcaaaaagtgaaatcgaaaacagaagaggacaaaaaggagggggaaaagagtcttttaacgacgaaaaacggagaagaaaatgcccaaaagaaaggcgaaacggaggaaaaagagagaggagacggaggggggaacggggaagaacggactgaaaatgccttagccgagccaattgcggccattgtggacgatgacaacgcattggaacacgtcgaacgtgtgctggctgaggtacattcgctattctaccaacaatatgacaaggacaaaaagatccctgatgtaaaacgcattttgggctgccttcgttccaaagtgctccgtggcgagcgcattgtcttctctgg

SEQ ID NO: 87396 - DNA, 606 bp, Heterodera glycines
caatctgaggaattttttggggttgccttctttcgacgagtcgcttttcccgcccaagtcgatcgcattgctgaaagtgcttgattcggaaaaaaaccgattggaagcgaaaagggaggaaattgtggggagccaagcgaggctgacgggaaaatacaaagcattgtgcgatagggtgggaacaacggcgcgacaaatcgaaggagtgcacgacagaattatgtccgaagatgagttggacaaactcaaaggcgaggtggacgcgctgcagacttttgtcaacaaacggctcgagaaggcacttcagctccaagcggagagcaaacgaatctttgagaccattcgcccgtccatcaatagtttcaatgaagactacctccactttttgcgtgttgacttggacagccaatccaccgtgttatcgtctgactttctgaagaagatggaaacattgaatgaaagactgaaagatcatcacgacttgtgggctaaacaggtcgtcttccgctatgacgagctgctcgttaaattagacgagttgtccgcaaaatgtttccaaccttctacggagtttccagcaaagccaaatttgaaaaatctgagtga

SEQ ID NO: 87397 - DNA, 559 bp, Heterodera glycines
ttctgtacgtccttaagttatttaacattattaatacaaattacgacaataattgagctgttaattgccgcaaaatgaatcgacgtttaaggaaaatttggatttgtggcgacgtttggatggatattctgccatcttttgaacgcggtgaactcggcctcaaaattgcattgctttcttaccgttacgatgttttggtggacacgcattttgacggaaaaaaagaattgacaatttggaggacaatcaaaatttgcgacggcattggcccagaaccgaaattgtctgtacagatcaaggacaaatgggtggagtttccatttcccgactgtccgttgcccaacaaaatacgatttaagcatctttggattacttacattgaccattccgtcattgaatttctccgttccaacaaacaaatttgggacagaagtggcaccgacttgctcattcaaatagaatcagacacaaatgttatcaagccgatttgggatgtttttaccagtgaaatttggccaatttttgcgacaagcattcgtcatttgagcattgcaaatgg

SEQ ID NO: 87398 - DNA, 417 bp, Heterodera glycines
  unsure (1)..(417): unsure at all n locations
ataaaagatccgaaaaaatgccaaacattttcaaaatccttctgattgtgcttttggccgtcgtctcattccgtctctcggcttctactggtgacaaaaaaactgctaatgatgggagtggaaacaactcatcagctgggattggtacgaagatcaaaagaattgtcaccgctggactgctcttcacttccctggcgacgggtggggcggaagcgattgggcgaagcaatgctcagggaggaaatgccgccggattggtgccnatcgcatgtgaccaatcgctcaatggctccaccacctcctcctgtgcaatttgaaatgggggcaaatcgattagaaaaaatgagggcacacctacgcgaacttgctgagaaaatgccggtcaatgaatcgaagcgtctgtcaccgagtggaccc

SEQ ID NO: 87399 - DNA, 577 bp, Heterodera glycines
acaattttgacgatgttttcgacgagttcgacccccgtcctgtggcgctgcttctctcgcgcaagtgcacagggccaagctgaagtcaagcgacgaatacgtggcagtcaaaatacaacatttgcatgtaaagaccgcagttttgttgacatggccacgatggagtttttcgtcaacgtcgcctcctttgtgtttcccgaactcaaattgaaatggttggtccgcgagacaaaattaaaccttccgcaagaattggactttcttcgcgaggccgcaaatgctgacaaagtgcgtcgaatgttctcccacatgcgttttgtcaagatccccaaaattcattacaattactcttctgacaaagtcttaaccatggaattctgcgaaggtggtcaaatcgacgacttggactatttccaagtccatcagcttgacaggcacaaaatttgtcgtctcttgggcgctttgtacagcgaaatgattttccgccgcggctacgtccacagcgacccgcaccccggcaatgttttggtcagacgaagtgccaacaccgggcgggaggaaattgtgctgttggacc

SEQ ID NO: 87400 - DNA, 583 bp, Heterodera glycines
  unsure (1)..(583): unsure at all n locations
gtggcagtgattgagcggtgagtttcgtccgcattccgtcgttttgactcccccaagggtttcccattcggccctctccgtcccctcgggcgccaacttcggctccgacatggtccaattccgtcaaatggcgcactctccgcccattctctccgtgccgttggcgacttcagtccatcagtcttcagctggtcgccttataaattctccgcaagctgagaatacgacagaagagtcgaacggccgactcagcggccaactgaaacattcgccgaccgtcggcagcgcagcgacatcgccgttggcgagcagttcgaccatcggagtccacgaaatctctctttcctacgtccgtcccaacactttttcgccttcggccggggatgaccgtcgttctttgccaacctatttaagttctcctccggcgcgttcttcggcctttttcccctccggtagtgttcatatgcatttcagcgcgggaaaggcggaagatgcgcgattgctttacacaattggccgtccngaggctgaatggagttttggcgcgggcgaatcgattcagattagtgacagcgaaacgaaa

SEQ ID NO: 87401 - DNA, 545 bp, Heterodera glycines
cagtgattttgctggctaagattggcccagctcagggtcaatttatctggtctgtacatacatattcaatcgtctttcgcgcttcccaatattctaacaataataaggcacaaaacattgacaaacccaaccaatcagtcatttcatcagatgtcttcaacaacgttcacgctaataagcgtgccctcccttattgttctgttggtcggttattatgtgcaaaggtacggaatgccaccacccccgccaaaaattgcgggcattgatttgggcaccactttttcctcagtcgcaatttttcaaccgcagacgggcgaaacgattgtgctgaaggatccgcttggtaaaagaagcattccgagtgtagttggctttctggaaaacggcgaaattgttgttggcacaagggcagtggaacagcaggaaatgaacccggagaacacaatttatgacgcaaaacgattcattggaaggcgtttttcgtcagacgatctccaatttgagtcggatcgcaaacgctatcctttcacaataaaattggacga

SEQ ID NO: 87402 - DNA, 553 bp, Heterodera glycines
ggctgaaagaatggctgaggaggctgaaaggatgtccgcacgtgaattggcctcgcacggagtttccattggcattcccgctgttcacgaccgatcaatcgattttccgcggatctgcaaaaaggaagagaagctgtcaaggggtttggtgtcgaactcagtcgatgtcggcatttcgggcttctacgaccggttcgtggcccctcgactgaggaccggcgttgacagcgtggacaatcttgccaaatgggccgaaaactatctgaaacgtgttctgttcaatcccgaaagtgtggggagcgctgcggaaagggcggccaaaattgcggcggagcacaagcgtgatgggcatattatgtgccattttcttgacgactggttgacacattcatctgaagccaacacgaatttcttcagttatgtggccatggagaagttccacaacggcgtggcaaaagcgatgaaaggcgcctgtcccgacgacgtgcagcgcaagcttgaggatgttcggcgccgtgtgctttccgcgccgatgaacgtccacttcggcgga

SEQ ID NO: 87403 - DNA, 425 bp, Heterodera glycines
gtcaccggactgactctgctcgttttgtcctgcgcccttccgtccttagcaattggtggccattgttcgtgctgttcttttactttttggcaccgttgcccatttccattgccaaacattcgcgctacgaaagcagcggaacatcaccggccattgaatttgcacaattcgccaccgccggcattgtcctctccgcctttgcgcttcccttcgtcctcgcccacgccggagtgatcgctttcggtgcgtttgttgtcgcttcgttgggctcgctggtcattttttgcaccatttttgcctatttttatttgcaccaattggaggaaaacggcggatggagcgcttcagtgatttgagaaaagcacaaaattaaaaaaaaaaaaaaaaaaaaaattttaaaaaaaaaaaaaaaaacaaaaaaaaaa

SEQ ID NO: 87404 - DNA, 290 bp, Heterodera glycines
caatcgatttataacaggagccgaaatgggaccaacataataatgatcctgccctgtcaacgctcaaatcatgtccccgatgttggcaggcatttcttcgatttggatacaaatatcaaaatgttcgccttttccaccgccacctgtttcgtcacaaagttgatggccactcccttacgaccgaatcgtccggaccgaccgattctttaaaaagacacacacacgtttttttaattgcattactcgaaaaagctaaccgatggaaaaaaaaaaaaaaaaaaaaaaaaaaa

SEQ ID NO: 87405 - DNA, 316 bp, Heterodera glycines
cagtcgcctccgcccggcagcgaaccgccgccgactgaggagaaggacgagctgtgaacggtggaatcaccaagtgctaactgtgacgactttccttggtctatcccccttccttcccccactatctctttggtttttcatttatttatgttattggtatttttcagatcttgattctgtttttgtttttttttggatttatcctatctcatttcttgatcgagttgttgtgtggatatgtacggttttgttgactattttgtgcagcgttatatataaattctgcgacaaaaaaaaaaaaaaaaaaaaaaaaaaa

SEQ ID NO: 87406 - DNA, 395 bp, Heterodera glycines
tggtttgcctgagctcgcgctccattaactcgttatggcttggctgaagatgcgaacttttctcgtaagcattaattctttctcagaaagttcccatctcagcatccaataaaaacttggagccgcgacaacgttcgttgtccgattattggctgacgaattcaattgcaagagcctctccgaccatggcccaatgcgtcaaagcttcgcgcgactacgccgttcagcctcacacggacccgctgagactggcgaacccccacgcctaaggaagggagcgaagaaggaattcgatttaattaggtcgcttgtaaatgtcttatttaaattcgttttgattctgttttccatgcgaatcaaaagttatcaaaaaaaaaaaaaaacaacaaacaaaa

SEQ ID NO: 87407 - DNA, 503 bp, Heterodera glycines
  unsure (1)..(503): unsure at all n locations
tttattggctgaccgaccatttccacttccatttgctgtttcggcacttccttttcactcctttttgctgcaactcaccagtaatgagcagcagccatcgcgagaccggcagaagtccaagaagtgtgctgatgcgccagtacgaaatgctgctgcaaaactcgaacgacaacagcggattccgtgcctggttcgacaataacaatctcttcaaatggcgcattctaatcgacgggccgccgggaacgccttacgcgggatgcaaactcacggcactgctccatttcccggcttcgtacccaaatgatccaccgacaatgaccttcctcaccgacattcttcatccgaacattgaccagagtggcaaagtctgcatcagcattcttcatgcgccgggcattgatccgcttggccatgagcagccgtccgagcgttggaatcccaaccgttccgtggagtccatnttggtgtcgatccaagtgctgctggcagagccgaattta

SEQ ID NO: 87408 - DNA, 576 bp, Heterodera glycines
taattctcttttcgtaaaatgctttctcccttctcctacgacccgttctatcgccgttcgttgtggcctatgaccaccgttggcaacgtcctttcgcccttccgccagttggagcgcgaactcgaccacttctttgacgggatgcagcccatgcttcgtgaccacgccgctcagctgaacgtcacggacaagggcgaactcacttacaaagtcgatgtcagcggcttccgccccgaggagatcaacgtggaggtgattggtaatgaaatcatcgtcaatggggaacatcgcgagcagaacgacagcgaatcggtccaccgtcagttctcgcgccgtgtgctcatcccggagggcatccaaaaggagagcatcaagtgcgagctggacggcggtcgcttgtgcatctgcggaatgaaaacggctggcgaaggcggacgaaccatcccaattgagatgaaaaagaaagcggccgtggaacagcagccgcaagcggagaagaaatagagggggacaaatggagacgacggaccgatcgatccattaatatgggtctcctcctttggacattttaaatta

SEQ ID NO: 87409 - DNA, 647 bp, Heterodera glycines
ttggggtggcaacgctgcaacgggatgcaaaacattcttaggcgaaccattgtctctgaacacagttttgtgtgccagtacagtggcaattgcgacgtgacaaagaacgttcgctgcgcgtgccgacactgtcgctttgcaaaatgtgctgcggtcggcatggacgcaaaagccattcaaaatgatcgggacagaatcggtccgacaaagcgtgtccgactttcgcccggcccggacggcaagcgcagttccatggacgaggaccaactgtcgctgtcctcattgtccccccaagcgcgttaccaagacgagaagctggtggaccacaccatgacagttgaagcgttgtgcaatgtgttgaggaaatgtgtgctggtggagaacaaaagtgtgcaggaagcgttggcccaaccgtcgctgattttccaggcccgggatttgcccatcgatgagaggacggagttcaaggagttgtacccggcctcgatgaacgacattcaaatgtggaacattcgtgagctgcgcctgtgcttggaatgggccaaaacatttgaggagttccaacggatgacctattcggaccagttcgcacttgtccgacactttgcgttcacatttaacattctcaaccgcgtgttttattcatt

SEQ ID NO: 87410 - DNA, 375 bp, Heterodera glycines
acctcgccttgccgagtgccagcaaattcgtgccgctttgaatgccaccggacgggaccacgtccttcaccttctcgtccccattcctcctccatctattgttggccctccgccttccggatgttttcctcggcctccttactcgaagccatttggcgggggatttgggccaaagtccggcggagcagccattccgggaagaggaggaccacagacaccggagagaagaaataacattggcactgaggagggtgaagagaaaaagtgaaggacagagaaaaagtgcaaagagaagccgattgattgaaaacgtacaatgaaatcacattcactctttcgataaaattttaatgcaaaaaaaaaaaaaaaaaaaaa

SEQ ID NO: 87411 - DNA, 513 bp, Heterodera glycines
ccgaaattgtcgactaattggggcggtgcctcctagttaaggagttgctgctgcccaaactcaaagcaaagccggtccgaacagcttcaggaattgtgattgttgcggttatgtgcaaacctcacagatgtcctcacataaatttcaccgggaacatttgcgtttattgtcctggtggtcccgattcagatttcgagtattcgacccagtcttacacggggtatgaaccgacttcgatgcgtgcaatccgtgcccgttacaacccgtatttgcaagcggtcggaaggatcagtcagctgcaatcactcggacacagcatcgacaaggttgaatttatcgtcatgggtggcacttttgtgtctttgccggaggattaccgcgactatttcatacgaaatttgcacgacgcactgagcggacatcgaagttgcaatgtgaaggaagcagttgcttatggagagcacagcagaacaaaatgcatcggaatcaccaccgaaactcggcccgattatt

SEQ ID NO: 87412 - DNA, 578 bp, Heterodera glycines
ccactcttctcgagtcgtcttttaacgttttagaaagtcttggcgaaatgctcacttggccttttgtcgacgcttttgtcattgccccaaaaattgcacttttaacgggtcgaaatgactttagctttgaccaattgtactaccgaagtgaaattgcgcttgtcgattccatcgatttgcccgcttttccccagccacgtgccactgatgtgttaagtgccggtgcgcattgtgaagtgcccaccgaacttccgaaggattaccgtgtttttgtggaggatcctcactcaaaagggactgtttacgtcgccttcggcaccgccgtgccgtgggactacgccccgcctcacattgccaatgccttctttgatgcttttgagcggttatctgaccatcgcttcatcttttcattccgtggcactttccccaatcggactctctcttcccatattcgccttgtctcttgggccccccaattggaagtgctttcccatccgaagaccaaagtctttttgacccattccggactgaagagtatcaaagaatcgctgtgttctggcactccgatgctaacaatg

SEQ ID NO: 87413 - DNA, 633 bp, Heterodera glycines
  unsure (1)..(633): unsure at all n locations
tgtcgcgcgaccgggagaccaaattctgttgttgaacaacaaatgcaggaggttacaagcagctggaggacctcactaataccaagaagacgctacagcttgaacttgacgaaatgttgaccaacaaggacgacgttggcaagaacactttcgagctggagaagtcgaagcgtgccatggagaaggagatggaggacttgcgcatgcaggtggaagaattggaggaagcagtgcaattggcagaggaccaacgacttcggatggaagtgaacattcaggctgaacgcaacgagttcaagcagcagttggagcaaaaggaccaggagggggagaacaggcgacggctgctgcagagtcagttgcgcgagaaggaaatgcaactcgaggacgagctccgggcgaggacccgccagcgtacggtggtcacttcgctggaggttaaggtgcagcagctgcaggaccaagtggaccagctgaacaccgaacgggccaccttccagcggcgccttcgtgcattggctaaccaatttgggcgcgattgatttggtcgcagaatgtgcgcgagtttttcatgtttttgcgcgtttgactgaacacaccacanaaaatgctaacgaattaatttaagatcag

SEQ ID NO: 87414 - DNA, 668 bp, Heterodera glycines
  unsure (1)..(668): unsure at all n locations
ggacgcgccccttntacttttatttgaaatacctccgccgatcattcacaaaagctcaaaaataatcccccgtaaagcgaacacaaaatgagaatgacccaagacgcaaatttgagcactttttgtgcccttttcactttccttctgattgttgaaggaactttcggcatttttggcattggcagcagtgacaatgacacaacgacgacgacgacacagggagggggagggacatcgacgacgacggcaaaaccaaagggaggagggacggcacacgacgaaaaccattccgatgactcatcaattcgcggcaaagcgcgcgagaagcgacagcaaacgaaccaacagcaacagcagccgaacttggagtctttgcccgtatgtgctaccggacagtcgcccattgcgccaattccgcccgccggccccgtccttccgatcggcgccattccgcccaccgtcgtttgtctgaagtgccgcccgcccaacggcccattgtccgggaacaatggcgcaaatggcaacaacggcacttaaaagcatttgccattggacgctntgtgaatggcaaccggtgaagaaaaaagagaactaataaatgccatggaaaaagcatttggacgaacgctgactaatcattgcttcttgtnttctaattcgttcgtttc

SEQ ID NO: 87415 - DNA, 632 bp, Heterodera glycines
caaagaaaaaaaggtgcagcaaattttccgtgaacgtgacattctccgacttttgtccacgcccgcaaatgcgtgcccatttgttgtccatttgttttgcacatttcaagacgatgagtcgctgttttttgtgctttcctatgcgcccaaaaaagatcctatggcccggctgaaaaagctccaacggttcagcgttggccagtgccaatttgcgatggccgaacttttcttggcactcgagcacatccatgccctggacgtcatccaccgtgatgtaaagccggaaaacattttgttgcgcgaggacgggcacattttgttgtcggactttggctgtgccaagcaaatcattgcaaagcgggaaaatgtggcggaggaaaatggtgacaaaaccgacggacaaagagcagatgatggccagaaagcagagaaaagtgctgacagcaaaagcagcaaaaaaacgggaggaggaggaggcgacaaagctggcactgagacggcggtgctcatttgttggcagtggcgcctatgtgagcccggaggttctgaatggcaaggaagtgacgggtgcatgtgattggtgggcatttggcgtcactttgttccaactgttggtcggccggctcccattc

SEQ ID NO: 87416 - DNA, 530 bp, Heterodera glycines
  unsure (1)..(530): unsure at all n locations
cagcgttaaactgcacagcaccgcggatggtctacgaggagtactgcttcgatgtgaggctcgacgacttcaacgaggagtactgtttcgagagacgaatccgaactacatgaccttccatggcgtcgactacgacattttcgtctgtgagaagacaatcagcgggctcaaagatgaccgaagcgaaaatgtgttcaaccgtagacaaggagcatgtgcaagcggggacgaccgatgcgataacgttttcaaccgtggacaagtggcaagtgcgcgcaatggtgaaggaagagacagcatcctcattcaaggattggcgttcgtcattgtgaaagtggtcaatgcagtgtacgatatgattgtttaattgtgatcaggatatattcatcacgtatatgtaaacaattatttttgtgtgtgtcgtatatgtacgaactgaatttctgaacattcgtcatatgtatgtaaaaataaatgtgtgtgaaataaattttggtagcaaanaanaaaaannaaaaaaaaaaaaaaaa

SEQ ID NO: 87417 - DNA, 261 bp, Heterodera glycines
  unsure (1)..(261): unsure at all n locations
ggcaatcggcggagcttcaccccaacggaattcgacccaattgggacggccaaattgttaattctgaaggaccttcgcagagcaattgtgaatctcaatcaatttgctgagaaagccctcgacagttgctctaatccgactattgtctgcagtcctacaatcggcgctggagggnaagcagctgatcggtttcacgaagacggaaacaaaaagacatcagccatggtcatgtccacgggtgggccccactccaaccttggc

SEQ ID NO: 87418 - DNA, 445 bp, Heterodera glycines
tggatataaaaattattccttacttttttggctgtgaaaaaaatgaattatgccaaaatttgtttcattttcctgcaactttttccaattttattccattcatcggaaggccgtgtcgaactttggcaagtcagccaaggtaatcccgattactacacacggggcgccattctgaatgaggatgctgtgccaaatgaaaattacaacggcggaggccaacattatgccacattctgagcaaaaattatgattgattgaatgatcgccagtccaattttgcattactgtacaaaaatcattactgttgctttaggttttcacttttgtataatccaatttcccctactgtacaaaaaattgttgttttaggttttttcatccaattttccgtgctgtacaaatactgttattttaggtgttttttttgtttaaataaattttaaaa

SEQ ID NO: 87419 - DNA, 576 bp, Heterodera glycines
agaaagaacacttgccatgccaaagtgcggttccaccgaagaaagaacaacttgccaaaactgtggttccaccgaagaaagaacagctgaagttcgaggacagtgaagaggaggacgaagtgacggatgaagagttggacgacgaagagatggacgatgaggaattggaggacgaatccgaatcagacgaagaggaggaacaacagatggtcaagcccaaaaaggctggcactccaaccgttgcccaaacgcagcagcatcaacttgtcaatgccaaaagcgcggttccaccgaagaaaggacaacttgccaatgccaaaactgcggttccaccgaagaaagaacagttgtctacccaaactgacaaatacaagggaattgctgcggaagaagagcgtcgtcgtgctgagagggataaggtaactctttttttacgctgtgaaacgttgcaaaagatgaccgatggtgagatcaaagctcttcatcccgatgccttagctgtacgcaccaacaacagggctttttgctggatggtttttgcatcggaaccgactgcggataaggcatttgccgtgt

SEQ ID NO: 87420 - DNA, 565 bp, Heterodera glycines
  unsure (1)..(565): unsure at all n locations
gctgccgccaaatgaatttgatttttgaaatattcgcctttggaatggacaatttctcatcggaaaaaaatgtttctcttcttcgtcttttcttattctttttctcgaccgtagtattatttggaagcgcacaccctatggtaaacaaattatgcgaagacctagataaacctgaaggttggcaattattgaaaaagttaacaatcgaaaagtgccggatgagtataatgtggaattccccaaatggaaagacagctacaaaagcattaaaaagtttataaaatattgcaactatcttcagaaaaacgaaaaacccgtccaagaaaacgatcaatataaacttttggcactaaaaccaaagtttctggatgccaataaaaatgagttaaaaatcagtgaagcaatgtctgaaattgttgaagcatacaaaataatgctgagcaaattagtaaagatgaaaatcaatatcactgaaaaactagaagaaaagatgctgaanaagcttcatttgtatgcaaaaaaagaattgcctgtaatggagtttaccaacagatcggattgcttg

SEQ ID NO: 87421 - DNA, 565 bp, Heterodera glycines
tttgctttccaaaacccgcgtggagtcatttcaaaaccacaaatgtgagtgacagcgaaattgacgacattgtgcagaaaggtctaaagaagatgagaaacaaaagcgatttcctgagcagtccctgggacgatctgatggtggtcgacgcctttcagacaatttcttctctgaattcgatggaagtcgaaacgaatccgacagtttttgcgatgactgtgcaaaaaattgggcaaactcagcgaatggccaatgtccgaaagatgtggcaaaaatggaacgacgccgtcgcgcaaagggacgtcactttcgacgaatttaggcaaaaggtcggctcggaaacggtgaaacgatcgttgaaaaatttccaacggatgggcggcggcgccaattggaggcctatccaggacgtcaaaatcacttggatttcactacgccaaatgtgcttccagccgctatacagcccggacgaattcaaagacattgaagaacaggatcaattcttcaaaatgcttatcgttcacggaaaagaatacgagtcgttggactgcatgagcatcgactt

SEQ ID NO: 87422 - DNA, 669 bp, Heterodera glycines
  unsure (1)..(669): unsure at all n locations
tttgtcctcccttcttgcacttttcctcctttcccttttgtgctttgtgttttgtcactttcgcccccattttcctccgttccttcaaaaagcgtcggttgaacaacgtcgtcagtacaacagaatcgtgaccagccaaaacgacaccaaagcacaaatcaacagcaatgtgcagaattgggcttcaaatgcgggagttgcgagcgattacaacaatttcacatcggagcagcagcagcggtctcaacaattccatgacgcagtctccggcaatttgacaggccaagcgctgcaattattcaacaacctctggagcattcgtcagaatgatcaaatcactcgccttgccgagtgccagcaaattcgtgccgctttgaatgccaccggacgggaccacgtccttcaccttctcgtccccattcctcctccatctattgttggccctccgccttccggatgttttcctcggcctccttactcgaagccatttggcgggggatttgggccaaagtccggcggagcagccattccgggaagaggaggaccacagacaccggagagaagaaataacattggcactgaggagggtgaagagaaaaagtgaaggacagangaaaagtgcaaagagaagccgattgattgaaaacgtacaatgaaatcacattcact

SEQ ID NO: 87423 - DNA, 137 bp, Heterodera glycines
tcggcgtcgactttgactcactttcgtgtctgtcgaccattactcaatcgacctctgacgaattgggcaaaaagtcgaaaggctctcccacaattgaattgctccgtgccgagtcggactgtcttcctcccgaatgg

SEQ ID NO: 87424 - DNA, 533 bp, Heterodera glycines
ttattcttcctattcccccggtcactttgttgctgcaaatgtcttcagaaattctttggtctactgtttttcttctattggtcgattgtgccaccattcttttttggttcttttttggccatgtcaaaaaacgacaacgcccacataaaaacgaaatctttatctgcggcgactgttggcttttggtgttcgattttcttgcgccttctcaactcggcctcgaaattgcactgatcaaccgccgctttaactgcatcgtcgacgaacacttcaagacacgcaaatggaaattgggctgcatgcgaatttgccacaaaattggagaaaatggcactaagcaattgcaaattgtcaattccgatgcaaagccattgccaattccgcaaaatccgttgcccaacaaagtcatcggattcagacacattcagatccattacatcgatcaaaatgtcatcgcatttctccgccgttttcaccgtcgtattttcgatgtttgttcaatggttttgtacattcacacagacaatgaccgc

SEQ ID NO: 87425 - DNA, 473 bp, Heterodera glycines
catgattggggagctgaactcgatcgctgatttgatttccaacttctttttggccgcttttgccatcaccaattttgcctgtttcgatgcgtcggccgccaaatcgcccggcttccggcccggctttcgtttctacaacaaatggctgtcattgttcggctcggcactgtgtgtgcttataatgttcgtgctgcattggcccacttcgttggtcacatttttcgtgttcattgtgctcttcgtgttcatcaagcacaacaaatcgcacatcaattggggcacgtccaccgaggcaaaccgttaccggcgcgcactgaactcgttgctgaaaatttcgcgcacggaggaccatgtgaaaaactacaggccccagttgttggtgctgagcgggaacccggtggcccgtcaggcacttgtcgactatgcctactgtatctcaaacggtaggagcttgcttctgtgtggacacattg

SEQ ID NO: 87426 - DNA, 321 bp, Heterodera glycines
  unsure (1)..(321): unsure at all n locations
cagaaaatgggaaaatgtgtgggaagaattgagtgctcgacagaacccaattgacattcggatcagagatggcggattcgacgacggtcttcccgacgccgcttctcccgggccaagtggacagcagtagaaatgaattaattaattgatgcgattatatgaccgaaatgatgttggcactttgccattaaatattgcctaattgtttgtttgtatttgacctttgcttgttcgcaaatgtgtccatttccattgtattccatgtatatatgtgaaattcattgggagtaattaattaatcgttgataaaatggctaatna

SEQ ID NO: 87427 - DNA, 599 bp, Heterodera glycines
  unsure (1)..(599): unsure at all n locations
caatttcccgatcatgtcacacatgtacaaatacatggaaaaagcaggatggcaaactgagaatagcgaattatttaactaccaaaaacaaatattggacaagggagtgccagaactgttctcagcagtcattaacgacaaaaatgttggaaaagctggtgcatacaaggaaaagcataacgaaagttcggatattttctcaaaagtttatgaaattgctgatcaaaaattcaaggaccttttcaagaacaatgcatttcctactctggaaaaattgttcggagatgcaaaagctttgttcgtcaacacaacgcctttattggattatgacattggcagtttgccaaaacgcgtcaaattcattggtggcattgatctgatgcagcccgatcacaaggatgctttaccgcaagtttttgggcaaccaaaaccggtgatcgtgttcagcatgagttctttactagaaccatccaaaatgccattggacaaatttaagacggttattcaaggacttggaatgtgtgaaaaggaagtgatttggaaatatgcgaaacaggaggatcatggtcggatgtcactcttgcanaagcatgctccta

SEQ ID NO: 87428 - DNA, 545 bp, Heterodera glycines
tggcctttttcttctggcttccttatacttaacctataatataatgggctgagtcggaagcgaaccaattgtccatttggtatgacattggcggaattgtcggttctgtgcttggcggattggcttcagaccgactcggtcaccgcagtcccatcattctcctgatgcttgttttgtccgttccgttgttgttcatctactctggccttggttcctcgcgggttgagcacgttattggcatgtctttgctcggagtgaccatctcgggcccatacaatctcatcgttggcacaattgccattgatttgggttctcagcaagccttggccaacaatgctgaggccctgtctaccgtaactgggctcattgatggcattggctcggctggctccgcattgggccaactttttgtgccgttgattcaaaatgaacttggatggatttgggtcttccatttttttattttaatgaactttctttcatccatgtgccttatccgtcgtttcttccacgacgctcggctcatttccctttcgtttgctccg

SEQ ID NO: 87429 - DNA, 506 bp, Heterodera glycines
tcatcgcaccgccgttccgcgcccgggacgaggccgaattgttgctgctacccttcttccctgtttcggtttcactcagctgaacatggctttgctgaacgggtccaccggcgttgtgctcagcaaattcgagcagaattccttttgccgagtggtggagcaatacaggattcgccttttgcttctcgtccctcccattttggtgtttttggctaagagtcctttggttgccaatttcgacatgtcccatgtccgtgccattctctccggcgccgcccccgcgggcgccgatttatgcgaagagctgaagcaacgttttccaaatttacagcatatttgccaaggctatgggatgaccgaaatgtgtgttgccatcgctttgcccattttggacaaggaacggcacgaatcatcgggcaaactgctcgccaatttggaaatgaaggtcgttgacttgttgaccagaaaagaggtcgagttgggaatgcccggcgaactattcgtgc

SEQ ID NO: 87430 - DNA, 433 bp, Heterodera glycines
accttaaatgttttggtttcgtttttccattttcttttctttttgacctttttctcttttttcttttacattttcggcgcttcaccgaataaaattcaagcaacgcctgtcgatgccaaaaaaatggttgagagcagaataaaatgttacgtgtgcaattccgggacgaaagggcaagccgactgcactgaggacgaccacgacaagttgaagacgttcatcaaacaatgcaatccgttaacttttgggacttttgccggagaagaagcgaaggcgtgccgaaaagtgcgccaaacggtggaggacgagacgaccatcgtgagggaatgcgcttacacgggcgaggagttggacggaaagcgacggaccggcaacaaaggggtcacagtgctcatcgaccagtgcatcaacgaccaaaatgcgacctttccct

SEQ ID NO: 87431 - DNA, 305 bp, Heterodera glycines
  unsure (1)..(305): unsure at all n locations
ttacaataaaacacacaaatcaaaatgttcttcctttgccctcccattgttcttcttccatcggcccttttctgcgtcgcttcccatggcttaacaaatcattcgaaagcatttggaaatgaaagcgaatcgaatagaacggacttttttggcactgaacccatggaaattccctgtcataaaagtgccgacggattcgacccaatggtggacgacgtattcgctttgctttctgctggagaagagggggaagaggagggaaatgggacgaaggtgggaattacggtggaggaggaggaggaana

SEQ ID NO: 87432 - DNA, 612 bp, Heterodera glycines
taggagaaggatgaggacgggctttttgtacatagtctatgcaagtcagcacgcctttggatgatgccgcggcacagaaaacagcgatggatggcacggggggcggaggagaatggattgataaaagtgtaaatacctaaatacaaaagcgccaaaagaagctgtgtctctctcacaatcagtgtattattattattatttctttttgtccgccatctttttctccctttttgtcctccttttttttcctctttgtgtctcccatttctttcctttttccctctcctttcctcaacttttgtgtattttaattttaattttttgtctgttttttaattaattagttaatttttttgtcggaactttcgttcattgtgtgtctgtcctctctctctaattataatccttcatcttctttgttctttaatctgaatctgctaatttcgtcttgtaaacatgcattttcatcgtcacgctttaaacagtcaattttacgactgactgattatgaattaattggtgttacattttttaccatggaaaatcgtcatcttgggatagacacacccaatcattttttcttgctatattctgtcacaatattgtttgtgt

SEQ ID NO: 87433 - DNA, 107 bp, Heterodera glycines
gatggatgtttctgctgtcgtagatgaacctctgccggaagaacaaccacaacataagtaacagcagcaacaacatgttgttggtggaggtggtggtggtggtgaac

SEQ ID NO: 87434 - DNA, 713 bp, Heterodera glycines
gtttatggacgtgtttcggcacgggtcgtggactctggaagggcttggctgttttcatcaatgatgaaaagttcatgactaaacttggccttacgactggcttcaagggaaagacattcatcgtccaaggattcggtaacgtcggcttgcactcccaccgttatttgcacagagatggtgcaatttgcatcggagtacaggaatatgactgcgcaatttacaatccgaatggaatccatcccaaagagcttgaggattggaaaatcgcaaatggttcaattcgcggctttcctggagccaaggctttcgagccattcaccgacttgattttcgagaagtgcgacatccttgtcccggccgcttgcgagaaagctattcacttggggaatgcacatcgtattcaagcaaaggtcattgctgaggcggccaacggaccgacaactccggctgctgatgcagttttgatgaacagaggcgactgtcttattgtgcccgacatgtttatcaacagcggaggtgttactgtgtcgtacttcgagtggcttaagaatctcaaccatgtctcttttgggcgtctgacttttaaatatgagcgtgactccaactaccatcttttggagtcggtgcagaagtcactcgagcgcaccttcgaccgtgccgttccggtggatcccagcgaggagttccaattgcgcattgccggtgccagcgag

SEQ ID NO: 87435 - DNA, 501 bp, Heterodera glycines
ggtttccctatgaatatgtttatccggagcacttttatacatggaacaactgaagaaagtgttggatgcgccagtaagcagttgggagtgttttcgggccattgtttgcttgaaatgccttccggaactggcaaaactgtttctctactggcgcttgtcgttgcttatatgagaaagtatccggaaagactccacaagctgatttattgctcacggacaattcctgagatagagaaatgtgtcgaagagcttaaaaggctgtttcgctattataccaatgtcaccggatccgcccccgatttccttgccctcactctctccgctcgtaaaaatctgtgcatcaataaatccgtcgtcagttttcggtatggttcggccgtcgacggagcttgtcaacgtttgacggcgagttacgttcgggcgaaaaggcggctgaatccgaaccttccctgttgttcctttttcgaaaaatttgacgagaaaagggacatgactttgccg

SEQ ID NO: 87436 - DNA, 480 bp, Heterodera glycines
cggcattaagccggcttctgtcgctggcattctccagcgctatgaaatgcaacagtttcggctgagttgcgccaatttcgagtcggaatcgagctgttgctcgacctcacaacagatggagataattgtcgactccgagtcggactccaatctgacgcggtgtccgtgttgtcgctgtgcccaagtgaatttgatctgtgccaactgtctgaacactaatgttgtccgaattggcaaagtgcgggaggacaaacggcgtctgttgaggagcaaaagtgccatttgccatctcatccagaacgcactcgccgacgaaatcaaattcgagggtgaatttcaccagctcagtcgctccattgaagaaattcgggcgaaaattgcgcacaaaaaggaccaagttggacgacttagaccgcgcatttcgcacacggaaagtcaaagtgagcgcaatcgacagaatgtgctccttctcgagaagaa

SEQ ID NO: 87437 - DNA, 422 bp, Heterodera glycines
  unsure (1)..(422): unsure at all n locations
ctcgcccgcgtggcgttggggcngcgcgagtcgcgacagtttgagactgaaatggccacctggcgattgagtcgatgcaaaaatacaataacactccgttcgattacgtcggcttctctttcccgtggttcggcattcattttttggaaccgttcatcagttggagcggaatattgcgcaaagacccgctaattatactgaggaagcagctaatggacgaattaaaggcacgcaaaaagctgagggaaagcggagaacaacagcagcagcagagagcgaaagtcgacttcattgacctgtttttggagacggaacagaacgaacagcagcagctgacggagcaatgccaaaacgagggcgaagcaatgctaagcaaaacggcacttcagagagtagcaaagcggtgcactttggaagagatt

SEQ ID NO: 87438 - DNA, 476 bp, Heterodera glycines
gcaaacgctcttcgaataaccctaatctctgtccacaagcaattcgatgtctgacacctacggcttcatcaacaatatctcagatcgtatatcacgacgcgtacgtcgcaagcgcccaacggagtctggggtttctggtgtcagcggcgcaccgccggagactcggaaggacgacaaggcgaagggcggctgctgctccaaaaagtgcgcttgcatcatcgtgtgcagcattctcacgctcattgtgctcgtcatcggtggactcgtcctggccgctgtcctgacgcctgaaacattcaaaaatgctcctctgttgagcctcatcgcgggcaaaaagaatgggggcgcggatggtgagggggaggataccaacgactgataagcgactctgttgtcctattgtgtggctatattgttcaataatctgtatctgatcttattgtacacacattatgtttgggataaagaaagtacat

SEQ ID NO: 87439 - DNA, 522 bp, Heterodera glycines
atgattgaaattacgcaatggaacacgagatggagacggacacgcagctgatccgtggcctcgtgcttgacccggcggccgacacccggacatgccgaagagtgtgcgaaacgtgcacattttgacatgcaatgtttcgttggagtttgagaaaactgaggtcaattcgggccttttctacaagacggcggctgagcgtgaacgtttgctgcaagcggagcgtgaatacatcacgcgacgagtgctgaaaattgtggaactgaaggagacggtctgtgccggcggagaccaaggctttgtggtgattaaccaaaagggcattgatccgccgtcgttggatttgttggtacagcacggcattttggccctgcgacgtgccaagcgccggaacatggaacggctgcagttggcctgcggcggcgaggcggtcaattcggtggacgacctgacgcccgatgtgctcggatgggcgggcagtgtttatgagcatgtgctgggcgaggacaaatacacttttgtgga

SEQ ID NO: 87440 - DNA, 556 bp, Heterodera glycines
aaatttccttggctttcttttctctgtgtttatttgcatttgctgaagtggcagccgaccgggtcctccttcttatagacatcccacaattcgggaatcgcactccgtcttcatcaaatccctcgaagagcgtggccactccgttattattgccatggctgatgacccaaacctttcgcttatcaaatttggcgaatttctctacgaccatttgatcattttcgcaccttcggtggatgactttggtgggaatataaacgttgacgagatcaccaaattcattgacggtggtgggaatgttctcgtcgctgcagacaaaaatttgggcgatgcgattcgcgaccttgcagcggaagtgggctttgagttcggggaggaccaatcgatggtcattgaccaccgcaactacgacactgttttggacgatgggtcgcacacgaccattgccgtgcccaacgcacaactgatcaaagcgccccttatcactggcgaaagtgcgcttttggctcccgtcctttaccgcggcattgcgctggtcgcggatgaactgggccct

SEQ ID NO: 87441 - DNA, 584 bp, Heterodera glycines
ccgctggagttcttgctaagctgactttacatgttgacgctgggcaacgcgctgttattttcgaccgttttaccggagttaaaccgaatgttactggcgaaggaacgcattttttgatcccatgggttcaacgtcctatcatgttcgacattcgctcgacaccaagggctgttaatactatcactgggagcaaagacttgcagaacgtgtcgatcactttgcgtatcctccatcgtccagacccatcaaaattgccacaaatctaccttaacattggcacagattatgctgaaagagttctgccatcaattacaaacgaaattctgaaagcggttgtggcacaatttgatgcccacgaaatgattactcaacgtgaatcagttagccaccgtgtgtccgtcgaactcgcagagagggccaaacaatttggattcattcttgatgacatttctatcactcatttgtcgttcggtcgggaattcaccgaagcggttgagatgaagcaagttgcacagcgagaggctgagaaggctcgctacttggtcgagaaagctgagcagatgaagctggctgcaatcacaacg

SEQ ID NO: 87442 - DNA, 517 bp, Heterodera glycines
cagcacccaccggttctggaaaaacgctctctttcgccattcccctcattgtccgtgttttgagcgcccgaaaagaacgttcccctgccaatggacaacaaaagtgtgccgacattcactcactgtgtgccgttgtgattgagccgaccaaaatattggccaaacagacctacgaaaactttgtgagattctgtgatggattggacataaattgcgaatatttgcgagagaatggaattggagataaatgtgacattttggtgaccactccaaatcgtttcattttcgcattggaaaaactttcggacgatggccaaaagagggcgaaattagtggagaatttgcaatggctgcttttggacgaatgcgatcggatgttcgaccggacggaaggggaggcgagtttccgagtgcagctttcgaaaattctccgcctttgcaatggaaaggaaactcgtcgcggcttttacagcgccaccttttcttatgaggtggaggaatggtgcaaagaacattt

SEQ ID NO: 87443 - DNA, 563 bp, Heterodera glycines
aattgtgcttacagtgtcggagtttgtatcgtagtggcagtggttgcctggggcattattcgtagccattgggcggttcaaacacgagtggcattgttactgtgccggttcaactgtattcctcatccatcctgcacatatggctgaaaacgcgttcggccactcaggaagtgccagcccggatccgactccggcacccggcaatggacaatgtgacgctggccaaaacggaccagttcatcgagtacgagttccacgagttagcacttctgcttgaaggacccgcaaatctggaatgggccaaagaagacacccgtgtctcctatatttacgtgttcgagccggacaccgttttggagcgcggcattcgtccggcattcatttcaaatgcggcacgctttccggacgtgcgcgaggggtaccattttcgtccgccgttgggatggatgaacgacccgaatgggttcagcaaatttggtgatcactttcatctgttctaccaacattacccacatgcgttgcattggagtgccatgttttggggtcacgcggtcagccgagat

SEQ ID NO: 87444 - DNA, 540 bp, Heterodera glycines
taagaatgaatgtccaacctcctcctaccgccactcattcgcaaccgacaattttgccgatgccaattcagaattggtcccatgaattgggcattgaatttggggacgtgctcatcgctgatttgctgcgtcgtatgtgcagtcccgatttttcctcgcctttggcgccctcagctcgttggcatgacatcccattcttcgagcagttccgcagcgatctccaattccaatggactctgctccgatcggtgctcgtcgggggcaatcgtgggaaattaaatgccaaactgttgtccatccttttttggactgtgtcggatcgcgaggaatggcaaaaacgaacggttgcccgactcatttatgcggcaaaagacgacaaagagctggccaacctggtctccctcgtcattgctgtgttgccccaactttgccaacaccgacaacagtcgtcgggtgaacttggtctgatgagtgctgccattttgcttgctttggccgatgcccgtcgctttggcaccgaatgggaccaatttgtgatgg

SEQ ID NO: 87445 - DNA, 606 bp, Heterodera glycines
cgcggcacagtaataaaatataaaagatccgaaaaaatgccaaacattttcaaaatccttctgattgtgcttttggccgtcgtctcattccgtctctcggcttctactggtgacaaaaaaactgctaatgatgggagtggaaacaactcatcagctgggattggtacgaagatcaaaagaattgtcaccgctggactgctcttcacttccctggcgacgggtggggcggaagcgattgggcgaagcaatgctcagggaggaaatgccgccggattggtgccatcgcatgtgaccaatcgctcaatggctccaccacctcctcctgtgcaatttgaaatgggggcaaatcgattagaaaaaatgagggcacacctacgcgaacttgctgagaaaatgccggtcaatgaatcgaagcgtctgtcaccgagtggacccgaccctcatcatcattagggccatggatggatctaacggaggaagaaagaatggatgcttagttttcagattttattctatcctcttttatttattagtttttcaaaacaaatttcttccacaactttttaaactatttgttgttttgaatctttttagataaatctaaac

SEQ ID NO: 87446 - DNA, 658 bp, Heterodera glycines
  unsure (1)..(658): unsure at all n locations
caagtttgagcgcatattaatttatttgtttaccaaaaacaacaaaaaaaaatgatcgctccattgatcaccatcattgtcatcacgtctttggtcattggtggccatgccttctcggccgatttgacggaaattgtcgaaaatgccaacgaatatgtggagaaattggatcaggagttcataaccgcactggacgttggcccgtttgatcattacacaggcccattgggcaccaggcccgaacccattacagctgtaatggcgggtggttatgcatgtggttcggacgaggcacccgggtcgaaggctggttcgatcgctctcgggttactttgcttcccacttatgggtctctttcataaatgttgtgaggaccatgatgcctgctacgacaagtgcggagccgtctttggcgactgtgaaggcaacttttgcgagtgtttgacgtggtcactgttgatgggtccacattgtatagttgtggggctatcgcattgtaccgctaccacctatgggggacgcgccgcatttgacaaagcacagaatatcgcctgctgcaaggaaaagttgagcccatgccttgaccagcaaaggacctgttactcanagtgcggcaaaacgaggcaaaagtgtgatgatgagtgcaacaaatgcgcag

SEQ ID NO: 87447 - DNA, 535 bp, Heterodera glycines
atgctgggacgcttaatctttcaaatcggtgaacaatccaatcggagtcactcgaagagcgatcacaaccagcactttctgttgagaaaaaggagcgaccaaaaacagcaggaatgattgacatgggtggcgcttctgctcaaattgcctatgaacttccattgggccattccgatgctgcaacgggtgggcaagagaatgttcagctgctaaacctcggctgtcgtgacgacgaatcgcgtttccgtttccgattgttcgtcaccacttttcttggcttcggagtcaatgaaggagcaaaagcatacgaaaagtttttgtggaagcggttgaacaacaaaagacaagcggcaaattcgaccgaaacggacaatggaaaagacggcgcgaaagtgccgactgtcgttgacggatgtttgcctgtgaatatgctgaaattgagccatgccgaggagaattacgaccaattcgtacgaaagggaaatggcgactgggattcatgtgtcagcgacatcgcttcgctgctgttcgagtc

SEQ ID NO: 87448 - DNA, 523 bp, Heterodera glycines
cggcggttacgtggtcgaacttcctcaaaatcccacgaaaattaccttcgtttgtgggccaaatcgctgaattgcccaattgtttcaattgattattctcttgcaccggaacatcctttcccacgcccaactgaagaagttctgtatgtctatgcttggatcctcaacaatcccgaaaaatttggatggacagggagtcgcatttgtatggtcggcgattcagccggtggaaatttgattgtttcagtcaatttgaaactcgtcgaattgggcgtcaaacgaatcccggatggtcttgtgcccatttacactccgtttttgttccaatatttgccttccccgtcgcgtgtgctttctttcatggaccctttgcttcacatgggcgtcgtcattcgttgtgctgccgcttactcgggttcgtattctgacgaggaactcgacaaaaactgctctttccatgtcaaatcggactcggctgttggaaacggccatctgtcactgcaagactatgtgaaccgagttc

SEQ ID NO: 87449 - DNA, 526 bp, Heterodera glycines
acgcggacgaactgaagaaattcccgtcacttacggatgcgtttaagaagaagaggggcaacatactcaatttcgaggaagaggaatttgacgagatcatcagcaatggcaccagcaagcgcgacaacagtccgtacaccgaccacgactacgcaggcacgcgccaattggcgacggcgaagggagcgaccggcaaacaccaacggcagaagggcggcggagggacggcgaaagagccgaaaaagaaaacggcacttgtcaatgggaccgattcggtggtccgttcatcggcacggccgcaccgtccgaccaaacgttttgtagaggaaacaaacgaatcattcattcgtgggacttcgaaagtgcgccgaacatcgccacgcaaacatggcaagaaatcgactgcggagggaggaagcgaaggggaagaatcggaggatgacgggaaggagtacagcgtggaaaaagtgttcaagaagcgtgtgaagggtggaaaaatggaatactttgtcaaatgggctgggta

SEQ ID NO: 87450 - DNA, 505 bp, Heterodera glycines
ttaagattttttaaatatttctattgactttcttagtctccatgtatatgacaacaaacagaggcatggcgattggttggaagcttttgacccgagacaaatggcatctttcttctttgtcctgctccctattggcattcgctgaaggaatgtgccatcgaaattccgtagtgcagaattcaagaatttggtcacagaattggtgaatgccttgcggaactgcgcttcggagttgctgcctctgcctgatgaagcacagaaactaacgctgaagaatattgaacatgataaattccgcatgatggatggacgaaccgccgatgaggcgatcgttgccactgtgagtaaagttggcgagaatattcaactcgcccgagcatctgtcatttcttcttcaccagcgaacaaactttttggtcaaacccatccaaaagaggaatttaacggcgttcaattgggacgttttatttcgttggtgtctttgggtcacaaatcggatgagagt

SEQ ID NO: 87451 - DNA, 548 bp, Heterodera glycines
tttttgactctgtccgttttagttggcttcgtccctttactttttcttccgcctttgtgccgcgtgcactgtcatggctcattttgacctcgtcgttctgttcctttgctgctttgaacttgtccattccgatgtcttcggtcccttcgctttgttttgcctttgttccttcgcttcttccgccactcttttggctcattttgcgcttctccgatcgtcggatctgttccaaatttcgtcttccgattttgttgaatattgccgaacttttgtcacaattctcgcgtttggttacgcttttactccggtgataaggacattgaccacttcaattagtactgacaccatttacgcctgtgccattctgctctttttcgccagtctttttgtccacgactacggcataaatgtgccggtgttcgttcgtgccaatgttttattttctttttaacgatggcattcccgttttagcgtcagtttgcctttgtcggcaaatctttgcctcgccgcttccgtttttctgatttctcgtctccagtccgaccttg

SEQ ID NO: 87452 - DNA, 369 bp, Heterodera glycines
  unsure (1)..(369): unsure at all n locations
cctccgatgggctccgatcccccggccgcggtcacttcctttccctccgccggttcggcaacctttccgtcgcttcacaatgcccgccacaattgcatctccacgtgccactacccttgtcattctgccgtgccctcctcctcctttacctcctnctcccatccgcccgtttccaacgggtgccattctctttgctcctcaaattctgcccagacgcaggcccaaacggagttttaacgcattcaagcagcttctctgcgatcgacgcacgaccaaatgagggcgtgtattaacattgatttgttaataacgtgtcaaagggaagtgaactcttcgcgaatgaccgacaggaaagcgccggtgctttac

SEQ ID NO: 87453 - DNA, 545 bp, Heterodera glycines
  unsure (1)..(545): unsure at all n locations
agcaccccatcctgctgtcctggcagccacatgttgtttcgatgatgaaagatccaccggcacattctccgcttcgatgccaaagtcttcgctttgtctgagtgccgaaagagtcgccgctgcgggggaaaaccaactgaaaacaatttggtgccctggcaatggtggtcaaacactcatcaacgagatcaacgcagctcaatcatcatctgatgagtgtgctcgctctctcggcttcgtccgtgccatgttcgaaattgccgcttccgccgcttcccatgtcggtgccaacgccgaattggccaatttggctgtccagttccgagaacaagttggcacaattgacaccaactgtgctgcgctgggcattcatgttgggcaaatcagcttgggcactcccaaaggagaccatccgcaagtgcatgactctgagagtgtgcttagtaaccctggcaccagcgggtctcacaagcgcatttaagtgcattgcgacgattccgatgatgtcatcatttgttgattgatatgctatagaaattatntta

SEQ ID NO: 87454 - DNA, 618 bp, Heterodera glycines
ctgctgtatacaaatgtctttccgtctgctgggcattctctgcgttcttctcttcgtggcgcaactcacaaacggcgatgcagcttggaacgatgccaatgatgtgaaccccttcaaaggtcatcaggaacgcgctctggcattcaacgagaaactcaagcatgcggaagagaacacacccgaaaatgtcagccctacgccgacgccgtccatcaacgctacggagacgcctgatacgaacgcgacgatgactacctccgaggtgactggcacgtcgaccgaaggcccaactatcaagacgaccgcaaagcctgctccgccctcgaccagcagcttccaaatgacgatcctcaatatcgtcttaacgggacttatcgccgtgattcttcttgtcgacatcgtcctggctgtggtcaagtgtaagaagtaggaagaactgaaggaagaaggaaggaagagccgacctaccgctggtgtaaacaattgctcgataccaaataatctgtgtggcctgttcatcgtgatcttttatatccatgtgtcttgtttggagaccgtattctccctattctgttgtctaattgtatgtatatatacctataaacgatgtgcacgcaa

SEQ ID NO: 87455 - DNA, 634 bp, Heterodera glycines
cacgcggcacagtaataaaatataaaagatccgaaaaaatgccaaacattttcaaaatccttctgattgtgcttttggccgtcgtctcattccgtctctcggcttctactggtgacaaaaaaactgctaatgatgggagtggaaacaactcatcagctgggattggtacgaagatcaaaagaattgtcaccgctggactgctcttcacttccctggcgacgggtggggcggaagcgattgggcgaagcaatgctcagggaggaaatgccgccggattggtgccatcgcatgtgaccaatcgctcaatggctccaccacctcctcctgtgcaatttgaaatgggggcaaatcgattagaaaaaatgagggcacacctacgcgaacttgctgagaaaatgccggtcaatgaatcgaagcgtctgtcaccgagtggacccgacccacatcatcattagggccatggatggatctaacggaggaagaaagaatggatgcttagttttcagattttattctatcctcttttatttattagtttttcaaaacaaatttcttccacaactttttaaactatttgttgttttgaatctttttagataaatctaaaccccaaaaaaaaaaaaaaaaaaaaaaa

SEQ ID NO: 87456 - DNA, 189 bp, Heterodera glycines
cagcggacggaactttagcactcaggcggaatggctactcgaaacggacggaaccgcacttctgagagtgctaagcgagccggacgtcgatttcattcgtacacacagcaatgacatttgtgaaatcttcgaggtgttgggcattgaagctgtccgcaaggcgattgagcgtgagatgaaccatagtga

SEQ ID NO: 87457 - DNA, 533 bp, Heterodera glycines
tctctctactaactgttgcacatcccaattttatttcttccttagtaagtagtattggtgcacaatgcgcacttttctgttcatagctgtagtcgggttggtgttggctgtcatcatggagagtgtaaatgcgactgggaataattcgccgacaaaggggcaaactccgcctggcagtccgaaaggtgggcacggcagcaacaaatcgccaacgacgccgcacagtgccggttcgccacacggcacgcagcatggtaaccaacagaaccatgctgccggacaaacgccgcctggcagtccgaaaggtgggcacggcagcaacaaatcgccaacgacgccgcacagtgccggttcgccacacggcacgcagcatggtaaccaacagaaaaatgctaccggacaaacgccgcctggcagtccgaaaggtgggcacggcagcaacaaatcgccaacgacgccgcacagtgccggttcgccacacggcacgcagcatggtaaccaacagaaaaatgctaccggacaaacgccgcctg

SEQ ID NO: 87458 - DNA, 476 bp, Heterodera glycines
  unsure (1)..(476): unsure at all n locations
cagcgcattggggccggagcgcctgtctatatggcatcggtgttggaatacctggcggccgaagtgctcgagctggccggcaacgcggcgagggagaacaaaaagttgcgaatcaccccgcgccatttgcaattggctgtgcgcaacgacgaggagttgaacaagcttctcgcggaggtcaccatttctcgtggcggtgtgttgcccaacattcacacggaacttttgtcgaagatgcagcagaagaagcagcagaacgacgacagtcagtgaacggtggaagaagaaacggacggatagaaaatgaatgatcccaaatatctctcctctttaatatgccaacattttgttcccaaacattttttccgatcattgaattccttttgtttgtttaaagttgtgtcctctcttcacttttttgagtaatattgtgcctttcttttgattgtttgtgccttttatgtaataaaatgtnc

SEQ ID NO: 87459 - DNA, 533 bp, Heterodera glycines
caattcctttgcataatgcaaaatttgtttcccggcaaatttggtcaagccgcgcaagcggccaacacagcccaaatgcaaatgaaagcggagcatgaccctagcgcaggatttccgtggtgggttcgatttctcgccaagggccttggcatcgtcggtggttttgttgccatatttttcggagtccttgccctcttcaccatccatcccatgtgcatggtcgcagcgcttcttcaactcgccgctggttttttgaccattgcccttgaagcgcccttttgctgtgctttcgtcgatttcatcgaaagaattgctcaattttccgagtcgcgtgcgtattggcaaaaggcagcactttatggcgggatgggtatcgtccccattttgctgtgtgccgggactgagactattttgggtgccgggatgatatgcgcttcgggcgtcgcctacggttttatggcattgggaaagaaggctgaccgtactacgatgttaggcggtgctaataccgctggacaggacccggcatggag

SEQ ID NO: 87460 - DNA, 607 bp, Heterodera glycines
cccgagaaatgggacatgaatacggtggttccaccaatttcactggcaacaacatataagcagcaatttgctggaatgcccaaaggtcatgattacgcacgaggcggcaatcccacccgtgatgtgctacaacaaagcattgccgcgctggaaaatgctcgtcactgtcgcgtgttcagctccggactttcagccacagcagcaatggcaaattggcttcattctggcgaccacattattgcgtcggatgatggctatggtggcactcaacgctattttcggcaaatctctgtccagcatcatggcatggaattgagctttgttgatttaacgaaattgtcaaacttggagaaggaatttaagccgaatacgaagatggtgtggtttgaaacaccctcaaatcctcttctgaaagtgatagacattgaagcagtgtgtcgtgcagttcagtcacgatcaaaagaatgcattattgtagtcgacaacacgtttatgacaccgtactttcaacgtccgttggaacttggcgctgatgttgcgatgcattcgttgaccaagtacatcaacgggcacaccgatgtgctgatgggtgccatggtgaccaaca

SEQ ID NO: 87461 - DNA, 447 bp, Heterodera glycines
ttggcaattccttcgttcggtggaatacttcgctgagaatgaaattgacaatttcgccattctgtttgtggcattgtttattgccatcgctgaagcagatggcaatgtccgggcaaaacgccatgaagaacgattgaagcgccaagacaaccgagctgatgaggagaaccgccaggtagacagtgctgatcgggagaagcgccaagacaaccgagctgatcgggagaagcgccaggaagacagtgctgatcgcgagaagcgccaagacaaccgagctgatcgcgagaagcgccaagacaaccgagctgatgaggagaaccgccaggtagacagtgctgatcgggagaagcgccaagacaaccgggctgatcgggagaagcgccaagacaaccgaactgatcgcgagaagcgccaagacaaccgggctgatcgggagaagcgccaaga

SEQ ID NO: 87462 - DNA, 386 bp, Heterodera glycines
acaaatgtctttccgtctgctgggcattctctgcgttcttctcttcgtggcgcaactcacaaacggcgatgcagcttggaacgatgccaatgatgtgaaccccttcaaaggtcatcaggaacgcgctctggcattcaacgagaaactcaagcatgcggaagagaacacacccgaaaatgtcagccctacgccgacgccgtccatcaacgctacggagacgcctgatacgaacgcgacgatgactacctccgaggtgactggcacgtcgaccgaaggcccaactatcaagacgaccgcaaagcctgctccgccctcgaccagcagcttccaaatgacgatcctcaatatcgtcttaacgggacttatcgccgtgattcttcttgtcg

SEQ ID NO: 87463 - DNA, 515 bp, Heterodera glycines
ataatcgtgctttgtttttaattgcccattttattgttgcgcttttgtcgttaattggttgttcaaaacatcacaaatgttttttgcgttggactttgttctgttcggcttgtttctgctcctttctctgttggtcggtctttggcacaatttgccgcgtttcgtccggccgtccctcgccgcttcttcgtccaacaaaagtgaccccaccggtgacccgtcgaccctcaaacattcttccgccaatgatttcctcgacggtgggcgtcgtctccccgtgctccccgtgtgtctttcgctgctcaccactttcgtctccggcattggccttctttcgacgcccgctgagatttattcgcgtggttcggcctttgctttgttcaatctttgcggctcttttgccttcgctctcatcggcatcttcttccttcccatctttttcaaactgaaatgtctcaatgcgtacgagtacttcgagcttcgcttccagtcccagtctctgcgtcgtctggcca

SEQ ID NO: 87464 - DNA, 563 bp, Heterodera glycines
  unsure (1)..(563): unsure at all n locations
cagaagagaatgaaaaagcacgacgggtgaaagcgaagaaagcggggaggagggagaagcattcgaccttgatgaatacatcggaagaggcggattggaggacgaggacccaaacaggtatatagcaaacactgtagcaaaagtgccgaaagaggctgctgagaatgagtcggatgaaattggcattttacggactcgtacctatgacttacacatcacttacgacaaataccatcaggttccacgcttttggttgattggctatgatgagaatggcacgcctttgacggtgcaacagatgaaggaggacttctcacaggaccacaaggaccgcacaattacgctcgagtcgcacccccacgtggtcaacctttgcctggccaccatccacccgtgccaccatgcctctgtgatgaagcatctcatcgagcaatactccgagagcggcaaagaactgaatgttctcgactacctgtttattttccttaaatntgtacaggccgtcattccaacgattgagtatgactacacgcgatccattcatttctaattttatgggactt

SEQ ID NO: 87465 - DNA, 529 bp, Heterodera glycines
taggcttttgcctaaaaatcgaagccctaatactaatttatttattcttaaaaaatctgattttttgacgacggttcagtaccgaagccatttggccacttcacggtccaaagcgctttccgcaaaaaaattcatatcgtttttagagaccgagaggagtcgaatgatttatcatttgttagatttggtgaggtacaagtatccttgaattttaaccccaactcgtttttacgtgttatatggaactgtctaacttctcgcttttgcactcctacataaatatataaacaaaaaacgagttggatttgtaccgtttttcaggatagtgtgttaagccaacaatacaaaattccttttttaattttgatatttaggtatatatcaacatacctaattatctgacctgcagttttagcagaatgggcattttaactgcttcgaaagtatgcactttgccacggctttcttccgctcgctctatgacttggtggtggggcccggagaaaaacaatgggcgcgaagttgttgg

SEQ ID NO: 87466 - DNA, 558 bp, Heterodera glycines
gatttggtacacccgccaaactcgtccattgcctccaacttcgtaacactttctagcacgaccgatgcgactattggcggagatttgaagcggtggtctctcctccatggcgtggactgttcgacaaattggccccactttgaggaatacagcgccgaattgcgacacttttccgtgtcaaagtcgaggcgaatgcaacagaaagagcagcaaaaaccggagacgggagtggtgctgacaaagaaagtggtgaaggacgaggacgagtcgccgcagaacggcagccgattcagaagttatttgggggaaggggcagaggacgcggggacaatcgcaagcagcggaagtggcggcaatttgttgcgaagtgccgccaaacaccattctatcgattcacaactttcggccatttcatcttcaaagtcggcttggtcaaagaatgagaagacttcacaaaacaatgccattcccacgggcaattgccaacaacgacaaaaatggacaaagaatgccgaaaccggcatgatactcgtggacaattcaaatttgacccaacaa

SEQ ID NO: 87467 - DNA, 347 bp, Heterodera glycines
atagtggtgttgaacccgaccttagagaatctccgagacggacgttcgccaggacattctcatggaccattccctacgctccatctcttacatcgccgacattggcgatttggttgttctgatggcccgtcgtgtgccttctcagcaagaacagacggaggatgaagctggcggagaaaccatccgaaaaagcccccgagtgatttgccatatattcgagtcggaagagtcggcattcattgcgcagtccattggccaagcatttcaagtggcatacgtggaatttttgagggccaacggaatcgaagacccaaattatttgcgagacattgactatcaggaagtgc

SEQ ID NO: 87468 - DNA, 542 bp, Heterodera glycines
cattctctctttttgtgactctaattccgtccgtcccttgccctttaacttccaccaatgcccctcgtgcacaattgcatcgctcgcactcgccattccctcttaattgttttgggcctcattatgataatggccaattgtggacaagcgatgcggcagcaggcggtggccgtacgtggccaactccgttgtgggaacagacccgcctcgggggtcaaagtgaagttgtgggacgaggacgacgggcccgaccccgacgacgtgcttgacgaggcgtttaccgactcttctggctccttccaaatgagagggtcgacacgcgaactgacaaacattgaccccgtgctgaagatttatcacgactgtgacgatgggataatgccaggacaacgcaaagtgaaactgcgcatccccagccaatacatcacaaacggagggttggccagacgaacttttgaagtcggagtactcaatttggagacagtctttgctggggaggaaagggacttcatttgaacatggaggggaagaagaactggcga

SEQ ID NO: 87469 - DNA, 522 bp, Heterodera glycines
ggtttttttagcctcgatataagcaacaatcacttggcattgttgccaaaagtgagtctccttttttcgatatatttttcagttggcattattaaccttggatgttttgtttcttcaggagatctcttcgttgaaaaaccttcgcgaactttcacttagaaacaatttgctagagaatttgcctaaagaatttcaacgactgcaatgtctacgggaattgaacatttccggcaatttgttggagcatttcccgcgagaactgctccaaatcaaatctctccgtgtgctttatttgggtgccaatcgtctccagtctttcccgtcggacatatgccgtttgtccaaccttcaagtgctttacctgggtggaaatgcgttagtcgatgtgccggatacaatcgggcagctgtcagagttaacttcgcttggtttggcggacaatcggctggagcaaataccaaccgcaattgccagccttcgcaatttgcgaaatttggcacttcataacaatcgactgaagtt

SEQ ID NO: 87470 - DNA, 478 bp, Heterodera glycines
ggaaaattgaattacataattctgtggcttcgccggataacgcattaacgcccattccatgtcgtccatcctttggacgttgacgagctgttcctgcagcacaatcggtgtcgaaatgcacagcaaacaagtgattggctcttccttttcgttgttttcattcgcttcttttgtgttcatggccctcgtgactttggctgaacatcccgaattccttcggaggagaaggattcccttgcgtacctatcttcaaattgttggcattttcttcgtggtcagtttgctgaacaaccgcgtgctcggcttcggcctgcccttccctctgatcatcgtttttcgatcgagcactcttctcgcaaatgttctgctcagttggctgttgcaaaatcgcaccttttcccccgcccgacttttctccgttttattggttagcgttggcattgcgctttttacgccgttcagccgcaaaagtgccacg

SEQ ID NO: 87471 - DNA, 561 bp, Heterodera glycines
acatttgggccttactccattagcagaaatgctagcattcacagagaaaagaatcgaaaacgccctttctcaccgctggaaaatgaccttgggtcggtgtgttcaatcgccaaaattaaaagtccaaaaactccgcgtcatgcagtcaaaattctcaaaaaaattgactacgaagaccgtgcttcttgctatttggtgcaatggaattgcggaagtgcggaggaaaagggtccttcgacgacgtgggaatgggccaataagctgtcaccgaactgcagaaaattggccaaagtttttgagcaatcaatcgcaaaagacgcgaaaaaagcgtgggaattcaccgactacgaagtggaggccattttggacagaacggtgcagggcgaactgcgctatttggtcaaatgggttggctggcgagtgcccacttgggagaaggtcaaatatttgctgccggattacagcgaattggtggaacgctttgagcaactaaatgcgaaggatatacaattctggacggatacgaagaacacgggggaaggaaagagaccaatggaggat

SEQ ID NO: 87472 - DNA, 476 bp, Heterodera glycines
caaaagtcgattcgaccattgaaaagaagctgtcagatgaatacgctgtgaaaggatttccaactctcaaaatactccgaaatggccgaaggttcgattataatgggccgagagaagccgacgggatcgtttcgtatatgttggaccaggccaagccggccgccaaacggctcaattcggcgaaggaggtgctcaagttcatgtccccctctgatgtgacagccgtcggctttttctcctccgaaagcggcgctttttacgaagcttttgctgacgcggcggaaaggacgcgcggtgattttgccgttgggtacgccttgggcggtgccattgcgcagcattttggcgcaaaatttggcgaagtagtactcttctggccagagatattccattcggagtacgagcccaaacggaagattttcccacgagagacggccacaagcgaagagttggtttccttctggcgcgacaatgcc

SEQ ID NO: 87473 - DNA, 545 bp, Heterodera glycines
taccgtcgcccgcgaaattgttcattcgaatggttggggcactgagggcctttaccgtggcattggtgctaacctttggaggcacggcgtgtggaactcgtgttacttcggaatgtaccataatttgaggcttttcctttgctccatcccttcaaaaaattctcagtcctccgccgatcgtttagaaacggccagcttgaccgtgcgtcttacgatcgcctcactctccgcaattgtggccaatttggccaacattccattcgacgtggccaaaagtcgaattcaggggcctcagccaaccaccggccgactttacttcagcacttggcaatccatcggactgctacagcgacagcacgggttctgctccatttacagaatgctgtttcccttcgcgttcatttttggccctggcggtggaatgatgctggtcatttacgagggcatttacgaatggctgatcaggcgatccatggctttagaataaacatttctgccccttcaattcttcgaattctcatgccaattctaaaacgtgcacattt

SEQ ID NO: 87474 - DNA, 461 bp, Heterodera glycines
ggagaagaagatcccgtggtgccaggtcaccaagtctgctgccaagaagaagtgaagaataatgtcacagtatcaaaatttcaatgatgcaaacttatgcattgcttttaaagactcatatttaagttgtgtgtttttaaattgtttagccagtttagtctgtagttcttttgcttctgctagttctccgggctccatctccggtgtatgcgctcagaactgggtgctggacaggcggtggtgacacattgctggtttatgtttgagtcaattccgcctttttaaggagggatgttgagagttgaggactatttaattttcaagttttgttgcgtctgtcgaatggataattttttcaaccttatatatttggctttggagtatttttaactaaaaatacggggcggaaatgggaagaaaaacacgaagaaagaacttgaaaagcaacaaaaagcttgatc

SEQ ID NO: 87475 - DNA, 515 bp, Heterodera glycines
ccaagaaaaggcttctattgttacggagtcatcatttgtcactcctggcattttccgtcgtcgtaaaatgctcacaggcagacaactgaatgatgaaggaaacaatgaagctaaggaaaaaagcgcggatttcaaatggtcaattgaccaaatcgcaaagatacaacccattgaatttgatgagactgaggagttttcattgccacctgaaaattgggacccttgtgcaaaattcaagactccacaatttgaaaatattgatcacttttggactcacaacaacttaattgctccttcaccgggactattcgccacagcctctgctttacgtcgtgttcaaccgtccgccaattctccaaccacctcaccgtttcagctcgctctttctcctttcggttcgggtccttcctgctcatcgaaatgctctttgtccgattccacattcatgtccccgacaatgatgctaactcattcccaaatgtctgagtcgaccaaagcgaaaatgtttactgcta

SEQ ID NO: 87476 - DNA, 628 bp, Heterodera glycines
tattattgtgccccctttgtgacgtccttcgtaattgtgctaatttccaacaaaatgaaccgccgttggatttgcaatgatgtttggatggacatgttcccattttttgaccgtcttcaactcggactcaaattggcacttctttcgccacgtttcgaatttttggtcgacaaacatttcgatggcacaagcgaattgccaattttgaaaaatatcgtattgtgcaagaacaaagcgacagcggtgccagaattgcgtgtgtttattgacaatgccaattatgtgccctttccggtgcccgaccattcgctgcccaagaaaattcgttttatgcatcttcggatttgctacatcgaccattctgtcatcgcatttatccgtgccaatcagcaaatgttcgacaaaggaacaaacttggagttcttctatgtgtcttggaacgaaaccttttttgtccagcccatttggaatgctttgatccgccatattttgccaatttttgtgccaaatattcgccaattgaaatttccaagtgctgatcatctgtactgtttgcttcgtttcacttctccaaaagtgctctccgatctcaacattcattcaatcgatgctgatcgtctgttcccaa

SEQ ID NO: 87477 - DNA, 588 bp, Heterodera glycines
cctcgacgatttgtttgggaagcgcagccagtgttggcacgttcgacttttgtcagctcgggccattacggcactcattggaccggcgacaattcggcacgatgggtcgacctgagggcatcgatcatcggacttatcgaattaacatttttggcattcctcacgtcggtgccgacgtttgcgggttcaatttgaattccaatgaagaactgtgtctgcgctggcaacagttgggagccttttacccctttttcagaaatcacaattctgatggagaaccggcccaggacccaacgcaatggcaatcggtggccaatgcttcgcgtgtgtccaatttgttccgttatcatttggtgccccatttgtacactttgcattttctcgcctcattgcgcggtggcactgtcgtccgtccattgtttttcgaatttccgcacgattttctcacccaccgattggacacccaatttttgtggggttccgaccttttggttgtgcccgtgctcgaccctttggtcgattctgtgcgtgcctattttccgcctgacagcgaatggtattcgataagcaatgctcataaatgcgcga

SEQ ID NO: 87478 - DNA, 320 bp, Heterodera glycines
ggagttggaccgagcgaggtctaatgccgaagaaaatcgtaaaatgaaaatatgtagatggaaatgatgggaaggatggcctaattggaggagcaaatggcacaaaaaagtgatctggcggaacaaatggggacattgcagacgaaaattgacctattggagacggaacagcggcaaagagtggaattgaatgcttgtcctaatgcacataaacattattgggacaacaattgttgctatcatgatctcaaaatcatcgactgtttgactggtcatcgggaaagcaaaagaccgggcgatcgctcactctacgcaaaaca

SEQ ID NO: 87479 - DNA, 578 bp, Heterodera glycines
acctcgcggctgaaacccggcattgaaaattcggagcgtcgtttcgatgtgcacaaattcacttgcgccgctttggaattgcccgacttttcggacttcgcccgactccgtccgttaattgacgcactcattgctgaattggatctcaacgatttcctcggctgcaccgcggcgctcgaaatgctggcggagacggccgccacggcgccaaagtgtgtgcctttttttggccaaattggcctcctggacaaagtgtacgcgctgttcatccgaaccaaggaggagccggacatgggcatcattcacattgcgtgcattcgcttcttcgcctatctgtgcaccaccgatgacaacgcattgaccaaatttcccaaattcacggccgatgttttcgacgcggtgttcagatttgatgcattcgacgtcacgcgtcgtcagttggccttcgaaacgttggcagtgatcagttcgaccagcggggccaagcagatattctcgcagaacgaaactctctacaacatgcaacgggcgatgagcaatttggctgtggcggtggcaacggccgccgagccgtcgct

SEQ ID NO: 87480 - DNA, 520 bp, Heterodera glycines
  unsure (1)..(520): unsure at all n locations
cactggacaagttgccgcagaagttgaaaccgaaggcattgatgagcacacttcgaatgccggagacacgcgattgctatcagtgtaacgtggaaaggagcatcaatgacgaaaacctttacctttgttgtgccgttcctcacgctgtgctccttttccaatggtatgaaccgctgcctcgctttgtccatcttaagcgagtccaactggacaaactgagcagtccctacaccgacctgcaacacccacacaaacccttcaatttggtcttcagatccggcgctgccaattccgatttgcccatggtgtgcattggcatttctcgggcgctcacttcgcctgtcggcactgcacaagaattgttgcgcgagttgcggaccaatctccaaaaggacaaattcgagctgcaactcgtcgactntaatggcactgacagcacagtcaacaatatgaacgacatgtactccgccgcactgttcggcgactgttcgtcggatgatgaaatcatcggaagttggca

SEQ ID NO: 87481 - DNA, 507 bp, Heterodera glycines
tagaaataaccttttgggccttacattgttattttatcatgcgtgattcaaaattgtcgttttgggcagcggaggcgtgggaaagtctgcgctgacagtgcaatttgtacagggaattttcgttgagaaatacgacccaacaattgaagacagttaccggaaacagttggagttcgacggtcagcagtgtatgctcgaaattttagacaccgctggcaccgaacagttcacggcaatgcgcgacctttacatgaaaaacggccagggctttgtgttggtctactccatcactgcacagtcgaccttcaacgacttgatggatctgcgtgatcagattctacgcgtaaaggacacggacgatgtgccgatgattttggtgggcaacaaatacgacttggaggatgagcgtgtggtggccaaagagcaggggatgaatttggcacggcaattcaacagctcctttctggagacatccgccaaacacaaaatcaatgtccacgaagtgtt

SEQ ID NO: 87482 - DNA, 648 bp, Heterodera glycines
gtgaagaatttggggacgtgctgtattctatttcccctatgattgcctctgaaaccatcacttagaagcccaaaatggcaacagtcccgagggagaagaagagtcgaattgcggaggcagtgcttcgccttcgtctcttcgcgactgtcattctcgagcatcgaccaacgaacacaccaacatttctcatcactctcttcacgatgacaatgcaccaccttctccctccttggccaatatctcaacaaacattgaactccatccacacaacaatgcgcttggaggttcctcctctcataaattcatcaaaaggccattgaatgcttatatgatatggacaagacaggaaaggaagcgaattttaacggacgatcccaaaatgaagatgaacgaagtgagcaaagctattcagatgggcgaaaaatggaagaaaatgtcggacaaggaaaagaaaccttacttcgaaatggcaaaaaaattctctgaagaacacaaattggtgcttcaagaacaccctgaactgcaatatgcgccctccaaaaagaaggtggtgaagaaactggccgatggaaagcaattgtccgtggtcgattcttcgtccgtcaagtcgtgcaccataacacccgacgcgtcgagaagcacaacgcc

SEQ ID NO: 87483 - DNA, 538 bp, Heterodera glycines
tccttccaatggctgctttctcgtccttcgctttgtcctcccttctccacttttcctcctttccctttcgtcctttgtgttttgtcactttcgcccccattttcctccgttccttcaaaaagcgtcggttgaacaacgtcgtcagtacaacagaatcgtgaccagccaaaacgacaccaaagcacaaatcaacagcaatgtgcagaattgggcttcaaatgcgggagttgcgagcgattacaacaatttcacatcggagcagcagcagcggtctcaacaattccatgacgcagtctccggcaatttgacaggccaagcgctgcaattattcaacaacctctggagcattcgtcagaatgatcaaatcactcgccttgccgagtgccagcaaattcgtgccgctttgaatgccaccggacgggaccacgtccttcaccttctcgtccccattcctcctccatctattgttggccctccgccttccggatgttttcctcggcctccttactcgaagccatttggcgggggatttgggcca

SEQ ID NO: 87484 - DNA, 591 bp, Heterodera glycines
acccgccgagcgtgagattgtccgtgacataaggagaagctgtgctacgtggccctcgacttcgagcaggaaatggccaccgccgcttcgtcctcatcgctggagaagagctatgagctgcccgacggccaagtgatcactgtcggaaacgagcgcttccgttgccctgaggcgttgttccagccatctttcctcggcatggagtcggctggcatccacgagacgtcgtacaactccatcatgaagtgcgacattgacatccgcaaagacttgtacgcgaacacggtgctgtccggcggctcgaccatgtacccgggcattgcggaccgtatgcagaaggagatcaccgcgctggcgccgtccgcgatgaagatcaaaatcattgcgccgccggagcgcaaatattcggtgtggatcggcggctccatcctcgcctcgctccccactttccagcagatgtggatcagcaaatccgagtacgacgagtcgggcccgtccattgtgcaccgcaagtgcttctgattgagcggcggtgatgtccgcagggaggcgaaagaacgaggaaaatgttggaggataaaatttgattcc

SEQ ID NO: 87485 - DNA, 683 bp, Heterodera glycines
tgaaaaagcgtttgagtgagctcattggtgctgattgtgagccgacatttttgcgcttggttttttgcgggcgatcacttgccgatggaatgcaaatatcaactctcgaacttggcccaaccacttctctcactctgctgatggatactgcacccaatttggatttatcttcttctattggccatccgtcgattgattggccagttggggcgtgttccactggaaatgactctgccgatgaagagcaatgggtgaaactctcttccgaccaatttgcggagaatgcagtgaatttttctgatgaaagtgcgttcagtgcctttttcgtcttttgcaaaagttgcgtttcgctcgaatgtgccaaattgcgtgcgtattgtcgcacgtgcgaatcgtccgcaataattttcctcaatgagccgcaacaatgggacgacgtcaaggagaacaattccattcgcatttttttgccattactgtgacaaggaaagttgcgtttcgttccgtttcaaatgcgttaaatgtggcgaacccgcttcacccctccaacacatttctcgcaatttctctctgcccccctccgaatgtgtcatttgcggctccaattcgtttcccttgggcgttcgattgcgcgactgcacccatctcagctgcgttcaatgtttcgtcgcatatgctgaaga

SEQ ID NO: 87486 - DNA, 620 bp, Heterodera glycines
attcggaaggatttggtgttccgaaaagctggggactggacaaaattgtaaattgggaagcgccggaaattttggaaaaatactgcggctacggcttcctctctgaccacgacggcaatcccattctgatgtctctgctcggaaatactgacgtagaagggatgttgcgatctgtccaatcgaaggattacatcaaattttcgctcgcggcaattgagaaaggcatcacattgtgcagggaacgcgccctgcagacgggccgacccttcgagcagatgatgctcgtgttcgacttggaccacatttcttcggcccactactcctccaagcagttcgcctcctccttcaccaccctcgtcctcctcttccaggagcattttcccctcgttctgcgaaaaatcctcgtaattcgagcacccgaaatggggagaattgcgttcaattcgatgacaccctttctgtcaaatgccatcaaatcgatgatcgaaatgccttctgaggaggggtggcagtccgccttaagcaaatacgtgaatttggatgcttggcctgtccattggggcggtcggatgatggaccctaacggagacccaaagtgcccctccaaaatccgctacggc

SEQ ID NO: 87487 - DNA, 491 bp, Heterodera glycines
agttggagcgcgaactcgacaccttctttgacgggatgcagcccatgcttcgtgaccacgccgctcaactgaacgtcacggacaagggcgaactcacttacaaagtcgatgtcagcggcttccgccccgaggagatcaacgtggaggtgattggtaatgaaatcatcgtcaatggggaacatcgcgagcagaacgacagcgaatcggtccaccgtcagttctcgcgccgtgtgctcatcccggagggcatccaaaaggagagcatcaagtgcgagctggacggcggtcgcttgtgcatctgcggaatgaaaacggctggcgaaggcggacgaaccatcccaattgagatgaaaaagaaagcggccgtggaacagcagccgcaagtggagaagaaatagaggggaaaaacggagacgacggaccgatcgatccattaattggatcttctttggacattttaaattattttcaacaataaagcgttttttctt

SEQ ID NO: 87488 - DNA, 303 bp, Heterodera glycines
acacgcgagggggggcgagtgcaaggcgcaaagtgccagaagtgaaccgatgaaaaaggtccctgccgccaaagttgtccattttaagtcggcgcaggaaacggcgcccccggcacgcatttgcggcgattccatcggatcgctcagcgccgcccatcgccagcgaatttccatctgcgaacggaacgaaaaatgctgtcgccacagagacggagagaacagaaaaaagattggctgctgcccctttgaggacggccaatgctgcgcccactcggcccattgttgccccgcgggatttgcatg

SEQ ID NO: 87489 - DNA, 521 bp, Heterodera glycines
ctccctatattctccggtcactttgttgctgctaatgtcttcagcagaaattcttttgtgtgccctgtctcttattctgttggtcgaatatgccatcatcctttggatcatttttgaccatgtcaaaaaacgactacgccctcacaaagaaatctttatctgcggcgactgttggcttttggtgttcgattttcttgcgccttctcagctcggccttggaattgcactgattagccgccgctttgacttttacgtcgacgaacacttcaaaacacgcaaatggacgttgggcaaaatgcgaatttgccacaaaattgaaaaaaatgggacgaagaaaatgcaaattgtcaaatcagatggaaatccattgccaatcccgcaaaatccgttgtcgaacaaagtcatcggattccgaggcattcagatcaattacatcgaccaaaatgccgtcgcttttctccgccgttttcgccgtattttcgccttttcttcaatatacttggtcatcactgaaaaatgtt

SEQ ID NO: 87490 - DNA, 452 bp, Heterodera glycines
gctgtcaaaatgctttctccttctcctacgacccgttctatcgccgttcgttgttgcctatgaccacggttggcaacgtcctttcgcccctccgccagttggagcgcgaactcgaccacttctttgacgggatgcagcccatgcttcgtgaccacgccgctcagctgaacgtcacggacaagggcgaactcacttacaaagtcgatgtcagcggcttccgccccgaggagatcaacgtggaggtgattggtaatgaaatcatcgtcaatggggaacatcgcgagcagaacgacagcgaatcggtccaccgtcagttctcgcgccgtgtgctcatcccggagggcatccaaaaggagagcatcaagtgcgagctggacggcggtcgcttgtgcatctgcggaatgaaaagggctggcgaaggcggacgtaccatcccaattgagatgaagaag

SEQ ID NO: 87491 - DNA, 532 bp, Heterodera glycines
tacctcgtctttcgtctaccttcaacaagttaacatgtacatgaacagcatgggctctcgtggtgcgtcatccgctgctgttgttgcttctgcagcagcattgtgcctattttcggcaatggcagtggtggtgtacggtgccgaaagcgctgggcctaaagcagaccaggccatggctgccaagcagttcaacccgtccgcatttccggccatgccaccagagcttgagaaaatcctgccagccgatgttgtgcaaaagttgaaagctgtccatgccgatatgtcgttgaacatcatgcagaaacaagacaagattgaccgtatcatgagctccttgccgggagaggttttggaccaaatcccggccccgcccggctttgaacgtctccccgacgatgtgaagaaccgtctgaagcagatcaatcgccaaaccaacaaagcatgggccgacaagcaaaaggaactgcaggagtatgtcaagacattgccgcatgaacaacgtgccattctgatgatgggcccaatgggaggt

SEQ ID NO: 87492 - DNA, 556 bp, Heterodera glycines
gtggaggaaaatttggatttgtattacgtgtggctggacattcttccatcttttgactatgcccaactcggtctccaaatggcactgctttcttaccgtttaatgctttggttgacgcacattttgatggcaaaccggaattgacgctttggaaaacaacaaaaattcgaaaacaaattggagtgccgaaatcggtgttggcaaattatgccgattctgtgcaatttccattggccgaccatccgttgcccaacaaaattcgctttaaggaccttcgcatttcgtacatcgatcactctgtcatcgcatttctccgttccaatcaacaaattttcgacaacaaaggcaccaattttggtcttttttcacacgtaaattatgtctaagagcggatttggaaggtgttcatgcgtgaaatgtggcccatttttgtgccaaacattcgccatttggacgtttctgttcatcatttgaataatttgcgtcgtctcacatcgccaacaattctcaccgatctcaagcagttgaactcaatcgattccgatcgtttgtatcc

SEQ ID NO: 87493 - DNA, 589 bp, Heterodera glycines
ggtccgccgcacgtgcccatcctgcgccagacatcgaacacagacggaccaacaaacggcggacgaagaatcgcaacagcaccagcagaagcagcagcagcaacggtttggcaacatcagccgaagcaacaacaaacagcaaccgccacaagcgaccgaccgccaattcgataacaccgcaacaaccgccagcgccaacagtggagacgagcagcaacaacaacaaacgtgacccaattgccgtgaacgaccagcacaaacagcagatggatggtgccaccgccttctccacagcaaaacagcggacaaacggtgcgcaaagtcaaatcgacctttgatctgcgccctgatgaagcgctgagatgtgagctgttcgatgcgttgatggtgcagcccaaacaatgacaacagcagcaaccgccggcaccgccaaaagtggagacgagcagcgacgaacggaagagttgtggagtgccatttgatcaaaatatggtgatggacgaccagcagcaacaacagcccaagcagatggtgccgacgcctccaccacagcaaaacagcggtcaaacggtgcgcaaagtcaaatcga

SEQ ID NO: 87494 - DNA, 574 bp, Heterodera glycines
  unsure (1)..(574): unsure at all n locations
ccgatgaacccgcgnacacgcaagtccacattttcgcccccgcactctctctggacaatttgatccttttccttttggccactcccgtccagtttttcggaggacgaaatttttacatgcaaagttggaaagcgctcaaacatcggacggcaaatatggatgttttggtcgttttggccacttcgattgcttatgcttattccgtctccgttttgattcttgcctttctgttgcaatggtcgtccagtccaatgactttctttgatgttcccccaatgctttttgtatttatttccttgggccgatggttagaaaacaaagcaaaaggcaaaacctcagaggcattaagcaaactgatgtcaatgcaggcgaaagtggccattttgatcacccgagacgagaaaacgggtcaaatcacttcggagcgcggaattgacactgaattagtgcagagaggcgatctgatcaaagttatggctggggagaaaatccctgtggacgggattgtcgtggagggcaaatcatcggctgacgaatcactgatcacgggcgagtcaatgcacgtcgtgaagaa

SEQ ID NO: 87495 - DNA, 422 bp, Heterodera glycines
  unsure (1)..(422): unsure at all n locations
ggaaatggcgctgcatttttntcgaaaaatgaaaattatggtgatcaaagacatcgagcgggatgacatcgaattctatgccaaaatcctcgggtgtcgcccggtggcatccgttgaccattttgtcccggaatcgctcggaacggccgatttggtggaggaaattgagacggctgatgggaaagtcctcaaagtgaccggccttaaacagagtgggtgcgctgtgtccattttggttcgcggctccagcaaattggtgttggacgaagccgagcgctctctgcacgacgcattgtgcgttattcgctgtttggtgaagaaacgcgcccttctgcccggcggcggtgcccccgaaatggaagtgtccgtccgcgtccgcgcagctgctcatacaaaacacggagccgaacagtattgctgga

SEQ ID NO: 87496 - DNA, 472 bp, Heterodera glycines
agcggaacaaccggtgcaccaaaggcggcaattatacggcactatcgctattatttgatgtccattggctgtggcaatgcctttggcattgttccgtcggatagactttatttgacactgccaatgtaccatacggcgggcggcattcttggcacatcacaagttgtcttcaaaggttgtacggcatgtattcgtacaaaattttctgcaagcaatttctggaaggattgtattcgctttgaatgcacagtgagccaatacattggcgaaatttgtcgatatttgttggctcaaccgccgtctccaatcgatcggaaacatcccatccggcttctcaccggcaatggccttcgtccacaaatttggcgtgcttttgtgcaacgttttggcattgcaaaaattggcgaattttatggcagcaccgaatgcaattccaaccttttgaatcttgacaatcggccgggctcgtgcg

SEQ ID NO: 87497 - DNA, 269 bp, Heterodera glycines
aattccttctgattgtgctttgggccgtcgtctcattccgtctctcggcttctacgtggtgacaaaaaaaactgctaatgatgggacgtggaaacaactcatcagctgggattggtacgaagatcaaaagaattgtcaccgctggactgctcttcacttccctggcgacgggtggggcggaagctattgggcgaagcaatgctcagggaggaaatgccgccggattggtgccatcgcatgtgaccaatcgctcaatggctccaccacct

SEQ ID NO: 87498 - DNA, 343 bp, Heterodera glycines
  unsure (1)..(343): unsure at all n locations
ttcgcgcattccattttaatcgtatggaaatgttggcattcatcgcgtgcggacgcncaagccctaccaccacaacatcagcggtttcatcgattaactgtgccgatatcggcacccaaacgatgaagcaccagcagcaacggcaccaactcaccaacaaaatgccaacatcgatgccagcaacaacaacaacgcgagacaaaccctcgtcctcctcctcccgtcggtcgtcgccgttgcccgtccaagtgggccaagactatgtgagcaccattgaactcagcaaacggggaggcggcgccgctgctggcggcggggaccagcgtggatggccactgaagtc

SEQ ID NO: 87499 - DNA, 383 bp, Heterodera glycines
acctgttttgctttcctcgggctcatcttcaccgcgtggttttttgtgcatggggtgaccagtacgaagaaaacgcgaaaccttgtcaaggaattgttcatcggcacattggcgtccctttttcttggcttcggcaccctttttctgatgctttgggtcggcatttatgtttagagttgaaaggaggaagaacacagggatttttgtcttatttttggggactttgttttttttctaatttatttgtatttttttttcctctgctaattgttattgagtgagtctgcctttttgtttgtttcttcccaatttggaaactgttgaatgttgtgtaattgtttgtccctttaatatttttattttaaaataaatggaaaactcgc

SEQ ID NO: 87500 - DNA, 519 bp, Heterodera glycines
caccggtgaaagaaacggaagaaattgggagcggagaagggacttcgaacaattctcaagaaaatacggacaaaccgaagcgaaagagaaggaccaaagaggaaattgagcaggaaaagttgaacaaagaagtgaaccgaatttgccggcagattcaatcggcgaaaaactccaagtgcgaacaattccttttctgtcatttttcgtcgaagattctcgacttggacgacaaattgagcgatgagctgagaaaacgctttgaggagcgtggaattgaacaacaaattgtttatgacaaatcgcccaaaaatccgatgcaaattttttggcgcaaaaagaaattggaagcgtaccttgacggtgagcaattgcacaaaacggagagaatggaattgcaaaatgtgttctgttgcgttttgagcggtgagacattttctgtgctggtcaaaagtcggggaaattcgatgatggattatttggacgagcaaatggcgagcatccgaaaacaaattggcggag

SEQ ID NO: 87501 - DNA, 459 bp, Heterodera glycines
tagcgttagctgatacattaaaagaaaatagtacatttacagactttggcctagagggcaattgttttggaaatgaaggtatcaaggaattttctaaagaattggaaatcaatgatacaattacggacatttatctaagtagcaattattttaaaagtgaagttgtcgaggaattgcttaaagcattggaagtcaataagacaattacaaatattgacctaagtaaaaataagattggaattaaaggtgccatagcattagctagagtattagaaaaaaataagaatattaaatacattaacctggaagacaatgtaattggggcgttaggtatagaagcattaactaaagtatcaagaagaaaaggcatagagattgggctaggctcttaacaataagctttccaagcattttgttgtataaattaggcgattttctttaggacctacccaaattttt

SEQ ID NO: 87502 - DNA, 467 bp, Heterodera glycines
ctgcacattccccaattttatttcttccttagtaagtagtattggtgcacaatgcgcacttttctgttcatagccgtagtcgggttgatgttggccgtcatcttggagaatgtaaatgcgactgggaaaaattcgccgacaaagggacaatcgccgccaggcagtccaaaacatgaaaaagaccgtaaaaatgagcatggtaaccaacagaaccatgctaccggaaaatcgccgccaggcagtccgagagtacaatcgccgccaggcagtccgagaggaaaatcgccgccaggcagtccgagagtacaatcgccgccaggcagtccgagaggacaatcgccgccaggcagtccaaaacatgaaaaagaccataaaaatgagcatggtaaccaacagaaccatgctaccgttccaaatgtggtgcagaaagttgaagtccacaaccaacctacgccatctgctgctgc

SEQ ID NO: 87503 - DNA, 481 bp, Heterodera glycines
aatgccgggcagaagtgttgaaagatcagctgaaaggggcggtcgacggaagagagggggcgaaagcgtcgtcgaggaaaccgttcaaaccgatccaaccgatcgcaagcgaagcggcgaagagagcgcaacagcggaacagcaccagcagccgcagggagttgctgttgtcgaacgaaggcggcggcggtggttcaacagcgacaacgcccgcccgaccacaggcaaccaaaattggtacaacgccaaacacggtgccatttggcgcgaaggatgctgccggcggcggcgacggaggcgtcattgacaaaattgagcagatgttggaggagggcatgtaccgaatcgagtgccaaaagaggcctttccgtgttcggtgaaagggacagccgactgtgtatgtgagcgttgctgacggcggtaataacgcgacttcaacaacaacagcggcggtgtgaagaagccagtggtgaatgttgtc

SEQ ID NO: 87504 - DNA, 432 bp, Heterodera glycines
tccgactcggatttgcgtgggttggccccagttcgtcgctcgtctctctttccctggacggcaacaacatttcgcgcatcggatgccatgcgtttgcctccgtcggccgactctccgtactgtcactgcaacacaatcgtatcacatcgctttcctgcgccgccacccacgacccaatttcactcaccgtcttcctggatcagtcctttttgcaaccgttgcaacggcttagtcggctgtccctctcccacaatgcgctgcaattgctcggcgaggacgacttggccggtcttggcgcgctgcgcgaactgctgctggaccataacaacatttcaaagatcgccagaaatgcgttcgtggacctccaactgcgcaaattgttcctcaacaacaatcagctgtactacttgccgaggggcgtcttttccggtt

SEQ ID NO: 87505 - DNA, 565 bp, Heterodera glycines
ggtaatgagaagaaccgcaaattgttggacttgttggatgctttggagttcaacaggtcgtcatttttcttcgttcggtcagccgttgtcgtgcattgaatcagctgttgatcgagcagaacttcccctccatcgccattcatcgtgcaatggcacaggaagaacgtttggcgcgctaccagcaattcaaggacttccaaaaacgcattcttgtcgctaccaacttatttggtcgtggaatggacatagagcgcgtgaatatcgtgtttaattacgacatgccagaggatactgacacgtacctccacagagttgctcgagctggccgttttggcaccaagggattggccataactttcgtctctgatgaaacggatgctcaaacgttgaacagtgtgcaagatcgttttgacgttactatttctgaactccctgatcagattgacgtcggaagttacatcgaaacacgaaccggcaacaatgctgcagccgaatgatgagaattaagatggatgatcagtttattttggatttatattgttttgtgctgtcaatctacatcatt

SEQ ID NO: 87506 - DNA, 423 bp, Heterodera glycines
ccctcaccgaaacccgcaaaattccctaaaactcctacaacaaataatacgaaatacttgccgccggaacttttggacgaaatgactttttacatatatcctaaccaaaattgttcgagaattctgacttcttcctggttactcatggaatttttgaggcctcatatcgaaaggtggaaaaaaatatttaaaatactgcttaacgagctgatcgatctgcacaaactctgtaaggaaggaatcccttggcgcacatttaccgccctggcagaaaaggacaaaaactgcaatgcctttgttgccgcgttactggaactggttaaagaggacgcttatgcatctatcgacggatctggctcgaatgcgttgttcatccgttttcgcgaactttacccaagtgttattgaaactcttgcgtggact

SEQ ID NO: 87507 - DNA, 367 bp, Heterodera glycines
ttaagcattgacacttttagcaaacaaacaaaaaaaaaatgggcagcagtgcctccgaatcgccgccaccgccaaaacttgtcgccatccaagacttgcccatttacaaggccgagtccgtcccggccgcacgtgctgcacggcccgtcgacaccattggcaggccggccacttttggtgaggaagttttcggcaatttccgcttggttgcgctccaattgagggacttcgtttcggaaaagttgggcgttgtcaacagttcccttgcacccataagagacgcggccaacgccactgaacagttcatccttgacgagcagcgcaaagtgttgccccgtgccgtcgccatttccatgggcggcatggc

SEQ ID NO: 87508 - DNA, 286 bp, Heterodera glycines
tctttaataaataagtttttttgtacaaaatgagcaactttatatttgtcgcctttttaactgcagcgttttttagctcaggcctcgctctaccggctccttatgatgctgaatcggtggtatcttctgaattaaatgttccactactttcagctgacgcaaatgttgaagcagcaatcaccaatgaaagtgatgctgctgctgcgatacaagctccatcaattgcggtaccaattgaacatcaaactgctgctgacattactcatccaactgaaactggcaatga

SEQ ID NO: 87509 - DNA, 458 bp, Heterodera glycines
catctgattgtggacaagcgagccagcaacggaggcggacacttggattcccatcggtggcttggttggccctcaaacatcggtcatgttcgcaggcgacccgaaacagctcggcccggtggtccgtccagagaatttgaaatggtttggctttgataattcgctgatgaagaggattatgtacggcgatgtatattcccaagcaggcgatcgtgtttttgtgactcttaaacaaacgtatcggtctcattatgccatcctgcgtccgtgctcttatcttttttacgataacattctccaagtcgacgatggacaaggcgactttcacaaattgaccgaatgggaaggccttccaacaaaggggttccctgtcatttttcactcctctcgtggcagcaaagatgagcagggttttaacaggtcgcaccacaatttgttcgaagctgaattggtacggc

SEQ ID NO: 87510 - DNA, 230 bp, Heterodera glycines
aacagctcgcccggctgccgacagcattgtgatcagttgcgagctgagcctgaacctggactacatgttggagaagctttgggaatatctcgctttgctccgaatatacaccaaaaagcccggcaatgcgccagaccttgggcctgaagatggcataattctgcgcggtaattccacggttgagcacgcgtgccatgcgctgtaccgcactttggccgcccaatttcgtt

SEQ ID NO: 87511 - DNA, 413 bp, Heterodera glycines
tcatgacattcccgataaaaagccttcgcaaccctacggcctccaggggaccaatcatcttcttcccggcttcggcaaaattgcctcaaaattgccgactaaaacaattttgaaaaaagacaaagtctatgcctggtgcaattgtggatattcacacagtcaaccgctatgcgatggaactcatctcagcgttcgcacgccagcctgggccggaaaactcagaccggtccgatatattcctgacaaagacatggaagtttggctctgcaattgcaaacagacaaagaatcggccattttgtgatggttcgcacaaaaaatttattgaacaagagaaaaaggatgtgttggcagatgactattgacttttctgatagttttgtttattttattttttttgtttcatttttagtc

SEQ ID NO: 87512 - DNA, 432 bp, Heterodera glycines
ttgctaaattttggcttaatcgcctgattctttttttatttttgccttttcttttattttttgcacttcatacaattgaaaatggctggcaaattcatcggcggaagaatgccttttcgtaatcacttttggctccttcctttctcacagtttctcccctttggccttttcccttccgtcccaattccgcttcttcccatgcgcgtgtcttcgattccgaattcccttcttctcattctccgaaattgcgctgtgttttgtcggctaataataagacaaattcgcgggcccggcgttaccaccacccgcggcctcagctggtcatcttcgacaaggacggcactctgatctgttttcattctctgtgggtcccgtgggtgcgaagctttgccgaaaaagttgaggaggcgggcatcgatggcattgccccga

SEQ ID NO: 87513 - DNA, 357 bp, Heterodera glycines
tccaaaaactgataaaaaaatggcgttcctctcccgtctctccatccttccaaattcgccaatttcgctgcttgcagtttctttggccgttttggctttcgtcgctttggcatcggccaatccgccgacggcacgcgaaacggcgccaaatgcacagcaaaacaatgccaattcagtggcaactggggaaattgcgaaaaatattgcggaaaagatggagcggatgaatgagttcattaattattttagggcgaagaagttcatcgatgcacataatttggcatttgagaagggcgaagtgtccttcaaagttgcgccaaaccatctgatgcattttacacctgcccaatataatcg

SEQ ID NO: 87514 - DNA, 331 bp, Heterodera glycines
cactcggactgcgaaagccgtgcatttgggcattcgcgcggctgaacatgacacacactgtgatgagcaaacggaagttgacctggctggtcgagcagggcttcgtctccggctgggacgacccgcgaatgcccaccgtccgtggcataattcgccgggggctgaccgtcgaggggctcaagcagttcatcctggcacaaggaggaagtcgctctgtcgtcacgatggaatgggacaaagtctgggccttcaacagaaaagtcatcgacccggtggcgccccgctacaccgctttggaaaacgcttctgccacgctcgtgccggcgacggc

SEQ ID NO: 87515 - DNA, 519 bp, Heterodera glycines
ggaatccaatttccatttatctactcactataaaatgctccaaaacggccttaccattctgcttctgatcagtgttgtgatcggccattccttggccaaccttggcccaaccatcaaacataatcctcattttaaagccgtacaaactgcgcatcatttgcatgatgccattgcgaagaggcacgaggccgaagttacgcagatcatttgctccattagcaacgaacagcgtcaagcattggctttggagttcaaaaaacaattcggcactgatctgattgccatgctgaaaaaggagttcaaaagcgactttgaagaactgatcatttctttgatgcaaacgcccgccgtttacgatgccaaccaaatgcgtgccgcattgtccggctccaatgaggcggtgctaatcgaaattttggcgacgcgcacaaaccgacaaattacggcgctgaagcaggcgtatgagcggttggacagaaggcatcagcacaatcagttggaggaggacatcaaagcgaa

SEQ ID NO: 87516 - DNA, 436 bp, Heterodera glycines
ctgccgttccccttgagtgtccgaagattgaaattacgcatgaagaaattgttgacgactacgtgcgagatcataccgcgatggacagctttttggtgactattacgccaaaccatcagaagcctgtgttggacatttcggattatcgtcagtattattcgaagaagtctctgttcgacgaagatcgcactgtgcgcacttttctggaaatgtgtctttcccaattctcgatcaacagagacatttactcgccggctggagccggcaaactctacgaagtgtccccggaggaacgagtctctgctggcaatggcattatactccgtcccggagttgcgaagggagttcgagtcgtgcgcaactatggagaattggcgcctgcgcttgttttggacatcaaagtgtcgccattctacgagtccaatggacttgtgcc

SEQ ID NO: 87517 - DNA, 238 bp, Heterodera glycines
atcgcctctcttattaacagcagcgccaacttaccccacagagcgacagcgacacatggcggatgagcttgtggcgcttgcaccaggaacgcgtgtctcaggccgatggaccatcctaaagaagcttggcgccggagcatttggagccgtctatttgtgcaaagatggcaagggaacagtggcagcactgaaaacggagccaatcgacacacgtcaaccgcttcttgttatggaggcc

SEQ ID NO: 87518 - DNA, 302 bp, Heterodera glycines
gattctttttgtccaccaaaaattcgcatttttttgctcgtcgaagcgcgcgcaattcaatacgcaatggaacgcatttttgagggaaagccaaagccgaaactcgttttcctcacattggaagagggaattgaccggctaaagctcaactcggacaattctttgattttggatggcaaattcactgttgccgtttcaatggcccgtaatgccgtgcacgacgcatacgaagccggaatggaagtgtggaaagcacttaaacgctcaacatccattcatgtgtttaacacacttttcatgtc

SEQ ID NO: 87519 - DNA, 312 bp, Heterodera glycines
atactgtgaacagtactttggcgaatgaacacagtgccgtggcactttcgtcggcaatccccggcaatgatgaaaattcctcgtcgcccgccgttccctctgaacgaagtttagaattgctgaagaaatatttcggttattcgcgctttcgccctttgcaatacgaagtgatcgaagcggctctaagcaaacgcgaccaattggtcgttatgtccaccggttatgggaaacgtgtgtgctaccaattgccctctctcattcaaaataatctcactttggtcgtttcgccactaatttctttgatggaggacc

SEQ ID NO: 87520 - DNA, 312 bp, Heterodera glycines
actactttggtgcccacaccttccagacaatccagagttgccaatgacaagttcaaggttggcgcttacactcacgtcaactggactggtcgtggtggaaatgtctccgcctcgacctacaacgcataaacaatcatctcaaccgttagtcttttgcgcccactcttggtgagaaatagctcatcgtgggcgtagacaaatatccatggttgcaagatagtaccggtcagtgtgtcgaaacatgaccgactcgttgagcacgtaacatcttactgctcgcacattagctagacattgcatccaaaagttttc

SEQ ID NO: 87521 - DNA, 368 bp, Heterodera glycines
gcctttctctttcctatttttcttttccccttttcgcttttatcgtcaaatgtgccaaaattacttttgctgcgttttacattgtttttttttctgtgtgtccttttttcattggtcgattcgcgtcctcagctgctcaattcggtcagtacctcgggccttttgatcggaaaaggaagcgaagtcaaatcggcttcggtcccccttctgtcggagccaatgattgaaatccattcgcattcggcgccagtgtcgccttcggagttgaacttcagcagaagacgaaggaagcgcataagcaacaacaaatccaattgaacaagaaaatttataatacgtatcgcaaacttaaaaatcaaagaagtaaa

SEQ ID NO: 87522 - DNA, 226 bp, Heterodera glycines
tttgcattggcttaaatcattccaccatgggtattttgcgcaaccgttcgatcaatagaattccaattcgagtcgaaaaatgtgctgagaatgaaaatggatttgccgatgattatgcaaactatctcttcgattccgaccaatccgacagcgacaatgccgacgaggaaaacgaagtggcggcccaaatccaaagccaacccatcggaggccaccgacgcataaa

SEQ ID NO: 87523 - DNA, 330 bp, Heterodera glycines
ccaatgttgaaactgtcgctgttgctcccgcaatttgtcgccgcggtggcgcatggtttgccagttttggcagggaaagaaaccgcgggacgaagttgtattgcatctccggccatgtcaatgatccgaccaccgttgaggaggaaatgtccatcccattgcgcgatttgatcgaaaggcacagtggtggagtgatcggtggttgggacaaccttttggccatcattcccggcggttcatctgtcccattgttaccgaagagcatttgtgacgatgttctaatggatttcgatgcgcttgtccaagtgaattcggggcttggcacagcgg

SEQ ID NO: 87524 - DNA, 493 bp, Heterodera glycines
ttagatccctcccgtcctcttagagcaactccaactcgtccacctttatctctcatggctttatcactttaaatggctttatttgttgggtcagatattcaaactttcatcggtcctttgccttataatcgcgagctttgaacgttatttgatcacttcccattggacattcagcggttttgaggaacgtactcgatggcttttgcttactgttgtccttttcatttccattggcattcgctttacgacttcggtggatgtcgtcattctcttcaacgaacagtccgttgtgcccttccgtcgttacattcccgcacaaatgacccaccgggaatggcttcccaacttcttcaatttgctcactgttatcattccattcggcacattggtgttttttaacggcggaattgtgctcatgttacggcgacaaaatgtgcaacagttacgtctgctgatcaccgaattgactatgggctacgattatatgaaagtt

SEQ ID NO: 87525 - DNA, 419 bp, Heterodera glycines
taaggaaatttctttacactgaaactaattacgatgatgctccgcaatcgcgatttgaacgtgcagccggctgcaggtgcgggtgctccactgcccaagcgccagtcagctcatttggtaaaggtggttggtggcgccagcagccgtgcttcatctcagtcttccgccgggtcggaccgggactccaagtacgaaccgaggccaaagcgtgcatgcagccagaaggacaaggaaaacagccactacaacaacaacaatcacaacaaaagcagtcataacaagtccaaaaagaacaccagcgggggcaccgtcgttccggtcacggctttttcacggtcgctgctcatcgattcggccaagaaggacgtgaccgttgtgtcaacggctgtcgatgccggcggcggtggggtgcttgccgc

SEQ ID NO: 87526 - DNA, 352 bp, Heterodera glycines
tgttccctatttttgcttctgttctcggcacttttgctcatttttctgtgcccgccgacctcggcccagggccgtcccccgccgagtaagtcaggccggccaactcagcacggacgagtgacaacggacggggaagagaaagacggcactgccgaggggggagcagcggatgtcgagagtggggagaaggaagagccgggactgagccaaaaactgctgaatgtgctgttgaatcatttgatcagccatttgccaaagattagcacggaaagtgtggtcaattgggtgcaggagacattcggattggaccgacaaacttcacggaattatgtgagaaaggcacacgaaatca

SEQ ID NO: 87527 - DNA, 225 bp, Heterodera glycines
gcaaaagcgccctctggcgaaagtaagccaaatccggggcagaagccgatcggagaacggcgaaagagggacgttttggggcacgccggcggatacgtcggaggatgggaccatcccattgactcgacacttgattgggcaaagagtcagtggaatgatgccaattggctcgccgatgttgtcaacacaaacggatgggaaaacaccggcactccaaccggcgga

SEQ ID NO: 87528 - DNA, 376 bp, Heterodera glycines
cgcggcgggcgatgtgatttcgcctcatcgtgcggttttgactctctccaaaacatgttcaatgccggatgcttctcattgccttacgcttggatgctcggcggaaaatgggtgtcattggctctcacttttgtcattgccggctttaattggtacggcaaccacattctcgtccgttcgtctcaacatttggctaaaaagtccggtgttgcctctctcgattatggacattttgcgaaaagagtgtgcgactacagcgaattgccatttttgcgacgtcacagcaagcgaataatgtacgtcatcaacatcaccatcctcttctaccaactcgcaatgtgtgccgttgccattcttttcattgctgacaatatgg

SEQ ID NO: 87529 - DNA, 362 bp, Heterodera glycines
aacccaaacatgcgccggttttggaacgggcggtggatttgatgattaaagagacgaaatacgacaaggacattctgatgacactgttgaagctgtaccagttgaacccatttctttacaacgaaaagtacgtgtgccttgtgctattgaaaacgatgaccaattttccacgcaacgattttgctttggcaaaatatttggtggacgctgccaaagtgaacgctccggagttgcgacgcgtctgtcagattggctctcttcttgagtcttgcaatttcgcgctcttttggcgtctcgatgacggacggtacaaaccccgcgacagtgtcgatgaaccattcaaaaaacctgacgaaatttgc

SEQ ID NO: 87530 - DNA, 577 bp, Heterodera glycines
tgaaggacggttccattctctgggggtcagatgaagaaattggcagccacgacggaatggaaaagtttgttcatacggacaaatttcgttctctgaacatcggttttgcgcttgacgaagggttggccagcgaaacggacacttactcagttttttatggggaacgatgcgcgtggtggctgcaaatcacttgtcctggcgcccctgggcatggttcgcgattcgttgaaaacacagctggtccaaagttgacttccattttggccaatttcaatgcttttcgtgaacgtcagcgtcatttgcttctcgccgacccgaatttgcgtcttggcgatgtcacgagcgtaaatctgaccaaaatcgagggcggagtgcagaccaatgtgatccctgcccaattcgtggcatattttgacatgcgcgtgacgccaaccgacgactttcagcaaatggaagcaatgatcgccaattggtgcaaagaggcgggcccggacgtcacttttgagttcgtccaaaagggaatgtgcaaatcgctgacccccaccgacgcctcatccccgtggtggcacgcgttttc

SEQ ID NO: 87531 - DNA, 452 bp, Heterodera glycines
ggattgtaaggaactttttgaagaacacaggaaatggcggaaggacagaaaaaagcgaaacaaaagaaaatgattttttggcaggaagtgttcgacaataacaaaccggacccttcaaacacagttgtgcacaattggtattcaagaacaacgcaggagagatttttggacacaaaacgtgcggttgagaagggtttccaagtgttggtctcctcgcgccggtaccttaattacatcaattatggccccgattggcgtgatggcactggcacaacccgacaaatttactattgcgaccctcgcggtttcgagggcacttatgagcagaagcaattagtgattggcggcattgcaacgatgtggggcgaataccttgacgggaccaatttggagccaaatttatggtcaagggcttctgcggtcgctgaacgcctttggagtccgcccgagtt

SEQ ID NO: 87532 - DNA, 264 bp, Heterodera glycines
cgccggcatgctgcgcagcttgggcacagagaactgtccatgtccattgggcatcgaagaggtgaagccgcgttctctgcgctttacttggtcaatgaagacgacttcgtgacttgcaccggacgaaatgatgaaagaaatacgaaaagtactcgacagcgatggatgcgaatatgagcaaagggagaggtatttgttactttgtgcacacggcgacccaagcaaagactgattgatacaatgggagatggaggtttgcaaatc

SEQ ID NO: 87533 - DNA, 322 bp, Heterodera glycines
accaaaatgaataaacgacaaaatgttcctgctttttcagtttattcgtcaaagggttttcagtggtgacagtgccaaaggaacgggtgaaaaggaaaggagcggaaatgaaaacaaaacgggtgggtctaccaatgttccgaatgcgaagccttgctccaattcgttgcgctttctaatccatctgaggtacactaatttcgccctaattgacgcgttcgatactgtcccaatttgcaggctggcttccgattcatcgggaaaagtctatttgcatagcgacatccgaatattattttcaaataaatcaaaagatttggaa

SEQ ID NO: 87534 - DNA, 207 bp, Heterodera glycines
tcccttttgcgcctgaacgttacatttggcggctgttcatcggactccatggaactccgagattggtcgctgcgttcgccttcaaaaactttctggtcacttccagcctttggcctttcccctttcgtccatggtatcgttgggcttcccaattcgcttgttcgttgaattttggccgaaattctgtcactgatcttgctctcgtca

SEQ ID NO: 87535 - DNA, 375 bp, Heterodera glycines
caccgccgaagttcgtctcgagtctctttctacgtcagttccaatatttgttgtcggatgttacagagagacttttggctttcggacagtaactgtggaccaaaacagaatttacatcaatgggcgaccattttaccgtcatggattcggaatgcacgaggacatcggaattcacggcagaggttttgaccgggcggcgatggtgaaggacatgaacatgttcgagtggttgaacggcaattgctatcgcacaagtcattacccttacgcggaagagagagcgtactgggcggaccggcggggaattgcggtcattacggaagtgccggccgttggaatttggaagctcaactcctcggcattgctgaaactgca

SEQ ID NO: 87536 - DNA, 500 bp, Heterodera glycines
gaatttggttaatgtgtttggcaatctgctatttgcagattgatttgatgcgcttgcaactccccgacccatttttgattattcactggccgatgtcgtctccgttttctataatcgctatccaaattcatttgctagacacaacatctctgaggatgtgttgtggcgtgagatcactgacgatcgaatagtgacgaagaaactaatcgttaaaaagggttcaagcttcctcagcaaattgcccaaatggatttcgggacaagcgaaaatgcaatttatgccgacacttgaagaaagcatttactgccgtcgtacccacaaattggtgacgtacacacgaaacattgccggcaaacacttgctgaatattagcgagcgaagcgactttcgtgaattgccgaatgagcgctctgctgtcgcgcgtcatttggaggtggctgccaattgtcgcctccattcgctggtcgagaaagtgctgatgatggcattacgcaaatcat

SEQ ID NO: 87537 - DNA, 507 bp, Heterodera glycines
  unsure (1)..(507): unsure at all n locations
atgaaatgcttgctcgcaaaataacaagtgaaaattttgaagagttggcacagaatttgcggaaaaatgcactcaaattggcaaaagaaagcactgggaaattccattttctcactgaaaatcacttttatggccaatttatcaattatttggcaaaaattgcccaacttaaagtggaagaagcactgaagaagcgacgggagaatgacaatttggacgaattatcggagaaggaaacgaatgacttttcggagggatggaaatcattacaaatgtttgtcgaaatgtattcatttggctcggaactgttcatgcaattagcggccaattacggcggaaaatttcccaagaaaacgcgaaaaacaatgaagcaattagtggtcaaaaaaataccgcaaatggacgaattgtgccaacaatttgtcgactatttccaggccaaattcatgaaaagcatcccacanaagctgagcattgagccgatgaacgctcaaaaatcatcgacca

SEQ ID NO: 87538 - DNA, 490 bp, Heterodera glycines
gcgtttctaatgccaccactccttcggcaagctacataattcgacttgtatcaacagaaattgacccagttgaattgatcccatttgaattgatgaacgaacggaccaacgaaatgctgacatttgagaaagaatacgatcatgaaaatatggaggacgatgaaaatatggaagacgaagatgcaagtgacgattggctgttgaagcgatgccaaattggagaaacggcgacgattcaatgggtgtgggacccgagcgattggcaaaatgtcagccttacgctcgatagtgtcaggaagaattgcattgggcaattgtctccacccaaggcggaccaaatgaatgcaaaaatcgtctgaaaatgagcgccgggcccagcggaagaaaaagtgaaagaattattgagaaatgacaaatgagtgatcattatgaatggaagttgatctgctaattgcatttgttgcttctttcgtttgaatacatttatttt

SEQ ID NO: 87539 - DNA, 405 bp, Heterodera glycines
aatgctccaaacggccttacacttctgcttctgatcagtgttgtgatcggccattccttggccaaccttggcccaaccatcaaacataatcctcattttaaagccgtacaaactgcgcatcatttgcatgatgccattgcgaagaagcacgaggccgaagttacgcagatcatttgctccattagcaacgaacagcgtcaagcattggctttggagttcaaaaaacaattcggcactgatctgattgccatgctgaaaaaggagttcaaaagcgactttgaagaactgatcatttctttgatgcaaacgcccgccgtttacgatgccaaccaaatgcgtgccgtattgtccggctccaatgaggcggtgctaatcgaaattttggcgacgcgcacaaaccgacaa

SEQ ID NO: 87540 - DNA, 418 bp, Heterodera glycines
tctttgtcgcctttttactgcagcgttttttagctcaggcctcgctctaccggctccttatgatgctgaatcggtggtatcttctgaattaaatgttccactactttcagctgacgcaaatgttgaagcagcaattaccaatgaaagtgatgctgctgctgagatacaagctccatcaattccggtaccaattgaacatcaaactgctgctgacattactcatccaactgaaactggcaatgagtcttctattgcatcatcatcatccacgccgaaaagtgagcagacgccaaaaaaagtgatgaacatgaaaagcgcgctggaaggcgcggcggccaacgtgtacggggggcttccgttagacaagcagcccaagacgatcgctgaagcggcagcaaaagcaaagcagacgcccgcc

SEQ ID NO: 87541 - DNA, 330 bp, Heterodera glycines
ggctgttttttgcgcttgtattggaaaaagctcgcgactcgtggttcttccgcttctgtgcctttttggttgcgttgcatttgctcgtcaatgccattttctccgtcagttttgtttatgcgagcgcacaaaactacccgggcggagttgcactgctcaaattgcagcataagcaccgcttccttcgggacaagccaatcgccgctcatatcgaccaattttcggctgagactgggatcagtcgctttttgcacctctatgacgcgtgggaatacaacaaaactgagaatttggcgcaagaggagtttggtcgattcgattacattttgg

SEQ ID NO: 87542 - DNA, 450 bp, Heterodera glycines
ttaaatccttctgactgtgcttttggccgtcgtctcattccgtctcccggcttctactggtgacaaaaaaactgctaatgatgggagtggaaacaactcatcagctgggattggtacgaagatcaaaagaattgtcaccgctggactgctcttcacttccctggcgacggatggggcggaagcgattgggcgaagcaatgctcagggaggaaatgccgccggattggtgccatcgcatgtgaccaatcgctcaatggctccaccacctcctcctgtgcaatttgaaatgggggcaaatcgattagaaaaaatgagggcacacctacgcgaacttgctgagaaaatgccggtcaatgaatcgaagcgtctgtcaccgagtggacccgacccacatcatcattagggccatggatggatctaacggaggaagaaagaatggatgcttagttc

SEQ ID NO: 87543 - DNA, 425 bp, Heterodera glycines
ccgtctgatggcttctctcggcgttcgccaatgatcggctcaaacgcagccggcgcactgaacggcgacttccaaacgggcgacctaatggtcatcaaagatcacatctttctgcccggactgtccgggtactctccgctgcttggcattaccgacccccgttgcggctcgagtactgtctctcttcataatgcgcacgacagagaattgacgaaaaaggcgatgagtttgggccgtcaaatgaaagtgccgttgcgcgagggcatttatgtgatgaatgcgggtcctcagactgaaacggcaggggaatgttcgctaatcgcgcggatgggcggcgacgccgtcggaatgtccacgtgccacgaagtgactgtggcccggcagtgcggcatgcgcgtgttcggcttctctctgatcaccaattg

SEQ ID NO: 87544 - DNA, 498 bp, Heterodera glycines
gggtcttcgccattgagtttaaaatcccgaataatccctcttccactgctcgagtaactagtccatccggcactatttatgtaattttgttggtcaacaatccaaaaaaacagccgattcatgctcaaatacacttccatttggcttttctgctcattgaatgcatccaaagggaagtaatgaaagcgatgggaatgacgacacgtggaaaaaatgggagttggcagatgaatttgggaatttatttgtcagaacatttattaagcccatatcgaaagaagaggacagtcagattttttacggttgtgtgattgattttccaaagcacaatgaacatttcggttttccgaaaagtgttgcaatcaaacaagtgttcatcaggggtgacgaatattataaggcaaaagatatgttgatccatgaagttgaaatattgaaaatggccgtacaaatggaggccatttacgtgatcaaattaattgattacattaccgtacc

SEQ ID NO: 87545 - DNA, 519 bp, Heterodera glycines
aacttcgtcggacttatttgttaggaaaatgccaatttgctccagttctgttcggaccggttgtttaccgcccatatcaacccaacctattggaatcgggcggtaacaagctgttcggcatcggtgctggtgcctacaacacttgtgttgtgctgtcgcccattctcgtgccgtacattgccttttcttggacccactcccatcacttttcttttttgcgcttcgttttggtgttttatgtcattgccttttccttccgaacgattggtcggctgacaaatgttgactacgtccgttttatcaaattgctcggaaccgtgcgcaaatctccgcagaatgtcactttgctcgacacactcaaagactacgattttcaagtgtacgctgcgcccgctgattttaaagcatcgccaggccgaacggccaaatggcaccctccgcgtgaacgccttccggacttgaatcctccgcttaattttctgcgtcaggctatcgcgtggacggccgctaacacttttg

SEQ ID NO: 87546 - DNA, 495 bp, Heterodera glycines
ggattatcccttggattggtacaaatctgtggttgctggccaattatcagtttcggcctctttcgtgacgatttgttaaccgcgttaattgttgctcaacggaaacaaaattttcgagtgcgaatatgaggaccgaaatttgtacaaagacccaaatgcttctgccatttatattctcagtttggctgtctccgataggtatagacggaggggcattggtacgctgttgctaaaccatctgatcactaattacagcgttcccttggcttcaaaactgattttcctgcatgttcttagtgacaaccattcggccatcgttttctaccgcaaaaacgggttccgccatcatatgacactgcccaaatattatttaatcgacggccaataccgcgacgggcaaactttcgtcctcttcacttcgcagggagtgtttggcgaattcgtctcgtcagttggcgattggtgtgccatggcgatgagtttcctcacttcgcc

SEQ ID NO: 87547 - DNA, 477 bp, Heterodera glycines
cgttactgtggccgctgcgcaagagctaaagatcgccagaattttcaatttttactcgaagattatatcaaagcattaaacgaagccaatgaacgaaacaaacaattggtagtgtccgtgaaaagacgcattggaagactggatgaggagaagcaagagttggccaggcatatcgaaagtttgcccgacctgacggaaatgttcgggtccgaacccgcaactacgaacctcccatcgctaggggaattgttcactccaacttcatgaatcgttgccaaagaatttatttatgttaatacaatttttaaagaatgactggaagggtccccataacaaaaggcagaaatagggacggaaacaaaactttacaaactcaaattctccattttgataataaaaatataatcaaatcaacagcgtggtaatttcaaagcacccgacagacaatcagagaatttctaaatcttattaatttcc

SEQ ID NO: 87548 - DNA, 457 bp, Heterodera glycines
caaagaaggaaaaaaagaaaattaagcccaaccccgcagcaccgaatgtcgaacagccagcaacgccggaaatcattgagaatatggaggtggaggttgaagcagttgcgaaggctgaagccgaggaggagttggacccgaagggtcgggtgcagcaactgctggaaatgggcaagtctctggaatgggagatggccgtccaatcggacgatgagcaaatcctcgacctggatgatgatcttgagatgtttccaaggctgattttcctgcagctggccaagttcctgaagaatgcacctgatgggttgaacgaacagcaaaagaaggaactgaaaaaagtgttggccaattggatggaagagcaaaagcagccatttacggtggatgaggaaatggcacaagtggacgaaactgtgcaaagtttgagcaccttctgtgaccaaattggcaaaagttt

SEQ ID NO: 87549 - DNA, 485 bp, Heterodera glycines
tgatttttcctttactgcctcaacatcgaattcgcttttgatgaaatcatttttcagttcgcctttgttcccatttctttcatccgttcaaattcgcttcaaatcaaccaaaattacaatttaaaattaaccattcttaatggttgagctgtccgctgtatgttttgtgtataaatcctccatccgtcatcttttgtatgtcattattcattatatatcattgcgccttttgtctaattgaacaaaattaaattaacgatcttaacaaaaaggtatttattgaattaaactttgatcattttcttaaataaagcaaatattttttgcatcttgaaatattaaattgattttgacaaggttttagtttttgaaattgttgggtcgattatgcggtaactagcggggtcagtgccttctgcgcatcccccgctaggtagtacgattgtattgtaagattatgtttgataaaatcgactggctcggcc

SEQ ID NO: 87550 - DNA, 469 bp, Heterodera glycines
tcaatgttgccgccgatggtgatacgccgcaggacatgatgatggacacgtcggaaaatgatgaacaccaccagcaccagcctggagaggagggggaaatgccaccacctccgccaacgccgtcactcattgaactgttggacgtcgagaccaatgaaaagatgctgttcccgctggacatggacgaggaggtgacggtgcaatggccggacaatgcgacgattggcaccagtgtcacggacggggacgtgccggcggcgccgatcattttgaagctgtgctgggacagggctgtgagaacgcgcttcgaaagcatggaaatcggacatttgatggagcgtgaggtgaacatgatggcctcgctgaagcagtcctacacgttgaaggagtgcattgacatgtacacgcagcaggagcagctgaacgaggaggactcgtggtactgccccaactgcaaaacgcatcggtg

SEQ ID NO: 87551 - DNA, 335 bp, Heterodera glycines
  unsure (1)..(335): unsure at all n locations
ccaaagagtgaaaaattcattaattaattgcatttatagtcaaattcattaaatttttatattttattggtttaaatttcatttttcttttattttattcattcaaacattgattctatgctaattttattgtttctcctattaatcataatttaacattttcaaattttgttgctaatttccatttgctaattgaccacttttatttgtttaactacacaaaaggacactcgccaagcataataaaaactgtccattcgtnaaaaaaaaaaaaaaaaacaacaaaaaaaaacaaaaaaaaaaaaaaaaaattgaaaaaaaaaaaaaataaaaaa

SEQ ID NO: 87552 - DNA, 259 bp, Heterodera glycines
atgacctgagttcggctgtgggcgaagaaatctttgtccgtcatcggctgattctatgccgaaacatcgaagcgttcgaacgaatgctcacccaggacggaacggagacaaaaaagaactctaactgaccgacgatccccagtgccgaccgatgttcgggcccttattgctcttcctctactgtcaccacattgcgtagagtgcctaaaatgcactgccagcgctcatttcggcggacaaatacaatgtgacaggctta

SEQ ID NO: 87553 - DNA, 616 bp, Heterodera glycines
catcctctaaaaattacaatcctctcagaaaatggcttcatctttctgctcctcaatcatttccatcgtcgcaattgtctgtttgctgtgcaaatgctgcttttcggcaccccatccatgctgtcctggcagccaacatgtcgtttcgatgatgaaagatcacaccggcacattctccgcttcgatgccaaagtcttcgctttgtatgagtgccgaaagagtcgccgctgcggtggaaaaccaactgaaaacaatttggtgccctggcaatggtagtcaaacactcatcaacgagatcaacgcaactcaatcatcatcagatgagtgtgctcgcagtctcggcttcgtccgtgccatgttcgaaattgccgcttccgccgcttcccatgccggtgccaacgccgatttggctgtccagttccgagaacaagttggcacaattgacagcaattgtgccgcgttgggcattcatgttgggcaaatcagcttggatgcccccaggggagaccatccgcaagtgcatgactctgagagtgtgcttagtaaccctggcaccagcgggtctcacaagcgcttttaagtgaatttcgtagattcgatgatgtcatcatttgtt

SEQ ID NO: 87554 - DNA, 654 bp, Heterodera glycines
actgacttatgccacggaagagcggggcaaaggcatggctttaattggtggctccttctccctggcttttttgattggcccttccattggcgcctttttctcgatcggtgcccgggaaagtggcgagttcgacccgtccccggctctaccggcaattgcactcacactggcagaattggcacttttggtgttctttttgccggagacattggccaaggcaaagaatgacgattgccataaacaaagtgggcatagccttcggcatttgttgtcccctcgggcgctgttttccttcgacttcttgtctccggcatcggcttcctccccgccggtttcggtgccattgctccaaaagtattcccgcgtctactttctgttcatgctgctgttctccgccatggaatttactctcggctttctcacccatttgcgcttcaattacagctcaatgcaacagggccggctttacctgttctccggcttttgtatgctggtcattcacggattcgttgtgcgacgcattccgtcaacactcaaagcacaaagtcacggagcgctagttggactggtctcaattgtgccagcttattttgtcatcgcttttgcacattgccaaaatgcccttttcatgggacttcttctgttctcagtcgg

SEQ ID NO: 87555 - DNA, 789 bp, Heterodera glycines
ccctattcttaccacaattatttgttcgtctccaagtctcgtcaaacgtctgcatttattgttcatcaatccttcatcggttgccgcccgcgcgcacttcaaaatggacgccctcaaaagacttgcgagccgtgcacggcagaagtcggcggagatcattctgagcgcggagaagaccgaaatcggcgccgagcttgaacaattgctgaccaagaccgacaagacggaggagcacatgaagaagctggtgcatgccatcgaggtgtacctgcagccgaaccctgcagtccgagcgctcgacccgcgaaaggacaaatccggccgacagaacacgctggacggtcttggggaggcgatgaaggaagcagcatcgaaagcggtgggcgccgagtcgaccttcggagccattctgctgaaggtgtcacagacggagtccaaaatggcagcaggggaacgccaactcatccaatcggtcaccacgcaaaccttggcaagcctccggcacctcctggagaacgaactgcgcaccgtccagaaggaacgcagcgtgttgaacaagaaacggttggatttggacgcgacaaaaagccgttggaagcgcgcctcggacgacaaaaaaccctctgttgaggcagagttgcgcaaagcccaagacgaatttgacacccaactggagaccatcagcactgcgttggaggctcttcaacggccgtggatcgtcaggctgaacaattggtgcagttcgtggcggcacagatcgtatgccacagcagcagcctcaaacttctg

SEQ ID NO: 87556 - DNA, 625 bp, Heterodera glycines
aaatgactgcggaggaccctttataaccaacgcaaaagtggcggcgaccgatcgttttttatgcgacccgtcgatgatgagcgtgccgcgatggtcgtggacagtgagcggctcaatttggaaggcgcggacgacgcggcgggcggtgcgtccgtcgtgtgcccaaccccttcttggccatgtctctgcagcagcagcgccaacgactgcccatcgcaaaatgtcgcaaccatttgctgtacctttgcgaacacttccaaacggtggtcgtcgtcggtgaaaccggatcaggcaaaagcacgcaattgccacaatatttgactgagttcggttgggccgaaaatgggcgcagaatttgcatcactcagccgcgacgggtggccgccatttcgctggcgagtcgcgtggcggacgaaatgatgtgtcggctgggagacgctgtgggctattcggtccgatttgacgagtgcatttcggcacgcactcacattaagttcgtcaccgatggaattctgttacgtgagctgatgagcgacccgttgctgcaggcgtactccgtggtcatcgtcgacgaggcgcacaaacggtcagtgaacacagacctgatcatcggctccctgcgcaa

SEQ ID NO: 87557 - DNA, 731 bp, Heterodera glycines
  unsure (1)..(731): unsure at all n locations
gaccgacgcccgtgcccgttctcgctcttcgaaacggggcaaattgttgacattgaacatgctcagaatgttgtgccaaacccaccgagcggaaatagaggaatgcaaatggacggacttttggcaatttcacgtcgtgtgtggcgcctgaatgagaacctggcctctgtccagaattacttgtcgctgatgcttgtcacccaaaaaattaattgctgggatatccagcattgtcaccgcgacctttttatccatgacggggcgctgctagtggaacatgcgggaaatggccactttttgtccgttcgatccctgtctgcggccaacgaaacgcacggggtattctattttgaggttactgtgcttcggatgcaaagtgatctcggcgtcggttttctgtccgatttcatcggcatgcatgagatggtggggcactgcgagagttccttcggctactggtcctatggcagtttgcattgtgattgttcgacagccgacgcacaccttgacggttttccgcagttcacgacgggcgatgtaattggatgtggactgaacgcattcaaccgtcatgtcttctttacgcttaatggcgagaaattggacatggnggattcttgctgctgatccggtccgcctttttgccgccgtcactttggttgacaacaaggacgccatccgtgccaactttggaccttcattcgtgttcaatttgtccagtgtgctgccat

SEQ ID NO: 87558 - DNA, 724 bp, Heterodera glycines
  unsure (1)..(724): unsure at all n locations
cagaaacatacatacacaacttctcatgtcagccaaccgacgcctttacgagttgatcgatcttcaccgaaagtgcaaagaagacctaccttggaagtattggatcgccttggcagaaaaggacaaaaactgcaatgactttgttgccacattacaggaactggttaaagaggacgcttatgcgtctatcgacggatctggttcaaatgcgttgctcatccgtctccgcgaactttacccaagtgttaatgaaactcttgcgtggactgaacttcaaaaattctccgaacaatttccgtcaactcagcgtatggtgcaagcacttcatgagttaattgaaacgccgggactttattgcggacccgttcccaagtcgtcctcatcagaggaacatttttaccattctgtggcttgcgttggaccaccgccggtgaaaattgatgctggtgttcagtcgacttcctcatcaacggctcccattccgaaaccgctggacaaatcgatgaagccaccgccacagcgtccccccgacgatttctctgagcatttatacgatgttccgccgaccattgatgcccatcctccgccacagcttaagcaacaaaacattgtgccgcccattcgtcagccgacttcgtccgcttcagctgcagtgccattgccgtcgcagaaactggtgctngtgttcagtctttggttcgccgtttgcctttgtcgtccaaga

SEQ ID NO: 87559 - DNA, 705 bp, Heterodera glycines
  unsure (1)..(705): unsure at all n locations
tgagctggaactgatgctaactacaactgccgacaactgacgaggagaatgaggaacttggctaccggacgcccgacgatttgttgctgtggaaagtgttgaggcgttcatcggcggcccctacctattttgacattatggacgacaaatacattgatggaggcattattgcgaacaacccgtcattggaactgctccagcaaatccaatattggaacatcttcaacaagcacaagaaatttcccaatgccgtgaacgttggatgctttctgagcattggcaccggtgtcattccgaccactccattggagcgcactcatctcgaagtttcgccaaactggatcacccaaccgatcacctcgataaaagcagcgctgaccatcggcgaaatcctggttgaccaggccactgccgctgaaggggtgcccgtgcagcggaccggcgctttttgcatccaacaacgggncgccgttctttcgcctcagcgcgccgctgttccgaaaaatacgattggacgagacaaatgacgcggacattgtgcaaatgatgtgggattgtatgggagtacatgtacaagcatcaggactatgtggaacnggttgtgcacgctgctgcgacgggttggccatgcggagcaccggcgccgtctgttccaaaccaatggggcggcacgtcttctgcagctgttggaccaagcgcagaaga

SEQ ID NO: 87560 - DNA, 775 bp, Heterodera glycines
ctgaagatgagacacgacacgcatttttggcaagaattttggcagaattgaagcacttacgaactttggatttgtccgaatggttactcaccgatttcactgtcctacagaaattggaaaaccttacgtcattaattctttacgacattcacaatttggaagggtctatcgacacgttgtgcaaattttgcaaactcacgggactcgatctgtcccaaagcgatcgttcctccagcggactgtacgctcagccggtgacagcacttcacaaattggtgtccagtttgccaaagttgaaatatttggacatttctggcacaaatcttacgactttgccttccgaaaatgatcgtccatttcgcggtgccggaacgattgacagtgacatcccgggactgagttatctgaagaaaccgctcaaatatttgggcattttcaactgtgaatcgagctcgcaatacaaaaacatcccggcggaaaagataagtggcgaccatggagaggaccaagtgctgacagcgatggaaatgtacttggaaagacccaaaacaatgcaagcggtgctcaacgaaagttaccatttgtaccgttttggcaccaatttgagtcgacaagttgaagcgcttcacctcgtgctaaagtcgatgtccttgcacctcaacaacagcaacctccaaattgccggcagtgcttcgatgttttacataattcgctctgtcaaaatgaattggtccacacgacggagagtgatttttgcgctaattgatggcatggg

SEQ ID NO: 87561 - DNA, 707 bp, Heterodera glycines
agaatttgcgggatcgatgttaaagacgtgaagttgtcgctggctaagaacgatcgtatcatgcaggaagaggctacaaattggcgtcgtcatacggaggctattgttaaggagttgggggaccgacatcacagtgacttttctggactccacaaattgctattggaactgtgcattcgctcttcacaattaccacaagctcaacccgctgttgtagaaacgaaacagtcgaaagaggacgaagatcacacgaagaaggatgttgaagttgtgcagattgctaagaaggatgttgaagttgtgtagattgctaacaaggatgttgaagttgtgcagattgctaacaaggatgttgaagttgcgcagattgctaagaccgctgagcctgctgagtttaaaccgactgttgagcctgatgcagaagttctgaagactcttaacaccgttgagcctgttgggtttaagccgactactgagcctactcctgctgttaccaccgctgtttctgttgctccgttgagtggcactttaaccttcaccgcttcgtccatccctattagcggcagtctttttggtggtgcttgtagacccgggacaaacacgttatcgaacttggcggccaatgtcactgctaagaccactgaacctgttggatttaaaccgactgttgagcctctgcttcctgctgttactactactgctgtcac

SEQ ID NO: 87562 - DNA, 405 bp, Heterodera glycines
tgtgccttttcctgccgccggaattgccgtgacgggcggtgtgatagcaattgggcctttgtttgtgccccgcgggtttattctgctagaattgcgaccatgccgtgccctttgtggagccactggtcaaactgtcgcttggagtgccaatgttcgcgggaagggacctccaaatgcgatgcaaaaggaaatgcttttgaaagtcggacttccaaggccaattttgccaacggggtttttgcgacataaaaacggacgaatgccaaaaggggaaaccccggggggcgaagtgcccggcgggttttgtcatgagaccgttgtgaagaaatatgccctccgggcagattcggcactgactgcgactaggcagtgccgatgcaagtcaggcctttgccatcattcttc

SEQ ID NO: 87563 - DNA, 388 bp, Heterodera glycines
tgactcgcagaagctggtgacacactttggcacaccgcgtgacgtgaagggcaaacatttgaagcgcatttgggaattggagtacccggaggaagccgaagtgtcgctggaccgtctctgatcagcgacacggattgaattgtgctgctgatcagcacatgaacgccggaggaaggaggagtaggacaaatgccatcgtcctcataaagttggagcagtacacacccaccacaccgtcatcctttgccgtccggagagtgatcgatccattgataagcaatcactcactcgcccaccaccttattgatctgattcccacttgatcatcattccattatccgaaaatcacttcatcccaaaaaaaaaaaaaaaaaaaaaaaaaaaaaaa

SEQ ID NO: 87564 - DNA, 589 bp, Heterodera glycines
accttacaagccctcctcacggtgacgacgttcctcgtgccgagccatgcccatcgcgaccgtgtggtgacgatctcgtcgcctgaaaactcgaactttattcagtgcgcccctagctatgcattccgcaagacgggtgttcttgaaatcgccaacttcgagcctcgttgggagcaaatgctgtacacgcttttcctggcggaaggctggatcgtgaatgcccctgaccacgaaggtcccgagagcgctttctcggctggccgctttggtggtcacatggtgcttgactcgatgcgcgctgcgaacaactttaagccgctccaactctcgaagcgccctatgcacattggtcacggctactcgggtggctcgacgcccaacggctgggctgcgagtctgcacgagacgtacgccaacgagctgaacgtggtgggctggtcgctgggtggctcaatgactgacccgctgtacacgctcaactccctcgacggtaaacctacttcgtcgctggcggtggccggtgccattggcttgatggacgcctacagggacgaagtccgcaacctgctcgatgacgaagtctggaccg

SEQ ID NO: 87565 - DNA, 832 bp, Heterodera glycines
  unsure (1)..(832): unsure at all n locations
gtgatgaattttgcttgttgctgtatttttaagagttgccaacgttatttttcgagcagtcgtaaacaaacggaacaatatttggaacgacaggccaacgaccaatactcgaggcgggccagagaacactcataccgtgcaaggagtgcctttaaactcatgcaaatcaatgacaaaatgcacttcatcaggccgggtaccaataataattgactcgttgcgattgacgcgggtgcaggttcatttctgttactcttttctgttgaaactcgctctttgcccagcgcccggctcgtggtgccaagtgctcagcgagttgattttccctaacaatttcgcaccaaaaaaaagaaccaaagcggatgaaagaacggacgaatgtccgtttgatggaactgagcaacgccaaggatatattttgggcgtcgacctttttgtccggccactccttttccttctatcgcatttcctccgttttatttcgcccctttcagacaataagtccaattgaaaatgttgatttactgtgcaaagccgacttcaccagaagagccactcagacagaaatcagacggcgtttgaatggccgaagggtcgatttgctgctcagtgacatggcaccgaatccgaccggcgaatcctacatggaccatttacggataatcaaactctgccgtgacctctttatgttcggcactgtgcccgatcccgagccaatccttgcgcccaatggaattttactttgcaaagtttctattcattattcaattntcaaaaaaaaatcctagattttcgacggcgttcacagaaatgacttaatcaaagaattgag

SEQ ID NO: 87566 - DNA, 798 bp, Heterodera glycines
  unsure (1)..(798): unsure at all n locations
gtgattcgccgccgatgccaacacattcgtttaaggaccttcgaattaattgcattgaccattccgtgatcgcatttcttcgtgccaatcaactcattttccagaagggctccaatttgcgtctgtcgcttccttttggtccattcaacattgatgatgtccagtcaatttgggatgattttgcgcgtcaaatttggcccatttttgcaccaaccattcgacactttggcgttcccgatggccatcttttggacactttgcttcgtctcgtttcgccgacaattctcacggatgatctgatcaacatccattcaatcaattccggtcgtcagtttcccgaagcgattggtgatgatcattttgaggggccaacaacagcaacattagatcgatcaactacaaattatgatggatcaattgcaacttctgctgctgctggtcaagcattgtcaaaatggttgcacatttcgagaaaagatgggcagccgaagcaattgcgattccgcaattttgccaatccgccaaacatggaatggcaaaacaatttcaaagagaaatttctgcgtgccatcacttccgccagctacaaaatttatttcaaaacggacgcttcatttgaaccatttgaattggtgaacgaacgaacgcaagaaaagctgacattgatattcgcaagcgaaacaatttgggcaaaacgatggataatgaaacgatgcccaattggagagacggcggcgccgattcattgggaaagacaaattttgacgacaatttgaacaatgtcgactnttggcattc

SEQ ID NO: 87567 - DNA, 704 bp, Heterodera glycines
  unsure (1)..(704): unsure at all n locations
caggtgctccttccgctcatccgtcttccccttgctcttcctctttgcttcccccgcccgtctcgtctctctccgtcccattgcatcaccgatccagcatttctggcggcgggtcccgcccaattgtcattcggaaagggccccaaggcttcggattttccatacgatccgtccgcgtttatttgagcgaaatgtccgagtattactccattgaacatattgtggccgctgtgcgcgagggttcgcccgcttgggaagccggtctccggacaaacgatttaatcacgcgcgtgcacacccaatcggtccacaacatgactcaccccgaaatgatgcgccgtctcctctcctgcggcgatgaactcactgtccatgtcgttccattgtccagcacctccataaaagagggcgaaccgcgtcgaaacattggcaaacccttgcgcaagaagccgcgacggccgccaaccgcacaacagaaaaacaaacaacagagtcgcaaaggttctgcacttctgcgacgactcagcggcaaacggacagtcggagacatcgttcccggcacttcgtctcagaagcaaatgttcattccccgttccgtgtcctcccaagaagggagggctcaacttttcaacagttcgacttcgaaattggagtaaatttgtatattgctagacgtttattcttgtacttcgggtaatnnttgg

SEQ ID NO: 87568 - DNA, 774 bp, Heterodera glycines
gattataaaaataagatgaaattgctcctttttttctgcctccttttggccaaatttgaatttatttggcaaatgaaaaagcctttagtgattaacgacaatgataaagctgaaggaagcactgggccttctgcggctaatcatcagcagaatgtcagtgaacaatacctcacaaaattggagcttgaaaataggctgctcaaagccgaattgaagcaaagagaaatgatggaagagcttaaagagttgaaagatgccaacattgaacagcagaaaaaggagaatgcgttcattggacaaatccaagagttgaaggatgaacagcagaagtgtttggacaaatatgaagcattggaaaaagaattggccagaaaatacatttgtattggccaattcgctaaacttttgactcgaattgatggaatggaagcccaaataaatggactgaaggaaaaggatgaagaaggatcgttgtcgtcatcagtgccagttgagaaacaaattaatgaagatccaaattcaacgaatcgccatggaatgggaatcgttataagaacacttaccggcagtaggcatatcctcaaagttcatcccagtgacaccatcgaggaaatcaaggccaaaattcagaacattgaacgcactccgattgataagcagagactgatcttcgctggaaaacaacttgagaacggctttactttggagtattatggcattggaaatggggcaaacattgacgttgtcctgcgcctttgtggctgttagagccga

SEQ ID NO: 87569 - DNA, 167 bp, Heterodera glycines
ctgttgcagagactttccatccattcccgaataacaaattttattaacctacttttattttttgttgttttggttgaatattttattatcattataagaaaaatgtaattgcatttaattagtaataaattcggttaccaaaaaaaaaaaaaaaaaaaaaaaaaaaa

SEQ ID NO: 87570 - DNA, 731 bp, Heterodera glycines
agcgaattgaacgcacagatcggcatggaatgggcaaaagcggcgattgccaaagcattggcagaagcggccaatatttcactgatacgaattgtcgacttaaatttagacgaattgaacgacggcacattgtacgctttttttgccattggtgcgccaagcggagccattcaggcgcagacgatctaccttttgaaagaaataacagtagcagaggcagtacagttgctgaacacttccgtcgtgtcaggaaaatttgccgttcgaattccacttgcgacagaagccgagacgaacacagaattggtgttctctggcactcagtttggaaaacagtcctctcctttacctcatccatgcccgccgccgggcccatcgccgcctccacaatttgtcggcttttccggctcaactttagctatcgttgcaattttttgtttcatttccggcgcctttttcattgctggtgcttacattgtccaccagaaaaggcaatacattcgcgggatggcataccaagtgtttgaatgacgaaaggaaactactttatttaatcattcgatgtacatatttttatttttgaattattcttatgcaaattttattttagaattattcttatgctactttgtattctcctgaccagggactgttaagtttagtgtagtcgaaccctttgaacaatgattttgaatgttttttcagatttctatttaaaaagcagtttctgg

SEQ ID NO: 87571 - DNA, 736 bp, Heterodera glycines
  unsure (1)..(736): unsure at all n locations
caataggacgtttctattaagttttgtttatagaatttggggactgtgctgttattctcatttcccctatgattgcctctgaaaacaatcacttagaagcccaaaatggcaacagtcccgagggagaagaagagtcgaattgcggaggcagtgcttcgccttcgtctcttcgcgactgtcattctcgagcatcgaccaacgaacacaccaacatttctcatcactctcttcacgatgacaatgcaccaccttctccctccttggccaatatttcaacaaacattgaactccatccacacaacaatgcgcttggaggttcctcctctcataaattcatcaaaaggccattgaatgcttatatgatatggacaagacaggaaaggaagcgaattttaacggacgatcccaaaatgaagatgaacgaagtgagcaaagctattcagatgggcgaaaaatggaagaaaatgtcggacaaggaaaagaaaccttacttcgaaatggcaaaaaaattctctgaagaacacaaattggtgcttcaagaacaccctgaactgcaatatgcgccctccaaaaagaaggtggtgaagaaactggccgatggaaagcaattgtccgtggtcgattcttcgtccgtcaagtcgtgcaccataacacccgacgcgtcgagaagcacaacgccgcggggttcttcaaatctgatcacaccacaaccggtgtcacagagtcaaatgttntc

SEQ ID NO: 87572 - DNA, 155 bp, Heterodera glycines
ctacgcactgaacgacccaaacagattgttagctgtcgtcccttttcttgtccgtacaaattttaatggcgctcgtgttgtgcagcgggcattgatcagtctcgtgcagtgctgcattgtccgtcaggtggacagtcagccgagcatggtcacct

SEQ ID NO: 87573 - DNA, 126 bp, Heterodera glycines
tgaagtgattgagagcgcgaccattcttcaacttaaagaaggagaaagtgatcgcaagaggaggaatttgctgatcactcccttaaactggcaaatgccctccctccgtttccctcccccgcccct

SEQ ID NO: 87574 - DNA, 568 bp, Heterodera glycines
  unsure (1)..(568): unsure at all n locations
atgacggtgccgttctgcccggcgccggtgcatttgaaattgcgggatattgtgcactgaaaaagcttgccgacaatgtgaaagggcgtgccaaactcggtgttttggcttttgctgaggctttgctggttattccgaaaactttggcggtcaatgccgggttcgacgcccaggaggccattgtcaagcttgtggagacgttcagtgctgctggtgagctggtcggattggacctggagagcggagagccgtgtgttcctcagagcgtttgggacaatgtgtgcgtgaagcaggcgagtctgaacgcctgtcagaacatcgcctccaatctgctggaggtggacgaggtgatgcgtgccggcatgcgcgacttgaaggggggacagtgaaaatgaacggaacggaaatgaaggagcaacaccaataaatcacaaaatgttaatggtttttctttgttgaactctgcgctttattgtttgaatcagaccactgctgtttttgctttttcaatctcgcttttctgaacgaatgaaaattttgaccnnnnanaaaaaannnaaaaaaaaaa

SEQ ID NO: 87575 - DNA, 762 bp, Heterodera glycines
  unsure (1)..(762): unsure at all n locations
gcaagtgtccgaaaggcgttggttttcgcactgtttgattatgtgagggaaaacggcggggaaaagcggccgaaagcggaagagcataaagaatttgcaaatgttacgaaaacttatttcgcttctcttcatgcatttgttcttttgacggacctaaattatgaagagttcgcccttaaattacatttccaaattcaaaacagccaagaaaagtttgctgaatattacacaaacctaaaatcaaaatgtgacaattggaccgtcgacaaatggcaaaataaaatggagagaattggcgaaaaaattgtggataaaagtagcaaagaaaaatgcagagaattcgctgtcaaattggacgaacaacggaatcggagccaaaacgaacagtcggaaaacatcgaaccgcccaaacaaacgtcctttcatcgcacctcgtttaaacgatcggtaaaaacttccaaaatatttgctgatcagcgaatcctccgaaatcgccccatcagcccactcgacgcccaattccgtgctgaactgttccaatttctcgactcgcttttcctgcccaatttgttgccctttcccaataaattcgttgctggcccaggcgacttggcccttttggacccttctctgtccgtcgaattcgaccgttgtttttctgattgtgaacaatccgatgagattaaacaattggacattgtcaatgtctattcagtgctcgtctcccatgattccctttattacactnttcctctttcgact

SEQ ID NO: 87576 - DNA, 683 bp, Heterodera glycines
attgcgaaacttattttgaggaggcgctttatctcacccattccctcgttttggtgcacatttcgcctgagatgtggacggtttttgacctatttacaaggcttttctggaggaaggcacttcatttttctcagattgtgcaccagtgctccacgcttttttgaccaatgacactgacaattttctgtctgtttttgaccgagtgcaacattttctggcgatgtgtgaaaaaacattgaacgatgagggtgaggacggctgtgatgagagcacaaaggcacatgcggcaaaaatgctggaggtttttgtgctccaatgtcaaggacgtgcaagtcatttcatcccggacatattgcgtttggttttcaatcaattgcagaaagagtcggccgatttaaaattgggccaactgaagccacaactattaattattttgatcgctgctttgtattccgattttcaattatgctccaatttgtttggtcagctgcaattcaaaacggagattggcactttcgaatggcttattcgtgagctctattcaaatcggaaggactttgagggtgtgcacgaccgcaaaatgctcatttggttgctctgtcgcattttggctgatggaaatttgcccgctttgttcattaatcagcctgaaaagtttatggagtggcttctgactctttttg

SEQ ID NO: 87577 - DNA, 724 bp, Heterodera glycines
caaaatttggctgattacggggcaatgcgcgctctgtgcgaaggcctccgaaagtccgtcaaagttcacccctccggcaaaaatgaaacattggcaggcacagcaacagcagccgaagaatcggactgtcaattcactgtttcttcaacaagtagcggcaccagcacaagcggacacaacgcatccgcgcacagtcgccacaacgccgccgagaaaatgtcgcaggacgcggaggacggcccggaagtgttgtaccatgacgagcggtgccagcacacgcacgcgcatctgtacaacgcggcacggccaccgatgaatcaggacgaatttgaccaccgttttgcctaccgcgggcccgaacagttcagcgacgagcgcgacatgtgcagacaaacgggcaaattcttccgccagtattaccgcccgtgtttgtccccggaggcgttttggcactttattttgcgctttgtgcccattttgaattggctgccggcataccaatggcgtcaatgtttgctggccgatgccatcggcggtttgaccgttggcattatgcacgtgccgcagggcattgcctatgcattgctcgcccgtcttcaccccgtggtcggtctttacaccccctttttccccccgttgttctacatgcttttcggcacttctcggcacaattcgattggctcttttgccgtcgtttctctgatggccggcatggcggtggaac

SEQ ID NO: 87578 - DNA, 812 bp, Heterodera glycines
  unsure (1)..(812): unsure at all n locations
caaatccgccttattacccaccaaatccgccatattacccagaatatcggcagccgtatgagtacacgagcgatggttattacgacagcagacaaaatcgccacggcgcggctgaccgccgcgacttttacgataatcatcgtgatgattattatgacaatcgccgagattattttgataatcgtcgtgatgataattacgacaatcgtcgtgataattacggcggcacaagtttcggttttggcagcggctttgccggccgatctttgcctccggtgctcaacgaaaataatttcgacccgggccatgcccaggggcgattggtcggcgccacaattgtgccgcccgaggagcaaagccatctcccgccggtgttctacggctcgtcccgccgctttcgacggtctgccgccggcgacgccgtgggcagtggttttctgaattcgtatttgtatccggttccgcaaagtcccggacggaaacgagtgcaaaaccgacggaacggaggccgacgcaccaaacggcggacgatgctttgctttgtgccgtccccggcaacacgacaaagcgggaatatggaattttggcgtcacaatttgctaaagtacagccccaaccaattccaacgccatttcccatacagaacgaatggcgaaatgaacagccaagaccaatcgagaaagagcaaaaggcagacggattttccccggggcgctnctttcccgaacaaccgacgcgggcattacggcgacggcggcgggagatacgatgccggcgaaacaatccgtcgctgatctgtcagccgatggaaa

SEQ ID NO: 87579 - DNA, 773 bp, Heterodera glycines
acaccctgacgaggctgttgctatcggggccgcaattaaggaggtgttcttgctggacatgtgacggacctgttgctgctggacgtaacgccactgtcacttggaattgaaacgcttggtggtgtgttcaccaaactgattacgcgtaatacgaccattcctacgaagaagagccaagtcttctcaacggctgctgacgggcagactcaagtggagatcaaagttttccaaggcgaacgcgacatggcattggacaacaaaatgctgggccagttttctctcgttggtattccgcctgcccctcgaggtgttccacaaattgaggtcgcttttgacattgatgccaacggaattgtgaatgtgtcggcacgagaccgtggaactggcaaagaacagcaaattattatccaatcgtccgggggactcaataaagaccaaatcgaaaacatggtacgtgaagcggaaagacacgcagcagccgacgcagaaaagaaagagatgatcgaggcaattaaccatgcggagtcggtgctgcacgacacggagtcaaagatcacggaatacgcggaacatctcaatgcagacgaagttaatgtggtcaaagagaaacttgaagagttgaagaagaagttggccaaccgtgaaggtttgaaatctgccgaagtgaaggagtcggttaatgagctgcagcagaaatcgcttaagctgttcgaagttgcctatcgcaagatggcagaaaagaaccagcaacatcagagcagcagcactgagag

SEQ ID NO: 87580 - DNA, 498 bp, Heterodera glycines
acagtgcccgggactatgcaactgctgtttacaagcagcacagcatccattcaacccaaatgcagcagcaacaaatccatcaacagcagcaagcgaccattgctcagcctcagcaagctgtttccgccggaatgggcgcagtttcttcttctggcggacctgcgattaatccgcaaactggacaaccggactacagtgcccagtgggccgaatactaccgcaccatgggaatgcatgaacaggccgcactcatcgaagctcagatgaagcaaacccacgccgccgctcaggcacaacgtcctcagcaacaactttacatgcaatgaaggcttgcagaactcgtcgaagaaagacaataatgtggctgaatttctggttatttggattgctttttctaatattatcagtttccgttcgatttcttttatatttaatcatcattacgaaccgttctttgactgatttatttgtcaaaaaaaaaaaaacaaaaaaaaaaag

SEQ ID NO: 87581 - DNA, 684 bp, Heterodera glycines
caatttaagtaaaatgggcgaattcttcttcaaccttgatcacggctatctcgaagctttaatccgaggatttaaatcgggccttttgacaagcacagactattcaaacctcgttcagtgcgaaacgttggaagatctcaaattgcatatacaatcaacagactatgggaactttcttgccaatgagcctgggaatatcactgtgcaggtcattgatgaacggctaaaagagaagctcgtaacggagttcactcacttgcgcaacaattctctggagcctcttgcgacttttcttgactatataacttattcatacatgatcgacaacatcattttgctgatcactggcactctccatcaacggccaatcaacgagctgatctccaagtgccatcccctcggctcatttgagcaaatggaggccattcacattgcatcaaacccggctgaactgtacaacgctgtgctcgtcgacactcccctcgccccatatttcgtggattgcataagtgagcaagaccttgacgaactcaatgtggagattatccggaacacactgtacaaggcgtacattgaggacttctataatttatgcaaaaagatgggcgggaaaactgctgaggtgatgtgcgaaattttagctttcgaggctgatcgacgagcaattatcatcacaatcaacag

SEQ ID NO: 87582 - DNA, 504 bp, Heterodera glycines
atctgatctgtctatggcataggtgtgcatacaatcgcacactgaaatggataaaggccttttttgccaacacgaattgtttattcactactcactcgaacgaactgttagggattctgtcggaaggtattgacggaggtgtgcctgctggtgcacaacaatgaaaaggaagatgtactctgcataccgaccactgctcattgactagcgaattacaagaggatctgcatgtctaccatgtaggaaagcgcccatcgcgaaggaggcctgcttgtgtgtcctatactgccacctgatgaactaggctgttatcctggtcatagctgtttcctgtgtgaaattgtatccgttcacaatcccgcacaacatacaatccgtaagcgtaaagtgtaaagcctggggtgcctaataagtgacctaactcacattacttgcgttgcgcttactgtccggtttccaaacgggaaacccgtcatgccagctgtattaatgaattggccaaca

SEQ ID NO: 87583 - DNA, 723 bp, Heterodera glycines
  unsure (1)..(723): unsure at all n locations
taaagccgactcggggcatggagcagacgatgcagtccatcttcccgcgcattcaagtggcactgcgccggtccatgcagaccttccaagactccattgaagctgagttggcacagtggaggtactgctcgaagatgcaatcgagcaaaatggaggcattgatcagattggtcggcgaatcggttgaagttcagattcgcggccctccggaaaaggccactgcgtgcatttacttcctggaggatctgtccacattggtggagctgacgagtgccgaagtggcgcccggtatcagcacagaacggcacttcctttccccggcacatttgagggaacacagaacgacacctgccatttttacgccagaaacaataatggaaatgcaacagaacgagtcgctggtcattgtgaacagtgacggggaggaggagngaggagttcaccgatgtggtttgtttcggctccaaagaagctgccggtctgctcacgctcggcgtcgacatttccgtctcccaattgcaattgtccgcccgctcggaactcgccgctttgctggacgcaccgaacactttgggcatggactggagcatcctggcggtgaagctgaacttgactgaacaaataccggaggtcgactcgtcaggccaatcgttgtcccgcactgatcagctgctcaccgaatgggcacttcactcgcccgacagcgcttcggtgggcaaattg

SEQ ID NO: 87584 - DNA, 316 bp, Heterodera glycines
agagcgcgcaactctatgcgtgttaaaatggtgctgtgtgaatgctgttgtttacaatattattcatcacattattattattttatgtgtatgccgtgtgagtgtgtgttggttgctctctcattcttttatcatcatatctcttctattagatttgaatttcaaaatgataattaatttattttattgtgcaaatttgctgatcgaataattattgcataatacatacatacaataacttaaaaaaaaaaaaaaaaaaaaaaaaaaaaaaacaaaaactaaacaacaaactaaaaaaactgaactcccgcgcgcc

SEQ ID NO: 87585 - DNA, 698 bp, Heterodera glycines
ttggtttttctattaactctccaacctaatgtattatttatggccattgctcggacttcggttctgtccccgttgctcctcttcatctttcttctgttcactgttgcctttgccatccaaatgtcttttcgcctaatgatttcgcttgcgcgaagaaaaatgccatttttcacgatggactgttcgctctcactgaagacaatcgactccgcattgacccgtcgaagcaaaaaacgaatgacactgggacacaactcgacgctcttctcttgaatcccatcaaagaaagactggtcttttcgctcattttcatcaagggaggcgaaaactgcaagcagtttttcatgaaacatgccgaaaggccgagttgttgtctgtttagcgatgaaatggaattgcataagcatccgtacgcaaaaggcgagtgtcaagctcaaaaatgtacttatgtcgacatgacgtgcagcgttcttccgatggacccggttgagggccttaaggattcttaccatttcaaagcgtcttcatggaacaccgcttcgggtacggatgagatgcagcagtgcgattggatagcatttgctgatggcatccgtattctgcagaagaaagcaggaaatgacaccaaagcattggaggaaaagtgctggaaaaaagtcgcagatggctcctccgcaattcgtgtcgctctgcttgat

SEQ ID NO: 87586 - DNA, 742 bp, Heterodera glycines
  unsure (1)..(742): unsure at all n locations
ggtggggcagtcttatttattgagaattttaatcgaattgtccgattgtctcctcactgtgtctatcagacgacggaattattctccgaacggtttctttaacgtctttccttttattacaaaaacgttctacgcctaagcctactggacctgtccgtcgagttcccgctgttatcatcggaagtgatgtgcgacaaaagcattctgaaagaaccgcatgaaaaggtgatggaacaaatggattctggcaaccatggaatgcttctgatgattacagtgaaattaaaaaacgtcttttgcgtcctccgaatgatttctccaagctcagggaaattatacgcaaagacattgaaagaatggcacagataaaggaggaaaacgtaaaaaagaggaatggaacgaccaatgggaacaagcaaatgacggatgagcagaacgaaacacgggaagaaaatgggcacgaggaggacgaagactgacaagaacagaatgatcaagcgaatgttcttggttttttgcctgacctttcctttctttgtgatccattattggcttaaacaacgttccgattcattgctgttgcccaacgatccgaattcttatttagccgtacttaaccaagtcacttggagcgattttattgaacgcattgtgcctactggaactgtgtcaaatgttcatttgaaagtttctcgtgggcctgaaagaagaatctccaagactgggaaaaccntggagttac

SEQ ID NO: 87587 - DNA, 490 bp, Heterodera glycines
aaatgtcgagacgaacttttgacacataaccgatacgcactctggacacagaggggagacgctctctgaacactgaagcgacacgaactttctacacagaagctagactcactctccacacataggcgaggacgcactctcgacacagaatggagactcactctcaacgcagaagcgagacgctctctccacactgaagcgagacgcactctcgacacagaggcgagacgcactctcgacacagaagcgagactcactctcgacacagatgcgagacgcactctcgacacagaaacgagacgcactctctacacagatgcgagacgcactctcgacacagaagcgagacgcactctcaacacataatcgagacgctctctcgacacataagcgagaagtactctcgacacagaagcgagacgcactcttgacacagaagcgagactcactctcgacacagaagcgagacgcactctcgacacagaagcga

SEQ ID NO: 87588 - DNA, 177 bp, Heterodera glycines
cactgacgcatcgcttcattttgccgagactttcgaccgcgccatttttttgcttcgcgcagactgtcgtacttcggagaaacacgtcacttttctgcacattctccgacaattgggcgcgagtgaagagaatggtggactccttggcaatttgaacgggctcattcgaaacctgag

SEQ ID NO: 87589 - DNA, 531 bp, Heterodera glycines
ccggcttgtgcaatgatggtaccgctggctataactccccccctgctgagatcccgtcaatcgtgcgtcgtacccattatcaccgtgtcatggttggcctgggacaaaaggactcgtacctgggatacgaggcgcattacaagcgtggtattctgacgctcaagcacccgattgagcacggaatattcaccaactgggacgacctggagaagatctggcaccacaccttctacaactagctgcatcgtgtacccgaggatcatccggtgttgctcacagaggctcctctgaaccccaatgctaacatatagaatatgacccaaattttgttctagacgttcaacacacctgccatgtacgtggccattcatgccgtgctgtcgctatactcctttggccgtaccaccggtatcgcgtacgactctggcgacggtgtcacccacaccgtgccaatctacgagggtttcgcgcttgacccatgctattctccgcttggacttggccggcccgtatctccctgactacctgatg

SEQ ID NO: 87590 - DNA, 326 bp, Heterodera glycines
tcaaagtcttaacccgctgaagaaagtgtgctacaaaaaaatttccatcgaccttcccgccagttatatcactgatggacccgtggccgaaaaagtgtttccgctgggcacccttaatttggccgggtcgttcaaaggcgaaacgcgcgactgtctcaactgatctgccgaggcgattgatgtaaagagaatggcacaatgaaaggttgaaaggcatttttggccacacaattcttttttcaattttcactcagtcgaataattaatgattctgtcgttggtatttacaaaattatgccaaaaaaaaaaaaaaaaaaaaaaaaaaa

SEQ ID NO: 87591 - DNA, 418 bp, Heterodera glycines
caccctgaactgctaccaaatgcaactaaagaggacacggaatgagtggccattttgcatgccctctcttacgccgacggaatggcatgcgacgggcgaggaaagactcaagcccaacccttaggctccgaactaccatggcaatgtgtacgacactccgtctgcagaacggcgtgacttggttaaacaatctccgggcgcattactccgccaatcttttacttaccgttacaacaatgccgaccaatcggataatgcaaatgcccatcatccaaactactctgtgcctctacggacaaagcaattatattcgcaatgagcaagagcaacgccgggagtacggaacagatatgggtctcatccagttccttacggtggcccacccaattatgctcacaatcagactgacatgtcaggc

SEQ ID NO: 87592 - DNA, 162 bp, Heterodera glycines
ggcggtgggtgcctccagattaaccggcactcttcactcactaccttcacgatgatggtggtccccagaagttattggtggcgatacacagcaatagcaccccgacctctgtagtagtgtgacggggggttggttgtggaacatgcgggaaagtgtccactt

SEQ ID NO: 87593 - DNA, 325 bp, Heterodera glycines
tgcccaacggatggtaaaatggtggagcgttcctcagggagttggagagagcaattactactttgggtgggcccgatgcgtccgttttcgacaaatcggaggaactctgcgattactaccgctgtttattatagttgaacaggactggctggctgtcggtgaactgctcgacgggctccaccggcgcccttaacgaactttactacagccaaactctccttttttgttcccccttctgtctgccaaaactctgctgatgccttttcttttcgaactcgtccattgccgcctttgtctgattggtgtgccgcttattagggacttc

SEQ ID NO: 87594 - DNA, 301 bp, Heterodera glycines
acaaaatgaaattattcccttattatgtttaatttatttttaataattgtcaaaattgaatcagaaaagaaaaagtacaacaaaagtcatttggcgaaatatttggagaaaaatgggaagaaaaagaagaagaaaaaagaaatgaactcaaaaaaagagaaaaaattgcaaaatattataaaataaaagaaaaaataaagcaaaaaggaagaaaacactcaacaaaagaatggaataaaattgaagaaaaaataacgaaaaaattggggacaaatcgaaaaaaaaaaaaaaaaaaaaaaga

SEQ ID NO: 87595 - DNA, 388 bp, Heterodera glycines
ttgtttgtgtattgaacggacttctgttcattctatgtgcaaaatctgcaagcgaagagtggcggatctctcaaactgaccaatggggccaccgacggacacgcactgtgtaccttgggaatggaagaattaactcttaacggcggccatgactggctagtgttgctcaatctgcaccgattttgcttctggccgcccattgacgggagtggtcggatgcgaattgggtggctttctctgactgagccgcttctgcatgtgtctagcgaatatggcaccgtgtctattctgagtgccagaatatgcccattgtgggccaatcgcgtcgcttttcctaccgacgaatttcaataggtgcggccaaacatgtgctgtctatcacctgagg

SEQ ID NO: 87596 - DNA, 659 bp, Heterodera glycines
  unsure (1)..(659): unsure at all n locations
ctccaccgagctttgtcagtccggtgccacagccgagcggcagccaaatgataccatcagtcggtcaaccgcaacctcaacagcacggactgctgctgacagtgtccccaaaaaagtcgactgcagtggtgacagatgcggagaatgccagtgccattgtgccgaatggagatgatgagcaggcgatgaccaattctgcaaacaaaaagcggacggactatttgagttgggacgaatttttcatgggagtcgcattgatggcagcacaacgcagcaaagacccaatcacacaggtcggcgcatgcattgtgaaggagaacagcatcattggcattgggtacaacggaatgccaattggctgcaacgacgacgaaatgccgtggggaaagggcgacgctaacccgctgaacaacaaatatctttacgtgtgccacgccgaaatgaatgccattttgaacaaaaatagcgcttccgttgacggggcaacattgtacacgacgctttttccatgtgcggaatgtgccaaaatgatcatccaatcgcgcatcagtcgggttgtttattntgagcgacaaaataccgtccaaatggaggcttcgcgtcgccttttcacatcacaggcatcaaattcagccgatacgaatcctctcgtccccgag

SEQ ID NO: 87597 - DNA, 654 bp, Heterodera glycines
cagaagctgtatcacttggaggatttttatcggtttcacgagttccattcgcccgctttggatgatcccgactttaatgccaaaccgatgattttgttggtcggacagtattcaactgggaaaacgacattcattcgctatctgttggaacagaactttcctggaattagaattggtccagagccgaccaccgatcgtttcatcgtggtgatgtacggcgaagaagaagctgttattcctggcaatgcgcttgtcgtcgactccactaaacaattcagagcactgacaaaatttggaaatgctttcttaaaccgttttcaatgttcgatgctgaagaatgaagtgctaaatggtgtgacaataatcgacacccccggaattttgagtggcgaaaaacagcgaattgatcgtggctatgatttttctggcgtccttgagtggttcgctgaacgagtggatcgtattattttgcttttcgacgcacataaattggatatttccgacgagttcaaacgctgtattgaggcactttcagggaatgaagacaaaattcgaattgtgttaaacaagtcggacatggtcgaccatcagcaactgatgcgtgtttacggcgcactgatgtggtccctcggaaaagtgttcaaaacgcctgaa

SEQ ID NO: 87598 - DNA, 722 bp, Heterodera glycines
  unsure (1)..(722): unsure at all n locations
actctgttttttaaaaatcccaccgattggcactttcattccttggactttctctgcacttagaattatttaaatggataaattggttttaaaaatccgtgagctcctcgatgagaacgaagtaaattttggggaagtgcagcgaattttggaagagtataaaagtgagccgaaggattggagacatttcacacattttgacgaacacaaatacacgcgaaatttggtggacgcggggaatggaaaatacaatttgatgattttgtgctggggacccggcatggggtcgagcatccacgaccacagtgctgcgcaatgcttcgtcaaagttttggatgggcaacttttggagacgcgatttgcatggccaaagaaggaaaaagaagagaaagaggaagaaaaggaagaagagaaggaagaagaagaggaagaagagaaggaagaagaagagggaccgatgagggcgacagggacggagctgttcaaaacgaacggagtcagctacatcagtgacaaaatcggaatctatcggatggaaaatccctcgcacgtcgacccgacggtgacccttcacctgtacattcccccgtacagccaatgctattcatttgaccaagtgatggtccccattattttttcaatttaattttaattcttttttttcatcgaagcgaacggggcgaaaacagcaaaatacagtaagctttcattcanagtacggt

SEQ ID NO: 87599 - DNA, 682 bp, Heterodera glycines
  unsure (1)..(682): unsure at all n locations
gtggattgattctcggatatttaattactctgttttttaaaatcccaccgattggcactttcattccttggactttctctgcacttagaattatttaaatggataaattggttttaaaaatccgtgagctcctcgatgagaacgaagtaaattttggggaagtgcagcgaattttggaagagtataaaagtgagccgaaggattggagacaattcacacattttgacgaacacaaatacacgcgaaatttggtggacgcggggaatggaaaatacaatttgatgattttgtgctggggacccggcatggggtcgagcatccacgaccacagtgctgcgcaatgcttcgtcaaagttttggatgggcaacttttggagacgcgatttgcatggccaaagaaggaaaaagaagagaaagaggaagaaaaggaagaagagaaggaagaagaagaggaagaagagaaggaagaagaagagggaccgatgagggcgacagggacggagctgttcaaaacgaacggagtcagctacatcagtgacaaaatcggaatctatcggatggaaaatccctcgcacgtcgacccgacggtgacccttcacctgtacattcccccgtacagccaatgctattcatttgaccaagtgatggtccccattattttttcaatttaattntaattctt

SEQ ID NO: 87600 - DNA, 654 bp, Heterodera glycines
atcgtattttacagcaacaaagccgcagtttttttcgaggaaggaaaatacgacgaatgcatcgaaatgtgtggaaaagcggtggaagttggacgagagaatcgggcggactatgcgctggtggcaaaggcttacgctcgaatggcaaacagttacaaaatgaaggacgaccccaagaaggcactgcacttctacgaaaaggcattgtcggaacatcgcgacccggacattgtgaagaagcacaaggaattagcgaaggaagtcaaagagatggagcagaaggcatacattgacccggaattgtcggataaagaaaagaacttgggcaaccaattgttcaagaaaggcgattaccccggggctatgagacattacaacgaggcgattaaacggaatccggacaacgctgtgctctactcgaaccgtgccgcgtgcttcaccaaacttatggaattccaaagggccgtcgacgactgcgacctttgcctgaagaaggacccttctttcgttaaggcgtacatcagaaagggcgctgctttgtccgcaatgcgcgagttcggccgagcccaaaaggcttatgaggacgcattgcaaatggacccgagcaatcatgaagcgatggagggactgcgcacgtgcatgcagtcgaacgaa

SEQ ID NO: 87601 - DNA, 429 bp, Heterodera glycines
accttcgattcactgctgattcaatgactgcaagtttcgttgaatggttcgcggacacactttcctataaaagctgtcttcagccggaaatcacccggggaattaacggaaagctgaaatggcctcacgggacgcaattaattgtggaaatatcgctgaaaaatgttttttatgtcgaatggcttttggacgaccgaccgctaaatagttgcgaagaattgtttagagacgggcgactgcttaagggcggtggcgacggtgtacaaattatcgactctttgtattcgtacggcgaatggctgagtcgtctcgtgttgcccgcggcgttgcaaaacaactgcggcagagcctctctcgctctgctgaccgtccgtgccaccaacaaattgggcaattcatgtgaaagctctgtgcgaatcctgccgaccg

SEQ ID NO: 87602 - DNA, 188 bp, Heterodera glycines
  unsure (1)..(188): unsure at all n locations
ggaagaaaacgaacgangnaccgggcnggcgaaagcaggagacgagggagcggacaaggcccaggggggcgagccgcggaggagcaaaaagcgaaggcggcnggcgcagagcacggaccccgcacagacattctttttttgtatcgaaacgaccgagcggagcggaaacgcgaggaacgaggagagga

SEQ ID NO: 87603 - DNA, 445 bp, Heterodera glycines
  unsure (1)..(445): unsure at all n locations
ttatgccctcctcctcctctctgttggcctttgctttgcccagtttgatcagtctccgtccgctgctctgaatcatgtgcgggccaaaagaggctacaagccgtggaagaagcaatccttctcctcttcttcaagcgaaatgtacagaaggagaagacccagtggtaacggtcattactggtanataacggctacggtagcaatggatactatcgacgaaaacccggcattttagaacgggcgctgggaaaaattacgcggagctattaacggacgagcagaagaagagaagcaaaaagccaaacaatgggcgtaacacttttaattgatcaaacgatattacagtatccaacaccaaaattacagtaaccaaacatccaatggaacgaatgactcatttaattcagcaaatttgctggaattgccgataaagaaacttagcnna

SEQ ID NO: 87604 - DNA, 535 bp, Heterodera glycines
  unsure (1)..(535): unsure at all n locations
gacaacgtcggtgactgtctttgcggccgaattgctcagagaggcggaagttatgattggacagcgaattcatccgcaagttattgtttccggctatcgaaaggctgctcgagttgcgaaggacgcacttgaaaatgctgcccaagcatcaggagagcatttgcgcgaatatgctcngaaaattgcgaagacttcactgggttccaagattctttcccagcattccaaccattttgccaaattggcggtcgatgccgtcctccgactcggccccaacggcgctttggactccgtccaagtgattaaaaaactgggtggatcgatggaagattcgtaccttgacgagggatttttgctggagaagaaggccggcatgtaccaaccacagcgaattgaagacgccaaaattcttattgcaaattctccgatggaccacgacagaataaaagttctcggaagcagaattcgagtggatccagtggcaaaaattgccgaattggaacaagcggcaaacaaaaacaaacccccaaaaaaa

SEQ ID NO: 87605 - DNA, 617 bp, Heterodera glycines
  unsure (1)..(617): unsure at all n locations
ttaatgttgggcacccaacgagttcaaaggccaatggatgcgttatgccgaaggctactgctttgttgagaacacgtactatgtgtccatgcgcgagcggttcccaatgcgcgagattgatcgggagcagcgagaaattatttactaccagtggangncttttctgttgcttggtcaggcattgcttttgatggcaccaaaatttttgtggaacgcgttcaactggaaatcgggcctgaacatcaacttgttggtgcagaaggcgcacaagcagtgcaaggcgggcacgcgcaaggacaaggaggaggcgagccggcagattggcgtgcgcatccattgcgtgttgcagcacaacatgcttgccaagcttgacatcgtggaccatgatgggagtggccgtacaatgcccgaccacgtggactggaaaagtgttaagccaacgcacagctccgtttcatttttctacattttattcaaattgtttaatcttggctctgcgcttgttcaactgtgcctcattaattacttcatggtgcccgccaattacacctattggggctttgatgtgctggccgatctggttgccggtcgagactggtcaagatccgggctgttcc

SEQ ID NO: 87606 - DNA, 579 bp, Heterodera glycines
  unsure (1)..(579): unsure at all n locations
tcttttgtcgtaccacttttaaccgttgaaattcgacaatggctgaagaagcggtcgttgcgtcggagatggaatcgcttgctctcacttcttcctcaccgtgttcgccggtgctctctctgctcagcgaggaaatgcttcagaaagaggttccttgcgtgtgctgtgatggcgacaaagttgtggtccgtctctccatcttgtcacagcgcggattctttgccaaaatgttgcctgacctcaacgtggaagccaacggactgagtgaggactttctgttcgacatgaccaaagcggagattccggccgacactttcataaagatcgtctcttggatggaggaacacatgggtcacccggtgcctgcattcgacgcggatcccatcactttcgagcgcaaatggctcacccaaagcgattgtcaaacgaattcttccaactgtgaatttgcggaggccgccgcgctactgaacgccgcctgcttcctcgacttgcagcttctgtcccgtcactcctcgcaagcggtggccagacgtntcaaggaccgttcgccggaagagattcgtgatatgctgcacc

SEQ ID NO: 87607 - DNA, 156 bp, Heterodera glycines
actacgcactgaacgcaccaaaccgattgttagctgtcgtcccttttcttgtccgtacaaattttaatggcgctcgtgttgtgcagcgggcattgatcagtctcgtgcagtgctgcattgtccgtcaggtggacagtcagccgagcatggtcacct

SEQ ID NO: 87608 - DNA, 301 bp, Heterodera glycines
ccggctgagcccaaccctttgccttccttcgtatatttgcgccactccgttttgaatactctggtgtaccacgtaatactgtgaatccggccgctgcagcacctatgggagagctccaaccgtcggagcaacgtgagatcttactcacctaacagctggcgtaatatggtcaagctgttcctgtggaaatgtatccgctcacaatccccacaacatacgagccggaagcataaagtgtaaagcctgcggtgcctaatgagcgacctaactcacattaattgcgtagcgctcactgcccgct

SEQ ID NO: 87609 - DNA, 137 bp, Heterodera glycines
  unsure (1)..(137): unsure at all n locations
cccccccccccttttttcnncnncagaagatgnatggacggaaatacccatctgtgcggtctgngtaaaaaaatgccacgcccaagatcaatnccgatgtgccttccaacacaactaacatctttttcacttgcacc

SEQ ID NO: 87610 - DNA, 697 bp, Heterodera glycines
gtgaagataaaaaaccatataatagatcaaagtttgagttcctattttgcattggcttaaatcattccccatgggtattttgcgcaaccgttcgatcaatagaattccaattcgaattgaagaatgtgctgagaatgaaaatggatttgccgatgattatgcaaactatctcttcgattccgaccaatccgacagcgacaatgccgaagaggaaaacgaagtgtcggtccaaattcaaagccaacccatcggaggccaccgacgcaaaaagacgaaaagctatcggccgattgaaattgtggacggatttccgttgaagcgaaacatgggggcgcagaagtggcgtcgtgtggaaaacactaggcttttgacgagttttgccgacactcaggacatttgctttgatggttccgatttaatccccgagacgatttctgcgttctcacgccttttgcgagatgaggcaaaaatgaaggtttggaatgacttcctggagaaagacgaatcaggacagaaaaagatgctttcgcaattcgaatacgaaattctcatggcacgcgacgcttcgaaggcgcagcattcgcaacaatcggtcaaaaatacggacatcaaaaagtcggagagtcagccgcacaataaaaatggtcagccttcgtcgggtggtggcaaatcgtcgtccgattgttttcagcgactc

SEQ ID NO: 87611 - DNA, 643 bp, Heterodera glycines
aagtttcagttcctattttgcttggctaaatattccccatgggtattttgcgcaaccgttcgatcaatagaattccaattcgaattgaagaatgtgctgagaatgaaaatggatttgccgatgattatgcaaactatctcttcgattccgaccaatccgacagcgacaatgccgaataggaaaacgaagtgtcggtccaaattcaaagccaacccatcggaggccaccgacgcaaaaagacgaaaagctatcggccgattgaaattgtggacggatttccgttgaagcgaaacatgggggcgcagaagtggcgtcgtgtggaaaacactaggcttttgacgagttttgccgacactcaggacatttgctttgatggttccgatttaatccccgagacgatttctgcgttctcacgccttttgcgagatgaggcaaaaatgaaggtttggaatgacttcctggagaaagacgaatcaggacagaaaaagatgctttcgcaattcgaatacgaaattctcatggcacgcgacgcttcgaaggcgcagcattcgcaacaatcggtcaaaaatacggacatcaaaaagtctgagagtcagccgcacaataaaaatggtcagccttcgtcgggtggtggcaaatcgtt

SEQ ID NO: 87612 - DNA, 723 bp, Heterodera glycines
aggattgaccttcatatgacctgacaatgcactcgagtcaaacgatccattgacaaagttttttgcgctttatctgcttcaacgaatgtgttcagccacacttcgacgcggaaacccttcttcgcattgagtcaacctggtggacatccacgaaattggcattctctccgtgatgtcgccattgcgcacgtgcgcaatgtccgaaatattttccaaatagccactcattgtaaaattctggtgcattcgccgggggttggaagtgcgtcgattaccaagtctttggccgatgcgtccgttttcgacaaatcggaggaaattgacgaagacaatgctaataaatcattggtgaacagaaatggcagccttttgttgaactcctcgacgggctcaaccggcgtactgaacgaactttacgaggccaaacactccttttttgttcccccttcgctcaacccgcgctcagctgatgcttttctttccgaacgcgtacattgccgtcgtcgtctgattgttgtgccgcttttttgtgatttcattgtcaacagatgcaaagaattgctttttgctcctgcaccgattgtctctttctacgacaccctttgcactttatatgcaattaaagctctttccaaagtgatctctcactctcttcatgaggatgaattcggagttgtgcagaatgacatgagtaagtcgctttccgaactgacgcgcctttca

SEQ ID NO: 87613 - DNA, 682 bp, Heterodera glycines
  unsure (1)..(682): unsure at all n locations
tagatttgttttgcttatttgatctgaaaattaatcagaatgaccagcgaaaagaatttgccgttgacaattggcgtgtgtgcttcttccgttgcgctcggctgtattgcgtacaaattgttgcagcgcaaaggctcccagcaagaacttctagacgaaatgactttgaggaaaaagaaagacgaggctcattttatggactcactgaagttggacccgaacactccgctcaactcacacgagttggcccttgcttcactcatctcattttccgaggatgccgcttcgttcgagaaagtgggcggctgttcttccattttggaacttctgaggcagaaagttgttgtccctcttcaactggcgtccaacaggaccactcttccgtcgttgctgtacagtgcgccgaaaggaattcttctttatggaccaaatggttgtgggaaaactctgattgcgcgtgccattgccaaagaggtggatgcgtacttcatcaattttggaacttcgctcgtcgattttgtcaacggatcatccgttactatgaagtctctgttcactttggcagagaaaattcagccgtgtgtcattntcatcgatgaaattgacttgctgttccatcgcaatcggaatgactttcagctgctgaagacgcaattcctcgcgcaatgggatgagtttctgc

SEQ ID NO: 87614 - DNA, 682 bp, Heterodera glycines
acaaattggtggcgcgggtcgacggaacgcggcggcggagcgagcggactttttccggcgagttttgtgaccgaaaacttcgacaacggacaaatttcgaacggaacggaacgaaacggcgagagaacggaggcagtggaaacggcggttgtcccaaaagtgcaaatcgatgaaactgtgctgatgaaatgcatcgaactgctcgagaagtgtgaccccgaggccgacccgtcgtccgaccctgccgaattgccttttctcgagcaaatggcgaaggctcaagcaccactcatcgatcagaaactcgtcaaaattgacaaacagctcagcatgttggccgaggtggacatcgcaattcgcgaggtgctcaccgcgtatgacacggccgtgcagcgggtgcccatgccaatgcctttctctcctcccgcgggctcactcgcctcgtccgcccctccgcccgtctccttcgcctccaccgcttcagttccgtctgttaatacgccttctttcccaacccaatggactatgaatggacagtggcaacagcagcagaaccaaaaccaatgaaattgttggagtggttcggatggaggagagagagtcattctgtggtccatataaatccattataaaaatgaccgatttaaaaactaattttactgcttaagagtgaacaaattta

SEQ ID NO: 87615 - DNA, 614 bp, Heterodera glycines
  unsure (1)..(614): unsure at all n locations
taaaagatccgaaaaaatgccaacattttcaaatccttctgattgtgcttttggccgtcgtctcattccgtctctcggcttctactggtgacaaaaaaaactgctaatgatgggagtggaaacaactcatcagctgggattggtacgaagatcaaaagaattgtcaccgctggactgctcttcacttccctggcgacgggtggggcggaagcgattgggcgaagcaatgctcagggaggaaatgccgccggattggtgccatcgcatgtgaccaatcgctcaatggctccaccacctcctcctgtgcaatttgaaatgggggcaaatcgattagaaaaaatgagggcacacctacgcgaacttgctgagaaaatgccgcgcaatgaatcgaagcgtctgtcaccgagtggacccgacccacatcatcattagggccatggatggatctaacggaggaagaaagaatggatgcttagttttcagattttattctatcctcttttatttattagtttttcaaaacaaatttcttccacaactttttaaactatttgttgttttgaatctttttagataaatctaaacccctannaaaaaaaaacccattacccaaa

SEQ ID NO: 87616 - DNA, 152 bp, Heterodera glycines
cgggcctccgcgctgacctttccttgaccgaagatgttcagcggaacgcatgcaggatcgtcgttcgaggtcacggcgtcgacattcacggcgcagacaggcgctccgcctggtcccgcgacagcgttcacagcacgattgaaattgtccgt

SEQ ID NO: 87617 - DNA, 652 bp, Heterodera glycines
cagccgattcggaaaggcagtttcatttgtttcctcggcggcgaaatctttcccttcgattatccgtccaaaaaagcggaggaattcaaacaaattgtcgatgctgacaaagtctgcttcgccttcagtgacaaagtgcgtcaattcgcctttttcgtgcgatttgaccgattcctaaagaatcgcgcttttttaacagcgcctgctgtcccaacattcgtttggtccatctcttccgcaattggctttcccccgaccgccctttgctcgctttcgttgccatttctgagattggcgtgggcgaagaattgacccattactacggcgaccgttggtttttggacaaactttccgttcgtccaaaatgcgtttgtcgctgcgcttcgcccttttgcgtttggccgcccaaagcgaagcgacgcgacgactttttctcaaggccaaaggaccgccaactgaaggcgaacaaagtgcgagcggagctgacacagcgaaggagcgggcaggaggaagagacgaaaaagaagcgaaacacagaagagaaagagaaaatggagggatagagagacggacggggagagagagagaggggcagaaaaacagacaaaacggggacatacgccaatgatctgaccaactttgcctatggtca

SEQ ID NO: 87618 - DNA, 797 bp, Heterodera glycines
gacttctgctgacaaaacaacaaagcagaaggacaacaaatgcaagacggatcagaaccatcggtggaacagcagcaaaagtcatcgaaaacaaatgaagagggagggaaggaggacacagcgaacagaaaggcgaaggaaagcgcggcggaatggatcggtcgggaaaagtgatggattagacaacaaagaaatcattatcaatgaatgacttttgattgataaacctaatgaatgcaaattcagcgcggacaacaggtggaggcgcattgcttcatctttcgccggaagaagcactttatttgagccacgacctcaatgtgctgacactttcttcgcaacagaatgacaaggcaacattagctgattactctcccgagcaattcttcgctgatttgtgcgctttccatcccaattttgcttcgattctctaccgttatttagtttatagatacttccgtcggctttgttgggtcgttagagatggcatttcgtttggcgtcgacttcttgctctacaaatgttctgtggatgagtaccattccagcgcgggcgtacgcatcgttcactccgcacatgaaccaattgcggcagaaacttcaattggggcgcttcagcgcgaattggccaactgtaagaaacgtttactgctcgcgaacgttgtcggacttccgggaaaactgcagaacttgcgcctaacgcagttgtggagtggccaatgttcaggtgctttctatgtcgatttggaatgcgaacagaagtcgtatttctgatttggatgggcaggaattgcaggc

SEQ ID NO: 87619 - DNA, 655 bp, Heterodera glycines
  unsure (1)..(655): unsure at all n locations
tggaggggaaagccgcattcntaaccaagttgaggcgctaactgcggaaaagagacgaatggagaagacactccaaacgacgagcagagaacgcgaagaattggctcaggaaaacaagaaattggcagcaaaactgatgaacagaaaggcacaggatcgaataatcggagagcgagagaggggacttgaggaagagctgagacaggaaagactcaaaagcgagtccgccaatgcgcggatccgcgagttggagcagcgcatcgaatgcattcaggacatgaacagagacattgcagttgaaatatcaaacgcaaattcacctctgctcatcacaatttcttctttggaagagaaactgcttggattggagcgtgaaaatgacattttgacgcgttcgacgagacaaatgtccgccgaattgggggcaatgaaacggaggcacgaagccgaaatgggaacaatcgaacggagtttggaagaagaaaaacaacaaaatgcacaaaaaacggaggaattggcgaaggcgttcagcgaaagagcgaatattcaaactcgtatagaaaaactcgaagacgaattgttgcagtcgaaaagagagcactcggaaagggtaaaccgaatggagaagagaatggaacaattggagacggatatc

SEQ ID NO: 87620 - DNA, 361 bp, Heterodera glycines
ggtggaattgaagaacaaataaatacttttaagacgacaaaaatgaaattattccctttattatgtttaattatatttttaataattgtcaaaattgaatcagaaaagaaaaagttacaacaaaagtcatttggcgaaatatttggagaaaaatgggaagaaaaagaagaagaaaaaagaagtgaactcaaaaaaagagaaaaaattgcaaaatattataaaataaaagaaaaaataaagcaaaaaggaagaaaacactcaacaaaagaatggaataaaattgaagaaaaaataacgaaaaaattggggacaaatcgaaaaaaaaaaaaaaaaaaaaaagaactctgactcggcgccgctg

SEQ ID NO: 87621 - DNA, 677 bp, Heterodera glycines
tgaatataaattttgttcttctaaaactgatgctcagaaatgaacataaattaccaattttctgacattattggcactgtttacaaaaatggccaagtcaaatttatgcccgatggaaatgttttgcttagtccggtcgggaatcggataaaaacgttggatttgaagcttttttcttcatgttcacttgccacgcaattacggtcaaacatcacacattttgacattaattttgccgggacacatgcctttgttatgacagaaactggccatggcttttatttgaacttgttcagcgacaccgttcttcatcagcaactcttttctgagcgtgttcgtgcactaaaattttcccccgatggacgattcattgccattggtgtcgctggctttgtccacgtctattcgatagttccattccaccgagttcagttcaacccgttcatccgagtgaataagttcaaacattctgcggatcgcatcaattcgttggattggtccgacgatggcagacttattattgctgccggtgagaatcgcgtggtcaaagtttttgccgcgtttaagtcgacctttgctaatgttggagtttatgtgctcaatgaaagggcctcagttgtcggggcacgtttctttgacgaatacaatttattttgcgttgacaaaatcggaagtgc

SEQ ID NO: 87622 - DNA, 687 bp, Heterodera glycines
catttcgaagtgcgcccgctgcaacatttttaaacggcctcgacaaacaagcaaattcttcaccaacacaccgatgaagagcgtcgtcagcccaactccgttccgccggcccctttcgctccgctgtgtgtgctcagtgctggtgctgctcatctgtgcgttcgatgtgtcactggcagcaaaagactttgagaagaatggcaaagaataaccaggaggcccatttaatacgctcagcatcattttgctgattccgctggtcatcgtcaccggcgcgttcgtctacctgctgtttatgaagccacagagcgaaggaaccggcgaggacgacggagaaggcgaaggagacgcggacctggaaaagggaccaaccgaagagacgaaaacggagcctcgaattgaatctccagcaactcttttgggcgtggcagtgccgttggagcaagacgaagaagagcagaaaaaggacgacgagggtggcgaccaaaccgcggagaagaaagaagaggacgcggcggcagcggacgaacaaccgaaagaaggcgccgcggaggcagcggaagcggagaaaagtgcgacaaaggaggagacgaccgaggacacggaggagaccacggaaggatcgaccacagagacttccgacagcggctccggctcgggatcgtcttcagcatcgggctctgaggg

SEQ ID NO: 87623 - DNA, 249 bp, Heterodera glycines
acggcctcaacaaacaagcaaatacctcaccaacacaccgatgaacagcgtcgaaagcccaactccgatgcaccagaccctttcgacccgctgcgtgtacccagggctggtgctgctcatctgtccccacgatgggtcactggccacagactattggtgtatagcggcaaacaagaacccggacgcccataaaaaacactcagactcagatcgctgaggacaatagccatcatggccggtgcgcatcat

SEQ ID NO: 87624 - DNA, 402 bp, Heterodera glycines
cattcctctctcttttctcctcctcccttctccctctttctgtggcacttccctttgcccctccggccaatttcgtttcggccgtatgttttttttcattgtttaattactcattctctccttcgcctttttcagcttgcatcggtgaccaatgtcctccgacttgtcccggcgtttgcacatgcgtcggcagaagggactgctgcacagatcgaaacgccggcggaggcggcgatggcattgccggcggcttaatatccggcggaggcgcctctctgccccgtcttctgttggcacttctgctcggcaccggtcggcccggccttccctccctccaattggctttgtgccgtgacaatgccctcaactgtccgttgtttttgtcctactgccaacttccgc

SEQ ID NO: 87625 - DNA, 616 bp, Heterodera glycines
ttcacaaaagctcaaaaataatcccccgtaaagcgaacacaaaatgagaatgacccaagacgcaaatttgggcactttttgtgcccttttcactttccttctgattgttgaaggaactttcggcatttttggcattggcagcagtgacaatgacacaacgacgactattactcagggagggggagggacatcgacgacgacggcaaaaccaaagggaggagggacggcacacgacgaaaaccattccgatgactcatcaattcgcggcaaagcgcgcgagaagcgacagcaaacgaaccaacagcaacagcagccgaacttggagtctttgcccgtatgtgctaccggacagtcgcccattgcgccaattccgcccgccggccccgtccttccgatcggcgccattccgcccaccgtcgtttgtctgaagtgccgcccgcccaacggcccattgtccgggaacaatggcgcaaatggcaacaacggcacttaaaagcatttgccattggacgctttgtgaatggcaaccggtgaagaaaaaagagaactaataaatgccatggaaaaagcatttggacgaacgctgactaatcattgcttcttgttttctaattcg

SEQ ID NO: 87626 - DNA, 519 bp, Heterodera glycines
  unsure (1)..(519): unsure at all n locations
gcagacactctcgtatacaacacgggatcgttncagtcgcagatcgtcgtcctcttcgcgtacttactgagcgcaggaacatcttaggcccactggtcaggacatacgaatcactactctcagtagatatgngtacacgtaatcattngtccgatcccncgggtgcactgcacaccgcttatcgtgcaaacttaccatagattccgcagactgtgacggagctacatcaactcacgcaggaagtactggcagcgcaataccgacacgacacacctgatctctagctagctgcatagcgctgttcggcacctcgttcttcccaatcaacaacgtattaccacattatcacgggaaataaagtcaaaactatggtgggaacacttaccacggacataattggggtgccaaattgtacatctggccaaatgtcggcttactgaaagaagacgcctactcacttctggtgttagacagtcgatctgcccaaaaacatttgtccactgaaacggcgatgagata

SEQ ID NO: 87627 - DNA, 285 bp, Heterodera glycines
caagtctaaaaatgtttatgccttggaccacaacattaacaacaggtccaggcctccgcttctaggaaggcccgtgacgactttttcacgttcgtcgcttgtggcttcatcttggagatcggcactcgcgcacttcgttatgttggattcgattcttttctcgtctaatttcgcacgaattgtttttcaattttcgcaggaattgtttttcaattgaaagtcgtaaaaaataaacattgtttttgcaaaaaaccaaccaaaaaaaaaaaaaaaaaaaaaaaatcc

SEQ ID NO: 87628 - DNA, 637 bp, Heterodera glycines
ccatttggatgcggctcgtcgcaatgaatcatctgctgattgagtatcagcaccaacagcagaagaacagttcgaacagtatgcagtcaatgcaccaaaatgtgcagcaaaaggtggcgtccaatcgcaattgtaatgcgcagcagcaaatgaatggccacagctgaacgaatttctttccatttacgccgcttcagcactccaacagcagcagcagaaaagtgccgacccgcagcaacaacaattggcagcacagcaggcggccgcggccgactcgtggctttacaattgggaatggatgacagcagcagcggcggcgacaagcaaaccgacgcagcagcaaaagccagtgaacagcttgaatttgacgcccgggggaacaactccgacgaaagtgaacaaaggcacaccaaacgagcggaggacagcagtacgaggaagcagtaacagcaacaacggaaacgcactgaatatgctgatgagtgcagggttaccactgctcagtacacttagcctgagcggaattggcacgggaaacaatgggacggcggaagttgcgcaacggaattgtgaggagatgaagccgcagcaacagcagcagcagaccaacctgaacaaacagcaaacgaagcggtaa

SEQ ID NO: 87629 - DNA, 736 bp, Heterodera glycines
tttccttcccctacttttctcttttattcttccaatgtcctcccaaatggcactgattcttcccttttggacgatggtcaatggttggacgggcatttccccctgcaccacgcagtgtttgacaacgatgtgccaaggctgggacaattgctcaaagaggcagcagcagcagcagctgaatcttcggtcatcgacagagaagacacccacgggaatacggccgtgcacatcggctgtatgcttggccacagagagtgtgtaaaattgctgttggaacatggggcatccgtccaatccggcaacaatttgggctggtgcagttttcacgaagcgataagttacggcgatcgcaaaacgattcgaatgatgctaatcgcgctcaaaaaacagtccagcggacagcttaaaagtcgactgcctttgttgggcgaacatttctcaaaattggccgacttttatatggagacaaaatgggagttctcctcgtggattcctcttctctcgcggattctcccctccgacactttcaaaatttacaaaaaagggcatcgccttcgctttgacttttcgcttgtcgattttaacaacaatggcccattgccaaaatgggaacgtggcgatgtgtctttgcttttggacattttgtcaaccgatggacgaaaggcggtgctaatggacaatcggaagaaggtttaccaagtgttgcgggaaaaagaccaaaatctgagcgatgaat

SEQ ID NO: 87630 - DNA, 392 bp, Heterodera glycines
gctttttatgattcggtggatggtggtgcatggccgttcttagttcgtggagcgatttgtctggtttattccgataacgagcgagactctagcctactaaatagttggctcattgcttctgtgggcacaacttcttagagggattttcggtgttcagccgcacgaaattgttttttaacaggtctgtgatgcccttagatgtccggggctgcacgcgcgctacactggcaaaatcagcgtgcttgtccttccccgaaaggggttggtaaaccggtgaaaatttgccgtgattgggatcggacattgcaattattgtccgtgaacgaggaattccttgtaggggcgagtcatcaactcgctctgaatacgtccctgccctttgtacacaccgc

SEQ ID NO: 87631 - DNA, 615 bp, Heterodera glycines
catcccgacccgaagcaggttctgatcattgggggcggcgatggcggaattttgcgtgaagtgcttaaacatccctcggtggagagagcggtcatgtgcgaaattgatgaaatggttgtccaagtggccaagaaatttttgcacggattggccacttcttttgactcgccgaaactccaacttcacattggagatggtttcgagtttctaaaaggacatgaagcggaattcgatgtaattatcactgattcttcggacccaattggcccagccgagtcgcttttcggcaagtcctattatcaattggtcagaaacgcgttgaatgaagacggagtgttggcgagtcaggcggagagcatttggctccatttgccactgatttccaaattgatgaattgcgcgcgcgatttgttcccttcggtggcttatgcttctgcgactgttcccacttatccttcgggcactatcggatatttgctcgcctcaaaacggcagatgcatgttctgagtgttccgcttcgtcccctcaatgattccgaatgccaatcgatgggtctgaaattttacaatcgccttttacactcggcttcttttgtgctccctaactttgccgaa

SEQ ID NO: 87632 - DNA, 707 bp, Heterodera glycines
tttcactgattgattgcattgtgcctgtgaaaccttaagagtgagcatacaagttggtgcaaggatgtcatcatcaaaacgcaaacatcagtggcatttgttggcaaatgtctcggattattcaaaatccgagaaaggatttcagagtgacgagaagctggatgataatgaccttgaggttgcgatgattaatgaatcatgtttgttcggtgacacggtcttccagcaacaatcggccgctttttttgccttgccttcactgcttccgttcaacaatcagaccaacatcgtctcttccttcgtctctccgtttaacgaagaacagaattcagacgagtccgatgctgcggccaaatcgatcgcgtatgacgttgtctcttcactgtttgatggagagcctttgtattcttctgagtcgttttcggatgacgaggggagcatggtggtcaatgccagcattctccaagtgcttcaagacgacgaaacggagtcagagcttgaacaagagaacactgaagcgacaaaggaaaatgaaacggcaaagagtgtttcggaagagagtgaatcgattgaattccaaccgacggttccgacttgtaacaactcaatgcccactctcctgtcgcaaatgtacgcagcagacgagcagactttgccagtgtttgattcatgggaggaactcggagattcgcctgttgccgcggaga

SEQ ID NO: 87633 - DNA, 522 bp, Heterodera glycines
  unsure (1)..(522): unsure at all n locations
gtgatttggtaactcgcggtgaatttaanccacttcgctccgaagcgctccaacaccaacaacagcagcaacagaatggtgccactcataatcagccttcaaatggaagtgcggtgctgcaggatatggcaaatttgacacttggaaaggacaaggaatcgtcagtggacagcgaaagagcaagcaaacgatcgtccagcgtctacagcagcagtgagcaggacccttcgtgtgatggacaagggggtaaacacaccgtttcaaaaaacgagacatgaaccaataaatagagagtgcagagaaaaaaacatctctctttttggcgtactatttctttatctctgttaatagagaaaacccgaattttcttctctccatataactttttttcaatccatacaatttacaccaaattttgcataccgatagacaaaaattttatgcatcgaataatatagaaggtttttgcaaaaataaggctcattaaaaagttattcgannaaaaaaaaacaaaaaaacaaa

SEQ ID NO: 87634 - DNA, 718 bp, Heterodera glycines
caatgaaaaaaattgattgtactccaccgatggcaaacagtggtgaacattcctcgcgccgtcagcagcaacaacaacgccatcctaacaccacggcggaaaacaactcggacattgagggcactgcgcatcgggtggcgtccgttactttgaacacggagtccgactcgcgcacatccgccgacctgccggcatatccttttcggagtaaacggcgcaaaaaagttgccacgtcgagacaaacaacagggggccgacatggatgttgatgaacatcaaccgccatggaaaaaactgtcggtgaacaccgtggacaatttgactcttccaagttgtaaagtgcaaatggactgggagcgtggacatggacaggcactgtccactgccaatgacagcactcaaaaccaatcgtccagcacaacgagacaagcatcggacatggaaaacagtgtatccgaccagttttcccattcacaatccgaatctgaggccagcacttccaacattgacgcggatgatgaacaaagtgactggcccggaaatgaactcgctcgtcatccccaactgtcctcctcctcttcggtcattgtgcccttccaactcgccccaccacagcaacgcgtcgcatcatcgaccaacaaacagcagaaggatgcagcgccgttaagtgcagaggcaatcaaacgcattgagtgctttttgcagagcgctgacgaca

SEQ ID NO: 87635 - DNA, 435 bp, Heterodera glycines
accgccgcgaatcgtcgcacttccgccgaacggcttcagccgcctcgcgcgagtatcggtcgggtggcgctttcgctggcggagaaaatcttttgcggccggcggaggaattgggcgggcgaagttcggcatttggcactcgaaacgtgccaattcaccgtggataaagccaatgtgagggggaagcgcccgcatggacgacacatgagacgaacgaacagacaaaagacgaaatcactcccccccactcactcatttgccttagagtgtcaaagggcagactgactgataaataagcccgatcactttttattgcttcaaattaaaaatgtacccattttccatgctaatttagcctcattatcagtaaggtgcttcgtacaaaaaaaaaaaaaaaaaaaaaaaaaaggcctatgaaaaaaaaaaaaaagaaaa

SEQ ID NO: 87636 - DNA, 681 bp, Heterodera glycines
  unsure (1)..(681): unsure at all n locations
atgtaacggccctttcgtgccactgaatttgggcaatttttgcggcggggaagagcagacaaaaaacgttgacagaaacagtggcgaccacggcgaagaaaagtcccatcagccgagtggagcagtttcggcactgtgcgcggctgtcagaagttcgtcccatttgctcgacaacagtccgtccgtcccgaccacgtcatccgccgtcgctttccctccctttggttcgtctcccaccaatgggggcgtcgtcggcgtttccgccgtttcggtggcacaaacttcgctctcttttgtgccttcgtttgggctgctccaacagcaaagtccgatcaagcagctgctgtacacttcctcacaaaacagacacaatcagttggtccccagtgcgttgccctctgcgtcgcctggcggactgatgccaaaccaacagaacggcataaagtcagcagcgagtgccgtcggaggagggcactccgccggtgtacttcccgcggaaatgaacactcacaaccaacagcagcaacgggaggagaacggcaacaacactttggcattactccttcagtccctccaaacgtccattttgctggagcagcagcanaaagcgtttctgagcaacagtggcaccacccacaacaatttggggactttattgaacagacttccttcattgaatgg

SEQ ID NO: 87637 - DNA, 677 bp, Heterodera glycines
agcgctcctaatgagtgccatttcccgcgaattggccaatgcccttcacaataatccgaacgctccgccgccgggcggtcgaattttgttgtgcctttctgagagtgatgtaaccaaaaaggatttgaaagcgaatttggacgatttttttgatggaaatttgaaaattgaagaaatgggagcggaagagttaattgaggaagcggaaaaggaggccaaagcggcaaattgtcagcagcaatttgatggaattatttgctcaaatgttttcactgggcaaaaaatggtggaaaaccgacgaaaaatggcggccgttttgggcgttttcctgcgaatgcttcggggcgaaggcgccgttctaatccttcgcgagaatcttgaagatttttctgccaaattaatcgccgacctcaccaaattcgtcgatgtgttcgccgccaaatggcaaaatcacacttttggcttccgtctctatgggatgtgccaagtgcagaattcgattttttcgcattcaaatttcctcgacgtccattggacgttgacaaaatccgaagaaaatcgtttgtccgatgacaaattgcccactttccgggaatttcttgacaaaactcactacactgaggacaatgtgggaaagctccaaatggattttcggcaaggatttcataagcccaggc

SEQ ID NO: 87638 - DNA, 578 bp, Heterodera glycines
gaccgacaaaaatggcaaaactcgtggccgttgctcttctctacgctgaccatagctgcgatggcacttgcaaaaacgggcaaaagtcaaacggcagacgaagctgagggattgcgcaatatgaacctaggggacaacaatacagtggacgccggaaaggaacccgcggctgatattgtaaccaaaaagggaaaagctcagaaagccggaacgaaatcggcggcggccactaatgagcccgccgctgctaaaggaactaagaatggaaaagccccgaaaaccaaagcgaatcaagaggaggccactaatgcgcccgccggtgctaatgaatggaacgaccaattgatgggcatgagcgccgagaaatccaacgaggagctcgctgtgttgctgccaaaagcccacactttcatggaaaatgctttgagcctgatcaatgaacaaatggaaaaaaatggtgttgcaactggcgctgccggggactcgagctcgaccgggatcccggccaactaggagaccaatgccacaggacggtaccggaggacggaacaaaggatgacgagctctgaggatgatca

SEQ ID NO: 87639 - DNA, 584 bp, Heterodera glycines
aattgcccattagaagaaatgttcagctcttccatttgtctgctctctttttggcctcctccgttttggccgtgcttataattggcattaaaatggacggaccgacggaggcaaaagccgccgcccctccaaacgccgcggggccaatgggacttttgcttctattgaatggcaaacaatcggcggctaatgaaaagggaaaagcgccctctggcgaaagtaagccaaatccggggcagaagccgagcggagaacggagaaagagggacgttttggggcacgccggcggatacgtcggaggatgggaccatcccattgactcgacacttgattgggcaaagagtcagtggaatgatgccaattggctcgccgatgttgtcaacagaaacggatgggaaaacaccggcactccaaccggcggacgatgaatcagtgaattgtgccgaccaaagaacgaaagacggcatttttgtttgggaatttaattgactttcacgatcaaacacactttcctttttagttccctatttattctaaattagcgttttttctgttcattttctacgcataaatttgtgtgaaga

SEQ ID NO: 87640 - DNA, 712 bp, Heterodera glycines
ggtcctttcgctttgtccaaaagaaaaatatgaaattggcgtttgttcgtttgaatgttcttacggtactttgtctgttctgctcaatgggtcattcctacggtaatccatccgacgaatccgatgacgaaatttgcgaggaagaagaaaatgaagcacaatcagaagcagaagaagcgttttatttttttcataattttaacggcacaattcaaagtgaaagagaggagaaaagaacggttgtcgaaatattttgccgaaatacaaatgacaaatttcaattttccaccgacgacgagggaaatttcaaaattcaaatggaagcgaaaatcaaatggaaatttcacaaatgcaccaccggactgagaatggcattttacaagaaaaaagtgatggaaaacaaagtgccaaaatgtttgcccattattttgcggagtccaaaacggaaattaaaaaatgcaaaaagattggatatttgtgttgtcccaattcgcatcaaatggcttaaatttggcccaaaaataaatgcagaagaagccgaaaccgaagaaaatgacgaaattttgagaaatgaatttgcattggattttgatgtggaaaagaacgcgcaaatgaacggacaaattagaaattgcagtgatttacattctgctgaacacaattttgaaatgattttcaacaaatatttcgatgatggaaaaagtgttgacga

SEQ ID NO: 87641 - DNA, 724 bp, Heterodera glycines
cagcgactcggcgaccagaacacagaaccaagccatccaaccaccccattccaacattcactggtgcccccgtctctgcctgttcagcaccgcgtctccgttctcagtcagcaaatggaggcggcggcgagcgcagtgcagtcgcccgtctctctgcgcggactgtcggcgccgcccgcggaatcgcaaccacagccaatgccgctgtccatgccaaatgattctccgtccccttcgcgacgtgcgccgcttttgctggaaaatgcggtaaaaattccggcggttgactacgacgaccaacagccgaccacgagctgtggccaaggcacgaaaagctgctcgtccgactcgggccaaggctcatccgccggttcagaggactccgcggaaggaattgtcgtcgtttccgccgtttgctcttcgccttcgccgtctttcaacggaaattcgccgctttccgccggcactttcaaaaaaaagctcgttgaaaattgggactttgaggacgtcgcggaatggttggcttcgcttggaatgggcgaatattcaaaggcattcggaaggaccaccggcagagaattgctgcgattcgatcgaacgcgattcaccgcgttgggagtgactcgaattgggcaccgccaaacgatggaacgttcgttgcagtcgttctcgcgacggagtgactgatcggaagttcggttggccgatcattcgttcgggtagc

SEQ ID NO: 87642 - DNA, 677 bp, Heterodera glycines
gtgaggacgggacttttggatggggcggttcggctgaaattctgttggagaaggacgcgtccattcgcctgaccaccgactcggcatttgagaagtcgggcaccgccatcaacctctacgtcgactacaagaacataacgaaggttgtgaccaaaggatcgcgcgtgtacatcgatgacggattgctgtcgcttattgtggaagaaattttcgacgacgccatactgtgcaaagttgaaaatggagggaaattgggcagtcgcaaaggggtgaatttgcccggaacaccggtcgatttgccagccgtttccgagaaggacatcaaggacctgcgttttggtgttgaacagggcgtcgacattattttcgcctcttttattcgaaacgccaatggcatccaaaccatcagagaagtgttgggcgaggcgggcaaaaacatcaaaatcatcgcaaagatcgagaaccaggaaggcgtgggcaatgtggacgaaatcattgcggcatcggacggcgtgatggtcgctcggggcgacttgggcatcgaaatcccagcccataaggtgtttctggcccagaagatgatgatcgcaaagtgcaacatggccgggaagccggtgataactgcaacgcaaatgctcgaatcgatggtgaacaagccgagaccgactcgtgcccga

SEQ ID NO: 87643 - DNA, 204 bp, Heterodera glycines
catattttggatgaggaactgaggctgaggtacgatctcgagtcgttgttcttggggttggactgtgacgaggagggcaattccagtgccgcgtcgtggcaagttgaattccgattgccggcctcaaagctgatcaaaatgccttcacaacttggcctagtctcatgagcattactttctttctaaaaacaaatgccaaaaaaa

SEQ ID NO: 87644 - DNA, 182 bp, Heterodera glycines
cgtttccctgacgcatcgcttcattttgccgagactttcgaccgcgccatttctttgcttcgcgcagactgtcgtacttcggagaaacacgtcacttttctgcacattctccgacaattgggcgcgagtgaagagaatggtggactccttggcaatttgaacgggctcattctaatcctgag

SEQ ID NO: 87645 - DNA, 217 bp, Heterodera glycines
tcgacatttccctccttctttacacttgagccaagagtttccctgacgcatcgcttcattttgccgagactttcgaccgcgccatttctttgcttcgcgcagactgtcgtacttcggagaaacacgtcacttttctgcacattctccgacaattgggcgcgagtgaagagaatggtggactccttggcaatttgaacgggctcattcgaaacctgag

SEQ ID NO: 87646 - DNA, 623 bp, Heterodera glycines
  unsure (1)..(623): unsure at all n locations
ttgtaacaagttgacccttcagaggcatcccttccctctgaccattgctctgtcctcctgccttacaatgtgctctattccctgcccctactccgctttttgtccatctcttccgtctccgtgcccaccgattatttgcttcgcattgttttgcccattttcgnctgncgcgcggnggccaccgtcagcgcatattttgcgctgtggaaaatcagtgtcagctacacgcagacaattaaatccacaatgcctttgttcactgtgctcatttctcgtcttttgcttggcgaacgtcagcccatgcgaatttacttgtctttgttgcccattatcacaggtgtttttattacgactgcgaccgaattgcaattcgattccttcggcctttgcttctcattactttcgacgggaattcttgcttttttgaatgttcttgccaaaaaggtgctcgatgaggcgcgaatgcatccgataaatctgctctctctgaactcccaattggcttctctgctgcttttcccattttggctgttcaccgatgctctcaaaatgtggtcgaacattcattcgacaaatcgacataatcagtcgcccgacccgcgctttctctttatgcttctcct

SEQ ID NO: 87647 - DNA, 411 bp, Heterodera glycines
atctacaacaatgctcgcacgtaatgcttctaaagaacgctgccgaccacaaaaacatcaaggatatatgcagaagacttaaataaaaatacaaaaaacaagtaaagcatctcatgaaagaaaagaatcagcaaaagcaaaagcagcggaaagaagataagaagatgtctaaagacaaaaacaagaacaagagatactaaaagaagcagaaagaacaaaagaagcactaccaatagcagaagttgacagacaagaagcacaaataaaagaagaagtagaaagataagaagcagtagccatagcagaaatcgaaagaaaagaagcaggggctatagcagaagtagaaagaacagaagcagtagcagtagcagaagtggaaagaaaagaggccgacatctgagaagaagtgga

SEQ ID NO: 87648 - DNA, 583 bp, Heterodera glycines
caaaaactccctctaaaatgagttcttcgtccattttcctttcctttgcgtctttttctttgataattttggcattgtgccgagcccaaaatgaatcagctgcccaaggcgatgcgcagcccccgccattcttaacagaggccagccaagagaaaatcaacgaattctaccattacgtcacgagcctggggcatttaaaagaaacggaaatagcggaaaaagtgaaggaatgggtggacaaacaatcggaggaaattcagaagaaatacgtcgagtttgagcaggaaagggaacgggcgaaggccgagggcgaagcggcgcacgaagaagcggtgagaaagttcagcgaagcggcgaaaaaggcggacaaggaactgaccgaaatcgcgaacaaccccaatttgtcggcaaatgataaggcggaaatgatcagcagaaaagtgcagtcactgcccaaaaaagtgagggacgaaataggaggagcaatgggcggaggcggaggaggtcaatagcagcggaagaagtgaagaggaagaggaagtaataggaaggagagggagaggagaggagcgaaaaggaacga

SEQ ID NO: 87649 - DNA, 104 bp, Heterodera glycines
atggcataagcgtgcttaactgcgagaccgacaagtcgagcaggtgcgaaagcaggtcatagtgatccggtggttctgtatggaagggccatcgctcaacggat

SEQ ID NO: 87650 - DNA, 666 bp, Heterodera glycines
  unsure (1)..(666): unsure at all n locations
taaaaatgcgcgccattctcttcctggcctggtttgcttggtgatggctgttattcttgagacagccaactcaaaggcagtgaaaaaagacaataagaaaggagcaattacaacgccagcaaaaggaaaagcggcgccgaaaggagcagcgaaaggaggaattaaaaaagacgcaaaatcaaagggaaaaggaaaaaaggacgccaaaggcaaaaaggacaaaaaagctaagccagccaaagggaaaggagtgcctaaaaatgataaaaaatccccagcggcaaaagccaatgacaaaaagagcccaaccaaaccaatggcagcagtgaaagccgtgccaaaggcggcggagaatgctcagaagggaccgtcgagtgcggaagtggtggcggaggaaaacaacttggacactgaggcggtcgacgacttgggggcggaagagtcggactttgaccaattggcagaggacgaactgctcgaggacgacgccatggacggcgaggcggacgaatgggaaggcatgggggaggagacggagatggacagccaaatggcactctgatggccaactaattggacaaattacaaacggaacaaaacgggacaaatgacacaaaatattatttatcatttttggcatatcattgaaaataaatagaatntatc

SEQ ID NO: 87651 - DNA, 251 bp, Heterodera glycines
taatgttcgcgagcgtcttcgcggtcgtttcctgcgtcgagcccgacggcgtctgcacgatcacgaacatcaggccctggtcttcatccggcaggaacgacttcggcaggcgcacgaacagcaggccgaccgcgacgatcacgaccaggtagatgatgagccagcggcccgaccgcttgatcacgtggtgcacgccgacgtggtacttgtcgcggctgttgttgaatgtgcggttgaaccagccgaagaag

SEQ ID NO: 87652 - DNA, 288 bp, Heterodera glycines
tgatctgttgcagatgccaatacaattaagccgaacgacgctggctgaacgggtatatcaccccgcatgtggcctttattgctactcgaatgtgtggctgatcaaagtgccattcacattcaacagtccgatcagtgatcacaacgatttagcgtgaaaagctgcatgaggcgcttgatgatgtcattgactattgattgattggcacacaccgcgttaatgaatgcaatcgaaatttatgacttcaatgaaaagtttatgggtgccgatgtaaaaaacaaaaaaaaa

SEQ ID NO: 87653 - DNA, 241 bp, Heterodera glycines
gtgagcgggttcatcaccggctttggcctggttggttacgcggcactttggctgatcgaagtgccattcacattcaacagtccgatcagtgatcacaaggatttgcgtgaaaagctgcaggaggcgcttgatgatgtcattgactattgattgattggcacacaccgtgttaatgagtacaatcaaaatttatgagtccaatgaaaagtttatgggtcccaaaaaaaaaaaaaaaaaaaaa

SEQ ID NO: 87654 - DNA, 184 bp, Heterodera glycines
tttgaaggaacaatgtgctcaaatggaaaagatggaagttcattagtcaaattaattaccaattgaagagataattggttcattgaaacggacgatgcgatgacgtcatccattcatttatcatttggataatttgttaaataaaataaaggccaacggaaaaaaaaaaaaaaaaaaaaaaaaa

SEQ ID NO: 87655 - DNA, 190 bp, Heterodera glycines
cgcgacccttgtccttagttgctacgcaagagcactctaaggagactgccggtgacaaaccggaggaaggtggggatgacgtcaagtcctcatggcccttatgggtagggcttcacacgtcatacaatggtcggaacagagggttgccaacccgcgagggggagctaatcccataaatcgatcgtagtcc

SEQ ID NO: 87656 - DNA, 177 bp, Heterodera glycines
gaaggacctggcctgcctgggcttcagcgccgatctggtcatgcaatcgttctgcactacggccgcttaccccaagcccgtggacgtgaagatgcaccgagaactgcccgccttcatcagcaaccgcggcggcgtggccctgcgtcctggcgacggcgtgatccactcgtggttgtt

SEQ ID NO: 87657 - DNA, 543 bp, Heterodera glycines
aaaaactgcacagcaccgtggatggtctacgtggagtactgcttcgatgtgaggctcgacgacttcaacgaggagtactgtttcgaggtgagcaacgccgacatcgtacacaacagctgcctctatgtggaacagacgaatccgaactacatgaccttccatggcgttttttactacattttcgtctgtgagaagacaatcagcgggctcaaagatgaccgaagcgaaaatgtgttcaaccgtaggcaaggagcatgtgcaagcggggacgaccgatgcgataacgttttcaaccgtggacaagtggcaagtgcgcgcaatggtgaaggaagagacagcatcctcattcaaggattggcgttcgtcattgtgaaagtggtcaatgcagtgtacgatatgattgtttaattgtgatcaggatatattcatcacgtatatgtaaacaattatttttgcgtgtgtcgtatatgtacgaactgaatttctgaacattcgtcatatgtatgtaaaaataaatgtgtgtgaaataaattctggtagcta

SEQ ID NO: 87658 - DNA, 414 bp, Heterodera glycines
acgtgaaacttttccacgccaaattgcgcctgcgtctgtgagtggctgacattgaccgtgagcgcgtgctgtcgctggatgacgacttgggaaaagttaaaacggaactcactgtgcatgcccgggagaatcgccagctgaatctttttttctccgactggagacgcgtacgcgagaatacgagatggaactcgaaaacgggcgggagcaccatggaacgtgccaagcgctacattgaccaggagaatagaccggagaaggacgcacgtagcacactgctcaaattggctgatatgttcgagtcgcccattcccacaacatctaatgtggcccgcttacgcatacagtttgacgacgacgacaacgatgctgatgacaatcatagaccggacactgcttcaatcgattcaccta

SEQ ID NO: 87659 - DNA, 376 bp, Heterodera glycines
atgatgggagtgccatacacattatcacctggcattggtgcaacatagattagttgtcaccgctgcacgtgcgtcttacttacctgatacagttggggcggtagccacagaccgaatcaatgctcacggacgaaatgcctgcggacagtggccatctcatgggacccatcgctcaatggctccaccaccttcctctgtgcagttcccaatgggggcataaccaattaaaaaaaatgacggctcaccgtacaccaacttgctgagaaaatgccggtcaacgaatcgtaacgtctgtcacctgattggaccaccacccacatcatcgttagggccatggatggatctaaccgtggaagaaagagtggatgcttcactt

SEQ ID NO: 87660 - DNA, 585 bp, Heterodera glycines
gaaaaggaaacatagtaaaagatatattcttgttggagacctgactttactatgtttcccagaccattccacgtctttcccaaagatattgaacaggaccaaattgtgccaagcttctgtggtcggctcgaaccggacaatgtcgtccagcgacaaactgcagcagcaaaaggtgctcaccgtggacacgatcaaccccaacgttatcaccatggaatacgcagtccgtggcccaattgttatccgtgcggttgaattggagaagcagttggcgaaagagtcgttgccgttccccagcgcgatcagagcgaacattggcgacgcacatgccatgggacagacgccgatcactttcattcgccaagtgattgccggcattacggagcccgcactgatcaagcaacagcccaacctgttcccggaggacgtgcagcgcaaggtggcctcactgttgcgcgcctgcggtggcggcagtgccggcgcgtacacacagagcaccggcattgacctgatccggcagcatgtggcccaatttgtggaaagacgtgacggtttcccctgtgatccggaaagtgtgtgcatctc

SEQ ID NO: 87661 - DNA, 595 bp, Heterodera glycines
ccaaaatgactgccgcccgtcttctaaaaatggttccatccgaaagtgccttgttggtctgtgacatgcaggagaagttcagggagcacatcaaattctttccgcagattctgcaggtcacttgccgcctcattgaagctgctaaactgctcgacatgaagattttggccactgagcaaaacccgaatggtgtttggccacactgtgccagaaattgtcctcaaaaagcatgacattcccttctctgagaagaccaagttttccatgtgcgtccccgacctccaacgcgaactcggcctctccccggccgttcggtcgctgcttctctgtggcattgaggcgcatgtttgcgtttaccagtccgccattgatttccaacagcaagggttcaacgtccacgtggtggtcgacgcaagttcaagccgttcaatggtggacaggatttatgcctacaaacagttggagaaagtgggcatcaatctgattaccagcgaatgtgccattctcggcttggttggcgacagtgcgcacccaaaattccgtgaagtccaaaaactgatcagagagagtgcgcccgacacgggactgatcagcc

SEQ ID NO: 87662 - DNA, 654 bp, Heterodera glycines
caatgcgcaacaaaatgccaaatcatctgagcctgaacacaaagtgccaaagcttcagagcctgctcaacaaaatgccaaagcatcagagcctgcaatccagcaacaaaatgccaaagcatccgaagctgcagaacaaaatgccaaagcttcagagcttgctcaacaaagtgccaaggcttcagagcctgttcaacaaaatgccaaagcatcagagcctgcaatccagcaacaaaaggccaatgcgcaacaaaatgccaaagcatcagagcctgcaatccagcaacaaaaggccaatgcgcaacaaaatgccaaagcatcagagcctgcaatccagcaacaaaatgccaaagcatccgaagctgcagaacaaaatgccaaagcttcagagcttgctcaacaaagtgccaaggcttcagagcctgttcaacaaaatgccaaagcatcagagcctgcaatccagcaacaaaatgccaatgcacaacaaaatgccaaaatggagaacataacttcaaaagatgcgccaaatgtcaaaagtgataacagcattaacaaacagtctatgaatggctctgatacaaatgagaaaaatgccatggaaacaaaatttgttgtgccaagctctattgagtcacgggttattgagcctgttcga

SEQ ID NO: 87663 - DNA, 560 bp, Heterodera glycines
  unsure (1)..(560): unsure at all n locations
tttttcccccccccccgtttttcccgcccgggatgtgtttncaaaaaccccttctgttncctctaaaaattaacctcctctaagaaaatggcttcatctttctgctcttcactcatttccatcgccgtaattgtctgtttgctgcgcaaatgctgcttttcagcaccccatccatgctgtcctggcagccaacatgttgtttcgatgatgaaagatcacaccggctcattctccgcttcgatgccaaagtcttcgctttgtctgagtgccgaaagagtcgccgctgcggtggaaaactcaactgaaaacaatatggtgccctggcaatggtggtcaaacactcattaacgagatcaacgcagctcaatcatcatctgatgagtgtgctcgatctctcggcttcgtccgcgccatgttctaaattgtcgcttccgccgcttcccatgtccgtgccaacgccgaattggccaatttggctgttcagttcccagaacaacgttgcacaattgacacctactgtgctgcgctcggcctttatgttgggcaaatccctttgtgca

SEQ ID NO: 87664 - DNA, 765 bp, Heterodera glycines
caagtcgatacgtcggaagacacaggaatcaagaccctgtgggttggccagttgagctggaatgtcgacatgactggctcaagagtgaattcgagcaatacggcaccgtacttgatgcacgagtgcaatacgatcgtgactccggtcgtagccgcggctttggatacgtcgactttgcctcatcggctgaagcgcttcgtgcttcgaaggaagctcatggtaaagaactcgatggtcgtgctcttcgtgtggatctgcagcctcctcgcggccctcaggagcgtgtcgaatctcgggccaaacattttaaggatgagctgagtgcaccttccaacacgctctttatcggcggtctcgcttgggcattgacagaagacgatgtttggaacgcatttgccgagtttggtgaggtagcgggtgttcgtcttcccaaagagatcgagtctggtcgtcccaagggctttgggtatgtggagttcacctcagaagaaaatgcagccaaggcactggaagccatgaatggtcaagctttgggcggccgtcccattcgcattgactttgctggtaagcgcgataacagcaactcctcgcgtggcgcacctcgaggtggtaatactggtcgtcctcgcgacagcggttggggaggacgtgccggtggtgcccgctctgcatcaggaagtgcccgatctggagccatagccccttctacggggtagaaaatgaccttcgatgattaaatgatcatattctgttcatataattcaa

SEQ ID NO: 87665 - DNA, 556 bp, Heterodera glycines
  unsure (1)..(556): unsure at all n locations
ggagacaacagcggatttgtctgcattgtgcccagcgttttctaacattttcttcgatgcgacagccgatgaagaaagtcactttggggaatcgtaacaagggaaaatgaaagatccaacgatttgaccgaccaactcaaaccgtgggatgttccgattttccaattnncgtangtccccagcatccaaaaacaaggatcattttcctgtcgctcttctctttccggttacgattccgctcaatgggtcgactcgacagacgccgccatttcccatcggccaccgcctcgtccacctccgccaaaattatgccaaacaacatcggaagtgacgtcacccagacgacactttcatcagtcccatcgacacagcgtagaattagtggacgaaaacttacaattagtaaagagtgttggacgaggagttctgccagattcagtgaacccgcagctgatgcaaaacgcggcatcagtgtccaaaactgatttcaagcagaaagtggtgcttgaccttctgaacacggaacgggcgtatctgttcgacctaaacacctggg

SEQ ID NO: 87666 - DNA, 209 bp, Heterodera glycines
ttatgatgaggaagactatgaataggcggtgacgatgatgatgaataggcgatgatgatgacgaagatgccgagggggatgagggcggtgaagacgacgaacaggaacaatgaccttttcgcatctgttttaagctaactcttctggcgacactgttctgactgtttgatgctttgcccaattccccccttctgccctgctgactgagc

SEQ ID NO: 87667 - DNA, 217 bp, Heterodera glycines
tcgacatttccctccttcttaacacttgagccaagagtttccctgacgcatcgcttcattttgccgagactttcgaccgcgccatttctttgcttcgcgcagactgtcgtacttcggagaaacacgtcacttttctgcacattctccgacaattgggcgcgagtgaagagaatggtggactccttggcaatttgaacgggctcattcgaaacctgag

SEQ ID NO: 87668 - DNA, 471 bp, Heterodera glycines
ccttgtttgtgtacttacacggatctccggagcacttttatgtgcaaaactctgcaggcaaagagtggcggagcactaaactgttcgatggggcgaccgacggacacgcaatttgtacctttggaatggaagaattcgctcttagcggtgtccatgagttggttgtgttcgtcaatatgcacggcgtttcctcccggccgcccatttccgtgagtggtcggagtcgaattgtcgggctttctctgaaggagccgtttctgcatgtgttaagcgaagatggcaccgtgtctattttcagtaccgtcgatgcccatttggtccaatcgctcgcttttccaaccgacgaagttcaagaggtgcggtaaaacatttgcggccgatcatctgcgccgatcacttgccaattggagaacattgacggcgttattctgatcgcatcacccggcgacttggcactgtacgaactcgtcc

SEQ ID NO: 87669 - DNA, 631 bp, Heterodera glycines
  unsure (1)..(631): unsure at all n locations
gcgcggcgttgtttcgggtgaattgaagcaagtaaaggcattggtgcttctggttctttccgtctcggcggaagtggcacgccaaaaacatcggatgtgaaaaagagcccaaagaaaagaattgctgcgaagaagccatcggtgatgaaagcgacgccgaagaaagccaaaaaggccgtcccgaagaagtcgccggctgcgaagaaggcgaagcccaccgctgctgcaaaacccgaagttcctctgcccgtttcgccggcagtgacaaagtctaagaccgcgaaggcactgaagaaagacgtcccgaaaaagtctaagatggccaagagatctcctaagatcgctaagaagtcgaagactccgaaaaaggcgacggggggtgcgaaaacttcgcggaaggtcaagaaggtggcggcgtcaaaatctgccaagaaggatgtcggtgttgatggtgcttcgtgaatatttcttttcctcccttccatcgatctccaaaatgtaaaattcgtttatgtatctctcaattaccttgcattttccactcagatattttccgatcattcttcactccatttgttttcgcgcaattatctttgccttttaaaaaaaaaaaaaanaaaaaaaaaaaaaa

SEQ ID NO: 87670 - DNA, 605 bp, Heterodera glycines
  unsure (1)..(605): unsure at all n locations
gaaaaaatgccaaccttttcaaatccctctgattgtgcttttggccgtcgtctcattccgtctctcggcttctactggtgacaaaaaaactgctaatgatgggagtggaaacaactcatcagctgggattggtacgaagatcaaaagaattgtcaccgctggactgctcttcacttccctggcgacgggtggggcggaagcgattgggcgaagcaatgctcagggaggaaatgccgccggattggtgccatcgcatgtgaccaatcgctcaatggctccaccacctcctcctgtgcaatttgaaatgggggcaaatcgattagaaaaaatgagggcacacctacgcgaacttgctgagaaaatgccggtcaacgaatcgaagcgtctgtcaccgagtggacccgacccacatcatcattagggccatggatggatctaacggaggaagaaagaatggatgcttagttttcagattttattctatcctcttttatttattagtttttcaaaacaaatttcttccacaactttttaaactatttgttgttttgaatctttttagataaatctaaaccccnnnnaanaaaanaaaaaaaaaaaaaaaa

SEQ ID NO: 87671 - DNA, 198 bp, Heterodera glycines
  unsure (1)..(198): unsure at all n locations
gagggtgaaggacttgctccgtaagctatgccggtcgaagaaccggccgctgcgactgtttattaaaaacacagcactctgcgttgttaccactagcttcaatcgaattccccccccnccggggccaccgccccattgggatcgggcccgggaaaacttgcgacgtcgggcccaattcgccctatagtgagtccgtat

SEQ ID NO: 87672 - DNA, 691 bp, Heterodera glycines
gtaatgactgcgttgcattgccatgttgttaaatcttctttggggcccgttggattggacaaaatgcttgtggatgatgtcggcgatgttacggtgactaatgatggcgcgactattttgaaattactggaagttgaacatcccgcaggaaaaatactcgttgatcttgctcaactccaagatgaagaggttggcgatggaacaaccacagtcgtcattattgccgctgaattgctaaaagcagctgatgaattggtccggaagaagatccacccaacgaacatcattaacggatatcgcttggcctgcaaagaagctgtccgctacatgaccgagaacctttccttccctgttgaagagcttgaccgtgccagtcttattcgtgctgctaagacatcgatgtcttcaaagttgattggatcggagtcagacttttttgccgaactttgtgtcgatgcaacagtggcagttaaacggactgacaaggcaggcagagtgagctatccaatcaattcggtaaatgtgttgaaagctcatgggaaatcgagcaaagaaagtcaattgatcagtggatatgcattgaactgctcggcagtgctgacgaagtcgtacagactcgcatttcagacgacgaattaattttgatcaaaggaacgaagttgaaatcggctgcttccatcattctgcgtgg

SEQ ID NO: 87673 - DNA, 680 bp, Heterodera glycines
  unsure (1)..(680): unsure at all n locations
cccttgatggactcgctgaaaggccgttctcttcgtctcgtgctgaaaaatgtgcgcgtctacgcgcggatgtccccaaaacagaaggaacgtgcaataaacgcgttgaaagccatgggtttgacgacactgatgtgtggcgatgggaccaacgatgtcggggcgttgaaacacgccgaagttggcgttgcgctgctgacccatccgctgaagcccgaagaggcgacggctgccacctccgcgggcagtggaacaccgacgcaaagcacctccggcaccagtggcagacagcagcaaaatgagggcggcggcggtgagcagactcggcgttacaacaaccgcgagccgacctcagcggatgccaatggacagcgacaacaacagcagcagttggccatgaccacggcgggcggtggtggcacgtcttcacgacagcaacagatgcagggtcgtctcaatcaaatgatgcgcgacttagaagaccaggaggagcaggcgaaggtccgtcttggcgacgcgtcgtacgccgctccgttcacttccaaatcgacttccatccaatcaatntgcaacatcatcaagcagggacggtgcacgctcgtgaccaccttacanatgttcaaaattttggcgctgaacgccttggtgttggcgtacagtcaatcggtgctgtacctgga

SEQ ID NO: 87674 - DNA, 707 bp, Heterodera glycines
gactctttccctttcctttaaatttttaaataattttgcttttattttcccaatgcttttctccccgtccactgttctgctattgcttctgatcgtcctccctttctctctttctttcattttaatccctcaaaatgtccgccaaatttcccccgccctttcgtcgcgtcccttccgccgatttggccatttttctgtcattgccaaacgaaacccaattgttctcatccccggcgacgggggaagtcggctaaaggcgaatttgacgggcaaaccgtcggtggtccattacttttgccagcgacagaccaacgatttcttcgcgctttggctcgatttgcaacaatttggcccttttgtcatcgattgttgggccgacaatatgcgcctcaacttcaacagaacgagcggaagggcgcaggatttggagggagtgaaagtgcgagtgcccggctttggacacacgcgaaccgtggaatggattgactcctccaaacggtcgccgagccgttacttcgcgcccatcgtcgcctccctcgccaaattgggctaccaacgcggcatcgatgtcatcggtgcaccgtacgactggcgaagagcgcccgaggaactccttcattattttgttaaattgcgttcactgattgagcaactttaccacgcaaatggcaaccgcaaagtgatcgttttggcgcatagtatgggaa

SEQ ID NO: 87675 - DNA, 711 bp, Heterodera glycines
gtgaatcgtcggcagagattgtggagggccgagctcagcccaaagttccaatcgtacgacgaagccatcaaatggcgaatgatgggcgtaaaccacgtccgccattcgaccaaagccaaaaaagtgttggggaagacgcgctttttggacttggatttgcccgaatctttcgacgcccgccagcgatggaatttctgtccgtccatttccctcatccgcgaccagtccagctgcggctcgtgttgggcattcggcgcggtggaggccatgtccgaccgaacatgcattgcgtcaggcggaaacattcggatcgctctgtccgctgacgatttgctgagctgttgccataagtgtggctttggctgcgacggcggcgagcctctgcaagcgtggcgctattgggtgaaggagggcattgtgacgggctcaaatttcaccgcccacggcgggtgtcgtccctacccattcccaccgtgtgagcaccacagcaacaaaacgcactacgagccgtgcaaacacgagctttacccgacgccgaaatgtgaacgaaagtgtcagacatcgtacaacaaacgcgaatacaaggaggacaaattttatggcaaaagtgcctatgccattgacaattcggtgaaagccatccaaaacgaattgttcgtcaacggaccaattgaagtggcattcgaagtgtatgaggactttctgaactac

SEQ ID NO: 87676 - DNA, 561 bp, Heterodera glycines
taattttactcctccgccaaaatgaaaagtttccatttgtccattgttgtgacactttgtctactcattagctgcttaaccccctcctcgtttggctatgatgatgatgatctgttcgacattggcactgctcagtccgttgcagtcaccggcattttgacgtgcaacggacggccaagtggcggcacaaaagtgaaactgtacgacgtagacacttttgacccggacgatttgatggccgaaggctttacggacgaaaagggacactttctgctggagggattcgaaacggaaataagcgacatcgacccaaagctgaacatttaccataattgtaacgacgaacactttccatgtctgcagaagttctccattgaggtccccgacaattacataaccgaaggaaaacgaccacaaaagatttttgacattgggaaattgaatttggaaggcaaattctcgggccaacatcgagattgtattaattaatcggacattttgttgaatcccaaattttaaatttataaaaattgtgacataaaaataaaataatacaaaatc

SEQ ID NO: 87677 - DNA, 497 bp, Heterodera glycines
caaaatcgttgaatctctacgtgaatattccacaaagttgactgcattttgaccagcggtggaacagggttctcaaaaagggatgtgacgcccgaagcgaccaaagaagtcattgagagggaatgcccaggaatcgctgtggcacttctgaagaaagggcttactcattacgccattcgctgctctcacccgtctcaccgcgggaattgctgccaattgtctgattatcaatttgccgggaagcccaaaagcagtgagagagggatttgaagtgattgagccgattctgagccatgcgattgccattgtgaagggggatgagagcgaaacttcagttttgcacaagagaacggcttaataagacagaagagactgtctgtcgataagcatttgatatcctatgtatgtgagaaccaattttaaactttacttcattactatgtaccattttgaaaaataaatctttaaggtgacacaaatcaaaaccaaaaaaaaaa

SEQ ID NO: 87678 - DNA, 108 bp, Heterodera glycines
tggataccgaccgccacggccaagaattatgtataggagagcgaaagcaccactgggcacgtcatcattgtaaacctcgacggacatatggttggtgggaatacaatc

SEQ ID NO: 87679 - DNA, 612 bp, Heterodera glycines
cgatcggtgtccaggacgtgtcctcaaatggcactccgatgccatgtgccaatactttcaatgaaaaggtgccgcttggctgtcgactgtccggtacgattgtgcatccaccagcgactcgtccggctcctactctcagtgtggcacgccgcccatggccgacgcaatgcaacagcagagaacagccttgaccacagagagagggggtctgaattatgtcatttggtggcaccgatggaggactggcgcctgtcctcttccgcctccacttcctcttcatccggacatcattctgacagaccatccgaagttgctcatcacgtcccaaatgccatcacataataatcaccagggtcctcctgttttgagatggcggtcaaatgcgggaaaaatggcaaagacagctgcggaaagagacagcacttccgcacatgctggaagcgtcgttcggctgcatcgaccaccacaggcatcaccacacgatccacgccctatttcccttacgccgcccaccaccaattgcctccgggcactgtcattccgtttcggtcgagcattcagcacctgaagcattggcacggaggaagcgatgccgatgatgatgacgacttg

SEQ ID NO: 87680 - DNA, 657 bp, Heterodera glycines
tcaccccccccctcgtttttctctctttttcctcctcgttttttcgagagtctcggtcttttttttcttgttctaaagtttgctctcgagtagtattcgccctctcttcacccaaatcctctactataaaatctctcctctctttgttaggtggttgagtatttgtacatgactttttcttggatgatgggcgtttttgtgttcgcccttctgttgggacaaatccgtgacattgtgtcaaatgcgaacaaaaacaacgaggaatttcgcaccacaatggacaaagctttatccgagtgcaagcgactcgacttgcccgagcatttgacggcacgggtgaggtcgtggtttctttacacgtgggagagacaacggacattggaggagaagaagctggtggagaagctgccattgaaattgcagacggacttggcactgtccgtccattacagcactttgggcaaagtgaagctgttccaagacgctgatcgggcatttctgcgcgatttggtgcttcgtctacgtcctgccattttcttaccaggggatatgatttgcagaaaaggggacgtgggcaaagagatgtacattgttaacaacggcattttggaggtggtcggcggtgagcacaacgaattggtattcgccacccttgcg

SEQ ID NO: 87681 - DNA, 781 bp, Heterodera glycines
gtggtggacggcgcccgaacttttgcgagaaaacaatcggacgggcacaaaagagggcgatgtgttcagttttacgattatttatgtggagatggtgaacagagagacggtttggaatgggacggagagggacgacgacgtggacgaaatcctttatcggctcaaacgcaccaacaacacaatccctcaccgtcctcagctccgcccccgcgaagacaccaatcaaagtttggtccatttgatcagagactattgggctgaagtgccggccgaacgcccgcgcatggatatggtgcggacgatgcttaagcagatggtccaggacggaaaccaaaacctgatggactacgtgttcggcatgctcgagcagtacgccagttcactggagcaggaggtggaggagcgcaccaaagagttggtggaggagcgcaccaaagagttggtggaggagaagcgcaagagcgacattctgcttaatcggatgctgccgcggcaggtggcggacaaactgaagctgggcgaggcggtggagcccgagtccttccaaatggccaccattttcttctcggacgtcgtctccttcaccactttggccggcaaatgcacgccattacaggtggtgaatttgctgaacggactgtacaccgcctttgacggcatcatcgacacccacgactgctacaaaattgaaacaatcggcgacggttatttggtgtgttccggcattccgaagcgcaacggcgaccaacacgcgaaagaaattgcggaactttcgttcgct

SEQ ID NO: 87682 - DNA, 542 bp, Heterodera glycines
catcgacgaaatcgacgccattggaaccaaacggtacgattcgaattccggcggagagcgcgagattcagcgcacgatgctggaactgctcaatcagttggacggctttgactcgcgtggcgacgtcaaagtgctgatggcgaccaatcggatcgactcgttggacccggttctatccgtcccggacgaatcgaccgcaaaatcgaattcccacttccggacgaaaagaccaagcggaggattttccacattcacactgctcggatgcaactggaaaatgtggacttggaggaatttatagcagccaaagacgatctgtcgggagccgacataaaggcaatgtgcactgaggcgggtttgcttgcactgcgcgaacggcgaatgaaagtgacaatggacgacatgcgaaaggcgaaggaaaatgttctttaccggaagaaagacaacgcacccgaaacgatgtatctttgaagggttcccaaaattggaatttgtgttgacttttattcaatgaacggtaaattaaattaacagaaaccaaa

SEQ ID NO: 87683 - DNA, 118 bp, Heterodera glycines
ttcttaaagtgatccaacgagttccgccatcactcatttgttcgccaaattatttgatgacacaattcaccccggaataagggacacacaaatagaggacgcattgctccgaaaaagg

SEQ ID NO: 87684 - DNA, 756 bp, Heterodera glycines
  unsure (1)..(756): unsure at all n locations
caatcccttcctttatctgcacaaatcaacatttgttcgccgttaattctgtgaatccgaacgcacattcgcagcaaatggccatggaaacattgggaggcggcgaagaacggaacaaaatggagactgaaatggacgtgtcagttggagaagaatcgcctcatcagcaacggtttctggaagaatgtctgaatttgagtcagaaatttctgaaggagatgagtaaagacgaagagcagcaacagaatgtaataaatggcgaggcgaatgatggcaaatcggacgtggcaaaagagttgctgatttgccattcttcctctcccactgcatcgcctcaaccgagcggatgtttcttaacgtccgccaatgtcgtagcggaatcggacggaatccttcgggaacagaacagaagcggagaagcggacggacaaagcaccgccgcaacgacaccgaacgcatcgcgaaggccgagcaattcatccgctgccgcggtcagtggaagcgttgaagacgaattggccaaaatcaaagtggtcttacgacagcacgagaggaggatccgattgcttgaggaccaattggcggatgccaacatggccaatgcttatggattatgaaaattaatacggacagaaatattgtgattgaagaaatgacgaaaggaaaatatttgaaaatttatagaaaagaatgcaatttgctcatcacaaaaaatggaatatccgnncagcttttgtaaatgagcttcaaatgttt

SEQ ID NO: 87685 - DNA, 706 bp, Heterodera glycines
  unsure (1)..(706): unsure at all n locations
aaccggcgccgtcgtcagtcgattatttcttttggcaatcggacgaagcgtcgtcatcttctgtttgtgcagaagaaagacgacagatgtatgaacaatacggcggacaaaagcaaatgagacggaccgaaaatgacaaaaacacggaacaatgccaacggaacgcccagcggaacatcggcgaaagaatgccaacgatggacgacaacaacgaccaacagccgtcgatgctgcgaagaatgcctttgcaatcgatggaaaacgcatcgctactgaagtcgtccgaattttcctcttccgaacatttttctgcttgcaaaaaagaacccatcgaacagagcgaagtcattgcgccaaagaatcggttgggtccaccagcgcattggcgagtggaagaaacggagaagagacagaaacggagtgcgaaaagggcaccacttcccagacaaacgacctaccaaatcgacgagcacggcagacaggtggtcgttgtgaggaacgatgattcatatcggtcaaatgacgaagacgacgagcggacggaaaacgcagagcgcggagtgccacccatcgcgcgcaacggatttgtgaagccggcgtattcctactcgtgtcttatcggactttcgctgaagaacagcgacacgggcgaactgaccgtgtcggagatatacgcatttttatgttatcactttccttacttncg

SEQ ID NO: 87686 - DNA, 139 bp, Heterodera glycines
tgacggactggctgcctttccccttacgatgaactggctgttacgcggccgggccgggtgaagttcgagaagggcgagcccttctgcttatcaatctggtcgagcacaagaaggtcgagcagttccagccggtgatccg

SEQ ID NO: 87687 - DNA, 205 bp, Heterodera glycines
tgtcccgcaacgagcgcaacccttgtccttagttgctacgcaagagcactctaaggagactgccggtgacaaaccggaggaaggtggggatgacgtcaagtcctcatggcccttatgggtagggcttcacacgtcatacaatggtcggaacagagggttgccaacccgcgagggggagctaatcccagaaaaccgatcgtagtcc

SEQ ID NO: 87688 - DNA, 668 bp, Heterodera glycines
atttgcttatgctctttccccgcccatcggctggcgtcggaatggattttggcccatatctgaaattgaccgccattttcatcgtcctctctacttttgggctcggcttatcattggcccacatgaaaaaaatgctgcaaatcggcaaagaattggccaaacaaaacgaaacgacaaaaacagcgtcggccacttttgttggacaggacaatttgcgaacacttcgggcattcaccgggtgtcaggccggcctttccgtactttccatttatgtggccgcctcattagcatttatgaaattttggtatgtgcgtactcatctcgtccaggagttctcctgctctttgatggccattactttggccgttgtccaattttttgtgcttcgaatggccaatggcggcggattacttctgatcaaaggaattgttttggccaatgcgtgccaaattgtccaggaattgaacatgtctctgtccgccttttacacctttttttacgcgggtcggatttacgacgcggttgaggagcgcacttcgttcttcactggtccggagagtgcgcatgttcgcttcgcattgtcccgagtacaacacgccaaaacctttctcttcctcagtttgttgttccatgttggccggatgctgttcaatgccttcgtgttgtgg

SEQ ID NO: 87689 - DNA, 560 bp, Heterodera glycines
actgttttgcttctttcctcactttgtttctgcttagccatttttctcgcgatgactcatcggcaagagttgagctgaaagtgacgtcttcaaacggaatgcctttgtaatggaggataagacggatctgcgcatttggatgaacaaatatggaaatgtgttcgaatttgctcttacgggttccgcaattcctctcgacgaaaaataagcaacatccaccagtccatctgccttggagacaagacaaaaagccgaagttgaagtaaatgaatatttgcgggatccaaaaattaaatccagggccgatccatcattatactgggaagtcaattcacaaaaatggccaatgattggtgacgttgtacggaaatttctttctccacctgcaacaagttcagaaagtgagaggcttttctcaacggccggtctaatttcagatgacttgcgaaagagtttattaccagaaaatcttgcaaaacttttgtttcttcatcacaatttgcttttaaccggtttctcaattgaatgattttgcttttacaaatttgctttcaaaaaca

SEQ ID NO: 87690 - DNA, 381 bp, Heterodera glycines; identical to SEQ ID NO: 86763

SEQ ID NO: 87691 - DNA, 740 bp, Heterodera glycines
  unsure (1)..(740): unsure at all n locations
tatcgtggacgttacgtcaattggctgaggttgctatgaatggtcgaaagaatcgtttgttcatgtcaatgcgaatttgcaagaatattaaggaattgttggggaagtttgaggggcacgtgccagcgtcggaggaagtgaatgggaaagcggagaatgtgaccattcaatctgaatctatcgtgaccgagagacttttatattacatcgaccttcgcgaaaatcggcgtggttcctttttgcggattactcagctcgagacgcattccgggattcgcaactcagtggcattgccatttgaggggatcggccaattgcacgatgcactggactcaattctggaggaatatggcgaagggttcattgaggaggaagccgaacttccccattctcagatgattcgtactgatgggaaaagctttttttttgatcctggccacaattctcgcggggactttctgaaaatcaccgagttgaagtcattcatgggagtgcgcaattccgtcgtcctttcaatcagagcaattccgcaattcactcaagtcctctccaagctctacgatgactttcaggagctcagagccgtagaggaagtgaacgtgaacaatgtgcttaagaaggagnccgccgaagaagcgatcaccgattccaacgaagagtcacccaaaaaagagaccaagtccactgattgatattgagacaaattaatactcattcttattggaagacgattaatgttt

SEQ ID NO: 87692 - DNA, 591 bp, Heterodera glycines
cgcaagcggttgatctcctgctttaactgtaccgacaagcagagccgcggcatatttcggcatgttcgctgtccatccctttttccagcgtccggacttggcaagcgattgttgactgttgctgaacgctatgcccgtattgtgtggggcagtgacgagatgcatttggatgttggctggagtttggccgaattaaagttgggcatgggacgactgcagagatactacaagcggcgcgggttcctatcaaccggcattcttcgccccttcaatggggctgtggcgcgcttcatcacggtagaccgaaacgatctgtggattgagctgatggtcaaggacatacgtggagcattggatgacatcggcggagatccagagaaacggatgaaaagagtgaacagtcgggggagattggccagagaagcagacaaagacgacggcggcagagatccacaaaaaaggatggaaagagtgcgaagctttgggagattaaccatagaagcagacagggacgacatcggcagagacgcgcaaaaaaagatggagagagtgcgcagtttagggagattggcaagagaagcagacaaatcg

SEQ ID NO: 87693 - DNA, 506 bp, Heterodera glycines
  unsure (1)..(506): unsure at all n locations
agacgagaaagccgngccataacgacgacgaaaaccatggcaaacggatggtacaatcggagcccagaaagccgtgccaaagacagtatcagcaacaccaaactccggcctcggccataaaatcgattctcaagacgccaaacggtggagacataaacncgaatcctgtaactgggcaacaggtggncgttatcagagaaaacatttcggaccgggacagaagcgccgcgtcagtttcggcccacaatcagagagcaatgacagcgcgaccagaaagcacaaaatgccgaaagtggaagtgtcgacagagcaaatgacgacgccgaaagccgggcagcaaaaatgccagacaaaaatgaacggaagcgcgtcatccggcaaagccataaatggaccgcaaaagaaacttgccgaagaacaaaacagagcgccgccacagcgctcgaacatgccgaaaagcgggggcaacgccaatattggcggcggtgccgacccaacaccgattc

SEQ ID NO: 87694 - DNA, 526 bp, Heterodera glycines
  unsure (1)..(526): unsure at all n locations
ttttgccgcattatcggaacccgggccaagtaaagtgcaaacagtgcactttgccatgtttgctgtgggagagggaaagccacgcgacgaaacgggcgattgacggagtgttgcgcgaggccgagcaaatgggcattgccttgaccctttggagtgaatccttttagtngtgctttggcttttgccttttctgcctgatcaaaccggttgttttctgtttgagtgttccttttgcccatctccccccccgccaccactccgattggatgcttacttttgtttgcgagactgactttgtacaattccaacgggacttatgtaccatgggcctataagagcattatgctgggtcctatttataaataacagtatcactgattatgcaacgtgacatgatggcaatgaaacacattccatgtaaaaataaactggtgagagcggctgtgcaaaacagcagactgttcttccacgacgctttgtccaaaccatccttttggtccaccaaacgcccaccgttttgtacgtg

SEQ ID NO: 87695 - DNA, 702 bp, Heterodera glycines
caattgaaaaaccgaacgacaaaaacggagatgcatttgaagacggaagtgaagagaaagacatggcgattccgttgttgggcgagggatcggtcggatcggcaaaaagttcgccgagaaaggcaaaggcggcggagggcggcggcactttgtggcgaaagcattctccggcgatggttctccgtcgtcgcaaaacttcttccgcctctttacgcacttcagcttcgacggatgtgttacaaatcagccaaatgcaaaaggaattggacgagtccgaagttcgtccctcttcaattggcaagattttccgcttcaacaccggcaattggcacttggctttcgtcggtctcatcggctgttccatcagcggattggccgtccctttctttgcgcttgtttatgcccaaattttctccgtgttcagtgaaccgttggaccaattgcagtccgatgcccttttctgggctgccatgttccttctcgtcggctttttgaatgcctttggctttttcatttcggccaatatgttgggccgttctggcgaggctttgaccaaaaagctgcggacggaggcatttcggaatttgatgcgccaagacaccgctttctttgacgacgaacggcacagcacgggcaaattgtgcacgcgcttcgccaccgacacgcccaacgtgcgctacgttttcacccgtctaatggtgg

SEQ ID NO: 87696 - DNA, 700 bp, Heterodera glycines
tccaaacggccttaccattctgcttctgatcagtgttgtgatcggccattccttggccaaccttggcccaaccatcaaacataatcctcattttaaagccgtacaaactgcgcatcatttgcatgatgccattgcgaagaagcacgaggccgaagttacgcagatcatttgtttttttagcaacgaacagcgtcaagcattggctttggagttcaaaaaacaattcggcactgatctgattgccatgctgaaaaaggagttcaaaagcgactttgaagaactgatcatttctttgatgcaaacgcccgccgtttacgatgccaaccaaatgcgtgccgcattgtccggctccaatgaggcggtgctaatcgaaattttggcgacgcgcacaaaccgacaaattacggcgctgaagcaggcgtatgagcggttggacagaaggcatcagcacaatcagttggaggaggacatcaaagcgaagacgaagggacccttccaaaatctgttggtgtctttgctcagctgctctcgcgaagaaagtgcgcccgcaagcattgtattggcacacgacgaggccatgaaactgttcagagagggcgagggccgacggggcgttaacgccgtggtgttcaaccaggtgttggccactcgcagcttcgcccagcttcgggaaactttcgagttttaccgacaagccacg

SEQ ID NO: 87697 - DNA, 317 bp, Heterodera glycines
gaccgcgccgaacatgacgccggcaccgcagaagaacagggcgacgcctgcgaggcccgccgacaggcccgcccaaaggagagaaacgagttttttttttttgcagcggcccggcctgcgggcgaagcaagaagccgagcggggccacgccgcacagccgagcggagacgccaccgggcacgcagaggatctactcgccgaccagaccgacgaacggcatgcaggcgaacacttgattgaagaggtcgacgagccgacgagcgcccggtagcgggtaacggcggccgatatcatagaacaagacatacactctgttc

SEQ ID NO: 87698 - DNA, 513 bp, Heterodera glycines
atgacgtaaggagatcggaaggatgaaatgtcgccgcatggaagagcaaccggacgaaattagacaacaggccatcacagaattcattggagggtgtccgccggaattcacccagatacttgcgcatattgatggactccagttggaagaccggcccaattacgagatgattgagacgatgctgcgtgagcacctcacccgaagccgtgttccggagcacccgtacgactgggaagtgggaaggcgcaacgcgatggcacaagcgcagagtgaggcagcgaggaggaagaaggataacacgaaagaaggcggaggaggaaaaaacaacacgcaaggatgagtccggccctggtctgatcgtatttgctcgccattgtacatattactgtgcctgtctgatcataattgctcgtcattatacataatatgctgtgatcagttcttatttgtcctgtcttaaacttatcattgacttgtgataaaattttattgattaaaaaaaaaaatggcgta

SEQ ID NO: 87699 - DNA, 315 bp, Heterodera glycines
gtgaattcgcttttcgatgttgcacacgcaaaaaaatgaagacggaatcaaacaattcttccaggaaatttatgagatgtacatcaaattctcgatgaaccctttctatcgacaagacactccgatcagatcgccaagttttgagcaaaaagcggcgatgtatggacggaagtttttaggggtttaaaaaagaccttggaaatttaagtttttgttgccatcagatttgtgtattttttgcattacattattttatacgggtttaaatcttaaataaaagaattcgcttttagaaaaaaaaaaaaaaaaaaaaaa

SEQ ID NO: 87700 - DNA, 639 bp, Heterodera glycines
tccgaaaacggaagaggcacaaaaggaagaagcaaagcccagtgccccggccgtcttaactgaagctgccgataatgtgaacaaagcggtcgatgacttaagcgttaaacaggcaaaagcattgaaaaacgcggccgaagcaacggcagagaaaacgccggaagaacaggaaaaagcattgaaagaagtggcagaaaaaggaggaaacgaacagctgaagacggctgtcaacaaaattttggaggcaaaagcgaaaaacgacgcggaattggaaagcgaagtgaaaacgaaaacggcaacactttctgaggacagcaaaaaggccagcgcagagttgactttgataattgaagacaaaaagacgactttggacgagaaggtgaagcggacggaagagctgacagccaaaatgtcggacaacacgaagaaggagctgaatctgaacaacagtgccgacgtcgtcgccttcgtcaagtcgtactccgccgtcgccgtgccggcggtggccacggagggcaaagcatgatcaatcagtctgatcggaggattcggcattgttgtgtgatgaaatgtagccaataatgaaattcattgattaaattaattttcgctaaaaaaaaaaaaaaaaaaaaaaaaaaa

SEQ ID NO: 87701 - DNA, 718 bp, Heterodera glycines
  unsure (1)..(718): unsure at all n locations
ctgtcaagagttttttcgccggtgcgctcaagaaagtgcagattctgaaggacactttcctgctgcacagcagacagaagatgctgttgctgaaccgtcatgaggagaccatgaaaatgttggccgcccaggagccgcccgacgagttcttcgaggagtttgaagtgcagaccgtttatgatgggacttgcaattggaagccaaggggccaacatcagcagtgtgcgcaagttggaaggtgtcaaggaaattttggttgacgactcgcaacgagcgcagggcttttgcaagattaagatctatgccatcaatccggagattgctgaacaggcgcgcaacatgcttgagtttttgcaaaagcatgtcaaagtgccgcatgacaaagttgggcagatgatcggcaagcaaggcaaatcgattcaggacattgtggacaaatcgggcgtcgtacgcgttcagattggcgaagaaaatccggaacatggccttgtcgacttcaccttcaccggcacgcgcgaatctattggcaacgctgaactgatggtcgagtttctgctgaagcacatcaaagaaatggacgaaattcnagaggaggaggaggagtgcaagcgaaaattgttcaactctcggcactcgcccttcacttacccgaacagtgggtggcagtcccatcagcagttgaacgccagtcagagagcatccatcaatgggggtggtg

SEQ ID NO: 87702 - DNA, 377 bp, Heterodera glycines
gctttactgatggaaaaagaggaggaacaaacctgtgaggaagaagaatgcttatggggcataaactatggcttagcgcatgtcctattgggacggcgacccccactgtgccgagcatctcttgagctggcgctcgaattgggtcatgacaccggactgtctaaaccaccaactgattggccatcgaagaccaacgctagttcgaccgaggagaggagtagcagcgcgcatttgagcagagcggagccaccaccggactacaccgaatgcacgtgatggacaaccgacgagaaggctaccatgcgaaaagtcggtcgatatgaagacccagctaaccctgctcaactggatcaacagcagccagttcaaccatttcg

SEQ ID NO: 87703 - DNA, 695 bp, Heterodera glycines
tgttatctcgtccgcttctattcattgccgcccttctcttcctcttcggctgctgtcgtgcggatggaaatgttgtgcatctgtcgagcctcaattgtgccacaaaggacggaggaatcgatggcttcaaagctgtggacgacggtctgatcttggattcctcatctgtcaccgctgattcgtctgacctgcccctcatcggtttccagaagaacggaaaggaggacttgatcttcaaactctttgtgcgcgatggaggatgcgtctcaaaggccaatttcttcaccaacggtcaaccgtgtacactcggagagtcggaggacgtgactgagtccgataaatgtccgggcgagggcggcacctccagctgcacatcccacgaagtcacctgtacgggcatcggaatggcgaaggtcgcggaggagtccaatggtcacgccttcaaagccaacctggacaatctcaccaaacttaccaatccgtgcgcgcaatggaaggcacattttggcggtgttcatcaagtgctgaatggttcttccagcggagagaagtgcgcgagtgcaagattccccgtctggatcattgctgagatcgtcatcatcgctttgttcgtcattggtggtgcggtgactgcagaggttgtgatccgtcaacgacaagcagcagcgcaaccgactctggaaactcctgcaccg

SEQ ID NO: 87704 - DNA, 744 bp, Heterodera glycines
  unsure (1)..(744): unsure at all n locations
agaacaagaaatttcgcgcagcgaaatcaacgaaatcaaagagattccgcgcaacgaattcaaaacggcgccaatcactgagagccgtgaaagaccgttcattaaaagcgaaatcatccgcgacatcagctccgcaatgaacttcttgaacgagcaaatccgggagtactcggaacgaaccaaggacagagaggaattcaagggcatcattgaggccagaaacaaactcgagacggccatcaaaccattgcacggagtgatggagtccgacatggcttcttcgagcctggagacgtcgatgaccaactcggccaacatcgcccgacaagccctggaggagttgcccgtgaaacaggtccgacaaatggaacaaattgcggaggagggaaagagcaaaacggtggaggagcaggagagggcactgcgcgagtacgcggagaagaacagcgaaagtgtgaagaaggctgttgaccaagtgtccgtcgccaaggaccgggcggacatcgctttggagacgtacttgaggagccacgctgacaccttctcccaggaggcgcgaaaggccaacgaccagatgctgttcgtgatgaaggacaagaagctcaactcggaggacaaagtgcgcanattggaggagtgggccaacactttgccggagaatgtgcgcggagagctgcgcgtgcgtgacttgcgcgagctgaagcagctggtgcacctgtacaacggactgacgcccgtnctgca

SEQ ID NO: 87705 - DNA, 326 bp, Heterodera glycines
gtttggacccgagcggataaattgggcttatggcatgagtcctgaaattaattccagtgccgaaccaccaggaaagcaaagtggctgaagagtgtttggaatatcagaaaaaattcgacaaaaagataaaccaaatcgcaagtcattggcacggcgtccgcgtgagcgcgccgaaagcatttggcggcataatgatcgaattgtcaatttcaaaaggaaagtacaatctgagcgacacccaaaattttaacattgaatttggaaatccgaaagatttgatgacaaaaataacggacaaaaaaaaaaaaaaaaaaaaaaaaaaaaaa

SEQ ID NO: 87706 - DNA, 567 bp, Heterodera glycines
  unsure (1)..(567): unsure at all n locations
gtgattgtgagaacatccgcgtcattgactggattgtgcgccgtttggacaacacagcgaacattggcattgaatctgccatcggcacaattccaacccgagaatcgatgcatttggaaggacttggcaacatcgactgggaccagctgatgtctttgccggccgactattggcacgaggacgcgaaggaagtgcgcaaatttctcgaggaacaggttggcaccgatttgccggaacaaattctgtccgagttggaacagcaagaaaagcgtatcatggcattatgagggatggacagttgatggagatgagaaatagagaaaattgactggaaattcgcattttaattacctaattatttatttattttacatggacatttcgtttcttaattttgtggggacacttcccccccccccccgaaatgtttaaaaaaaaataaattttccgttataaaattttttcttgtaaaatattatgatttctttcaaaactatgtatttgtttccgctttctttggttttttaataaataaaaaaagccnaaaaaaaaaaaaaaaaaaaaaaa

SEQ ID NO: 87707 - DNA, 797 bp, Heterodera glycines
gcaaaatccgttgcccacaaagtactcggattacgacgcattcatatcatttacatcgatcaaaatgtcatcgcttttctccgcctttttaccgttttttcgccttttcttaatattcttgttcatcactgaaaatgttcgcattttggactgtgttttgctcaacattttgccaatgtttcgcgactccattgatgtgttgtttttgaataccatcgcttttcgtcgtttgcgtcaattggccccgtcacttctcagcgattgtccatcacttcgcagtgtctctttcaatgatgccattctgcccgcttttccgcccgatgacagtgccaatgcgtcggatggccaagcggtggccaaatggttgttcacccctcgtccggatggtctgccgaaggagcttcaatgctctgctaatgcaccggttggtcaatggtcgtcaacgatggaacagattaaagcggcattttccaatgcttcttctccggttcctttttgcattcacttttggtcctcttctccacctgactccgttgtgttatttgatcggatcaacgaagtgactggggaggaattggcacttcaacaagataatgcacatgattgttgcctcttccgtttgccaattggatggggtacaagaaaatgggacaatgtgtgggaagaaatgattgctcgacagaacccaattgacattcggatcaaagatggcggattcgacggacggtcttcgggacgccccttctcccgggccaattgatcactaatcaacagcggaagaaatgaatgaattaatt

SEQ ID NO: 87708 - DNA, 798 bp, Heterodera glycines
  unsure (1)..(798): unsure at all n locations
gtggggtgattggctggtgtatcggagcgtgggtggggccacccattccatgttggccgacgaagacggtgctggcgacagcagcagtgccgttgcacccgttgcggaacaacaactgccagtgctcatcggaatgcgcggacaacgcatggagacggacagctttccctctggctggggtcgcgtcgaaaccgacactcttgacacattcttcgattccagttggtattatttgcgttatttggacccgcacaattcgaatgcgccgttcgacccggacattgtcagcaaacacatgcccgttgacatctacattggtggcatggaacatgccaaggtgcatctgttctacgcccgcttcatctaccatttcttgcacgagcttggcatggtgcccagccgtgagccgttcgcgcatttcattcagttgggcgttgtccgggcgcccacctacaaattgcctgacggcagatatgtgcccgactcggaggtggacggcaacaaaaaattgcctaattctcggctggtgcacaaagggagcggccaagccgtacagaaggagtttgagaagatgtcaaagtcgaagcataatggcgtggatcccatgggtgtcatcgacagctatggtcttgacgagacaaggatgcaattgttgatcgaagcgaggcccaactatcagattgattggccctatccgtaccccacatttcagttgaaaaccatcaatcgatgggtttntgcgtgtgcgaacagtggtggacaattatgtgacagaacgccaacgggcattgtcaatgg

SEQ ID NO: 87709 - DNA, 797 bp, Heterodera glycines
  unsure (1)..(797): unsure at all n locations
gtgaaatggaaccgaaaaaccgttgctacgttttgacaagaattttccgatcaatttccttttggcccatttttggatgattacgccggactttggctgctcgggttggacattctcccaaaatttggaccgaaaacaacaaatatttcaatggaaaagccgaagaattgccaattggagtgtgaaaattattcctactgtaattgctcacgattcttctgcgtgtgttacatttaatcctgccaaactccccggggcgttaggacttcgcccgatgatggttggtggtttccctatcgacataaaaattgcgccgtggacagtgctatttaaaggctttaaattcaaagggataagaaaaggaaaaagtgtagaattatatggaacttgcgctagcacattcatttcgccagaatttgtgctgttagccgcgcattgttttgacaatgtgacggaaggaaatcccttttatttggtgcacaattcaaacgcaagtaatctttcttctagcaagaagagtaaaaaggtcataacaagccatcgccacgatcagaagaatgtgttccttcaccccaaatacgaccctgtttcggaccaatcggaatcacagttccacgacatggcacttattaagctttctcgcccaatggcgcgggttcagccaatttgttttcactgtgccaaagttgataggtttcgcaatggcactgcttatgtcatgggctgggggcangagacaaatgattgtgtgggcttaacgaggcctgccaaaatgttaaatggtcgcccagtgaaaa

SEQ ID NO: 87710 - DNA, 651 bp, Heterodera glycines
tccttttttttggatttgaattactttttaagcccttttttaccattttaattgcttttccttctgctgttttgtttctgcttctgaacaacatgcacacttttgttgttttttttgctgatgtccttcaaattttcatttgctttttcaaactgtgcgatcgaatgaacaatgacaacatcgacaatttggcaaacaagcagctgaacaataatgatcatcagtaattcttacaattattatgacgcctttcttccgccaaacgttgacaatcaaattgccttttttaatgagcatggcatgtcaattaatccgcttctccaacagcaattgagcgtggagaatgaaagcagcggaacatgcttggcaaaaagcagcaatatgatgggtcaccagcagcagagattggcaacccatgccaacagtttgaccctagcaaagttggcaacaaatgccaatcaaatgatgggcagtcagcacggattaaccacacatgccgaaaacaaaagcggacagagcaaccgaagaaaggcaactgcttgtgcttacaatagtgccgcccaaaaagtggagatgaaacgccaaagtgcacggaagccaaaaaagtcacgcaaaccgccaccctttgtggtgccagtggacaaaaccaac

SEQ ID NO: 87711 - DNA, 124 bp, Heterodera glycines
gtgattcgcccttccgttggcattcactctggttttgaacaagattacattcgatggctcgacgaacgttctaacgtcttttcgtcgatgatttcgacagggaaatccccgctttccgcctgct

SEQ ID NO: 87712 - DNA, 797 bp, Heterodera glycines
  unsure (1)..(797): unsure at all n locations
cctttacgaaatttcccatttttgcccgctgaaaagaaatcgaccgcttaccgggaaagaatcgaatcgcttcccaaagtgcaccaaagcactttaaagaaacttctgggccaccttcaggagattgtctcgcacgaggaccgcaatttggcctcgttggaaaatatttcgaaagtgtttggcccaactctgttcaatgtgtccaatgccgaggaagaaatttcgttggaattgtacaacacggcgaccaaacaagcgattgtgacgcgcgatctgatattttattattgtgacatattcggagtggacgcggagcagctgctggcgaagtgccgaatggacgtcgtccgggaacaaaagacttccaaaaaccctgccaatggtcttctgattcccgtccatttgttcgagcgggacaacaaatgttttaatgtccaatcggaatggacagcttcacaagtggtccaattcaaagttcaaaaattggcttttgtgtcgccttgcgaaaattatgcgcttttcgaaatgatcaaaaaagggcaattggagagacgaattggcgcaaatgaatcgctgagatcgattgtattggggcgatggatgacggacggagtgggaagagcagcagaaggacaacttcctcttgctgaagaaggatccgcatcccttccaaccacaaagtggccgtgcctttgctgaggatttgaagttggctgagcccggctcgcgcactttcaagacggcctcacttcgcattgaggacggagtgcacgtgtgccatcattcacgcngaatga

SEQ ID NO: 87713 - DNA, 705 bp, Heterodera glycines
tactttcctccttttccgggcaacgacgcagcagtcgaaacaaccgacgcagaagtgggcgcaacggcaccagtcaaacggcacagtgacaacaccattatttatcatcagcaacagcaacagcagcgacgcatgggccaaatcaatctctgcgacgacgtttggttggacacattggcatggatcaatcgtggagaagtcggcatgaagttcgcgctggtcaatgctcggttcaacactttggtggacaggcatttcgagcagaggaagtggtgctttggcgagtttcacatctgtgagcggatgacggaagaatcgggcgcagaaatcatgacatcgatcgacggcaccgacttcagcacgttgccattgcccaccactccgctgccggacagtgtcgtcggcttccaatcaatctccatttggtacatcaacgaagaggtcatcaattttctgtgcacaattcgccgtctcctcgccgaagacattgcgctggaattttccacttacttcacagaatatcgcagttggaaagtgatggcacgacacatttggccgctgttgcgggatgggatcagcactttgttcctgaagaagtgtgacttggccatgctccgtaaacacgtgtcgcccaccgtgctgttcgactgtgccggcctgcaccgaatccacacgcaaatgctgcccgagtgtccgtctgctgac

SEQ ID NO: 87714 - DNA, 728 bp, Heterodera glycines
  unsure (1)..(728): unsure at all n locations
ggtggacctaacggaggacccgcaaacgcattagtacttcggaccattgcacagacggaggcgcgaaggaagcgaatcggacactttggagtgcgagatagtcgacgacagtcgagaaagcgaaagaaattcgaatcaccgcaagccgtaccgcctgccgcgaacaccgacttcattcagacagcccggggcgcaattcggcgtcagtcattacgcgatcggagtgggatgacacttgcacggcttgattcacaacgtgaagggtccgacctgattaggagttggagcaaggaggatgtgtccaatgaggaaatgtctgcgcatcatttcggcaacgggggaccgtccacctctcaccagccgacagcaaatcagcaaagacgcgactcgccgcctaaaagaatgccgaaacaatcgcagcaaaagcagaagcaaatgtcgccagacgagtggttgaagaagttggaggccgaatcgggcggccttcgagacgaagaggaggagcaggcggagaaagacgtgctgaaagggagcgccggggagagcatgcggaagggagcgaaagcacagaaaggcaacggggtgattaggagagatcagcaacagcagcagcaacacgatatgaacggaatgaatctgaagggatcactcggtggacagaatcggaggcggaagaagagctgttgctgcattatttgatcacgccttcgccttctncccaatcgctt

SEQ ID NO: 87715 - DNA, 129 bp, Heterodera glycines
atcttgttttttttgtcttattatcccattaagacgccacctttttctctgtcacacaaagatcaatagatagcggaaatagttttataaagacatgcttgcgtccgaaacctccggggggggtggctt

SEQ ID NO: 87716 - DNA, 488 bp, Heterodera glycines
aaaattgaaaaatatctaaaaaggccggccaatgacgcatttgttgagggatgtcatcgaagcagcggataatcggattgctgatgctaatgcgcaagccaatcagcgggctgctcatcaggttgctcaagcataaaggcggactgtttattctggttgctcaggcataaaggcggatggaattgtttatgttgtgttcccgtttatttcgacaattttatgagattgatcacaaaatcagcgccgaggacagaaaaaaatttttcgaaaaatactgtgaggttacgacatggatggagcataatgcaggtgcaccatctgtggaagtgactcaaaaaaaagaggcgtttgaacatctgtaccaatcaatcattgacggtgcagtcgggcaacgactatgtcgcgacaacgggttgtgtggcaaggacgtcatccgccaacgaagttgctataaccggttgtgcgcctggaaattcgaagaatgatga

SEQ ID NO: 87717 - DNA, 134 bp, Heterodera glycines
cgagggcgagcgagagcgttgacgaaaaccggtcggtcatcgtcttgcatccttcagttcctccgcgaacggagctgaacagtcactcaagagaaaagggctgcttgcagccaacgtcggcacccgcgtgggct

SEQ ID NO: 87718 - DNA, 624 bp, Heterodera glycines
agcgcaacaatgtcttctgacgaatcgacgacttcttctgccagtgttgtgagcgttcagctgcgtgaagtgcccatcacagacttcaaggacgtgcttccggtgctgcacaaaacgctcaacgaattggaacatccgttcatcaagaaggccgaagaaatatgcggaatggaacgtgagaagctcttctacatcacttcctctcttgtgctgctcgtgttgatgctctgccctggcaatatgcttctctctactgttatcactgtggcctacccaatgtacgcgagcttgttgaccctcaacactcaaaacacatcggaatacacccagtggctcgtttattggtgcgtgtgcgccgagttctgccagttcgactatctctttggctctatcaatggccttctgctgctgtacgtgcctctgaagaccggctttctgctctacttggcccttccgcaaacttatggcgctcacaacttgtacgtgaagcatatccgcaaagtgcttgccgtgacgaacgtattggacaagatgaagaagatgttctgatcgagcagataatgtatcactgtgtaatgtctaggatgattctctgttgtgattcctatattatgtgttatgtat

SEQ ID NO: 87719 - DNA, 754 bp, Heterodera glycines
  unsure (1)..(754): unsure at all n locations
ccatggttgctttctcgtccttctcttggggctcccttctcccacttttgctcctttccctttgcgtcgtttgctggttttgatagcgttttcgtccctccattctgttccatctcgnttcccttcaataaatgcgtggggcttgaacatacgtcggtgcgtacagcagaatcgtgatccctccaaaaggactccaatgcacaaatgatcagctatgtgcataattgggcttgaaatgctggagttgtgagcgatgcaactatttccatctgagcaggacctgtggctatcaacaattccatgacgtagtctccggacatttgacaggccaagcgctggaattatttaacaacctgtggagcattcgtcacaatgatcaagatactcgccttgacgagtgccaggaaagtcgtgccgctttgaatgccaccggacgggaccacgtccttgaccttctcgtccccattcctcctccatctattgttggccctccgccttccggatgttttcctcggcctccttactcgaagccatttggcgggggatttgggccaaagtccggcggagcaaccattccgggaagaggaggaccacagacaccggagagaagaaataacattggcactgaggagggtgaagagaaaaagtgaaggacagagaaaaagtgcaaagagaagccgattgattgaaaacgtacaatgaaatcacattcactctttcgataaaattttaatccagaaaaaaaaaaaaaaag

SEQ ID NO: 87720 - DNA, 868 bp, Heterodera glycines
cgttcggacgatttggcccatcgccagcgccggtcgaccatcgacgaccactccacgcgttggtccaagtcggccagaaggcttttgccaattcatgaaaggggttcgccttgcgatgcgccggagagtgtgcaaaaggcgcagtcgtcggacaacaaatcggaccaatctgagaacaacagcaacgacaaacagcagcacgtggacgagcagctcgagaaactgccacggatggacgagcagcaaaaagacgatgaaatcgttttggttgggtcggcgaatgtttgcgttgtccttccggaagaggcgggaaatgaacacaactgccaaaaaacagctgaacaaccgaatgacgcactcgaaaatgacattgacaaaaaagtgaccgattttcaaacaatggtggaaacgacagaggaggacaaccgaagtggcactgccaccttcgaaagctttggcaacagtgccgagccgacaccaatggaaacgacaatttaccattcggcaaaagaatcctcggaaattggaacggacaatggacttctttcaaaaatggcggaaagtccgccgaaagtgccgccactcactcccccaagcattctgcgaaaagtgaactcccctggtggcaatggcgtcaaaaagattcgacgcgtccaattcaaagaagacgaacttggtcccggcagaattcgttttggtcgctccttttcggcgtcaccatacccaaaacagctgcttgaacatctcgaccaaagcacaagcgaaggcgccgccagtccatcggctggacatgagtcacccgccaagcgaccgatgaaagcgtttcgacagaatttgcccatcgccagcgccggtcgaccatcgacga

SEQ ID NO: 87721 - DNA, 617 bp, Heterodera glycines
gacgttggctggaccttttggctgaggactttgaggaaccatgccacattcgtcgactctgacgactaggaggaggaggattcacggaactactggcatgatgaacatgccgtactaaggggacctttttgcggtgtgcctcttctgccctcactgcacgggagaaactcgcggaaccgatcttacacatgaatgacactccaatttctaccttatcagtttcatccactacaattacatggacacatactaccggatgatatccgtcaacttcattccaaaacaaactttaacactcggactaacgaccaccagacaatggatatccaatgcgttgaagttcccggccaagagcaatgggacactgacgacaatttggtgccgcctgtttgggaatgaccatttgctttggatgttggagagtaggcatttgtagcgagaaatggagcaaatagcaaaacaaacggcgactgaatgtgatgaaccgatagagaaagctgtcactgaaagtgatgtgcgattcaccaaacattaacatgggcacattggtcgaggagtctaagcacaacgccctggaacgggtgattgccgaatatttgtcggatctgacgggcagt

SEQ ID NO: 87722 - DNA, 260 bp, Heterodera glycines
cgccgcagagaaggaggaaaagaagtcagaaagcaaggaagcagagaaaaaggagaatgaggagcaaaagcctgctggtaagaaggagaagcgcgccgcagagaaagaggaaaagaagtcagaaagcaaggaagcagagaaaaaggagaatgaggagcaaaagcctgctggtaagaatgagtagctcgccgcagagaaggaggaaaagaagtcagaaagcaaggaagcaggcaaaaaaaaaaaaaaaaaaaaaaaaaaaa

SEQ ID NO: 87723 - DNA, 791 bp, Heterodera glycines
  unsure (1)..(791): unsure at all n locations
atgctgcaaacgcacaaacgtgcaccgcctgcgttggcccacatcatggcacatcattcgccccatttgccggtcggaagtgagctaagtccagctaaatcactcgacagccatcaccaacggcaaatgccactgtttgcggaaaaaaaatatggccaaaaccaccagtcgcctcatatgtcaccaataaagctgtcaaatggtaatgtctcaccaccacaatcaccatcacatcgtctacaacagattatcaagcggcattcacagacaaaggatttgtccagggaaaaagtgcaacgacaacaacaaagtccgctgttacagcacccatcaattcgcgccctaattggcctgcccaattcgccggctgacgaccaaaacccgcctccgccattcacgccggaacagcacgcgctgcttatggacaccgtactccgtccaccgtccggtcttccgttcgagagtccacgatcagcgccgtcaccgcttgagctgagcgaggagcaacgcgacaaactgatcgatgccatccaaggacgaccacagccaggacttccatttgaggatgaagcggaacatgaaggactacatccggcacaccgtgtcaattcggcacatcttgaacacgttttggatgccatattccgtaagccgcctggcctaccatttgaggatgatgaagaggaggaacacagcagcaccaacatgcatcactcaattgccggctatgagactaagctattcaagaaagatgaatgctgatgaacgatgaactgantataataattttt

SEQ ID NO: 87724 - DNA, 636 bp, Heterodera glycines
  unsure (1)..(636): unsure at all n locations
gcggcacagtaataaaatattaaaagatccgaaaaaatgccaaacattttcaaaatccttctgattgtgcttttggccgtcgtctcattccgtctctcggcttctactggtgacaaaaaaactgctaatgatgggagtggaaacaactcatcagctgggattggtacgaggatcaaaagaattgtcaccgctggactgctcttcacttccctggcgacgggtggggcggaagcgattgggcgaagcaatgctcagggaggaaatgccgccggattggtgccatcgcatgtgaccaatcgctcaatggctccaccacctcctcctgtgcaatttgaaatgggggcaaatcgattagaaaaaatgagggcacacctacgcgaacttgctgagaaaatgccggtcaatgaatcgaagcgtctgtcaccgagtggacccgaccctcatcatcattagggccatggatggatctaacggaggaagaaagaatggatgcttagttttcagattttattctatcctcttttatttattagtttttcaaaacaaatttcttccacaactttttaaactatttgttgttttgaatctttttagataaatctaaacccctaaaaaaaaaagnnggaaaaaagaagn

SEQ ID NO: 87725 - DNA, 526 bp, Heterodera glycines
tcatctttggcaagaacctgcccatatggaattggacttcatccaaagcgttttgttgggcccacagcgaggaaatttgacggcaattgaatgtgtattggcacaaaactttaacaaacagtcatcaatgatgccaaattatggctcggaacgtaaaaatgcaaaagtaccaaaattagaaatggaaaaggcatggtggtggtgatgagacctaattggacaatggaagctagaccggtcaaagtgatcagagacttaagagaaaaggggtgggactaccaagaaggcctacgagtgaatgcatagtgtgcgggaggaagagctcttactgttattacagggtacaatgttgggaaagctgtaggcaattctttcatcatattgtggcgaaccgaacattgttaaactgttttggagcaaacaattgcccagttggataacatggctttccatgcacgaggctgtggtctgcacaaatgcctttcggccggcatggacccgacactgatcaatgcggtgcagcaga

SEQ ID NO: 87726 - DNA, 504 bp, Heterodera glycines
  unsure (1)..(504): unsure at all n locations
ccnttgtggaggttggggnttnnnncnccaaaaggggnnnnnncgaaannnaaaaaacaaacanacncaaaacaacacgcggccttntgagaaaaaatgagagagnnnaaaaggccgaaacancnnngaaagaaaaaattttnttggggttgggaggggaggggngcgggcctcccccttggggggggagaaacacaaaaaaagaggggggggggggaagagggggnnnaaaaaaattaaataaaaaaaaaaaaggggggggggggggccccaaaaagggggcccaaaaaaaaaaaaaaaaaaaaaaagaaagaggggggcgcccccaaaaataaaaaaaacacggggcggggaaaaaaaaacaccccttcgtgtgttgggggggggggggggnncccccccccccccccccntnttttttttaataaataataagaaaagaggggaggggggggcgccgcccacccaaaaacaaaaaaaaaaaaaaaaaaaagaaaagagaga

SEQ ID NO: 87727 - DNA, 707 bp, Heterodera glycines
gtggaagatgggcctggttgaccacttgttagccctgggcccggggctgagtgacccgatcagcggcacacatcgctacttggaagaggtcgccatttccgcctgtgagcagctcgcggccggcacgctgaaaatcaaccgcgagcgcccgctgatggagcgcattcagaacgcgttgctgacacgaaaaccgttgctggacgcggtggttatgcgaatggcacgggacaaagtgatgaagcaaacccatggcaattacccggcaccgttgcgcattttggacgttgtccgcaccgggctggtggacggccagcaggagggctacgaggaggagacaaaggagtttggctatcttactcaaaccacacagtcggaggcgctcatcggactcttcaaaggacaaaccgagtgcaaaaagaacaaacacggcgaggcgcgcaaaacggagcgtttgggcgtcatcggtgccggtctgatgggcgctggcatcgcaaatgtcagcattgacaagggcattcatacgactcttgtcgacacgaagcaggaggcgttggaccgcgggctgaagcaaatcaccgcccaaatggaggggcagctgaagcgaaggaaaatcaacgccgcagagcacgccatctgtctgtcaaagctgaagccggtggttgacgactatgagcaattgcgtgactccgacgttgtgatcgaggcag

SEQ ID NO: 87728 - DNA, 628 bp, Heterodera glycines
atgttccactgaacaggtgccgcctattcagccaacatgaacaacccccagcatgccccgccacaaccgtcgccgggcgccgcgccggccggcaacaccaccaccacttacgtgtacatggcggacgggggacagccccactgggggcctcggccgcaaaatgtcttttgctcgaactgtcgccaacaggtgctgaccaaagtcaaatactccgccggtctgctcacttggctgttgttcggcggttgtcttctgttcggctgttggttgggctgctgtttgcttccgttttgcatggacgactgtcaggactgtgagcattactgcaccaactgcaaggcgtacatgggccaatacaaacgtctctgataaatggttttgactcgtcgttcgtcctgacaacttccaccgttcgccctctcccccgtcccccggaaaacctttataaaagaagcgacaaatttcagcaatttttattttcaaaattcgcatcacttttatatcattcccattattttacacattatgcaattatctgttttttaatggtcatatgccgtatttacatcacatggatatgattatgatttgatgatgttttccatatcataaattatgaaaattcgcc

SEQ ID NO: 87729 - DNA, 354 bp, Heterodera glycines
ccttgacgatatgtgcaatgacgccgatacccctgtattgttgaatgacgacattttccggctttccaaatattgctcaacagaggccaccctacagatctcacgcgcaacacatgtttcgttacagaacacacaccctaccaacgcattgctcatgaacgagaaccactccatggcactggtaaactcgatcaaacaccgcatggaaatgcatacactagggccgagtcagcatctttactcatgcgaagcgccgtgatccctacattatttccgggctgctgaccgatctgttgagcatggacggtgttctgacctttgtgcggaccgttgtgagtgcccagttcatcgatt

SEQ ID NO: 87730 - DNA, 641 bp, Heterodera glycines
aaataattatggagaatacaaaagaaaatgatggaaaaaccgagggacattgttcttcggtgagtgagtcgacgtctaaagaagagagcatttgtaatgataaaagcgaagcggaaggatccaatgaaaaaggaatgccaaacaaagaggaagtgccaaaaggatctgtatagaaagtgcaaaatggagcggaggtgccaaatgttgagggagtgccaactgaggcgggcagcgcttcacagccgagcttgtacagccaatttgtgaccagcttcgagagcgtcatcaacagtttggtctcagaatcacttcgcagatgacgtagcgacgcgtccacagcaaaaattgccatctttggacttggagggcgttgcggcgttcatccgcgaagaacgacccgagattgtgttcatggtcggtgccggagtgtccacgtcagccggcatcccggactttcggacgcccggcaccggtctctacgacaacttgaagcagtacgacatcccaaatccgcaggcgatcttcgacataaattacttcagaaggaatcccgagcccttttttgtgttggccaacgcacttttccacgaaagcataatgccgacttccgcgcatcatttcattcgtttggtggcggacaa

SEQ ID NO: 87731 - DNA, 91 bp, Heterodera glycines
taactgcgagaccgacaagtcgagcaggtgcgaaagcaggtcatagtgatccggtggttctgtatggaagggccatcgctcaacggataaa

SEQ ID NO: 87732 - DNA, 100 bp, Heterodera glycines
tgttagagtgatacattattggagtaaccatgacctcctgtggactttgattccctagatggtaatgcacaaacctttgaaaacaggtgggtgtgtagaa

SEQ ID NO: 87733 - DNA, 448 bp, Heterodera glycines
cctctttgcggtgtttgttcttttgatgttcgccgtttctctggcggtggtcaattccgatttagcaataaacggacaaaagtacaacaggagaaagcaacagatggaaaagcaaatggacaacaacaacaacaacaacagaaaacgaaggaagaaaaagttaattcgcgtccaagaacgccattttttcagcagatctttccaaagttggatgctgaacaactggacaaaccatggtcaagcattttcgaaaactgaacagatggaaaaggatggagaaatgagaaaaggtttatttttcgacctaaacttgtgattttgaagccaactgaattcgattgtgattgatttcaagttttttgtgaaagaattgttaccgattgttaaaaaaaaaaaaaaaaaaaaaaaaaaaaaaaaaattgaaaaaaaaaaaaaaaaaaaaaaaaaa

SEQ ID NO: 87734 - DNA, 683 bp, Heterodera glycines
ccaaaagatgaagacaaataaaaggcaaaaagtttcttcatcagaagaagaattcgacccgaatcagaaggatgaggattatgacctgctcatggatgacgaagagcgagaaaaattcgacaaaatgactgaaaaggagcgagaaattgaaatttacaagcgactcgagcagcgtgaaatcatgaagacgagagagaaaataaaaaagaaactcgaaatggctgctgggaaaaaggcagacggagaagttgccgcaaggcaaaaaaaagcgaaagcgaaaaatgtccgacgaatcaaacggagacgatgaaagcgacgagaaggactcggcatccgaagcagaggaagccgaaagcagttccgacgacgcggaagagacatcacattcgaagagtgcggttaaagctgaacccgatgagtcggacgacgaaatcgacacggaataccacaaaccatccgaagtcgcgaacaaacagagtaaaaagaaagccatggccgacttattgagcaaacgacgcaataaaatacaagccgaggaaaagcggaagaaggagacattgaaggcgactctcgacttggacgaaatatttggcaacgaaaacgaatgtggaaaatcggccggcagcagcagttcgtcgacgagttcttcgcgttcctccagccccgactggaccaagtcacgt

SEQ ID NO: 87735 - DNA, 682 bp, Heterodera glycines
aaactgttcttcttccttcattacactatgaggaaattctattatttaagctgttccagcggtcttggcatttgtcattgtttggcaaatcctttcgattgagaagctttgcgggaaatttgctgagccaaagtgtttctatccaacggaagcttgcgacaacttcactatcttcaaacaaaacgcagaaaccactgaactcaacgcggacaatgaaacaaaatggatccagctgaacgacctcccgaccggcgagggctgtctcccaatcaatatttccattgtctccactcttcgaaatggttacaattgcggtgtatcgaatcaattgaaggacactgcggatgcgttggcccgtgtgctttacctgtgcttactgtttctgttcgctctcgttttccacactttggctcagcaaccttcggaagagtatgacctgttcggttatttgtgtgccgcttacagcgtcttggttttgggtttttcgaccgtgacaacgattttggagtcagtgaattggaccactctctgggaatgcaccaatttccgaccctatcagtcctttctgttgttccttttgcttcccagtgtcattctgttctgctcagtgatttacgaaaccttctccaactgttctctgcttaaagaaagcgatgccgagaacgcgcaaaagcaaaccgtc

SEQ ID NO: 87736 - DNA, 148 bp, Heterodera glycines
cctgatgggactcttacaatgaagtgatatgagaagcgcgacactttcttcaacttaaagaaggagaaagtgatcgcaagaggaggaatttgctgatcactcccttaaactggcaaatgccctccctccgtttccctcccccgcccct

SEQ ID NO: 87737 - DNA, 755 bp, Heterodera glycines
gtgattccttttcgcgtaacaaaattttaatttattattgctgagcaagtggatatttaagcggggtttccttttgcaattaattaattgtaattaattgatcgtctccccaatggcttcttcactcaccattgaaaaacgctgcaaacttttcaacacaaaacaaatggaatgccaattcgatggaactgaagccggaaaatgtgctttttgtgtaaagcttccgtgtaaatttggagcagttaattgtgcagaggaagtgagcacctcttgtgtaaatccgcaagaattggaaaaatgctgcaaggcgcgtgacaacgaatgctgcgtgtgtgtgctatgcgagaaaaacaaagttatgaaggttttggtcgaatgttgcggaaagcgcaccgaaacgagtgccgaggccgggaaagcgctttgcatttgtgtgccgaaaattggtggaggcaaatgtggaggacaagtgcaagtgaaacaatgcgatgcgaagctggttgacgagtgctgcgcagctaacacggagagtggcgactgctgttgcgtctgtttgagctgcaatgaccaaaagtgtgtggtcaccgtccgttgtcctgctggagaagcaaagtcgactggtccaacttgcactgcttcaaaatgcgaaagtgtgaagtgctgctgaagtcaaaaaaactgatcgaagactgaaaggatgcatgcatttaactgactcagttttaaaaatgctttttcaattagcaaataaataa

SEQ ID NO: 87738 - DNA, 708 bp, Heterodera glycines
ttgccgtcgggcagcgccgcctttctccgctcattggagcaccactgtgactgggtgaacgacatcgttttgtgcagtgatggcactcgactgatctccgcctcttccgacaccaccgtcaaagtgtggcacacgcgcagaaatggcgcgtgtttgtccaccctcaaaacacacaaagattgcgtccgctgcttggcttatgcccggtggcccaccgaattggtggcgagtgccgggctcgacaaatgcatttacctttgggacgtgaacacactgaccaaagtgacggccaccaacaacacggtgaccacttcgtctttacgcggcaccaaaaattccatttactctttggcaatgaatgagtgcggaactgtgattattgccgggtccactgaaaatttgctgagagtgtgggacccgcgcacgtgtcaaaaggtggccaaactgcgcggacacaacgaaaacattagggcaatttcggtgaacagagacggcactttgtgtctgtccggcagcagcgatggcactgtcaaattgtggagcatcggccagcagcggtgcattggcaccattcgttgccattcggacagcgtttgggcactgcaaacggactctgtttttgccaccgttttttcgggcggacgcgaccatcgcgtgtttcgaactccgctgcgcaacctcaacgactcggaattgctgttcaccgaa

SEQ ID NO: 87739 - DNA, 754 bp, Heterodera glycines
  unsure (1)..(754): unsure at all n locations
caccgtttgctgctattgaatcaattcccgcggccgcctggcggccgggagcatgcgacgtcgggcccaattcgccctatagtgagtcgtattacaattcactggccgtcgttttacaacgtcgtgactgggaaaaccctggcgttacccaacttaatcgccttgcagcacatccccctttcgccagctggcgtaatagcgaagaggcccgcaccgatcgcccttcccaacagttgcgcagcctgaatggcgaatggacgcgccctgtagcggcgcattaagcgcggcgggtgtggtggttacgcgcagcgtgaccgctacacttgccagcgccctagcgcccgctcctttcgctttcttcccttcctttctcgccacgttcgccggctttccccgtcaagctctaaatcgggggctccctttagggttccgatttagtgctttacggcacctcgaccccaaaaaacttgattagggtgatggttcacgtagtgggccatcgccctgatagacggtttttcgccctttgacgttggagtccacgttctttaatagtggactcttgttccaaactggaacaacactcaaccctatctcggtctattcttttgatttataagggattttgccgatttcggcctattggttaaaaaatgagctgatttaacaaanatttaacgcgaantttacanaatattaacgcttacaatttcctgatgcggtnatttctccttacgcatctgtgcggtatttc

SEQ ID NO: 87740 - DNA, 183 bp, Heterodera glycines
cagtttccctgacgcatcgcttcattttgccgagactttcgaccgcgccatttctttgcttcgcgcagactgtcgtgcttcggagaaacacgtcacttttctgcacattctccgacaattgggcgcgagtgaagagaatggtggactccttggcaatttgaacgggctcatttgatacctgag

SEQ ID NO: 87741 - DNA, 428 bp, Heterodera glycines
  unsure (1)..(428): unsure at all n locations
tcaaagtgattgactaggactaggacgactgttctgactccttccacatgatagggtaggcctctacctctcttcttgttccttccgctgaaaaggtataccactaactcactagcattatgcccgtactacacatatataaacagtgcgtccataggataatgtcacaacaccgcggttgaaactacgaattctcgaactatgcatactaaattgagggacggccttaccatctgatgaaatggacattcttaatacatagacgggattaactgctgacgaaatggactctgttttatcatggatgcgaagaaaaactggctaacataaagctgttntttgtatacatacttcgtatccagccattgaatgtggaatcctttgtataccacattcgtgttcagcanaagaatgtagaaaaaaaaaaa

SEQ ID NO: 87742 - DNA, 260 bp, Heterodera glycines
gaactcaaaggttacaatgacttggtcaattcatggctgtgccaacgtgaaactgtgtcctattactgctccttacgtttgctgcctgcacaatcttgatgtgctagagcccgcggccatagtagccaaattctgaccaagagtggacaagcgacatacaccaaaaggaaatcagtaacggaggaacaccgacgttcttgctttagatgattcagggacgaggtttctatcaattcttattccgtacagcacattgtgat

SEQ ID NO: 87743 - DNA, 826 bp, Heterodera glycines
cgacttcaaattgaggtgtcaatccgcgcaacacggagtccgtccaatatattttcgtggccaaaaaactgcaaaagttgtaggacaactggcaattaatgtgccggaggatgggagcattgtgagcggcattttggtgcggcgaaatttcaattaccatttgttgcatccgaatgaactcagcgcttacactgacttggccaattcgcggctgtcccaacgtgaaagtgtgttctatgacggttccttccctttgctgctgcacaaccttcgtctgctgtcgtccgatgcgattgtgtcaaattcggacgaagcgtcgacaagtgacaaacagcaaaaggaaagcaaaaacggaggaacaccgacgtacgtggtcaaaatgttcagggacgaaattactatcaatttttattccgtccaacacattgtgatcgttgaatggatgtcaaaccccgtgaatgatttatttgccgatgcgacactttcggccattcttcacgcccaaaccaaccctatcctcgataaaaatgttccgaaggatttcggtgcgaaagcacagcaaattgagcaaaatttggaatcgattttggttgggacactgtgcgaattatgcggtgacaaaagttttgtggaagtgaaagaggaggaaaaccaaggggaaaaggacgcagcagcggaggaaagcgacaaaaaagaggggaagagacggagagtgattcaattggagttggacgggaaagaagcgtgcatctgtcccgtcagtctgcagatcactgaatgcgaggaccaattgctgcaccatctttttgtcttcgctcactcaaaa

SEQ ID NO: 87744 - DNA, 730 bp, Heterodera glycines
aacactgacgaagtgccaaggacattttgcagaaaatgcggtcacgtgccccttaacatgcaaggacacgctgacgaaatgccaaaaataccaccaatgaatgcagtgctaccaaatgccgaagaaatcttaaaaagtgccgaagaaatgccggaaattgaagaaacgccgaagaaaagcgtcgaggaaatcctgttcaatctaagcgaaatgccgaaaggctgcttgcaaaaaatgcagtctttgccaaaggacatgcccggaaacactgacgaagagccaatagtaccaccaatgaatgcagtgccgccaagtgccgaagaaattccggaaagcgttgaagaagtgccgaagaaaagcgccgaggaaatgctgtccaatctagacgaaatgccgaatggctccttgcaaaaaatgcagtctttgccaaagtacatgcccggaaacactgacgaagtgccaaaggaccttttgcagaaaatgcggtcactgcctcttaacatgcaacgacacgctgacgaaatgccgaaaataccaccaatgaatgcagcgctaccaaatgccgaagaaaccttgaaaagtaccgaagaaatgccggaaagcgttgaaaaaacgccgaagaaaagcgtcgaggaaatcctgtccaatctaagcgaaatgccgaaaggctccttgcaaaaaatgcagtctttgccaaaagacatgcccggaaacactgacgaagtgccaa

SEQ ID NO: 87745 - DNA, 703 bp, Heterodera glycines
attggcaaaacgaatgagcacgctcttccacctgctgaccatctgtttgagtctgcagtcgcaacgcatcgacgagtccatccaatcgcaacttcaggacaaataccgggaaagaactgctgcgtatggccaacggcgacatcgacgagttccgaaacgccttccatgcgggatgtcccaagttcttgtcccccaccactgttgtctacgacagggagcagagtggccaaagagcctttgcttcgccaatgcaatgcgtttttggaaggtatcgaaagtcaaattacgctgccaatattgcgtggctatcttaaactctacacaactcttcccgtccaaaagttggccagtttcatggatattcccgactcggagattggactctttcatcggcaagctcctaacctacaaaatgattgtcaccgagttgggcaaggaaaccattgaccaaaccgaaggggccgatgagaccaccgaattggatttctacgttgataaggacatgattctgatcgctgacactaaagtggctcgtcgcgtcagcgaatatttcatcagacaaatcggataacttcgtgagatttctcgaagaatcaaatcatctgtcactcccgttggtcaaatacacaagaattgatgttttgtcactgtaattgttaattattctagacgttcgttcgttttcgcttggcatgatttgttc

SEQ ID NO: 87746 - DNA, 259 bp, Heterodera glycines
ctaatcggaaatgttcgcgagcgtcttcgcggtcgtttcctgcgtcgagcccgacggcgtctgcacgatcacgaacatcaggccctggtcttcatccggcaggaacgacttcggcaggcgcacgaacagcaggccgaccgcgacgatcacgaccaggtagatgatgagccagcggcccgaccgcttgatcacgtggtgcacgccgacgtggtacttgtcgcggctgttgttgaatgtgcggttgaaccagccgaagaag

SEQ ID NO: 87747 - DNA, 726 bp, Heterodera glycines
  unsure (1)..(726): unsure at all n locations
tatttccgtattttcgccttccgttggcctcgacaacgcaacagcagcaacagcagacggaaacaatcgacgcagaactgtgccaacaaccgacgtcatctgtctgctgttaaacattggacatatctcacaatcatcaccatcatcatcagcagcagcaaaagcagaggacaacaaaacgcatggaccaaaaccgactcagcgacttcgcttggatggaaacattggcgtggctcggtcgtgcagaagtgggcatgaagatggcgctggtcaacacccggttcaacatgctggtggacaagcaattcatgctacggcagtggcgctttggcgagtttcacatctgcgggcgggaaggagcacaacgaggcggcgcagaaatcatgacatcggaagacggcaccaacttcatcacgttgccactgcccaccacgccgatgccgagcagtgtcgtcggcttccaatcactctccatttggttcatcaacgcggacgtcatcaaatttctgcgccggattcgccgtctgttcgccgaggacatcgcactggaattctccactcggcacacggagtttcgcagttggcaagtgattgcgcgacatgtttggccactgttacgggacgggatcagcacnatggtgtgcctgaggaagtgcgatttggccatgctgcgcaaacacgtgtcgccgaccgtgctgttcgactgccctgatctgcaccgaattc

SEQ ID NO: 87748 - DNA, 682 bp, Heterodera glycines
taggaggaggagccagggctcactgtccggcatgtcggtaggtgggaaggacaaatccagaccggtgagcagcacagccgtggccgggactccgtggtgcgtggtgtggacgggagacaaccgggtctttttctacaatccgagcactcgaacttctgtttgggagcgtccgccagaactttacaatcgtccagatgttgacctccttgtttcgaagccacctccctcgaaggaacaaaaaggtgccggtaaaagtaaaaaacgtcagaaattcgagagcgacaatgaggaggaggaggaaggggcggttgaagagggagagtccgacacttccgaaactgaacaatcgcccgagcttcagccaacaaagaaaaaatctcgcaaagagaaaaaggctgaaaaggaaagggagaagctgaaactggaacagcaacagcagcagcaactccagcaaaaacagcccaaacaaccattacctatacaagtggaaaaaccaattgaccccgcaatacaagccgaactcgacgcgcaaaaggaacgtgaaaaggtaccgttggaagagcgtattaagcagtttcgtcagttgttggaagacaaaaaagtcagtgcgacaagttcatgggagaaggaactctcgaagattgtctttgatcagcgctatcttctccttagtactgtggaa

SEQ ID NO: 87749 - DNA, 468 bp, Heterodera glycines
  unsure (1)..(468): unsure at all n locations
ctcctcctcctctctgtcggcctttgctttgcccagtttgatcagtctccgtccgctgctctgaatcatgtgcgggccaaaagaggctacaagccgtggaagaagcaatccttctcctcttcttcaagcgaaatgtacagaaggagaagacccagtggtaacggtcattacagggattacaacggctacggtagttttggatactatcgacgaaaacccggcattttagaacgggcgctgggaaaaattacgcggagctattaacggacgagcagaagaagagaagcaaaaagccaaacaatgggcgtaacacttttaattgatcaaacgatattacagtatccaacaccaaaattacagtaaccaaacatccaatggaacgaatgactcatttaattcagcaaatttgctggaattgccgataaagaaacttagcancnnaaaaaaaaaaaaaaaaaaaaaaaaaaa

SEQ ID NO: 87750 - DNA, 767 bp, Heterodera glycines
cctatttgctgtttatgtactcataagcgtcattttcacttgtcatttgtgcaagcgtcggaatcccatcactttcgaatccatcgaccatctggaagcacattttgcacaacaacatttccaatgtttgccgtatgtttgtgagcaatgtccgcagtttgccagtggtctttaccctacagaaggcgcaattattgaacatatgaaattggtccatggctctgagagtgaatttgagtttaaaatcatcatccgtgaggacactgaagagaagcgggcaaaagtccgtgctgcacttgagcattgcgtccgtaattctggcgacgtggccacttcgtcgtccgctgccactacaacttcgaacaatgacagcacagcgattgaacttccacagacgcaacagcaagtgcaaacaacgcatcagcctcgcgttgtccaagtggttcctgcgccgacagttgttgtcaggacggaagtggtgcaacagacagcggaaaaacactcgggggcaaacaacacgagcaacggcgcggcattggcagaaggcggtgggagtggaacgacgacgacgaacacaagccgaaccaatcgaacatcatccggagggaacaagcgtaatgcatcagaagctgttggcgctggaaaaggaccgcccgtttggaaaattccgaagaagtccacaagcaaaaagggaagtgatggtgctgggaaaccgagtcgagagagccacaacaaccgggagagccacacaaccaacagtcggattc

SEQ ID NO: 87751 - DNA, 391 bp, Heterodera glycines
caactcgtggcattctgtgtagaggtgctagtgaacgaaaagcgcctttcccttaacggatggttccattacgctccggggacggcgaatgttgcacagacagggccaaattgcgctgtggaagagccgatttgtcgggtggagccatcgatgaatatcacgttggcagaagtcaacgaatggctgagtccaaattacattcgtccgggacaacatcggcaaatcaaacggatttttgcatacaaatccgagctgtccctccaacaatttctcaataatgaacgttataacaaagctttggatgagttggaaaaggcgcaatttgaaagtgttggcccaccgcacaaaagaaatgtatggcgtctcgtcgagtcatccttgggacagaaca

SEQ ID NO: 87752 - DNA, 449 bp, Heterodera glycines
  unsure (1)..(449): unsure at all n locations
ccccccccccccccncccgccctttcncactccagttggggggaaacagacccattttttagggccaagaaaaaacaccccgaaagaaccaacacaggcgaccgccacaaaaaaaaacgcccccagggaaagggcccctcagggaacccctccctccctcctctccaaagctttcgattcgcagctttgacgcaaatacaaacatccaattgggcatcatcatggccatcccacccacgaaccgcgaccggcctcttttttcggtcgtctccaacgcttgtcctactgtacgaagtgcccaattgacaaacttttccggtgccgcactaaaaaaaccccggccccccctaagccgggcagaatccactgtgcacattcttatttgacccaccacgtcccggcaaaaacccccaatttaactcccccggccccctcggcggtcgggagcc

SEQ ID NO: 87753 - DNA, 278 bp, Heterodera glycines
cattaaatgaacaatgccgactctgaacgctcggaaattgcgaagactgaaagaatggacgcgaaatgcataaaaaacgatatggacttaatctgacgaatgaaacctgtactaattttgcccagcccggatggctacgggacaaccatggacgaagaccagctgtttttagtgtcatggacaacgcaagcgggtaaataagatgagtagatcatggaccacaccatgacagatggaacggatgtgcaatgtgtatgaggaaatgaaaagtggcggag

SEQ ID NO: 87754 - DNA, 132 bp, Heterodera glycines
acggcggacgcatcgccagcgcacgcttccgccgagagcactgctaacgcaatgctaacgaactctgacactcttccgattcgtcccattgttcactcattggcatttcacttcccatttttccattgtccg

SEQ ID NO: 87755 - DNA, 688 bp, Heterodera glycines
  unsure (1)..(688): unsure at all n locations
caaatcctctcagaaaatggcttcatctttctgctcttcactcatttccatcgtcgcaattgtctgtttgctgtgcaaatgctgcttttcagcaccccatccatgctgtcctggcagccaacatgttgtttcgatgatgaaagatcacaccggcacattctccgcttcgatgccaaagtcttcgctttgtctgagtgccgaaagagtcgccgctgcggtggaaaaccaactgaaaacaatttggtgccctggcaatggtggtcaaacactcatcaacgagatcaacgcagctcaatcatcatctgatgagtgtgctcgctctctcggcttcgtccgtgccatgttcgaaattgccgcttccgccgcttcccatgtcggtgccaacgccgaattggccaatttggctgtccagttccgagaacaagttggcacaattgacaccaactgtgctgcgctgggcattcatgttgggcaaatcagcttgggcactcccaaaggagaccatccgcaagtgcatgactctgagagtgtgcttagtaaccctggcaccagcgggtctcacaagcgcatttaagtgcattgcgacgattccgatgatgtcatcatttgttgattgatatgctatagaaattattttattagataaaaaatgaatcgttgctaannaaaaaaaaanaaannaaaaaaa

SEQ ID NO: 87756 - DNA, 307 bp, Heterodera glycines
tcaccgagtggagccgacgacctcccggacttaaattggcggggacgtcgaaatcaccggcattcaaatcttctgaaaggatttagaaaactggcgaatgtattgaatgacgatcattcgttgtgatggatgggtgttccgttttaattaatctgacaaaaattagtctctccgggcgatgattgtccatctgtgaattgctgctgttcccaaccgtccgacttttcttccccccccatttctaaaattctaatccctctgccttccctttagtggtgctaaaccaaaaaaaaaaaaaaaaaaaaaa

SEQ ID NO: 87757 - DNA, 405 bp, Heterodera glycines
ctggagcatgaagcccacatgcagacacagcctggtcgaggacgcgttgaccatggcgttcgcttccggagacgggcaccgccctgaactgatcttccacatcgatcggggcaaacagttctgcaaacgtgacaccgggtactgctgcgcttgataccacctgcattaattcactacatgagatccgacggatcggccgtgcacagtctgaccaatcatagtggagagtctcccatcacatatgtgatgcatgagcatcagaaatgcttatagaagctaccgtaatagcgtggtctgtttgatagcgtgtgcgatgcggctgcgggaaactgttatgcgttcacaatttcccgcaccacttcgaaccatgctcgtgaagcgctaagactgtggagcctaacgagg

SEQ ID NO: 87758 - DNA, 335 bp, Heterodera glycines
  unsure (1)..(335): unsure at all n locations
cnctgtgatgcccttacatgtccggagctgcacgcgcgctacactggcaaaatcagcgcgcttgtccttccccgaaaggggttggtaaaccggtgaaaatctgccgtgattgggatcggacattgcaattattgtccgtgaacgaggaattccttgtaggggcgagtcatcaactcgctctgaatacgtccctgccctttgtacacaccgcccgtcgctgcccgggactgagccattttgagaaattcggggacggttagtgttccggcttcggtcggtatgcagactggaaccgatctaatcgcagtggcttgaaccgggcaaaattcctaaca

SEQ ID NO: 87759 - DNA, 90 bp, Heterodera glycines
  unsure (1)..(90): unsure at all n locations
cctgcttcaggaaaagccactaagncttcagctatagacgaccgtaccgcaaaccgacactggtgcgcgagatgagtattctaaggcgct

SEQ ID NO: 87760 - DNA, 858 bp, Heterodera glycines
  unsure (1)..(858): unsure at all n locations
attttctgcgaatctttgggctatttgagtgaacaattcttctgcaatgctcacaaagtgtttcttctattcccaaattcgtcaatgccttttctggtcccaaattctttctcattttctccaaatggaaatggccaatgcccgtccaattgactccaattgatcacaaattcttcggcacttttttgagttggtctccgttcggcgattggatcggccgcagagatttggcatgggaaaaagcgcggagaaagcatcgaacgaaaaaagagcagcaaaatgaaattgaaaaggcaatgaaaagcattcggaaggaattggcaatggcagtgataatgccgacaattgggggacgaaatttggccgaaaaagtgaacatttcgagcgcaaaagtggtgaagaatgagctgaagcgagcatgtgacaaattgagaagcaaaatggaaacaaaagatgaagcgatagcattcactgagaagtacgaacattttattgtcatcgaatgcaaaggctcaagtcacaacgtggacaaattctgcgattttgtcggaaaaaggctgcgctacgaactgcttgaatttgtggagaaccctttggccatttgggtggacttttgccacgtccgcccaaaaatgatcggcccaacggaatgcccttctgccgacttggagaaaaatggaaactcaattggcctgaggcattggctggtgggcattcaaatggcggcagaacaaaaggcaaacagcgcatttaagcgcanattgaggggacatctgagggaagagttggacgtgaagatcaagggagactttgagaagggcagctntcacaatgtgcagctgaaatcggaatttgcag

SEQ ID NO: 87761 - DNA, 759 bp, Heterodera glycines
gggtttgcccattggcaatcctgcgggaaatactcccgagaaatgggacatgaaccaggttgtgcctcccatttcattgtcaacaacgtacaaacagaattggcctgggatgcccaaggggcatgattacataagagaaggcaatcccactcgtgatgtactccaagaaagcatagcgaccctggagagtgctcgccattgccgaattttcagctcaggacttgccgcaattgcagcagtgtcccatttgcttaattccggacagcatgtcatcgtgtcgggggattgtaacggcggcacgaaaaattatttcgacaaaatttgtgtgccgcatcatggcttggagctgagttttgtggatttgacgcgattggaaaacttggagaatgaatttaagcccaacacaaaaatggttttgtttgaaacaccctcaaatccgcttctaaaaatcgtcgacattgaagcggtgtgccgtatggttcgagcacgctcaaaagattgtgtcgtcgttgttgataatacgttcatgacaccgtactttcaacgcccgttggaacttggcgccgatgttacggtgcaatcgctcaccaaatacatcaacggacacaccgatgtgctgatgggcaccgtagttaccaacaaggagcagcttgatcagcacatatacgcccagcaaatttatgctggcgccgttccgtccgcctttgatgcctttttggtgcttcgtggcatcaaaacgctcccattgcgaatgcgcca

SEQ ID NO: 87762 - DNA, 774 bp, Heterodera glycines
  unsure (1)..(774): unsure at all n locations
ccaaaaacgaaaatggcccataaaaggaagcgacaaacaggatgcgccgtgttcataacaaattccgacttggtcgaccagtgttcgttcccgcttgaccagctgccactgaacacactcgtcattatcgcctcacaactcccgttcaaggacttcaagcgggtcggcatgatttccaagcagttcaaccgagctcaacgaatgaccaggttcagcagaaagcacgtctcggtcgacctgttgcgcaagctgttcccggacgaagtgcccgacacggacgtggacaacagcaacaacgacggcactgagcgtagcgttggcatgctggaggtgatggacccgctgcgtcagcacctgcgaagttcgccgcccagaaacatccgtgaagtggacatgagcaagttcagcacgttccgcgagtcgcactttgtcgaactgttccgttcaatcagcaacggcagagaactgttcacggaagtacgacggctcaatgtgcagaagtgtgtgatcgagttgcgcgacatggaatttttggcccaactgatgcccaaagtgtggtacattcgctgctccgcccaaacgcttgtcattccggaagacattgatcagtccaaattggcactcagcgtggaacagatgcgccaattgcacgccaagctggacaagttcgactacgtggcgaggaagtgcaccaaaaaacacctgtggttcatcagcaaactcaccgaactgttcgccgnagctcgaatcatacaattggacaaatgacgagcc

SEQ ID NO: 87763 - DNA, 747 bp, Heterodera glycines
ctcttttgagtccttagcttcttttacctcccctttctctttttattgctaaaatgacttctcccattgcttatgaccaattgcgagaaatgacgcgcaatttcctctcaaaaggcgtcagtgccgtggaaacaaatgccattttccagggaaaatttggcaccgaaaattctccgactctttgcacgatttacaaatggcgaagggaacaccgcggaggaatgggggagcgcgaggcgaacgaccaaaatttggaggaaaacgaaaaggaaaaagaaagggcggcggacgacggaggcgaaaaaggggcaaaaccgtacaaaaaagattgtgacaaatattgcgtaccatgcaacagggaattgagcagcagacattactacgaattgcatatgctaaagattcacaacatttttgtgggcgattcgaaggcgctttacgaacttttggagtcatttgggccgaaacgcgagaagaaaatcatttaccgttgcgacgaatgttttggaggcgaattggactacgaattgttggaggatttgcgtcgccaccgtttgttggaacatggaaagaaaatgcgagagaaattcgactcaccggcgtagacaacttttttgaggccccctccccctcaaaatgccccccctctgttcctcctcccttttcccctcttcgccccgtcgttcgaccccaaaaatcgtcgctgtcggtcgaccgttcccttcgctttttcgccctccacaaaaa

SEQ ID NO: 87764 - DNA, 767 bp, Heterodera glycines
  unsure (1)..(767): unsure at all n locations
atggcagcagtgatacaccaaacccttctgttactatgacacgcagtttgggtgaaaatgcaagaatggaattggcccagaaaatcgaaggtcagctcacgggacgcatcgccggcattcatttgttggagcgggaggacggactgctcgttgtaaatgaggacagaacgctaagagtgctgctcagacgcgagtcgggaatgttttggccttcaattatccatgacttgccgcacatccccacaaaactcagctgcagtgaacagaaaaacacgatttttgtcggttttgcaaatggacagatccacgaatattcaattgaaaacgatttcaacagcatttcattcaaacggcaatggaattcgcacaccaattccatcagtggactcggcttttcagaacgattagaacaaatggtcagttgctcaaaggacaaaacggtggtttggcattgcacgtcgaccactcgcaaaatcgcaagttactgtacgggttcgccttgtaccacacttcaattcgatggcgatgcttccttcgtttttgtgggcgattattccggaaatatttcagtgcttcggctggtggttgggacgcaacagcaaccgcaattaatcagcaaattatctgctcataccggggcaatcactgatctttgctgggatttgagccatcagcttcttttttcggcaagcactgattcgctggtcattgtttgggacatnncgaggcaacgcnngcactgttatgagctcaatgtcacaatgcca

SEQ ID NO: 87765 - DNA, 632 bp, Heterodera glycines
  unsure (1)..(632): unsure at all n locations
tggggacagagggaaggagaaantgttaacaaatttaaaaaagcaaaaaatgagttattaataattaacaaaattaaaaagtaatgattgccgtggtggcacacgtgaaaaaagaacggactttaggaggaattggaaccaaatagaaggaaggaaacacaaatgtacaataatataatgttgtcgtaacgtaatgagaatttgatcggaagcataaggaaaaggaaaggagagaaaaggagagatttatgaaagagagcgacagacggcggaaggagggacaactgacaaacgatcacagagcagaagcagacaacggaccaatggtacacaaatgggaaaggatgaatgagagaaagtgaaggagaagggttaggacggaaagggccaaatttggtgccattccaaaaaaaaggaaaagatgacattttggaagaaatagtaatggaagaagtaaaattttgaagaaatagtgcgataataatatttttggttgagaaaaagagaggagagagagtgagagtgagagaggaaagcctagtgagagaggggagagagagtatgaggattttaaaggggaagagaatgagaataatggagggaaaagatatgaagcgaacgaagagagaagg

SEQ ID NO: 87766 - DNA, 734 bp, Heterodera glycines
  unsure (1)..(734): unsure at all n locations
accttacggcgttggctctttgggctatgttaaaaggaatttggncatttttccgacaacgcaatacaaattcaaagatcgaatggacctatttaacggagcgaaaaaggatgattcggttactttggaggatgcaattccgcacttaaaggaaatattccacgagccaaagttacacttttgcaccggtctcaaacgttgggtgtccggccccgtggtgcttccctgctctgagaaggcttttaaaaacatcggtcacagccttttccaaggagagtccatcagtcacagcaatgagcattggacagcccagcacatgcaccgagcattggcaatttgcatttcgcgccctcccagagacgaaggtgccgtcgatggctacgccacgttccaagacacgagccgtgccaacgaatatattttcgtgccttcggtaaaaatcagaaggcgggcgaggtacgggaaatttgctgtgcagggcgaactcttctaccgcgtgcttgactcgcagtgcggactttcactcctcgacattcatttctcaaaattcagccgacacttcccccggctaattctctcccatttgggctgtccaatctttggcgattggatttacgagcagagattgcttaacgttgacggacatccgatctgtgccgagccgnaagacgtgtggagggctgaggcgaaaaagttcgagccaagcgcctttctcaataaaatcggcatcggaa

SEQ ID NO: 87767 - DNA, 648 bp, Heterodera glycines
ccttgggaagacgcgtgcgacgagtgccaattgatcatcaaacgcgttgtcaatgtcgccaccgacccggaaaaagttgccgagttgaagatccttctgtcggcactgtgtcaggagacctcctacgtggaggagtgtcgtctgttcgtcagcaaattggaccttttcctcggccgtctgttgccctttttgagggatgcccaccacgtgtgcaaagaattgcggatttgcaacaacggacggctccaacagtttcacgtgctcggcttacactttgcacgtgtaaatgcttcgttccaacgtaaggatttgatctgcgaggagtgtcaattggctgcccgggaattggcacgtgaagtcagtgagccgaaattccagcagtacgtggaggaatggctgcaggggaatgtgtgtgtccatctcggcactttgaaatcatcgtgtgagcaaatgttggacgaattcctcccggaaatgtggcgagaattggaggacattctctcggaccagaaaaagttctgccaggatttggagctttgccccgcgggcatttcctcgccgagttcggcccgacgccccacggcccaatcaaaggcccgcaaggtcagtcgccatttgttggccccgcgccgcgagtgatcgatcaaa

SEQ ID NO: 87768 - DNA, 636 bp, Heterodera glycines
  unsure (1)..(636): unsure at all n locations
gtgaaatggaagagcgcgcgggnccatgtgaacatggacttactcaccgcgttggcggacaaaatgaaaaatgaggagcaagatgaagtgggggaggaagaggaggaggacgaattcccacacattgcaaatggcacggcagcacacctgccggcaatcattgaggacgaggcggaggacgaactgaacgccatgctggctaaagctcgtcggctgaagcagacggagacggacaaaatgcatttcgtcaagtcagagcagtacaacaatgatggcaccagcagcgacgacgaggagacaacgcccgctaccctagcgggcggacacagcacttccgttgtgttcgactccacctctgagaagtacaagtccatcggtggcagctttggactcttcacaacctccaaacaccaggtcaaaatggagacgggcatcggatttgacgagagcgaagcggtgccaaaacgtagcggaacagagcaaagaaaaaaggcaaaggaaatactgagaacggcaacaatttcaagtgtcgggggaagtgacaatgaaatggacattggcactgactttgacgggtttgggccaatagcgacggggaatggcaaatcgacggtcagcgaaagtgacgaagaagag

SEQ ID NO: 87769 - DNA, 658 bp, Heterodera glycines
cctttactgctgatgctggacgagcacacaactctttcgtttgaattaccggccgagccatccttcctttgccagggtgcgtaattaacaaattaatgagccgaaaattggccccctgctaataattgtccatcccacccttccttcggccgcaatggcccccaaattccttccgcccgaacttctgttcgaaatcgtggcgtttatgcctgcaagaggtgccgtgccgaatgctcttacctcctgctggttgcttcactcacttttgctccaacgagtcaccaaatggaagcagcaaatggctgaagaccgacaaataaaacttttaatggagaaaatggatgagaaattcgccgaaatgaaagctgaactgaaagctgaaatttctgggaaattcgccgaaattgatgggaaattcgccgaaattcaggaccaaatccaggacttaaaagccgaaataaatcaaaaggcggccaaaatcagcattgaagtgcccgctcaaggactcaccattcaacaggcgaccaaagcaggcctgttggacttggaaagcggacaattaacgattatgtgtgacacggcgacaaacttgtcactggcgaaggcaatcgaaattggcatgttggacccacactcgatgactgcgtgcgactcgagc

SEQ ID NO: 87770 - DNA, 681 bp, Heterodera glycines
ccaaagctgttgggacgaactcgaagaagctaagagcaagactgaatttaatgttggcctaatggacgtgtgggatttcggggcattggcacttttccacaaaattggcaccaaaaatgttgtgcttacacacaatttcccgatcatgtcacacatgtacaaatacatggaaaaagcttgatggcaaactgagaatagcgaattatttaactaccaaaaacaaatattggacaagggagtgccagaactgttctcagcagtcattaacgacaaaaatgttggaaaagctggtgcatacaaggaaaagcataacgaaagttcggatattttctcaaaagtttatgaaattgctgatcaaaaattcaaggaccttttcaagaacaatgcatttcctactctggaaaaattgttcggagatgcaaaagctttgttcgtcaacacaacgcctttattggattatgacattggcagtttgccaaaacgcgtcaaattcattggtggcattgatctgatgcagcccgatcacaaggatgctttaccgcaagtttttgggcaaccaaaaccggtgatcgtgttcagcatgagttctttactagaaccatccaaaatgccattggacaaatttaagacggttattcaaggacttggaatgtgtgaaaaggaagtgatttggaaatatgc

SEQ ID NO: 87771 - DNA, 567 bp, Heterodera glycines
cagttgatggagcacgacctcgagggcgccccgtacggctacacgccgttttgcgacagtcgcaagtccatggacggctttcggttctggcggagcggctactgggcccagcatttggcgggccgcaaataccacatcagtgctctttacgtggtggatttggtcaaatttcgccaaattgccgccggcgatcgtctccgtggccaataccaagggctcagctccgacccgaactcgttgtcaaacctggaccaggatttgcccaacaacatgattcaccaagtgcgcatccactcgctgccccaggaatggctgtggtgcgagacgtggtgtgacggcgtgtccaaggacagtgcgaagaccattgatctttgcaacaatccgctgaccaaggagccaaagttggactcggctgttcgcattgtgtccgaatggaccgagttggacaacgagataaagcggcttttgacaagcagcagcaacaatagaagtgctgttggaaagccgcaagacgacgaaacagcatttgatgacgatgaaaagcacgaggaattatgattaaaagaa

SEQ ID NO: 87772 - DNA, 684 bp, Heterodera glycines
tcggaggaagaggaataaaaggaggatgataaagaaaaggaagaaaaagcggaggaagaaaaggaggatgaaaaagaggaggaagaaaaagaggaagaaaaagaggaggaagaaaaggaggaagaaaaagaggaggaagaaaaggaagatgaggaagagaaagacgacgaggaatagtcggaggaaggagaaacggaataagaggaggacaaaaaggagtcagaggaggacaaggagcacgaggaagaggcggcgacacgtgcgccgagtgcgaagaaggaaaagtcggtttccgaatccgttgaagagtccgatggggacccggtggaacaggagccagaggaagaagaagaagaagaggaggaggaggaggagccgtaccacccgttgaagtcggacgaaatcatcggcggatgcgaggacagcacggatgactgcgctgccaaaaagatgcgtctgtactgcagtgacgaggactacgaagaggacatgcacattcgttgcccgctcacgtgccgtttctgcaaacgcggagagccatggcattataattacgaggccacttacgagaaattgggctgcaaagacacgcacccaagcgattgccgacgggagaaggaatggtgccggagggggacttataaaagttttatggctgaaaagtgtgcgctgagctgtcgccgg

SEQ ID NO: 87773 - DNA, 715 bp, Heterodera glycines
tgtgtcttgggctgacaataaagcgcaacaatgtcttctgacgaatcgacgacttcttctgccagtgctgtgagcgttcagctgcgtgaagtgcccatcaaagacttcaatgacgtgcttccggtgctgcagaaaacgctcaaccaattggaacatccgttcatcaagaaggctgaagaaataagcggaatggaacgtgaaaagctcttctacatcacttcctctcttgtgctgctcgtgttgatgtactgccctggcaatttgtttctctctactcttatcactgtggcctacccaatgtacgcgagcttgttgaccctcaacactcaaaacacatcggaatacacccagtggctcgtttattggtgcgtgttcgccgagttttgccagttggaccttctctttggctctatcaatggctgccttctgctgctgtacgtgcctttgaagaccgtctttctgctctacttggcccttccgcaaacttatggcgctcacaacatgtacgtgaagcatatccgcaaatggattgccatgacgaacgtattggacaagatgaagaagatgttgtgatcgaggagacaacgtatcactgtgtaatgtatgtaggatgattctttgttgtgattcctatattgggtgtatgtattggttgggggagtaaagcccctatattgtataaacaatatttgcaaaaaaaaaaaaaaaaaaaaaa

SEQ ID NO: 87774 - DNA, 215 bp, Heterodera glycines
ccatcccccacaacatacgagccgtaaccataaagggtaaagcctgaggtgcctaatgaatgagcttactcacattaattgcgttgcgctcactgcccgcttttcacttgggaaacctgtcgtgcctactgctttatttaatctcccaacgcgccgtgagacgcgggttgcgtattgggcgctcttccgcttccttccccactcgactcatgcgc

SEQ ID NO: 87775 - DNA, 468 bp, Heterodera glycines
  unsure (1)..(468): unsure at all n locations
ctctggccgccattttgctggccaaaaaggctttgtggctcttttccgccctttccgccggctccccttgcgcgccctttgtgtcctctgtcggatgcaaattccaagaattccccgnggtggttcgtttacatgcactcattggcattatccttggcatttagtgtgcaaatgtacacaaaaagcctaagcgactctatgggttacagtgctgaaagaaacacaccgaactcccccaaaaacattgggacgacagcaacagaaagacggcacgggcactggaaaagcatcgtgccaatgccttcgtcgcctttgccccgtcccttcgccgtcgtttctccctcagacagtcgcccactttccttctcttttggctttgctccgctcgtcaaatagcgctgctcgccctctgtttggcgcccgcttttctgttcaccgntttcgattatgaacctttgcgtcgtaaaa

SEQ ID NO: 87776 - DNA, 196 bp, Heterodera glycines
tttgacgcgtgatgggctcgaaggacatggcctgcctgggcttcagcgccgatctggtcatgcatcgttctgcccacggccgcttaccccaagcccgtggacgtgaagatgcaccgagaactgcccgccttcatcagcaaccgcggcggcgtggccctgcgtcctggcgacggcgtgatccactcgtggctgaacc

SEQ ID NO: 87777 - DNA, 675 bp, Heterodera glycines
caaatgtttgttgttgaacatgcgcacggcgaccaaatcactttcggcgaattacaatctctggctccacctatgagccgactgggcaaatcatgtacaacggagtccaaataaactgtgcaaccgaccaacacaaagcattgacagaattagccaccatttgttcattgtttatcgactcttccgtggattacaacgaaatgaaacacgcttatgaaaaagttggggaggccactgaaacagcattggttgtgttggctgagaaaatgaatgtgtacgacacgccgaaacacaatggactgagtccgcgcgagttgggcagcgtgtgcaaccgtgtgatccaactcaagtggaaaaaggagttcacgctggaattttcacgtgataggaaagcgatgtcggtgtattgtaagccgccagcggacagaacgggggccggtgccaaaatgtttgtgaaaggagcgcccgaaggggtgctctcccggtgcacccacgtgcgcatcggggaccaaaaggtgccactgactcaggcgatgacccaacgcattgtgcagcagtgcgtcaaatacggcaccggacgcgacactttgcgttgtctcccgcttggcaccatcgacgagccgccaagccccgaaaacatgaacctcgaggactccaccaaattcggcgagtacg

SEQ ID NO: 87778 - DNA, 568 bp, Heterodera glycines
aggattccgtttcgcacttaacaacgctgccaatgagggccatttggaggtgtgccgtctgctggcggaggagtgggccttagatgtcaaccaacagaccatcctatatcgaaccactgcactgattagcgctgccagccgatgagatttagccttcctgaatttcctcatctaacatggtgccgaccttcaacatgttgaccagattggaaacaacgatttgatgtgggcagggatcattatgaaaactgaaatggcacagcttttggtggccactcggcgcggacattaaccaacgggacacgcgacggcattcgaacgcaggatatactggaactgaccggacatgcccaaatgatggccattattagaactacggcgacggacaatgggcaacacgcggaatgcaccgatggacagcataatgatcagcaacagatgtgacagcatcgcagagagagcgaatcgctggccaaaagccgcggatggatttattcggaaggcattaattgatcactaatgtattgtatgttattatgcccaccatctctatttgatccgatttgtc

SEQ ID NO: 87779 - DNA, 748 bp, Heterodera glycines
  unsure (1)..(748): unsure at all n locations
cngacgatggaagtcccaacgaagaagatggggcagtgactgcactgatgaagaggacgacgaccaattggacactggctttggtttcctgaacaacataactctgagtgaaataaagcaaattcactatcaaacgaatttgaatgtggcaaaagtgaagaaggcgatgctaagggtcatttcctcccataagaagtgtgctcctccggcagttgattttgtgatgggtttggacgacgaagctgatgcagaagaccatctgtcatcttgtccatcacaggacaatgattcggaacagattgaaagcgatgttgaaagtatggctgccatttccgacgatgggacgccaactgcggagggagttcagaacaccgcagcgaaagcccgggggatcaacagcagagagttattcgcgaatgtcccgcgttttttgaatggaatgacaaagcgaaatttgactgtcacaaattcattcgctgttctgctgcatctatgcaacgataagcaattcactttggcacaaatggaaggagagaataaattagtcgaagggcattctatggctgaattcttcgttaaatttccaaattgagtccgagtaccttgtatctcacaaatccgaaaccgatctccagacaaattgtatagtttattattgtttctacattcttttgctgaatacgaatgtggtatacaaagaatatcaaatggaatgactgattatactgtatgtgataataaatcagct

SEQ ID NO: 87780 - DNA, 586 bp, Heterodera glycines
ttttatggcgcgggatgcctgataacagaaggatgccgaggcgagggcggttttctgatcataacgaccgggaacgcttcatggaacgctacgccccggtggcgaaggacctcgcctctcgggacgtcgtctcccggtcgatgaccatcgaaataatggagggacggggagtcggacctctcaaggatcacattttccttcaacttcaccatttgcctcctgaacagctccacaacgtttgcctggcatttctgaaacagctaaaatcttctctggcgttgacgtcaccaaagaaccgatccccgtgttgccgactgtccattacaatatggggggaacaccgaccaattacaaaggtcaagtgatcagattctccaacgaaaaaggcgaccaagtcgttcccggtctttgggctgccggcgaatgtgcggcacattccgtccacggagccaaccgactgggcgccaattcactgctcgacttggtcattttcggtcgcgcatgtgccattaacattttgtccgccaataaacccggcgattcgctgcctcctttggaaacggatgccggagagtcttccattgcc

SEQ ID NO: 87781 - DNA, 698 bp, Heterodera glycines
  unsure (1)..(698): unsure at all n locations
acatcgcaccgccgttccgcgcccgggacgaggccgaattgttgctgctgcccttcttccctgtttcggtttcactcagctgaacatggctttgctgaacgggtccaccggcgttgtgctcagcaaattcgagcagaattccttttgccgagtggtggagcaatacaggattcgccttttgcttctcgtccctcccattttggtgtttttggctaagagtcctttggttgccaatttcgacatgtcccatgtccgtgccattctctccggcgccgcccccgcgggcgccgatttatgcgaagagctgaagcaacgttttccaaatttacagcatatttgccaaggctatggaatgaccgaaatgtgtgttgccatcgctttgcccattttggacaaggaacggcacgaatcatcgggcaaactgctcgccaatttggaaatgaaggtcgttgacttgttgaccagaaaagaggtcgagttgggaatgcccggcgaactattcgtgcggggaccgacgagaatggttgggtatttggggcgtccgagtgagacggcgaaagtgatcgacggcgagggatggctaaggacgggtgacatcgtgttggtggacaagtacggcttcatcactgtggtggaccgactaanagagctgatcaaagtgaacggattgcaatcgctccttctgagttggaggattt

SEQ ID NO: 87782 - DNA, 642 bp, Heterodera glycines
tgtatctggttgatcctgcctgaactgatgtgttatttaaagataagcctgctgtgtagttaacctgccagacgggaaactgcgtacggctcattacaccagctataatttacttgaccttgacttcttacttggataactgtggtaattctagagctaatacatgcaccaaagctccaatctccccagagcggagcgcatttgttcgccacaaaaccaagcgccctccgggcgtccagtgttgactcagaacaactaagctgatcgcacggtcttgtaccggcgacgtgtctttcaagtgtctgccttatcaactttcgatggtagtgtatctgactaccatggtgatgacgggtaacggaggataagggttcgactccggagaaggggcctgagaaatggccactacgtctaaggatggcagcaggcgcgcaaattacccactctcaacgcgaggaggtagtgacgagaaataacgagaccgatctcttatgaggccggtcatcggaatgggtacaatttaaaccctttaacgagtatctatgagagggcaagtctggtgccagcagccgcggtaattccagctctcaaaatgcatagaattattgctgcggttaaaaagctcgtagctggatctgtgct

SEQ ID NO: 87783 - DNA, 770 bp, Heterodera glycines
  unsure (1)..(770): unsure at all n locations
ccccgactcgtccaaacacttccgaccgatgtgcaggagttcttcttacaagtcaatacgaagccttggagatgaaagaccaagaagtgcagatggccagggaaccaaccgcggccggtgcgtttggcaacggcacagcggatcaacaaagtgccggggatgaagccgtttggcgcagaattgggccaagaagtaaacatcttccgcccaggtcctttctcccgactaccaagaccccttcacgggcacgaaccgatacatgccgggctgtaacaacggagtgacgacggcacaacaaaatacgaaacgtagtccgattgtgcctctgccagacaatttctgcacttttggcctcgacggtgtgtccaaaaaagtgattgaacggctgcgcgagatgaatttgctccagccaaaagcgttgcaactgaacgatgacgaattcgcttcggcagaagtgatactctcccaagctgactttgccatcaatgagtgccaaatcgtcgcattagaaaaaggaattttgtggtcgcccgaaacgattgtgcccgcgttggatttgtttcgaattgctttgctccatccaaaattgaacgaaatcttttgctcattggagtccgttcttggaaacccgccaaaaggtgttccgaccgtacggcgtttggtggaanttgctcacttggcccacggctcggagcccgtccgcattttggcgtgccgttcgctggctaatgcctcggcgcatgactttggccggtctatgctaatggccg

SEQ ID NO: 87784 - DNA, 746 bp, Heterodera glycines
ccaaagcaaagcctggatcacccaaatcaccatccaaggcaaagcctggatcacccaaatcaccatccaaggcaaagcctggatcgcccaaatcgccatacaaggcaaagcctggatcacccaaatcaccatcgaaagctaagcctggatctcccaaatcatcaccatcaaagaaaggcaatgtatcaccaaatgtatcaccctcaaaaggcaaaagtcctcaaaaactactgtcaccaaaagcaatgctgcaaacgcacaaaagtgcaccgcctgcgttggcccacatcctggcacatcattcgccccatttgccggtcggaagtgagctaagtccagctaaatcactcgacagccatcaccaacggcaaatgccactgtttgcggaaaaaaaatatggccaaaaccaccagtcgccttatatgtcaccaacaaaactgtcaaatggtaatgtctcaccaccacaatcaccatcacatcgtctacaacagattatcaagcggcattcacagacaaaggatttgtccagggaaaaagtgcaacgacaacaacaaagtccgctgttacagcacccatcaattcgcgccctaattggcctgcccaattcgccggctgacgaccaaaacccgcctccgccattcacgccggaacagcacgcgctgcttatggacaccgtactccgtccaccgtccggtcttccgttcgagagtccacgatcagcgccgtcaccgcttgagctgagcgag

SEQ ID NO: 87785 - DNA, 685 bp, Heterodera glycines
gaatcccatttccatttctctactcactcataaatgctccaaacggccttaccattctgcttctgatcagtgttgtgatcggccattccttggccaaccttggcccaaccatcaaacataatcctcattttaaagccgtacaaactgcgcatcatttgcatgatgccattgcgaagaagcacgaggccgaagttacgcagatcatttgctccattagcaacgaacagcgtcaagcattggctttggagttcaaaaaacaattcggcactgatctgattgccatgctgaaaaaggagttcaaaagcgactttgaagaactgatgtaaattataaaatgcaaaaacagccatttaaatttaaatttacaaagcatttctttgatgcaaacgcccgccgtttacgatgccaaccaaatgcgtgccgcattgtccggctccaatgagtgagtacatttacaattgaattgggataaagcacatggagagaacttcaaaaaggaacgccagtagctcaacaggtttaagtgatagattacggtataaacgccataatgaccacaggagaaacttagctatttgttttggctaaatttaatgttcatataagccatcgaattgatggtggattctggttacagtttacctcatggcttaccgtatatacatttcattacggtgttactgta

SEQ ID NO: 87786 - DNA, 232 bp, Heterodera glycines
  unsure (1)..(232): unsure at all n locations
gttgctccgatggacgttgaaaaggtttccgcccctagcgatgagctcgtaacaaactgcatgccgaatactgcgcacgacttcgcgagctgttcaacgcacacaaagtgaagcatggcggacttggccacgacgtgcagttggaaattgtgtgaaattggcaaatgaaaggccacaaaaattanaagctcaattttcgaatctaaaggacaaagtgcactcaaatacaata

SEQ ID NO: 87787 - DNA, 739 bp, Heterodera glycines
ccacgacgaccgagggacaattagcgaagggaacgacgccgccaattccccaaacgtcacaacagcagcaaatacagcagccaatgaccatcagcaaaccgaaccagcatcacaacgccaacaccggtggacaccgtgccaacgccagcttgtcgccggcactgggatcctccggtttcggctcgtccgcctctagcaacgcttccgcccaggtcgagcgcgacctgatcgacctcttcgacgagcagtgttcgattgggccgccgctcaaatggacgccttcccctcctccgcttcaacagcaccagttctccggtgtgatgtacccacacaccggcgtaatagcctccatggacctcaaatccagaggctactacgtctacagcaacgagttcgacaacgaactctacctgttaacggaggagttgctggagaagggaagctggattaaatttaacatcctcgacgattattaccgcttgacgattggacagtacgccctgctcaaaaaatcccccttcgacgtaagagtcgaaagaaacacaatttatgtgggttttttcactgggtcttgggttaagtttgtctatatatattgatttttccagatgtgtgtcagcgcgtacattacccccgaggcactgacgcaacgtacaatcgacgcttcctacgtcaaaaatgtctacgacagatgccgcttgcttcagcatgcgcatgttgggaaggagctgaagctgga

SEQ ID NO: 87788 - DNA, 696 bp, Heterodera glycines
cattcttaaaaaccagcagtatcagcagtcccttttgggccattccccccccccccccacaaatcagcacagtcaattcatcaattctttcgttccttcgttcatttccattctttgctgctctctttttctatcatttctcaatgctgcgcatgctcaacttttcgtttgcacagtattaaatcgaatgaaagaataatgaatttttccttacttatattctcccgccgatcaaatgggcccggaaattgtcactcgcgcacaacacaacaacaattgagtggtgtgtattgtgtttggtgaatgagcaatggcttaagaaagcacacattgtctgtgcaagatgagaaaggatgggagacggcgaaactttttattctcctcaataaaatggcataatttatttaccaaagaaaaagtcataataataagaaaatttcccatagggacggacaatcgccattttctcacattcttgattttacattttgattcccattgtgctgagctgatgaaaagagaatcgaattgctttctacaaaaaaaaaaccctccacactttcccgttccccccctaaccccccccactttaccccttcattttccgtgccccctgggataatttctcccgggggtttttccaaacccgccaccctctacgctcggtttttcacccctgtttcccatttggcccat

SEQ ID NO: 87789 - DNA, 522 bp, Heterodera glycines
ttcctcggggatatcattgaccgtggcacgcacatcctgtagaccctttgttagctcctacctaaaaataaatgccctgagaattactttattctccggggcattcatgaatgcgcttcaataaccgaatgtattgctcttacgacaaatgctaacggacgttttctatcaagttatggaatacatttaccgattgttgcaactgtctaccaattgctgctttaatacactagaaaatcttctgttgtcgtggaggactgtctcccgatttacaaaatatggaacaacattctcagaattatgcgaccgactgacgtgcccgacacccgacttttgtgtgatcttctctggcctgacccagacaaatatgggcatggatggcgcgaaaatgaccgtggatggtcattcactttttgcccgcacatggtaccaaatttcttgaaccgacactacttggactcgatctgccatgcacatcatgcggtggaagactgctacgaactcttttcaaaaagacaatcg

SEQ ID NO: 87790 - DNA, 175 bp, Heterodera glycines
acaaatgaatcgattgaactcaactgattgacatcagtagaattgtcggtgaaatgagacgaagtccactcttgtagtagttttttcacggtgttcagtatttgcttcgttttcactgttgttgttgcacataaacccgcgtttacgccaaaaaaaaaaaaaaaaaaaaaaaaaa

SEQ ID NO: 87791 - DNA, 725 bp, Heterodera glycines
ttgattgattctccgatattttaattactctgttttttaaaaatcccaccgattggcactttcattccttggactttctctgcacttagaattatttaaatggataaattggttttaaaaatccgtgagctcctcgatgagaacgaagtaaattttggggaagtgcagcgaattttggaagagtataaaagtgagccgaaggattggagacaattcacacattttgacgaacacaaatacacgcgaaatttggtggacgcggggaatggaaaatacaatttgatgattttgtgctggggacccggcatggggtcgagcatccacgaccacagtgctgcgcaatgcttcgtcaaagttttggatgggcaacttttggagacgcgatttgcatggccaaagaaggaaaaagaagagaaagaggaagaaaaggaagaagagaaggaagaagaagaggaagaagagaaggaagaagaagagggaccgatgagggcgacagggacggagctgttcaaaacgaacggagtcagctacatcagtgacaaaatcggaatccatcggatggaaaatccctcgcacgtcgacccgacggtgacccttcacctgtacattcccccgtacagccaatgctattcatttgaccaagtgatggtccccattattttttcaatttaattttaattcttttttttcatcgaagcgaacggggtgaaaacagcaaaatacag

SEQ ID NO: 87792 - DNA, 741 bp, Heterodera glycines
tgcgaattgaattttccgacttaaaaaattggagggcgaagcgacggcgaacaatcggaaggcgaaactgattttcttcttcgagtggtccatcgacgtcaatttcattgcaactgtttctggttccgaaactgagtacaaaggaagtgtggaaattctgaatttgagcgatgagaacgaggcacacgaaattgagatttccgtgcacattgaaacggcgggcccacatgaaaacgaaattcggcacattctctccaccgatgggctctcattcgtccgttccaaagtgggcacttacgtgcgcgagttgaaggaggagttcagcaaagggatcattttgccggtggacagcaaaggcgccattcgtccgcaggcggtggcaacgcaagggaaaacggtggtggacaagaggcgctttcagaatgatatcattcagaagacggaggagaaagtgaccacggcggaaactcaaaacgctctcaaaactggtggtttcgaactgaccgagacattcaaagtgccgcccgaacgcctttttgagattttgactgcgtctgagttggtcagtgtttggtctccgaattcgtcaattgatgcgcgggaaggtggccagttttcgttgcttggcggagtgatgtcgggtcatttcaccaaattggcaaatgcggcgcttatttcaatggcatggcgtttgaagagttacccatcaggacattttgcagatgtgacatttacgcttaa

SEQ ID NO: 87793 - DNA, 796 bp, Heterodera glycines
aatcgcttttctctaattagatggtcgaacttgatggcgcgcctatgatttccgctgaagagattttggaccaaaaattctttccagactgtgttcggaaaattaaaaaaacccatgaagaaataatagagccttcgacatggagaaatttgacataattcaaagaacgatgcgaatgtattttgagtcggaagattcctcggatgtgtttgaaggctttctgaacgttgtcaaatatgtgaagtcacttaccactgagcaattggacatttcgctcgtcaaactcgctctgctcgcattttacgaatttcagaaactcggaatcgcgcaaggccaacaaatcccttttgaccttcacattgataagactcttctcttggatgcgctcgtcccgtgtttccgacttaaaaccaaatacatcgaagcgatcagttccgtattccatctgaaggacagggaaatggttgaagttgcgattgctcaaattaaaacccttttggagaacgaagtgccaaaggctgtcttttggatggaccatttgaatctgcgcgaccatttcccatttaacacaatcgtttgtaaacttattttggaaaaccaaactgctttgatttatcctttcgtcggtgaaagtcaatttcgacgtaataaactcattcattatttggacaatttgttgggccttgttttgcgcaacagacgagcgggagatgaatatgagcgggaaattatgaaaaaccaaaaacaattggagaagctcaccagaaagtttgtcaagaatttcgaattaacggaa

SEQ ID NO: 87794 - DNA, 215 bp, Heterodera glycines
  unsure (1)..(215): unsure at all n locations
ataaaatcgtccgtggcttttacggttggcttctccgttccttggattggattaaccggcaaattttacaccgactctctctctctgctcataatcgcgaggacatgataatcaaaagtttccgcagatcgtaccctggactgctccagcgtttgaacgaattgaaacggagcggaanaccggttttacaacggcggagtgttcatcttgttaca

SEQ ID NO: 87795 - DNA, 452 bp, Heterodera glycines
cgctcaaaatgccgtcgatttcctcccaataaaaacatcaaattctcgaagaagaaatgaagccatcattcaacttcaaacttttcgcatccgtctttcttgtgctttgtgtggcctcacttgtcctctgtcagcataagccagcagcagcatgtaaaccgcccaaaaacgtgggaagaggcaacttggcactcacgcgatggtggtgggacggccgtagttgtaagcaattcatctacaaagggcagggcggcaacacaaacaatttcccatcaaataagctttgtgatcaagtgtgcaagccatgaatgagtcgtggaggtgcagcgtgaagagaccaccccaagaagaaaagtgaagaaattaaaagaaaaatttttcacaaaaataaaattgtgcattacataactacataatgatttcgtcggaataaatcaaatccccccccccca

SEQ ID NO: 87796 - DNA, 554 bp, Heterodera glycines
caaggagagtcgggcgctttcggatcggattgttcgcattatttcatcgcttgcgcaagcagttccatcagactttcatgaaaagctgtccgatgaatcgaagctttggcttgggatgcgcttgaagagcttcacaaatgctttaatgagcagctgcgccggagaagccttgcgtgatggtcgttcaatgttggctgagatgtttcgggcaattccaacagaaagctctgctattctgcgagcaatttacgaatcggtcacaaaccatgggaatcaattgaatgcccaattagttctgatacgccttgctgctgaatctggagacggacaacaaagcttgttgcacgtgttgaaagaggtttctggtcgagaaagtgttcccggcaaatttctgaagtcgctggaaacgtttcaatatttgtgcaaccagttgaaaaaggtggaggaacagcggaagacagcgcaactcacacaacagaatgacgacacctgttaacgatggagccgaggaacagcatcatgcaacgacatcgaaacctcaagcccgaccacac

SEQ ID NO: 87797 - DNA, 288 bp, Heterodera glycines
tgactggaaagcgattgattcgcggcaatattgcgaagggaatgcctttcatccgaaagcaagataaatgggcatatattcactcttaagtatggacttaaacccgtcaggaatttacggtcgccgtggacgcccttagagaacctctaaccgtgttgttgcacatgataaaaaattgctctgacatagaacagagccgtgatttccgctagcaaatattttaatgcataaactcgacccgacagctctgagccaatagaatgtctctccccgtggcaagcagtttgg

SEQ ID NO: 87798 - DNA, 197 bp, Heterodera glycines
ctatgacgcgtgatgagctgaaggacctggcctgcctgggcttcagcgccgatctggtcatgcaatcgttctgcccacggccgcttaccccaagcccgtggacgtgaagatgcaccgagaactgcccgccttcatcagcaaccgcggcggcgtggccctgcgtcctggcgacggcgtgatccactcgtggctgaacc

SEQ ID NO: 87799 - DNA, 240 bp, Heterodera glycines
ggccagctgcgacaaaggagcagccgagcgcggagacgacggaaacatccggagactcacctgccgccaccgaataagcgcccaacgaagaacagccgatcgcggagacgaaggaaacaaccggagacgcacctgccgccaccgaagaagcgcccatagaagaacaggaatgaccggccggctacttatgacctgcgatcgatgattggcttggtttggattgtccataccccttcttgg

SEQ ID NO: 87800 - DNA, 162 bp, Heterodera glycines
ggcgatgagagctgctttttacatttatgctgttttcgcatagtagaaatattgtgtggatttgagcgtattggataattgttatttttagaggatgcggatctttttgccagttgatttatggacgttgaaaaaaaaaaaaaaaaaaaaaaaaaaaaaaaa

SEQ ID NO: 87801 - DNA, 797 bp, Heterodera glycines
  unsure (1)..(797): unsure at all n locations
gaagggcgccgatccgaatgagccggtggttggccgtgagaacgacattaacacgaacttgacgcctcttttcgttgctgccctccatgcacattttccgctgtgccgtgtgctcgtcgaccgtggtgccaacgtggacttgggatcggactgcccaacgccgctgatgatggcttgcaaaagatcgcaaatggaaattgtcgcatttctcatcgagaatggtgccgacatcaatctgcagaatggtgacggagaaacggcattgatgatcgcctgttcaagggcaaatgtggacattgtgcgcttgttgctgtcacacggtgcaaatgtggagcaaacggattacgaaggattccgtttcgcacttaagaacgctgccaatgagggccatttggaggtgtgccgtctgctggtggaggagtgggccgcagatgtcaaccaacagaccatccaagatcgaaccactgcactgatttgcgctgccagccgaggagatttggccatcgtgaatttcctcatcgaacatggtgccgaccttcaacatgttgacgtggttggaaacaacgctttgatgtgggcagtgatcagtaggaagactgaaatggcacggcatttggtggccatcggcgcggacattaaccaacgggacacggccggcaatcgagcgcaggatatagcggtactgaccggacatgccgaaatgatggccatttttcgtactacggcgacggacaatgggncacacgcggaaggcaccgatggacagcaaaatgatcagcaacagatgtgacagcagc

SEQ ID NO: 87802 - DNA, 444 bp, Heterodera glycines
ggtggtggtgacggccgttgagggggaggacagcacacggagagaaagtggtagtgagaacgattgtgacgcagtacgaaaagaccgggagcagtgacagtcatctgaccctgtctgcggagatgcgcaaggaaagctctgtcgacgaatcggtcactgacaatgtgcctgacatctgcacatgccgctgttgcaatgatgctgaacatcaaagaataccatccttccctgtctactgttacgccagacgctaccatgagtctggtgatcggtggctttggtgacgagtatgaataattgtgaggttgatcagacataggattggtcgtaatctctcatcatcaattggagatgatctctgtctactagaggcctatgttcaatgccctacgagacattaactagtttatattcccgcagacacagtgtgcgaacaaatccctc

SEQ ID NO: 87803 - DNA, 442 bp, Heterodera glycines
ttccttgcatttcgcgttggcttcgtactcgtcaggtttgtccgttggacaatcgcgactgggagttccaaagatatggacattgagttgccttgcggttattgcacacggctgaatatttgggatcacgatcattatttaaatatgtgttttgttaggtacttgacaaaatcatgactttgttttttctatgaaagtattaaaaaggattcaccatataaaaaaaaaaaaaaaaaaaaaaaaaaaaaaaaaaaaaaaaaaaaaaaaaaaaaaaaaaccaaaaaaaaaaaaaaaaaaaaaaaaaaggtcctttggtttgttccccctgtttaataaaatcccccgggcccccttgggggccggaaccttgcaacttgggccccaattccccttttagggagtcgttttaaaattcactggccgtcgtttaacaacgtggggc

SEQ ID NO: 87804 - DNA, 554 bp, Heterodera glycines
caggatggacacactattcaaatgttgtaaaaccaacagtgcgttggtcatactcgacaggagtgatgaccctgtcttaccatctgcttaaccaatggacctacgatgctatggttcacgaactgatcgggctgaataaccaccgggtgaccttaaaaaacacgggcaacgatgggctgaaaaatattgttttgaatgctcagtacgacgaattctattcaaagaatatgtatttgaattttggcgatatcggacaaaacatcaaaggactgatgaatgaatatgaacggaaggctaaaacacaccaacagttggaatcaatcgcggatatgaaaaaggttgtggaacagtaccctcaattcaagaagatatcgggaacggtcgctaaacacgttcagttggtgggtgaacttagccgaatggtcaccgatggaaatttgttggaaatatcggagttagagcaaaacattgcggtcgcaaatggggattattcggcttgtctggattcccttcgaagacttatgcagcgtcccaaaacaactgatttgaatgcc

SEQ ID NO: 87805 - DNA, 458 bp, Heterodera glycines
  unsure (1)..(458): unsure at all n locations
ttttcaacaacatncggaaccaacaccagtcagcagaagagcaaaaggcaaacgaaggctgtgacccgggggagaaggagcgcatggaacgtgagagtttgatcgaggaagcgtacgctttgtcacaagaggccaacatcagcttagagcaaatcatcaaacggtacaccaaatgccgtaatcagttccttgaacgtgtcaccgaccaaatcagcgaccaactacaacaggatcattctgacagcactgacgacatcagcaccaacaaacatgagcggaagaagcgtccgattgtgttcatttcgccacagttgcgcaaacgggtcaaaatacaacaacaattggcggaagcggactcggccaacgacggcgacgacgacagtgaacaaaagcaacaaaaagaaaaaagtccatttaccattcccggcggtgctgaagacgacgaaatgacagatgtt

SEQ ID NO: 87806 - DNA, 235 bp, Heterodera glycines
ttgagtcccctgtacttccaaatcgtcgctcaatgctgtggaagcgaattggggttctgaatgacatacgataacataaaacttagctcttcaagagcaggacgaatgagaccagaattgtgtgatgacgccggtccaaaaagggatgggcctacatttgcactctgatcctccagtgataaaccggtattttagcgtgtccgctcatgacgagcgatgcttgtgatgaccacac

SEQ ID NO: 87807 - DNA, 155 bp, Heterodera glycines
atacgcactgaacgacccaaaccgattgttagctgtcgtcccttttcttgtccgtacatattttaatggcgctcgtgttgtgcagcgggcattgatcagtctcgtgcagtgctgcattgtccgtcaggtggacagtcagccgagcatggtcacct

SEQ ID NO: 87808 - DNA, 212 bp, Heterodera glycines
agcagagggcggaattggggcatttatggcaaaaagacgggaaaaaagcgaagaaaggggagaggaaaagtgaccaaagaccaatttgttttgtttaattttttacattaaaatcctggtttgtcttattaaaaaaaaaaaaaaaaaaaaaaaaaaaaaaaaaaaaaaaaaaaaaaaaaaagggaaaaaaaaaaaaaaaaaaaaaaaaaaaa

SEQ ID NO: 87809 - DNA, 704 bp, Heterodera glycines
gtatcgccgttttggcgtcgttgacggagatagcatttaccagacggagaaattcaacccagtcagaatttgaacatcaaaattgagccttcgctaatcgccgtcggtgccaaacacattgccattgtgctgaacagcaaagcatggttttatgaaatcaagcgcaatggcacttcatttatgtacgaacatgactatatgacgaccattgtgaagatgaagctgaaccgcgattttgtaatggcgcagttggacaatcgcgtgcatttgcacaaaatcatccgttcccaaagcgatcattccgatccctccgataattacatgacaaatgacgtgctttttcccaactccaacgagacgaatccgcgtgatgtgattttggacgccgatctatcagaaaaattcttcatttactccacacggtcgcgcttcctcaattattactcattagcccatggtcgttttgtcagcgacttcaaacattcgtccgaaatccgaaagttgttcagtgaaccggatggaattcggaccattttttacgatgatgcccatgatttgcacatttattcacccgcggatgatcagctgagcaaaattccgcgcgagggttcttccatgagcaaccaaaagtacgatggctgcctttgggaagcgtttactgtggataaagacacctttttggtgcacgatcagcacactatttt

SEQ ID NO: 87810 - DNA, 684 bp, Heterodera glycines
cattgaaactgtttatcattcactgattattccgcacggaaatgaataccacgcgcaaaagctttgactgaaatgaaaatttgggaggcttaaatgcatccgatcacttcagccaagtaaaaaaaaaaattttaccactgagattctcatggaaattccgaggcttacatgtcaccccaaaataatacacataataaagcatttttttgtttttaataaacctaaaacagtgacaataaagacaataggtaaatgatagaattttataagtggtcagcaaattatattcattcttttggtgcctttcagctctgcccccccccccctccgaaacttatcggtgatttgattttctctgactggtctgatctgatatggttaaggcaaggtgtaaaaaaatcaatcgtccgaattaattttattattaatgaaattctaattctcatttattgtaccaaacgaaaaacaatattcagtccaaacaataaaatatttaaagcctttctttccctgcaaaaataagatcaacaacaatccctcttctgtgaaatgaatgctttagctattgttagtctctttgtccaaagcacaaacagccgcggcccgggcgaaatattcagtgaaacatccatcagctgatgatgatagccaaaaattgagaagaaagccatcattctattcact

SEQ ID NO: 87811 - DNA, 290 bp, Heterodera glycines
aagatggttttttggaaagataataacgtttggtacgcgacaacgcccgaaggcgtccgtcgatggtccatctcgacctcaacacgcggcctcaggaaatcaaatgtagcacagaggcactctattttttttggccgccattcattgcctcaagacacacttccaattttcttacagacattgcccttgatagccccgtggaaaggctttacggcgctcatagaggcagacaaaatggtcaatttcggctgtcaaagccatcgatggctggcccactcaatggccatata

SEQ ID NO: 87812 - DNA, 175 bp, Heterodera glycines
attggcatggaccaatcgaggaaataacaggcatgatagattgcgctgattaacgctgccaacagcagtttatgtggacaagaaaaatgtatcacaggatgcaggggttctgccatcggtgaatttgagaccggatgacaggagaatggggggcacagatattgacataaaacga

SEQ ID NO: 87813 - DNA, 294 bp, Heterodera glycines
ttttttttttttttttttttgcttccttgctttctgacttattttcctcctactatgggccaggaccacagctgaaaagaatacgaggaggaacaatggcgggcgggagaaagggaaggtaggctcaaatcgccctaacgagagacgaattacaagttatgatggactggaggattacaaacgtcgcaaccgggaaaatcctttcgaatcccaacttaaattctttgcagcacatgcctcttgctgcaaatgatgtattgagcaataggttccctccgattgacctacccaaca

SEQ ID NO: 87814 - DNA, 416 bp, Heterodera glycines
tagtggaggagaagttaacggcgtaattcggacggaaggagaacaatggaagcaattgagaaagttcactctgaaagcattgagagactacggattggagaagggagccacagaagcgatggtgctcgaggcaatcttcactctgatcgacgaggtggagggggaggtgaacagcgggaacagtgagctttctttttatcggaaggtcgatctgatgacggggtcggtgatcaaccgaatgctcttcggattctcattttacggagaccgctacaaaacattcacttttctgaaagatgcgcttgacgtggagcaagaatatttcatctcactaatcagccaaatgatcgaagcgcggccatggcttcgccatttgccatacttttcaaaaaaaaaaaaaaaaaaaaaaaaaaaaa

SEQ ID NO: 87815 - DNA, 327 bp, Heterodera glycines
tgacccacccgtgcaaacttgaagtggccatggccacccccgctgaacttgacttgatgccggtcattcttgaaatcaataaggatacgttttccgttggtgtcactccgaccacccttacatccgttggaaagggtccgtgcttttcctgtcagcaaagcgaagaagtcaaccgtcagtcgatggccgcagcttctgaaggaccttgtaacttcgcttgccaatttccccgccaagtcgcagcagccgtcgaactgatgggaccaatagagggacgattaagtgacgatgcgaaagacggaccgactaaagacccattttccactg

SEQ ID NO: 87816 - DNA, 741 bp, Heterodera glycines
gacggaagtgcgacgagtgatacgcgacagcgaatgcgccgattcggaaagacatatttgtgctcatattctcgactgtgcatagatgccaagttgcgttgcaacggcgaagacaattgtggcgaaaacgacgacagtgacgaggcgcattgctcccgaattgaggccctcgcctctcccaccacaattgtcgtcgcttacatcgtttcgggcatcattttcttcttcattttgtctctgttctgttttctgttcaagtcaaagctcgaaaagaaaaataacgcaaaaggggaagagaaacgaagtcggagagagagggaaaagcggaagagagcgcagagaaagcggagggaggggcgaaagagtgggcggaaggcggagggcgaagcgcagagacagacagcgcgacaacccagcagacagccgaggccacgcagaacggtggcggacggacacaaattgtccggcatttacggaggcgtgggcggcactcagtcggtgttcggcagaagagggacaatgagaagaatggcggaggaagagagcgaggaagagggagcaacagcaacagcaggacaccaagaggacgcacaacaccaccaccacaagcagcatcaccacgattacagtcaacaattctcacaacatggacaaactgaccaattcgaattggaatcgcagaaaagaccaaaggccaatgagaataatgtccgaatattttatggataattggattaagaa

SEQ ID NO: 87817 - DNA, 340 bp, Heterodera glycines
aaccgttttttccaccatagacatttggtccaccagatctaccgacgaccattcgacggacgacctgagtatttgagctgcatagggccgaccacgccggtattgctgctggcacgagtcagcacagccgactacccatgggacacggctgaacacatttgggcgaaccaacgcacacggtaaagcaatgcgcagccaaacgactgcctactgaacattttgaacacctgccaatggacaactgtgcataaacttcccctacaatggtacaaccgtaccgaaacttactgtatgaagagcggcctgtacacaaataccctgagctaaaagacgtctacac

SEQ ID NO: 87818 - DNA, 323 bp, Heterodera glycines
ttttttttttttttttttctttttttatataccctgcgctgaaacaaccccttatgattttcccccacggcctcaatgtcaggaggaaacatgtgactgtcagggccaatcccgcctttaacaatttccattagaattgacctagccatattgccaactacattttagtgcctaaaaagaactggcgagacctcacttttatattctatacagagatctcctgaaaccaacatgggcgaacgtcggctcttagtttaaaccaaacactatctcacataccatttttagccttaaggggataaggaacaggatatcaaaacatc

SEQ ID NO: 87819 - DNA, 584 bp, Heterodera glycines
  unsure (1)..(584): unsure at all n locations
gtgatggaggactgtcgcctgtcctcttccgcctccacttcctcttcatccggacatcattttgacagaccatccgcagttgctcatccgtcccaaatgccatcacataattatcaccagcatcatcatcttttgagatggcgttcaaatgcgggaaaaatggcaaagacagcagcggaaagaaacagcacttccgccatgttggaagcgtcgttcggctgcatcgaccagcacaaccatcaccaccgctccacgccctcttccccttacgccgcccaccaccaattgcctccgggcactgtcattccgtttcggtcgagcattcagcacctgaggcattggcacggaggaagcgatgccgaggatgatgacgacttggacgatgtggagatagaggtggaggaggtgctaaacgaagcggacgacgcactcagaggaggcgccggaggggggcacgactcgggcaccggcatggagagcatgtcatcggccgacatccaaccgaacggcgcaccatcggttggccgacgatgtctcaacaacggcgcaggggacgtnnnanaaaaaaaaaaaaaaaaaaaaaa

SEQ ID NO: 87820 - DNA, 325 bp, Heterodera glycines
gacgcaacagccacaaaaaccgatggaagtcgagcagcagcaaacgccacaggcacagctacagcccaagaaggctatagaggacgaacaacagtaacaggtcattcagtcgcagcagcagcctcagaagtccaagtacgtgccaccgtcgatgagaaaatatcggagcgatttgtttgatgaaaattgagtatttaatgtgtgcttaattggtgttgcaaagtattgttgatgagacatttaagcgttttggagttgtaataaattgttgttggtttttgctcatgttttttcgaaataatgacttaaagttttgttggctatt

SEQ ID NO: 87821 - DNA, 424 bp, Heterodera glycines
tcttttacccgcttaaaaccttggcatttatcttcgattgcacttggcttcattacaccgctggctgctgctttatccgcttggcctttttcttgaggcacctcgccttttctcatttccgctcccattttttactttttcagcgtctattcactgcaacttctaaatgcgtctaatttcagttacaattttggcgttgtgtatggcccttttcaccattcattatgattgtccttctcatatggtttcacacctcattaaacatatgttaaatcatacgacgaaaaaaatggacgaattgcacatggaagaattggcgattattacaagtccgcctaatattctccaatgatgaaaaacacaataattcgacgcattattacataattacataccatgtaattaaatcagcacaatctccggg

SEQ ID NO: 87822 - DNA, 286 bp, Heterodera glycines
  unsure (1)..(286): unsure at all n locations
ggcgtgccggaatgggnccttcttcatgaagcagaaaataccaacgcttgcggcacttttgctctttttcatgctctgacgaataacaccgaccgaattgacattggaaacggcgtcttctatgattggtttaaggcggcaaaacaactcaatgttgaacaacgctcggaccttttggcaaacgattcggagttggctcatttgcatgaacactgtgctttgagggaatcggagacagatgtcccaaggaatgttgctcaccacttcatctcatactttacacatg

SEQ ID NO: 87823 - DNA, 184 bp, Heterodera glycines
aaagactggcccgccaacttttgcctgtgccaatgccttcccctttgaccatggatggcactgggaccagttgactgtcacgtcgtaacagaccgtctttcggcacggccactgacatggcgcatcttctccaacgcatcgcaacgtgcgacaacttcaactgatgcacggttcagaaacaaca

SEQ ID NO: 87824 - DNA, 398 bp, Heterodera glycines
ttaaaagatccgaaaaaatgccaaacattttcaaaatccttctgattgtgcttttggccgtcgtctcattccgtctctcggcttctactggtgacaaaaaaactgctaatgatgggagtggaaacaactcatcagctgggattggtacgaagatcaaaagaattgtcaccgtggtactgctcttcacttccctggcgacgggtggggcggaagcgattgggcgaagcaatgctcagggaggaaatgccgccggattggcgccatcgcatgtgaccaaccgctcaatggctccaccacctcctcctgtgcaatgtgaaatgggggcaaatcgattagaaaaaatgagggcacacctacgcgaacttgctgagaaaatgccggtcaatgaatcgaaccgt

SEQ ID NO: 87825 - DNA, 295 bp, Heterodera glycines
tgggacaatgggcaagccaagtgagatttggacggaaatgagtcgggtggaagtgaagaacagaaaaaggacactcgaatgataatccgtgcgatctaccgacggacagtgtattaagattaattaacaccgtttcattgcaaatgtatctcaaatggttgatgatacaacagcaatacatgtgagaaaaaaagagcaaagatatataaacgcattgaaatcgtatggaggaaacgaacacggctggataaagactgatcgcactggcggactcaaactgaccaaccagggtcag

SEQ ID NO: 87826 - DNA, 645 bp, Heterodera glycines
tctcgctggtgcgaagattatcgaagtgggcgacacgccaaaggaacgggcattgttcaacggggcgcaaaaactgttcggaatggtcatcactattggacaggcaattgtctacgtggcttccggaatgtacggaaacccacacgaaatcggcgcctttatttgcttgcttatcgtaattcaactcgtcgtggctggtctcattgtccttctgctggacgaattgcttcagaaagggtatggacttggctcgggaatttcgctgtttatcgccacaaacatttgcgagaccatcgtttggaaggccttttcaccggcgacgatgaacacgggccgtggcacggaatttgagggggcgatcatcgcacttttccatctgttggccactcggaatgacaaagtccgtgcacttcgtgaagctttctaccgacagaatgtgccaaatttgatgaatctgctggccactgttctagtttttgccgccgacatttatttccaaggctactcgtgccgattagcccataaaaagtgctcgctaccgcggtcagcacagatcctatccgatcaagctgttctacaccagcaacatgcccatcatcctccaatctgcgctcgtctccaacctttacgtgatctcacaaatgc

SEQ ID NO: 87827 - DNA, 348 bp, Heterodera glycines
gggggggggcgaccgcgacttgaccatgaatcgccaaacgactctctcaatcgtgttgtgtctttttctgtcccttcctttatcagtttgtctcggcgctgatggcccattgggtctcttcacattggctccttcccaaccctaattaatattgtaattgccttcctcgtctaagttcgttagacatttgatattaattttattaaatgattcgttcttttccggccctctcttttctcttctcttgaaaaaaccgatggttaattaattaaaaaaaaaaaaaaaaaaaaaaaaaaaaaaaaaaaaaaaaaaaaaaaaaaaaaaaaaaaaaaaaaaaaaaaaattaat

SEQ ID NO: 87828 - DNA, 187 bp, Heterodera glycines
ataacgagaaattggctactcgcttctcggagtggcacaccgaacgattcaacgagtacaaaagagcacaccaacagcccaatgatcccatgcaatagtgattattatttattacggtgccatttgttttgttcggcttatttatccaataaaaagaccgatgcaaaaaaaaaaaaaaaaaaaaaaa

SEQ ID NO: 87829 - DNA, 278 bp, Heterodera glycines
tcccaaataaaatgaacaaccacccaaaaaatggataaacacatgaaaaaaacagcatttgtaacgcgtgcctcgtcctcttaacaaatataatttccctcaccaaaacattttctcaaaccaaacattcggtcctttcggccaatcatccgctggaaccggcgtcatttggtacggcatttccgctgctttggtcccccggcgatggggacaatggcccaaggcattcaatgccccgaattacaaagcggccaattgaattcccgcgggcgtcatgg

SEQ ID NO: 87830 - DNA, 197 bp, Heterodera glycines
agcggcgtcgactttgcctcactttcgtgtctgtcgaccattactcaatcgacctctgacgaattgggcaaaaagtcgaaaggctctcccacaattgaattgctccgtgccgagtcggactgtcttcctcccgaatggcttttgcccaactcttcgacatattttgaagccgctgattccatggccgagcacagcaa

SEQ ID NO: 87831 - DNA, 452 bp, Heterodera glycines
agaacctctgccggaagaacaaccacaacataatcaacagcagcaacaacatgttgttggtggaggtggtggtggtggtgagcagtcacaacaacaatttgcaacggaggaagaggaggagcaaccggttagcagttatgagcaaccacaaccgcaacaacacgttccggccgacatggttgactgtggtggtggtcgagcaacacaacagcatccgatggatgccgaaaaagaatatatggaggaggagcaggacgaattgggcaacatcattggcgttggcacgcgcattgtttcaattgcatagcattcaacatctcctacagcttttgcccatgtttgtggtgcagagcagtagtaacaacatccatggactaagacaacaacagtcacaggacattactgcagcacaaccggaacaccattatcattcaattcctattggtcaccgc

SEQ ID NO: 87832 - DNA, 439 bp, Heterodera glycines
gctgaaagcgttggggtatactccgactttgacatggagcctcctgcacttaatgggcacaaatgaaggcactttggctgacacgggccatgacctgcattgtatgccattgataccgaataactttacgatgcaatggccaaagtaagggcacactgtgcaccaatccccgacattcggaaatatttgctgaaaattccgttagcattgatggaatgagggggctgaatgatccgtacgacggcaaacaattcgccactttcattgggctaacgcaaatctgggaaaacttcttgaatctgtgctcaaacgctggcggagaattgacgtggaatgatcagctgatcagtcgattagaggccgaacattgcgatgtcggaatgtgcgaattgtatgacatttgccgcttcgctatgttccatcgaattgcggcaaacga

SEQ ID NO: 87833 - DNA, 714 bp, Heterodera glycines
tgtggactgtttattggcgccctttgctccggcgatggcccgactgtcttgcgattgtcgacgcctaattcgtgctcagtctcttgacgccctcgggaattcctttcgtgtgcccgctttaagtgaactcatgcaaccggcggattgggaggattgttttgctgaattgctcttccccctcctcaccaaactcttggccatcagccccccaatttctcccatggacccaattgggatggaggaagcccaaatcctctccattcaattcatttgcaaaattctgctcggcaatcttacgcaaattagcagattggactcttttgccgatttgctttcacatctttttgagctgatggaccaatttctggagggaagttcgtgtatcgaccttttggcggaagtcatccaagaatcactgaaaaattgtgctctcgtctgtgaaaactttggcgtttttcgcgacaatttggccgaattgcacggccaattgcaggaaaggctaaacgcactggcgaaaaaacatgaaattgcttcctctgttggcacaataaaactgagcacttgaaaagggataaaagaaggagatgaaagattttttgattccacgagctaatggctccccaaattaatgtgatatttgtgatacccatgatttcgcacaatatttccaattgcattgtcatagtttgtaaattcaattgttcctttgaatac

SEQ ID NO: 87834 - DNA, 652 bp, Heterodera glycines
atagaacaaaaatggaaatccaaccgcagccttttgtcgatgaagccgctaatgttcaaaatattgtgaatgctatcggaaaatgtcctttggcgattgctgtgccgcaagagggcagtgaaacagtgccaataagtccaagcttcacgggtaacatcaacatgtttagttcgattcccatcagtcaggaattgccttttacttcaccagccaatgaactcggtgtttctgctcccctttctcgacttcgttcagtgactgatttcgatgaccaaaatcaagccgaaagtccacgagcctccaacagttttccccagaatttggcgtcacataacaaaaatcggatgcgcaacaattcctttccttttgcttcacttttgcttgagtcacaaagttcgtccagtcaaacattgccaggggtgccggagaacgacaccgtttcggggaaaaccggcgaaagtgacaatctctccaaaagaggggccaattttttgcacacgaaagtgcattcggcccaggaattgacaatgcggcggaactcatccctttccatggacactttcggggatttaagcaccaaaatcgcttcaactcaaagtgccgagaaagttcattttgcttgtggcgaacaggaccaacggttggaaaatga

SEQ ID NO: 87835 - DNA, 719 bp, Heterodera glycines
cagccccttttacacacgaaactcgccgaattattgaaggaaaggccgtgtgtgcaggagacgcgcattgccattctccgcacattgtggcccaagtgcattctttacaccgggcgaattgcgcgaacagctcagccaattggtgcagcgttttccgcacaacatcccaattttgcaagcacctctgcgtgttggcagcgattttcacaggcgccgctttttggcacaacatcctggtacagatgatcgttctcgtctgatccgcacctgtggtcgtattttcgccgctcatcatcactacttggccgagcacaaacgatattatgagcagaaattcgacaaccaagcctttcgaactttgctctaccaatatgtgcacctcttacgcaaggctgccgaggaaaattgtggtagtgcgcttcccgacgactatatttgggttttcttgatgcaacacatcacatcggagaggacaatgttaccaaggcgcgttattgacgaggtgtttacaattggccaaggtcgttgcccctggagtaagcagtttctcatggagtcgttgcgcggctgttgcgaccgcaccgacccatcggtggcaatggtaaacgccacaatgaaaacgcatggcatcagtgtgtactgcacggacccggaagtccaactgctgcttgagaacgtgtgattttggccttcgtacgaacgacgcattcattgcctgg

SEQ ID NO: 87836 - DNA, 172 bp, Heterodera glycines
agaagggccgctgggggaaggagtcgggttggctgttggggtaagcggggggggggaaaggggggagccaattaaactcaattggtgatgggtatatgtcccctttacggccgcagaatcggtctcgcgttgtgtatttatgatttggtgccggcccgggggagggtggttt

SEQ ID NO: 87837 - DNA, 693 bp, Heterodera glycines
cgtaattatctcttctttgtgtacaacaataacgacgacaattgagcaatgtcggaccatccaaatgttgcgctggccgaccttagccgcgtggcaaacgacgtttggctggacactctgttctggattgatcgcgctgaagtgggcatgaagtttgcactgatcgacgcacgtttcggccggctggtggccacgcatttcaacctgcgcaagtggtggctgggcgagctgggcgttcatcgcgcaccgaggcgatggcagtgcggcggtacggcagcggtcagcgcaatggacgactacgcgatgtccaatcgactgccgctcgccacgtgtcctgcaccgaacggcgtgatcggcttccgtgccatctacatttggtacgtcgacctggaagtgatcgcatttctgcagtgcctgcaacgtgtcatcaaccgcggcatcgctgtgcagttcaccatccactcgacggacgtgcgctgctgggcgctgatggcgcaacgcatttggccactgatcgcgcacggcatcatcgcactgaacgacatgaaagccatcaacctcgcgctgctgtgtcgccatgtgtcgccgaatgtgctgttcgactgtgccaaccttcgcgccatcaccaacacgcacatgttccccatccgaccgcctcacagcgctgtgcacatcaacgaactgctccagccg

SEQ ID NO: 87838 - DNA, 90 bp, Heterodera glycines
  unsure (1)..(90): unsure at all n locations
gngaaacggctcataggcgaccatctgagccgtgctatttgccgaatcgcgggcaaacacagccgagtgatatatgaccattgataacgt

SEQ ID NO: 87839 - DNA, 257 bp, Heterodera glycines
cacgaagcaagaaccacgtttttttttagacacaacagggagggatcaacagctggaaaatataaaacggttatgtagataggaaggagcaaagatggccatatctgtcaatagagtaaaaaagttgtgcaatcagaagcgaacacgaaatacaagctggtacgggtaaagagccaagacatggggtgtattatggagggagtgaacaaacagtcagtgcgttgttctcattggcttgtttggagaggggtaaattg

SEQ ID NO: 87840 - DNA, 749 bp, Heterodera glycines
cccggcaaccctagttaaactgctgcttgcgaaagcctatccgttggcacccgactagataattttgcatatattgttttgtgatatacatagtgattacatggctgtcgttgattattcctccaatttctggggggacaagcacattggatacagcgtgctttatgaaaacatgaagaagggcgaggagtcggttcacgaacttctgacctttctcaaagaacgcgtaaatatggaggacgatttattcaaatcgcttgggaagagtctgcacagagttaacggatacatttcaaacaagagcggttttgtggacgcgtggaaattggcgaaggaaaccttggaattatggactgaaatccaatcgtcgacacttcgaaatttaaatgatcttctgaaagaagtcgctcgttatcaagaagaattggctcggatgcgaaaacgtgccaaagacgcggacactttggaaacgatcaatttgatgcaaacaacgaccacctgtctgcaaaaagcaagggacacgttcaaccagcgaagcactgacgtggtcagtctgaaacagagcaacaaagaatggacggctgccatcacataagaataccttcgagcacgcaacatattgaacaatgctcacgatgagtacaagccttacatggacaagtacagccaaattcgcgacactttttaagaacgcgtcaaccaagcctcacgctctttccaagaacatgaccgactccatttgctacaaa

SEQ ID NO: 87841 - DNA, 635 bp, Heterodera glycines
cagcaaacagtgggactggctgcacaaaaagtggtcgtaatgaaaatttcgtccgagccaattccgacgagtgcggacggcgtcaaacgaaggcaccaaaagcggaaaggcggaagagcgtcggaagaacggacggacgcaactttagtgaagcaaatgaaaggaaccaatactgttgttatgggaacaatgaaggaagaaagggaggaacaactgtaccagcgagaggggaaacccgaagcgaaagaggaggacaaattgaagacggcacctgcagaagcggagaaaaagacggagaagacgggcaaagatgggaaaagaggacggaagaagaagagggacaagcagcagcgggaagagggaggcggcacgaagttcaattggttcgccgagttcccattcgacaccgccgccacttccatctctgaagaacagtcagcaccagcggcaactgatggtgggatccccgccaaagtgttcgcgtcgcccacccgttcatttgtgctccctgcccacgagcgtcacttgctactgcttccctacatggacattggccttccggactggagagtgcacgactttccccaaccggaccgattcttgtttcctgagccaagtgaatggcacaaaaagcc

SEQ ID NO: 87842 - DNA, 100 bp, Heterodera glycines
gcccttatgggtagggcttcacacgtcatacaatggtgcatacagagggttgccaagccgcgaggtggagctaatcccagaaaatgcatcgtagtccgga

SEQ ID NO: 87843 - DNA, 690 bp, Heterodera glycines
catttcgtaaaaattgcaaatgaatacgcaacaagagatgtcgtcattcaatattggtgtcttttgaaagctttggaggacggagtgaaattaagcggaaatgagccgaacacgaagaagtttttgcttgatttgatgacagtccttgaaaatatgaaacagtcgcacaaggaaaatgacgccgtaatgcaagaaattgtgggccaatcacacatcgaagaccaagcgcaacggttgttccaattcgcttacggattggaccagcatagccaattcggacagaagctcataaaggcattttacactgcaggttatttgtttgacgtgctcacatgttttggacaattggacgacaacattcagtctgcacggaaatatgccaaatggcgagcaattgacgttcacaactgtctgaaaaatggagaacaaccgaagcccgcgaccaatccgacggcccaacagcaaaaagaattgagtgaccaagatgacattgctgcacaaataaacgacaaactttcggccgaattgaatgatttgaacgcgtctttagccaaatcgccgcagtcgcccgccgtcccacagcaacaatttttcaatcccatgctcactcatccgtcgcaacagcgtcaaattccttcaaattatggccaaagcgatgccatcaacggcggtcactccaccgggcatttc

SEQ ID NO: 87844 - DNA, 152 bp, Heterodera glycines
  unsure (1)..(152): unsure at all n locations
cctgatgggactcttacaatgaagtgatatgagaagcgcgancctatcttcaacttaaagaaggagaaagtgatcgcaagaggaggaatttgctgatcactcccttaaactggcaaatgccctccctccgtttccctcccccgcccctttcg

SEQ ID NO: 87845 - DNA, 321 bp, Heterodera glycines
cgacaaaagtgtgctgaagcgggtggatgtgaagcagttgcagctgtttctgcagggggccgtcatgccgacggttaacgccggtcttttggcctacgcggagacattcaccgcaccggcgcagcagaaacggtacggcaacaaaggactgctccgcctttggaatgcactgaagactttgctggacgaattggacgaggcgatgcgcgtcaacgaagcgacgatgggcaacgagcggcgcgagtatcagcaaatgctgcgcaacgcgtacgaaaacactgtggagaaactgaacagggcattcgcacgcggcagagagtc

SEQ ID NO: 87846 - DNA, 436 bp, Heterodera glycines
attattctcttccactcaattttacttttccttcaaaatgtcacttttttctccccttttctgttcttcatttttacttttgtcattctgcttttaatttgtgcttttttgcctcaaataagcgaagttgaaaatgaaattgccgaatttattcaccgtaaccctttggccattgaccaccgtatcgcactcgtccaactcattttcgaacaccaaaccgaactgattttggccaatgaacaaatctcattcccaaagaacatctctttagacgatctggcatttccctatgaaatgcttgtcagcaaaataacaagtgaaaattttgaagagttggcacagaatttgcggaaaaatgcactcaaattggcaaaagaaagcactggcaaattccattttctcactgaaaatcacttttatggccaatttatcaatt

SEQ ID NO: 87847 - DNA, 359 bp, Heterodera glycines
ttcccggctgatgtgcgccagcgcgtaaacaaattgaacgccagcagggaaagtcattcagcactaaatttgaagagatcatgaaatatgtggacactttgcctgaaggcacaaaatcggctgccaaaaacattttccattgaatttttcatggaaaaggaggggaggaaagaagtggaaaaagcagcatggattaatgaaagcaaggctaaacaatatttattaaatattttattttttggtaaaatatttccaatttttcatttccaataaatatttttgctttgttcttttcttccaatttacgcttaagcatgcacataataaggaaaaaaaaaaaaaaaaaaaaaaaaaaaaaa

SEQ ID NO: 87848 - DNA, 640 bp, Heterodera glycines
tcatccgaacgtggacacatttgcgtttatgggcaacccgcaaaaggactatctgatcgcacttgtggtcccaaatcgcaaaaacttgcaagcacttgctgaaaagaatgccgtcaatgagtcgagttgggaggcaatttgtgccaacaaagaaatggccaagcttctggaaaaggaactccaaaactttgttttttggaaattgcgcagggaggaaatcccgaggaaagtcattatctgtgcggagccgtggactgccgactcgggaatgctgaccgaagcactgaagttgaagcgcaagaacatcgagagaaaatttgcggaggaaatccgacagctttatgaggggaaatgattgggttgttaattcccggaggctatttcgcttcaatttgatctcgaacatcaaatcaagcagtttcattgtgccgtaattgccatcatcatgagctttgtacccccaattatacgcaattaatttttgttctgttttcactggtcattcttctgtcagtgcgcgtttatttattttttgatattcgttagggctcttgtcgagagaaatgtccccatttgtcgctattaattgatgtgtaatgtttgaatttgtattggaattgtacgatttcgtaaaagagta

SEQ ID NO: 87849 - DNA, 396 bp, Heterodera glycines
ccagttgggaggcaattttgtgccaacaaataaatggcctaacttctggaaaaggaactccaaaactttgtttcttggaaattgcgcagggacgaaatcccgaggaaagtcattatctgtgcggagccgtggactgccgactcgggaatgctgaccgaagcactgaatgttgaatcgcaagaacatcgagagaaaatttgcggaggaaatccgacagctttatgaggggaaatgattgggttgttaattcccggacgctgtttcgcttcaatttgatctcgaacatcatatctagcaggttcattgcgccgctattgccatcatcatgatctttgtacccccaattatacgcaattaatgtttgttctgtctacactggtcatgcttctgtcagtg

SEQ ID NO: 87850 - DNA, 296 bp, Heterodera glycines
ggatgggaatggcacccatgcccaaccgagggaaagtaaatgctctccatcctggactgcactcacacttccaaattccctgcgtattggtaatcaatctggctgttcacagaaccgatgcccaccactcatcgctggtcatatattgacaacagccatatgattactgccactatgggtgtaataaataagccttctcttatgccgaaacattgaaagaacccgaaccaggtcgtacacgcgcttcaaagaatatgctttcttaactaccactgcgcccggatggatgggaatag

SEQ ID NO: 87851 - DNA, 185 bp, Heterodera glycines
gaaataatcggaaagagacctttgggttaattgaatacccgagcatggccgcacttactaagtaccgtattctttgtgcgaatattggcaactactcattcccgacggagatctgtgcctctgcctttgtggtacatgaactcttgtgcatgcgcatgaacagggcgcctcgtgcccgttacgac

SEQ ID NO: 87852 - DNA, 455 bp, Heterodera glycines
tgggtgcatgagttcttcgtcttctgccgccccatcggacccgcagcaaaaaagcatttatgaattttcggccaaagacattgacggcaatgagaccagctttggcaaataccgtggcaaagtgctgttggtggtaacgtagcgtcgaactgcggcttcaccgactccaactacagtcagctgaagcagttgctggacaaatacaagtcgaagggactcgaaatcgcggccttcccgtgcaaccaattcaacaaccaggaatcgggctgcgccattgacatcaaagactttgtgaccaaaaagtacaacttcgagccggatctctacgacaaaattgacgtcaacgggcccaatgagcatccgatctacgcctatctgaagagcgtccaaggcggcatcctcggctttgatgcgatcaaatggaactttacccaagtttttgatcgataaaaacc

SEQ ID NO: 87853 - DNA, 506 bp, Heterodera glycines
ttccggctgatgtgcgccatcgcgtcaaacaaattgaacgcctgcaaggaaagtcatgcactacttaattcgaagacatcatgaaatctgtggacacatttgtctgaacagcacaatatccgctgccacaaacattctccattgaatttctactggaacaggaggggacgaaagaaccggaaaaagaacatggattaatgaacgctaagctaaaccatacttattaaacattgtattcattggcaaaatatttccaattgttcatttctcgtgcaattggtgcttttttctttgcttccaatttacgcttaagcatgcacctgactgggcatcctcgtcactgagctacacctaaaactggtcgtgtgggtggttaccactgctgacccactaatgaatgtgcaagcgccttctagggaaccatatgggatatctccccacgcctcggatgcataacagtgtccattctatatgtgccacctaaatagcttggcttatccatggcc

SEQ ID NO: 87854 - DNA, 684 bp, Heterodera glycines
  unsure (1)..(684): unsure at all n locations
cccaaattgtgctccgtctgttactctttgctgtcctcattttgaactgcttcgactgttgccatggatttcatcctaagtccagcacagttccaacgactacgaagtccagcacagttccaacgactacgacgaagtctcctccagctccaaaaaaaggaagtattcttgnataactcccaatttgggccaccattgtcatcgccgttttaattggcatggtcatcgcaattggcattgtttgctgcgcgtggtggtgctgccttcgtcaacgatatgttcgccgttctgcaactgatgggccctcctcgtcactgagcgacaccgaaaagtcaaagggcggcggatattcgtcgaagccgagcggattgatgtccaagctgcctttatggaagtcgtcgtcctcttcgaccaaaaccaaaatgccggacagtctcaaatcggacatacaaccaccaagggcatcatcatcaaaaacgaaagacaagtcttcgtcaacaatcccggacagcaaatatgccatgctgacgcataagcattgaacggaacggcgcggacggacggacgatgatggcattgatattgatgatatcggatggatttcatatttaattgctgtgttaatgatgcataactattgtattgttttagcctgccattgtcgatgctcacacattcatttcc

SEQ ID NO: 87855 - DNA, 400 bp, Heterodera glycines
ttgacgatggtgaaagaaagtggcaacgacactcttacccagcacaatggtaactgactgactggtcgatatctcgctacatctgtactaaatcgaccactaactaatcaggcttactaatactcatatattcacatctcgaatcggcatcttcgtcgagctccacagttccatatgtatgcacatacttctccatttatctgtgtcgtacaagcatactagcaccaacacaatatcgcctaactttctatttcaccctcatatggacagtcatgaaatataagaacaaaagccattttcacccacaaaaagtgccgatttgcacaataacagcttaactcacgcgtctgaaagcatatctatcgaaatgaatacaactgattttacaataaataatgaa

SEQ ID NO: 87856 - DNA, 712 bp, Heterodera glycines
  unsure (1)..(712): unsure at all n locations
acaaaaagcgtttcgggactgcacatcgtgggcgtcagcagcgcgatcggaaacaccttagtgaaactgttcaaacattgacgtggagatggaaatgccaactgagaccaaagaaagggagagggaaatgccggaagttgaaattggcggagaatgtttcgggacggcgaggggtgcggcgccagtggcaactaagacgacggagagcccccaaaagttgggcattcaaatgggcgaagaatggcgcaaccacgtgagatgcacccaattgtactggcccattgcttgctccttttgctttattcacccaattcagctatcaacattttttccaacccgagtaccataagaatttgtgtgaatcgcttttcaatgaatattcgcacgctttaacgaatcgaatttggaatacttttggcgactccgaatgccctgttctcaattacaacttcaatgccgaattcaatcaaagaactgttttctgcgcgtaataatgaaataattaattcagcaaatgatggcagtgatttatttgggcattttaccgcaagtgcaaccaaacaacttcgctatttggagactactgaattacggctggaattggtcaaaattcaacccgagttgagtcacagtttcatcgaatctcttattcaacttctacctgacccagaatgtcttgtaaatgttcaaatagtgcatcaaaacanaatgc

SEQ ID NO: 87857 - DNA, 716 bp, Heterodera glycines
ccaaccgtgcccaaaagatctgtccggagacagtcgttccggtgcctatctttttctgcctgatggtccggctaagcctttgtcggcggatggcaacagttttctggtcgtttctggccccgttcgacaatatgttcatgtaaaaggacccgtcgaagttggcattcgtcaccaaattgcgctggacgtccatgcggggcatttggccattctaaacaatgtcaatttggctaccgagtcggccgctgaccggggagacagggcacagcacgcgagcaaacatcgaattggccatgcgtctgcgagtgccgttcatgcgacaggacaattttttcaccgatttgaacggctttcagatgattcgacgaagaaggcagccgcaattgcccctgcaagcccatttctacccaatgccgggcgctgcgttcgttgaagacgcggacattcgcctttcgctgatgggccgtcaggcactcggagtggccaacttggagaaaggcgagatgcaggtgatgctggaccggcgacttgttcaggacgacgaccgtggccttggacagggcgtggaggacaatttgttgacggagagtcgcttacatcttctgctcgagcacttcgaccgcttctgctacactcctgcgtcttcttccgccgatgggacaatcgctcttcattcattggccgtccaccattcgtcacttcgtctccattatccg

SEQ ID NO: 87858 - DNA, 589 bp, Heterodera glycines
aaaatccttctgattgtgcttttggccgtcatctcattccgtctctcggcttctactggtgacaaaaaaaactgctaatgatgggagtggaaacaactcatcagctgggattggtacgaagatcaaaagaattgtccccgctggactgctcttcacttccctgtcgacgggtggggcggaagcgattgggcgaagcaatgctcacggaggaaatgccgccggattggtgccatcgcatgtgaccaatcgctcaatggctccaccacctcctcctgtgcaatttgaaatgggggcaaatcgattagaaaaaatgagggcacacctacacgaacttgctgagaaaatgccggtcaatgaatcgaagcgtctgtcaccgagtggacccgacccacatcatcattatggccatggatggatctaacggaggaagaaagaatggatgtttacttttcagattctattctatcctcttttattgattagttcttcaaaacaaatttctttcacaactttttaaactatttgttgctgtgaatctttttagataaatctaaacccccaaagtcagataactaaatttttaccgaat

SEQ ID NO: 87859 - DNA, 595 bp, Heterodera glycines
  unsure (1)..(595): unsure at all n locations
ttaaagatccgaaaaaatgccaacattttcaaatccttctgattgtgcttttggccgtcgtctcattccgtctctcggcttctactggtgacaaaaaaaactgctaatgatgggagtggaaacaactcatcagctgggattggtacgaagatcaaaagaattgtcaccgctggactgctcttcacttccctggcgacgggtggggcggaagcgattgggcgaagcaatgctcagggaggaaatgccgccggattggtgccatcgcatgtgaccaatcgctcaatggctccaccacctcctcctgtgcaatttgaaatgggggcaaatcgattagaaaaaatgagggcacacctacgcgaacttgctgagaaaatgccggtcaatgaatcgaagcgtctgtcaccgagtggacccgacccacatcatcattagggccatggatggatctaacggaggaagaaagaatggatgtttagttttcagattttattctatcctcttttatttattagtttttcaaaacaaatttcttccacaactttttaaactatttgttgttttgaatctttttagataaatctaaacccccaaaana

SEQ ID NO: 87860 - DNA, 528 bp, Heterodera glycines
  unsure (1)..(528): unsure at all n locations
attaggactgtgtcaacactttgaaagaagcatttctccgtgccatactttttcttctgtctgctacagaattcaatttaatttgttcatcgacgaagcaattgttccatttgaattggtcaacaacagaagcaatgaaacgatgacaatgagcaaacaaaatgccaattgggtgatgaagcgatgccaaattgggcaaatggttcagtgggaggacgaaaagccgaacaatttgaacaatgccggcattttttatttgagcggcaacagaaaacatcctggttggaacgactttaataatatctgcatttgtttgtgtggcgacaacaaatcctttgggcctttttctccaccagcggcgagtcaaagcggcgaaaaagatgagaaatgatcggctattttggagaatattgaatggacaaattggtctgctgatcacttttgatgctcatttttgcttgttaattttgatgtgtctttctgacgaaaaaattcatttcttccnnnccaaaaaaataataaaaaaaa

SEQ ID NO: 87861 - DNA, 196 bp, Heterodera glycines
agatcaaaataattgagaacactggactgttgttcactaccctggcgacggctggggctgaagcgattgggcgaagcaatgctcagggaagaaatgccgccagattggggccatcgtatgtgaccatttgatcaatggcgccgccacctcctactgtgcagtttgcaatgtgggcaaaacgggtgaaaaaaatgag

SEQ ID NO: 87862 - DNA, 570 bp, Heterodera glycines
  unsure (1)..(570): unsure at all n locations
tcaaaaactcgcaattgccaaaacagcagcgcaagtgaaagaaataaagtcaccagccaagccaatggttctaaaagcagtgccgccccaccaaatgcatttaatgaatgagaaagttaaactgctgtgtctccacccgcccatgctcgttcacttgcgaccgttccttacagtacaccgatggcagccgaccgtaactcactgccatcgtacacttcggatggcaccaatttggacatggcccatgagaatgatgattatcagaattattactacggaacggaagacagcagcagagaatttgatgcatcggcggaggaggaggatgaactgtatgaggagggggacggggcaatgagttggcagacggacgactacggtattggcattggacaggagtacggtcaccaatcggtggaagtgccaccaaagtcggtgatgctcgactgaagaacaccagcaggatttttgtaaaaacatatttctcagatttttgaacatttgcattttatattcgcttagaagctaattttttttatctagctctaattatgtaaaaattaatanttc

SEQ ID NO: 87863 - DNA, 695 bp, Heterodera glycines
tatccggtgttgctacatatgctccgctgaacccgaaggctaacagagagaagatgacccaaattatgttcgagacgttaacacgccggccatgtacgtggccattcaggccgtgctgtcgctgtacgcctctggccgtaccaccggtatcgtgttggactccggcgacggtgtcacccacaccgtgccaatctacgagggttacgcgctgccccatgctattctccgcttggacttggccggccgtgacctcactgactacctgatgaagatcctcactgagcgtggttactccttcacgaccaccgccgagcgtgagattgtccgtgacatcaaggagaagctgtgctacgtggccctcgacttcgagcaggaaatggccaccgccgcttcgtcctcatcgctggagaagagctatgagctgcccgacggccaagtgatcactgtcggaaacgagcgcttccgttgccctgaggcgttgttccagccatctttcctcggcatggagtcggctggcatccacgagacgtcgtacaactccatcatgaagtgcgacattgacatccgcaaagacttgtacgcgaacacggtgctgtccggcggctcgaccatgtacccgggcattgcggaccgtatgcagaaggagatcaccgcgctggcgccgtccacgatgaagatcaaaatcattgcgccgc

SEQ ID NO: 87864 - DNA, 652 bp, Heterodera glycines
taagcgggacaaaaattgaccttaaaatgcttcttctacgtcaactttgccttctgttgttcgctgtgttttatttgattgatgcgcgaactcaatccgtcgcggtgaaaggacgtctgctgtgtggtacggcaccggcacgaaatgttcgggttaaactgtacgatgaagacgctggtgtcgacccggatgaccaacttgatgccggatattctgacccaaatggcaactttcaactttctggccatacctcagagctgacgaacatcgacgttgtttttaaggtctaccacgactgtgacgatgggattaagcccggctcgcgcaagttgaagttcaaaattccgaattcatatgtcacggacagtgcgacgccaaagaaaacgtttgacatcggtgtgctcaacttggagactgtgttcaaggacgaggaacgcgagctgatcgtgaccatgaagaagaagcggagaagccaccgttaccaagactttttggacattttgccatgaaaaagtttcgagaaaatgacaaattgccaagaaaattattttcaatttaaaaatagaagcggtatttaaaatggaaatattgattattaaagttaaaataaattgtaaccatttaattttacaaaattaattgtgacgttata

SEQ ID NO: 87865 - DNA, 230 bp, Heterodera glycines
cgaagttgtcggatgaactggtggcgatggggctccatgctcatacggtcgtggacacctacacacacgcttgaagtgatgcacagtatggacaccattcatcgactacgaacattgaaattgccgccgagtgtctcttcaatgaaatgatgatccgtacgctttgcctccggaatgttctcatctccgccctgatgaatgatgacagggggcaaccggggatggaattg

SEQ ID NO: 87866 - DNA, 252 bp, Heterodera glycines
agcctactggatgccgcgggattctagccgacatggcaacgctcaaggtatgatagtgcctcctgataggtgccgtactttgtgactcggttctcaaggcgtaccaccaccgacatcgattggcaataaaccctgctggcgaacttgccgagttaaaatgagggcacacctacgccaacttcctgacgatgtgccggacgatgtatggcatcagtctgtctcaacttggacactgtgcacatcgtccatgag

SEQ ID NO: 87867 - DNA, 721 bp, Heterodera glycines
  unsure (1)..(721): unsure at all n locations
ccttttgtcccgcctaaatgccgcctattaattttttggcttcataaatatcggaagtgtttttcgaagaagaaattcgaggaatgcccaaattttgtcctcgctttttggaatggcttaacctcaacaaattggaccaaattctccgcctccgatgcaaaacgtttagctgctgcgattatgagccatttgaccaattggacgtccaattcaatttgaaacatctccaaacggaaattatggacaaagcgaacgggacgatcttctcggatgaactgctccaccttttgttcaatggaaatccgcacataaaagcatttagcactcgctgggtgatcaattgtggcgacgacttcaccgatcggctgattgagcatgccgccaaaggtttaaacgctgaaaaaatggtcccttcgattcgcttcgttccttcttttcaccgccaaagagaattgccaattccaaccaaaagtttgacggcgtcggagaaagtgcgactgatcagaagagaaacgaacgattggcgattgggagaatggcaaattgacaatttgcacaaagaaaacatcaaatttcgggtcgttttatacatttacaatgacgcggaaacgggggaagaagcgatcagccaattcagtatggacagagtccactgacanatgagggggaaaganatcagtatggacataattgtattcatcagtttattcacatacagtgt

SEQ ID NO: 87868 - DNA, 318 bp, Heterodera glycines
tgttaacaacttacatacacaattggcctgtgatgcccaaggcgcatgattacatctgagaaggcaattccactaccgatgtactccaagaaaatttaggtacgctgaacagtgcttcatattgtcaaattgtcaggtcaagacttgctcgaattgtacacagtgatacaattatgcttaattccggacaacactgacatcttaattggggattattacggaagcactaatcataatttatacataataaatgagccgcatcatgtcttggaattgacatttgtttatttgacactattgcaaaactcggagaatgaa

SEQ ID NO: 87869 - DNA, 433 bp, Heterodera glycines
  unsure (1)..(433): unsure at all n locations
cggagtgcagaccaaagggaaccctgcccaatacgtggaatatagggacatgcgcgtgacgccaaccgacgaccaacagcaaatggaagcaatgatcgccaatcggtgcaaagaggcgggcccggacgacacttacgagcacggcccaaagggaatgngctaagagctgacccccaccgacgcctcatgcccgaggaggcacgcgcattggtcggcgctaagcgaacagaaatgcgctttttccaaggagattttcatcggtggaacggacacgcatcgtctgagagagaaaggcatgccggcgattggcaagtcaccgacgaagaacacgcccattctgttgcacgaccacaacgaatttcgcaacgaaggcggttaactgcgcggagcgaaaatgcacaccaaaatgatcccacggagcgccaaaccgcca

SEQ ID NO: 87870 - DNA, 575 bp, Heterodera glycines
caaagcgcaacaatgtcttctgacgaatcgacgacttcttctgccagtgttgtgagcgttccgctgcgtgaagtgcccatcaaagacttcaaggacgtgcttccggtgctgcagaaaacgctcaacgaattggaacatccgttcatcaagaaggccgaagaaataagcggaatggaacgtgagaagctcttctacatcacttcctctcttgtgctgctcgtgttgatgctctgccctggcaatatgcttctctctactcttatcactgtggcctacccaatgtacgcgagcttgttgaccctcaacactcaaaacacatcggaatacacccagtggctcgtttattggtgcgtgttcgccgagttttgccagttcgactatctctttggctctatcaatggccttctgctgctgtacgtgcctctgaagaccgtctttctgctctacttggcccttccgcaaacttatggcgctcacaacttgtacgtgaagcatatccgcaaagtgcttgccgtgacgaacgtattggacaagatgaagaagatgttctgatcgagcagataatgtatcactgt

SEQ ID NO: 87871 - DNA, 427 bp, Heterodera glycines
  unsure (1)..(427): unsure at all n locations
gcacgcccccggctcccanacacccccaaacaacggccccggcgcgcacagcacgnaggagaggcaanacgagaagaaacgccgttggtgtccacacaggcacggcgagggcgccccccccacacaggacgggtacgggtcnacacacaantctcccggaggagggaccgcacatcgcccgagagacgctcgccgcctacgagtgcaagactatggacccccccgaaccgccttataccgacgaggacacgggtcccacagaagcgacgggccaccctacgacggtcacgctctggacaatcatagcgaaggagcgcacggagacacacatgaggggcgcgggcaccgcaccgggcgaagcgccgccctcttacaaggcgagagcggcgcgaccgtcgggacaccagccggacagcgaggaacaacc

SEQ ID NO: 87872 - DNA, 811 bp, Heterodera glycines
  unsure (1)..(811): unsure at all n locations
ggaggtggaacccatcatcggcccggcgtggttgagctgatgctgaagggtgccattgaccgtgtgttgggaatgtgcgttggctatttggacaacggagtcgcccatcggccgttggacgtacaacggagagaacacattttgcacttggccactggacttggccaatccgggctcagggttattgcaatggcttgtggcaaagacatgaactcattgtattatgttggtttagtcggcatcatggacccaccacggcctggttgccgacaatccatcgagacggtacagaatgccggagtctccgtcaaaatggtcaccggcgatgcgttggaaacagcgattagcattggcactcgactaaacatcttcaactccggggacaacactctttcgggtgctcaaattgacgaactcacggacatggatttggaaagattaattcgcggagtgtccattttttaccgttcgtcgccaaggcacaaacttcgcattgttaaggcactgcaaaatatcggagaagtcgtcgcgatgacgggcgatggggtcaacgatgcggtggccttgaaaaagtcggacattggcgtcgccatgggcaatggcactgacgtgtccaaggaggcagccgacatggtgttgatcaacgacgatttcagcacgatcaaagcggccattganggaggggaaagggcatctaccacaacatcaccaacttcgtaaagttccaacttagcacaagtgtttcngccatttcgctgattgccatctccaccctcttccattttgaaaatccgctgaacgcaatgcanat

SEQ ID NO: 87873 - DNA, 637 bp, Heterodera glycines
agaacggaaggtgatacgagttccgtaatgtttcggtgcgcgactcttcttcgagggacggggtcgaaatggatggcactttttcgttgggtggcatccttcggcagagagaatgcggcggattctttggcattggcgggggccgcgagggcaatttccaatcgctgatgctcgaacttttgcatacctgcggacgaaaaaaggcaatgcttttgaaagtgagattaccaaaattggacatttcggcgataaatgcgcgagggaaaatggcagaattgcgcggcatttcgatcgatttggacatcagcaagggcgggtgggacatgcaatgggtggactatgagaaggttcgaccaaaacagacggtgccggaacagccgcaagacgaggacggcacttttggggggaggcgaacgatggagacgcaaaccgagccaccagaacagaaagcggcacagcgaggagaaaaagccgaggaaaagcccaggggtcagtggcaagaggataatcgaccgcacgcagtgatttgactgtttgatcggttagccgacatttgcggaccattatttatgggttgaactgtctaaaaaacaaaaaaataaataaatttataaaaaaaaaaaaaaaaaaaaaaaaa

SEQ ID NO: 87874 - DNA, 738 bp, Heterodera glycines
gtggagctgattccgtccgtctccacgaggaagtgacttttgaacttttgtctgtgaatgacgaactcaacaccacctttcgaaaagtacgaccgatgcatggccaattacaacgcaaaaggcgtcgacctttcgatggtggccagcggaagtgggacaaagcgacaaaaggagggggaggacgaactgttgatagacttgggaggagcagcggatggcatggggacgaagggaattgcggacaaaatggcacaaatcgacattcaccgcgacagaaaccaacgcgaagggaaaggcgccgggatgagcaacgaggcatacgtccacgaccaggccgagttgcccatgcgttcggttgtctataacaaaacggaaatggcggacgaaaagaacggcgaggaagcgccggaattgccaaagaaaaagccattggtcgacgacgggctctgacgattttagttcaaccaaagccccggaggcaatttgttggcgacatttttatactctttggacagagttccccccccccccctccatccgtcccataattttccaatttttaacttaaaatgcacgctctctcctccctttatattgctgcagctttgtgataactaaatattgacacgatattttactgtactgcttgtgtagcgattcgaatgcatcaaatccaccgtatctctgttctatttgttttgcagctaactttggaaatttcaatagatgtttgattag

SEQ ID NO: 87875 - DNA, 610 bp, Heterodera glycines
  unsure (1)..(610): unsure at all n locations
taaaagatccgaaaaaatgccaacattttaaaatccttctgattgtgcttttggccgtcgtctcattccgtctctcggcttctactggtgacaaaaaaactgctaatgatgggagtggaaacaactcatcagctgggattggtacgaagatcaaaagaattgtcaccgctggactgctcttcacttccctggcgacgggtggggcggaagcgattgggcgaagcaatgctcagggaggaaatgccgccggattggtgccatcgcatgtgaccaatcgctcaatggctccaccacctcctcctgtgcaatttgaaatgggggcaaatcgattagaaaaaatgagggcacacctacgcgaacttgctgagaaaatgccggtcaatgaatcgaagcgtctgtcaccgagtggacccgaccctcatcatcattagggccatggatggatctaacggaggaagaaagaatggatgcttagttttcagattttattctatcctcttttatttattagtttttcaaaacaaatttcttccacaactttttaaactatttgttgttttgaatctttttagataaatctaaacccctnnnnnaaaaaanannnnnaaaa

SEQ ID NO: 87876 - DNA, 699 bp, Heterodera glycines
cagttgttggaggagtgcggcggatggaccgagccaaatcgttacaagatttatttttcctaccgaaacatcgaacatgaacatatttcgcatgaaaatgttgccgagttggcttcaggctcaaccatcggcaattattttggttccatcgaagacgtagagaacattagtgccaccgttgtacgacccaaatttcacacggtccaaacgcagacggaggacactaacaacaacgaaatgttatcaaacagcagtttttgcgccgagccgggtgcggacaacgacatggacggctccaagacggaggggatgacggcgcaagaattgcgcatgattgactacgagagggacattgaacggctggaaatccaatgctcaaagcagcacgaacaactgatcattctgagcgaacgtgccaagcacgtggaactgttggaggaacaaaaggtcgacctgcaaacgcagacggacattttgcggagacaaaatgcgcaactcattcgtgaccatgaggagctgaagtgtttgtttggcggcggttccatctcacgcaacggtttggaggagttggtgcgcagtgccggccaattgcgcgaaaagacatagagctggagaccaaactgaaactgttggactcgcagcagcaaccacgcgacgcgccaaccgtcggcgagtcgcgacgaattgcgcaactgttca

SEQ ID NO: 87877 - DNA, 234 bp, Heterodera glycines
actcactaactctgccccctgtcattagttgtgtgtgtttctctgcttcttaatgcgtttggatgatgactcaaactgtaggccaaccaacttttgatcatgatcatgattttacgccccccatcaatcacaccactaattttacattgtattctctttttcgtttatacataattactgggagacaaaaaaaaacaataatccacactaattacaaatcaaaaacaaaaaaaa

SEQ ID NO: 87878 - DNA, 629 bp, Heterodera glycines
  unsure (1)..(629): unsure at all n locations
gacgaagacgtacagcagcaacaagacgaagacgtacagcagccacagcaacaacaaaacatggaggaggaggaagagggacagaaaagtgacgacggaaaagcggaggaggggcagcagacgaaacgccaaattggcatggacgacgacgaagtggtggcggtgctgggccacgaacttggccattggaagttgggccataccatgctgttgttgacttgcactgaggtcaacttgttgctgatgctggtcatcttctcgctgttccatcaacaggagagtcttttcaccgcttttggcttcccacccgcgcaacaacagcccattctgatcggactgttgatcatcggccgatttgtcatggccccctacaccgaacttttgtccgttttgatgaatgtgatcacgcgaaagtgcgagttttcggccgaccgcttctccgcacagctgggccatgcatcgcaactgtgcagcggactgaaaaaaatgtgtaaagacaatctgtcactgcccattgacgacgtgctctactcgtggtgtaaccattcgcatccgccaattcctgagcgaattgaggcgttgaagaagtacgaatagggcgacgttgtttgatgaatgaagcancgaga

SEQ ID NO: 87879 - DNA, 725 bp, Heterodera glycines
aaaaaggcggaaaattacctgttgaagcgaaagtctgcaaaaagttcttcctcaaagaatcggaaaaggccaaaagttacgcacagtcataaggcattggtgccccaggcaaaagcgaatggcaattccatcgatggcacaaacaccgaaaaaaggggttccgcctgtgcatcttcaacagcagcagcgaagaatgatggatccattcctatggaggattttgtactgccggcacagattaaagaaatcgtgccgaagacagacgctgcggaagcgccccttttaatcagcgaagtggacgacgggggaacggcaatcgaagaaggcccaaagaatgatgggccatcggagggaagtggggcggacgagacggaggagaagcgcaggtcggcacctcctcagctgaccaaagagtgtctgccgacgatggtcacgggccgttacagggaggacttgatcttttacacgccgaaggcacgggccaaaatcagagagaaggaaatgcaacgactctcttcaggttcttcgcgtcgtaaacagattttttcctccttggaactgacggaaagtgatgcaatttcgttggttggttcttcgacttcgagtagcaaagaccagcaaaagatggactccgatgacaaatcagtgccacctccacccaagccaaaagaccttggccaagttcccgtctatctgacggaacaccaaagggatttgttttttaa

SEQ ID NO: 87880 - DNA, 312 bp, Heterodera glycines
  unsure (1)..(312): unsure at all n locations
ttcacgaagaaattctgcgagatctgtcggagctggattgacttatttgaggataaaattcaagtggaaaagttgatgatgcacaagcgttgcttcgtttgcgcaatttgcgactgtccgcttgagccgggcaactgttcccgagatgacgggatcatctactgccaattcatgtgcaacgaccgtgtgcctgtgcggttttgttctgcccatatgatgttgggatcgggcgaaaaatgccaattgttgaaggaaaaatggatgaaggaaaatgaggaaaagcaggaaatatgacacaacanatgattaatg

SEQ ID NO: 87881 - DNA, 637 bp, Heterodera glycines
  unsure (1)..(637): unsure at all n locations
tgcatgagttcttcgtcttctgccgccccatcggacccgcagcaaaaaagcatttatgaattttcggccaaagacattgacggcaatgagaccagctttggcaaataccgtggcaaagtgctgttggtggtcaacgtagcgtcgaactgcggcttcaccgactccaactacagtcagctgaagcagttgctggacaaatacaagtcgaagggactcgaaatcgcggccttcccgtgcaaccaattcaacaaccaggaatcgggctgcgccattgacatcaaagactttgtgaccaaaaagtacaacttcgagccggatctctacgacaaaattgacgtcaacgggcccaatgagcatccgatctacgcctatctgaagagcgtccaaggcggcatcctcggctttgatgcgatcaaatggaactttaccaagtttttgatcgataaaaacggcaaagtggtggagcgttatgcgccgaccaaagaaccgaagaacattgagaaggaaattgagaaattgctggaggcctgatttgatgaaaaaaacttgagcttttcagacttatatgcccatagaataatttgtaatctaaataaaattcttatgctcannnnanaaaannnaannnnaaaanana

SEQ ID NO: 87882 - DNA, 119 bp, Heterodera glycines
  unsure (1)..(119): unsure at all n locations
gcaattggaatcttttccgcacttcatttctttttattttatcccaatttttagttttatttatttttaaatagcgcataaaaaatgacgacaaattgggagaaacttanngaaaggaa

SEQ ID NO: 87883 - DNA, 629 bp, Heterodera glycines
  unsure (1)..(629): unsure at all n locations
gtgatctcgcctttggtgacatgcgctactctgatacatacattgcgattagttattggcttgccattggcttggccattgcctcgttgttttatttccgtatgaaaatgccaaacgcaccgaggccaatcaaagtcaatttgattttccccgctatctttctgctcggctgtgtcgctttggtggttattccactcgttggcaagccaaaagacacggcaattggaattgcgattatgctcacttcggtgcccgtttacctcgttttcatttgttggaaggaaaggccttcctttttaacaaagcgtccgcgtccattaccatcttttgccagaagcttttcttagtttcgaatgaagcagaaaaatagacttacaaatgacagtttttatatttgtgattagtgactgaattttgcattttaattagagagtttttcaggtggggtcactaattacaatgttatttattactttaattgttgactttcgtattcttttcttttactttttttttgttgaaatgacttttttgtaaatttttaattgtgaatgttatttttgcctaatttgctaaagttaatgcaatacaataaaatgattaccgcnnnnnanaaaannnnnaaaaaa

SEQ ID NO: 87884 - DNA, 442 bp, Heterodera glycines
ggagaaggaacggctgagaaaggatcgcacgacttgccttgaatcacagtccagggacttttcatgcgttttgaccgcttccgaaggatattcaagtgcgagaaaatcaagccaaaagccatccccagcatgacttctcactttcttcttaactgagttttcgcgggttcaaaagccgctaatgccgggcgggtacagtcgctacgaccaggagattttccagaaagagacggtggccgactttgaaattgaaaccgatctgagctttcacggaaatgctgcgctgaaccaacgcattggcgctgctcaccctcaaaatacgccaactgcgctaacatcgaacggcgtccaaaaggcggacccacgacgacccatcaccgctggagttgctccgtccgtcatgcgacaacaacacggcccgggccaaaaacgtgcgtcacgc

SEQ ID NO: 87885 - DNA, 660 bp, Heterodera glycines
tagaccgggaaaaggacgcacaaattacactttgggtcgacaaatacgcgccgagcacctttctggatttgttgaccaaagatgagacaaatcgaatcgtgctgctatggctccgtctttgggatgaatgtgtttttgagaaaagaggaggcaaaaaatgggaggggaaccaccgacgcattttccagcggaacaatgccaatgcgacgtctctgtgggacaatttggaggagagggaccgaacacttcgaaatgtaacggccaaagggcactgacaaccgaatgccaaaacaaaaaatcttggcactttttgggaacgtcgttggcccgcgtggcggcggagcaggccggctaccggccggtgatcataccgatcagtgaactgcaaaacatggcggagctgaagtcgcgtcttgaaaatgccaccgattgcacgtccattgacgcgccttccacaatttgtccgtctccgccgcttcgacaggtgaagcaccgccaccacacgtcggcactcggccgtgctgtttcattgtggacgcggtggaacaagcgtcgccggaaatggttcaattcctttgttcatgggtccgtcgttcccgcgcttcctccgtcgtctgtcggtgtcccgtcatttgcacttgcgccttccttttgcgtgcg

SEQ ID NO: 87886 - DNA, 616 bp, Heterodera glycines
  unsure (1)..(616): unsure at all n locations
taaaagatccgaaaaaatgccaacattttaaaatccttctgattgtgcttttggccgtcgtctcattccgtctctcggcttctactggtgacaaaaaaactgctaatgatgggagtggaaacaactcatcagctgggattggtacgaagatcaaaagaattgtcaccgctggactgctcttcacttccctggcgacgggtggggcggaagcgattgggcgaagcaatgctcagggaggaaatgccgccggattggtgccatcgcatgtgaccaatcgctcaatggctccaccacctcctcctgtgcaatttgaaatgggggcaaatcgattagaaaaaatgagggcacacctacgcgaacttgctgagaaaatgccggtcaatgaatcgaagcgtccgtcaccgagtggacccgaccctcatcatcattagggccatggatggatctaacggaggaagaaagaatggatgcttagttttcagattttattctatcctcttttatttattagtttttcaaaacaaatttcttccacaactttttaaactatttgttgttttgaatctttttagataaatctaaacccctaattnnnaaaaaaaaananaaaanaaaa

SEQ ID NO: 87887 - DNA, 460 bp, Heterodera glycines
cgccttaactccttcaacaatcagaccagcaccgatttccctggccttccgaccgttcccccaccaattctttagccttacggggctccgcccgggtgggccccgccgcctccatcccaacaaaaggtccgcttgctttcagccttattgtggcgcttcccaattgtcgcttcattcccgtgaacagttcccaattctcagcggtgcttcttcctccacagcccaacaacaacaaaataatatttggggacaaaaagcgacgactgatttgtttaaaaacaaacccgagcaattgccgacgaaaaaagaggagccaaagcgatcaaaagtcatttcgcccccggacatttggcctgaaggaatgccagagcaactgaaggcgcgggagttgggattgcccgacccgcatccgattgtgccgccgcattggctaaatccacccaaaaaaaaaaaaaaaaaa

SEQ ID NO: 87888 - DNA, 594 bp, Heterodera glycines
tctcgtctttcgtctacctaacaagttaacatgtacatgaacagcatgggctctcgtggtgcgtcatccgctgctgttgttgcttctgcagcagcattgtgcctattttcggcaatggcagtggtggtgtacggtgccgaaagcgctgggcctaaagcagaccaggccatggctgccaagcagttcaacccgtccgcatttccggccatgccaccagagcttgagaaaatcctgccagccgatgttgtgcaaaagttgaaagctgtccatgccgatatgtcgttgaacatcatgcagaaacaagacaagattgaccgtatcatgagctccttgccgggagaggttttggaccaaatcccggccccgcccggctttgaacgtctccccgacgatgtgaagaaccgtctgaagcagatcaatcgccaaaccaacaaagcatgggccgacaagcaaaaggaactgcaggagtatgtcaagacattgccgcaggaacaacgtgccattctgatgatgggcccaatgggaggttcgccgccgccaccgcccagctttggccggcgccgatgaagcagtgcttatgtgcatatatgttgc

SEQ ID NO: 87889 - DNA, 359 bp, Heterodera glycines
ctcaccgcttatggaaccaccgttataggacccaaaaattgagcggactttcaacgaactttttgagcgagacgtggctggtgttctctttgtcggcactggcaccgctgccaatgcgttgtcaatggctcatgtgaatcgcgcgggtggcatcattttcgcgcataggcatgcccatctgattgaggacgagtgcggcgcgcccgaatattttacgggcggcgccaggttggtcggcgtaagcggcgccgagggacgcattgacccggaagcattaaaggaggcaatccaacgctctccgccaaatcccgtttcaatgcacactggccgccctatggctgtgcccatcacccaaagca

SEQ ID NO: 87890 - DNA, 458 bp, Heterodera glycines
tggaggaagttctccgctctctgatgatgccctttacggcggaaggacatcagaatgtgcaccatgatgcacgccctgagcactatctcgtacaagatattgtgcacacgcggactaatagcctttaccctgtggccgacggctaaccgattctttattgcacaacccggccactaattgggagcgtggcgttggcttccaatccccgtggccctgagatgcgcacaaaaaggagggggacactggcggctaggggaagaatcactgaccggtgcccactgaccgatggatgatgaaatgaatggcacggtactcacacgatctttcacatttgtgacctaatttatgcgctttccgctccaccacgatgtataaaattatggtggctctacacagttagggctctcatgatgatgttcttctttgatatagaatgtggataaacgacatactcctcc

SEQ ID NO: 87891 - DNA, 628 bp, Heterodera glycines
  unsure (1)..(628): unsure at all n locations
gccgtttttgcccctgacatggaaaacattccgcagcagaatcatcagctgtgcaacctcatggtttgtgagtcggacttaaacgacggaattgccgagagggcggcagagccgacgactgactttgacgctgtacggatgacttatcggcacgaggagctgcaatatgagccgttggtggtggtgtcatacgaagagacggttgccctcgggacgaccgccgtacgtcctcatcccggctttcggtcgttgtgccgggaacgatccaccgaccacattgaggcggctgcaatggtggcggtggagggccacggactgcaaagctttgtgcctggtcatgcgggacagtttgcggtagacgcttcaaacaccgagttggcctgcccaaaggcgttgctcgtcggcgttgtcacttctcatggaccggcggacaaagtgacggctgagcatgtgggcggtggctgataccaggtatgctacacggtgcaagacgacacggaagcgttggtgtttgtcaaatatggcgaaaacaatgtggacggcagcccgtttagcgttcgtncgatgcgtttccgcaacaatcacaatgacgacgctgtcttggcggaaatgcgaacagacgatgtta

SEQ ID NO: 87892 - DNA, 704 bp, Heterodera glycines
  unsure (1)..(704): unsure at all n locations
gctaacctgattgtgccggacccgtggatggtgcagccggtgcgcgcggtgcacgacttggacaacatccgggtggcatcggcctccaggacattgttgcggtgtttcaacttcggcacattttgctggacggccattgttttgaggacccatcgggcaatccgccgcgtggactccaatttgtgctgggcacgcgcgttgagccggcactgttcgacaccattgtgatggccaacctgggctacttccagctcaaggccgggccaggtgcatggattctccgtcttcgggatggccgttcaaagcaaatctacgcgctcaagagcagcgtcgacgcggaaaacattggcatttttggacagacagaagcgggtgccaacggaggggagggagggggcgaaggcgatgtggaggagcttcatgtgctggtggacagtttctccggccgtacaattcgtgtacgggtcgaaaaacggaagggcatggagcggaagagtttgctaagcgaggaaaaggaccaaaagcagcaacaggcgacgggtgccgaagacgggacggatgccgtcgacgaacttgacgaggaggaggcggaggaggacnaanacaactccatttggtcaaatttggcgccgaaaaaagtcgtcaaaaaaattgtccagcaaattgatgggcaccggtcaatcgtacgatcggattaacatctt

SEQ ID NO: 87893 - DNA, 465 bp, Heterodera glycines
  unsure (1)..(465): unsure at all n locations
gatttggtactttccgacgcgccctcaagaatcggaacggatggaaaaggaaaggcaaatgttggcgggcgagcgcggagtgtgcgccgcgtgctgcgacttttgctgcggcggctccgccgtcctcctttggctcgtactcactttggtcgcgctcggattcctaagcttccttctcatcgccatttactttctttgaaattgaaataccaaatgcaatttaatcgccagcagaagaaatgcagtaaatacttcacttcaattttcatttccgattggacaatcaaacgcaaattgaactttttttccaataagaattataattactattttcgtttgttgaattatattcgaattttaatcaattttaaaatgacaaatccactcgttttcaaaatatttatattttgtttccgataaacatatgtaacatcnaaaaaaaaaaaaaaaaaaaaaaaaaaaaaa

SEQ ID NO: 87894 - DNA, 114 bp, Heterodera glycines
gactaggggcgtggatgataactctcttctatgaataatttctgactctctccggacaagtgggactacctgaacaaggcccccgtggccccctaattacgtagtgccggacac

SEQ ID NO: 87895 - DNA, 742 bp, Heterodera glycines
gcaatgtgggcggatgatgttgaggagtttttgcgctttaaatatgatgtttacgaggatttgcatcatccatcttccgctgcctcaactcttcttcaaatgctttgcaaacgccaaggaatcatggactctctgttggtatttatcattgagaatttgtcttcaacttccgacgttcgtcaagccgacggtgcccttcatatggtcgcgattgtttcctctcagttgcttaaactcaaaaaatacagaaaagacgtcgaaaaattgttggatgctcatgtgattccgcgcactgcacatcaaaatcgttttgtgcgtttgcgtgcctgttatgtgcttcactatgcctccgaaacgccattcaaaaactcgagaattttggaccgtgcgattcattcattggtaaaatgcctaaaggacgataccgaattgccggtgcgagttcaagctgcaattgccatacaatcactgatcaatgatcactcgcaaaaagggacagtggtccaaattgttcgccctcatatctccgatttgctcataaatgtgttgaaattggtcaaggagactcgcgtggaagatttgcctgctgttgttgacgcactcattgaaaactttgaggaggacgtcattccaattgcctacgacgttaccgttcaattggtacaaacattccatgcaatggttgttggtcaagaagatggaaatgaagaggaccgaattgctgaggattacagcgttgggg

SEQ ID NO: 87896 - DNA, 354 bp, Heterodera glycines
acggcctggcttcggttcccgcaggtggtaaactcaaacgcaggagagatggaggaaagcgcgaggcccccagccccaaatcgtaacaggaggaagagcacagcgaagtgaaagactgtttcaggtgctgctgcttccggaggcgtcgtagaaaagttccccagcagaatgtgaaatgacctttgacttttaattgaattctttgttctttataacccctatcaaataattcatttgatgattatcacacatattttatatatatttctctcctattccgtattccaatgggtgtctgtacgtgttgattggttggcattaaaatttcaaaaaaaaaaaaaaaaaaaaaaaaaa

SEQ ID NO: 87897 - DNA, 608 bp, Heterodera glycines
  unsure (1)..(608): unsure at all n locations
caattccgtcttctccgactgttccattctcaaaagcgtcgtaccataacgtcacacacatcataaccctcatgaccactccagcaaacgcggcgagggcccggagtgccaaggcgaagctgcgcgatgccaagcggaggagggcggcagttggacgcgcaggatacacaagaaaagcgcagcggggcgagcgatgtgccatttgtatgaccaacgtgagcgccatcacgcggacgacgctcggctgcacccatccgttccatcgccgctgcttgtatcgctggatccgctaccacaccaattgccccgtgtgccgctacaacttcgcccgcaccattccgcgcggtgagcgtaaccaaccgctgtaagatgccatgtgttgtgatcgccgtacgatgtcatttgtgtgatcatatttgtatcccattgttcggttatgcgtatgtatttgtacaatggaatgtatgttcttatatgtactctgtatgtacagtatgtataatactcgtcagtaaaatactctccttgttcttnaaaaaaaaaaaaaaaaaaaaaaaaaaaaaaaaaaaaaaaaaaaaaaacccaaaaaaaaaaaaaaaaaaaaaaaa

SEQ ID NO: 87898 - DNA, 645 bp, Heterodera glycines
ggcaaaacttcgccgttacgccccatcgccgctctgatcgttatatgtgtgcctatggcgtcggttgcgccattccgtggctaatttccagtgaaattttccccaccaaatttcgcgctgctgctgtgactgtcgctgttacggtcgcttggtcattgtcttttgtcgtctccacgtgctatttgccattccaacaaattgtcggcacttccttcagtttcgtccctttcattttggtcagtgccggtggcgctgtgttcgtttattgtttgttgcctgaaacacgcggtaagcgagcgacggacattgtgcgcgaaattcgccaacgagtgaagtcaatttcgcacggccaatcgccgtttgcggaagggtcggcggaagcggcgacgacgacggcacaaccaaacggacaaatgagcgaactgacggcactgctgaggttacagcgtcaaaaaacacttcaaaaacagcagcaaaagaacagttggcacgacggatacatgagtatggataataatgcttaacattgttgacgtggatgagaaagttttgcggaggaaaagcaattgtaaaaaataatcgaaatccgggccatgtacaaatttaatgtttttttattagtttactgtttggattatttttgct

SEQ ID NO: 87899 - DNA, 717 bp, Heterodera glycines
  unsure (1)..(717): unsure at all n locations
ttaatgctcgggtgaaggagtaatggttgatgaaaaggaccgatgtaaaaaatgtgttggaaggaaaacggtgcaggaacaaaagataatcgaagtgaaaatcactccgggaatgcgcgataatcaaaagattgtcttctacggagagggggaccaggagcctgggattgaaccgggggacgttgttttggtcatcaaaacgaagtcacacgaacaattcgagcgaaagggcgacgatctcttcatgaaaaaaacggtaagtctcgcagacgcgctttgcggtttcactacgaccattaaacatctcgacggaaggcaaattaccctcaccacgatgcccggcgatattataaagccagaatccatccgaggagccatccaagaaggaatgcccaagcccaattcaccagagcgcgggaatctttacataatctttgaagtcaaatttccaaagaaacattttctggactccgagagcaaatacaataaattgctttctctgctgcctcctcgtccggatcagcctgngattgctccgaattcggaagtggaggaagtgacgctgaccgaattcgacccgcgccgctatgaccgcagttcgggcggcggtggaggtcgtgaggcgtaccatgacgacagcagcgacgacgaagtgccgacggggccgggcggggcacagcacgtgcagtgtcagcagcagtgatctgagagagcgaa

SEQ ID NO: 87900 - DNA, 793 bp, Heterodera glycines
  unsure (1)..(793): unsure at all n locations
acattttttttcctttctatccttaattttgaaaatttgaattgattgaaaataatcgtgtccattcattcccgcttttcccattaaaatgtcccaatttggcccggcattcgctgtcaatgccaacaatccgtacgctcacttcaaatgctgctgtgcaacatttaatatcaaagaccatgcccagttttgcggtgtgctcagtttcgcgctgttcctctgcctcgtgctcatttccatgatgcttttcgggtcgctttctctgttttacattttcgttggtgtcgtcgtttacattcttttgatgaaaactctctttggcgtcgtcaacaaattgtcccttctcttttacatctttttcgaggccattcaaattggcttttacttggctttgatgctttacataattgtaccgttgctttttcttgaaattccccgtcgcaactgtcggaatgttgagatcaacagtgaaatttgcgacgaacccagaaatcgctccgaagattacgtggaattgcttttgtttgtctcccttttggcctcaatcaaactgcactttgccagagtgtttgcccatttctacagatatttgacttggaatgagcagtgttcggtgcatcgagctcaatacataaacggacgaggcattcacatcaccatggatcagccccaattcgctgcttcgttttccccttattacggatgggacactcacaccgtanagggatgcgacagaaggggacaacagaatgagacaaacaatcctaatcaattgcccataacggaactgccg

SEQ ID NO: 87901 - DNA, 716 bp, Heterodera glycines
  unsure (1)..(716): unsure at all n locations
cgttcccagcgtcgggtgatcattgtcagcactgttcggaacaacgaaaaggagggcgatcggatttcntgatggtcggacacagcgtttcaacacaataatcactcgtgcggaagagcttttgatcatcgtcggaaatgccaaagtgatgatgagggattcgtcttggaaggagatgatctattattgccgcaaaaacggtgccacagttgacatgccgtctgaagcggagcttttcccatcgggccaatttcaaaatgatgtgctgacggacagtgacaagagcagcagcagtagcaacagcgaagttgatgagaaggagcgaactgaccaacttgtgaagaagggcacgtcgagtgccgccgctgctgaacaacagaatctcagggccaaggcatcttccgccgaggaagaggatgaagacgattcgagtgttgctggggagacaacgacggaagacgatgacgaggaggaagacgacgaggatgaggacgactttgacgaatcctcttcctctggagatggggacgaatttttgacggacacagacgaggaggaggagcagcactgactgaagggggcccaccgacgggcgtggatatggacaattagcgctttttatggtgatttggttttttgtatgtttcgtctgagctttatcctttatttgagtgcatttcctccgttttgttttccccccttctccgtttgcttat

SEQ ID NO: 87902 - DNA, 319 bp, Heterodera glycines
tccataagtctcgcaataccgtctgactgagaataagaacatcgcgcattcggcagcacatcgtggactcgggtttttcacggtggggacacgcctctgaaagacccggccttcacccccaacataatgaacgggacatcggctgtgttggcccgccacggaaggaaatgcatcccctgagcgaacaaattccgatcaagagggcacagctgcgccaattccaaccttcacaaggtccggaagaggcgtggtcgcacctgggcataatgccgacaatgagggaggaactgtggaacaacccgatgacctccatttacat

SEQ ID NO: 87903 - DNA, 292 bp, Heterodera glycines
ccaaaattggtgaatccggacgaattgaccaaacggacgggcgccctctattataagttggatttggaagaccaagtggcattatcaaaacgaattgcaattatgaaattggagcgcaacttcaccaaggaggacacgtacacattggacgcacagacaacgaacgattttaaggaaaagatcgcagaacttttcgaagagacggaaagtgacgaggatcaagcacggatggttttggaagggtcggcatattacgacgtcgaagccaaagacggagtttggatacgcatct

SEQ ID NO: 87904 - DNA, 491 bp, Heterodera glycines
  unsure (1)..(491): unsure at all n locations
atataaaaatgtttcctaaccaatttggaaattgctcaaaatggattgtctntcattgtcagggtggagattgggaccggaagaatcggctccgctcctacgaggctctctacaaaatggcaattcgcgaaatgcgcggggcggcgctactctttttgttggtcgtttccacctttgacgcctatgagctgatgagctacgaggacctgaccttttacactgtgatttgctgcgttgatgctttggaccgacccgattcgaaggagaaggtggtcaactgcagcgaaatacagnatcaattgaacgccgaaccgacagacaaaaatcgtcatttgcccttggccaaacaattgctgaccaccttttaccggtcggagtctgctcagttcttcacggcacttgtcgagctggatcagtacatgaagcaggaccgttatctgaggccccactatcaattttactctcgtgccatgcgtgtccgggcatatcag

SEQ ID NO: 87905 - DNA, 577 bp, Heterodera glycines
gcagggaaacgcgaagaagcttgacgcgagaaaaatggtgctttattcttcgacgactcgactctgctcggccttttgtccgtccttaacgtcaaagtgccgagcaatgcgctcgatttgcctccgtattccgcttgtgccatgatcgaattgtacgaagaacggcaaaacgccagaggcaacaaaaacttttttgtcaaattattttatcgacgaaatcaaattttggagccaatggcaatcgccggatgtgaagcgaaatgcgatttgatcaattttcttcaaattcttgagcctcggtcaatccgagggggcgaagaggaattgaaaattttatgcgatgaaaaagtgccgaattcggccgcccggcgcatgggaaacattcccggttttgcaaaaagtttaattattgccatatttataagcattgcagccataaatcacggaacacaaagcacagtaataaatgtacggtaaaaaagttttaaaaattctgcattttctatttgttaaaaaacttcaattgaaaaataataaattctgtgtgctacaaaaaaaaaaaaaaaaaaaaaaaaaa

SEQ ID NO: 87906 - DNA, 586 bp, Heterodera glycines
acccgcttatggcgccagcgttttggacagaaaaattgagcggactttcaacaagtttttgagcgagacgtggcggtgttttttgttggcactggcaccgctgccaatgcgttgtcaatggcttatgtgaatcgcgcgggtggcatcattttcgcgcatcggcatgcccatctgattgaggacgagtgcggcgcgcccgaatattttacgggcggcgccaggttggtcggcgtaagcggcgccgagggacgcattgagccggaagcattagaggaggcaatccaacgctatccgccaaatcccgtgtcagtgcacgcgggccgccctatggctgtgtccatcacccaaagcacggagagcggcacgctctactcattggcacagatccgtcgtattgcgaacattgcgcattcgcatggcattcccttgcacatggacggggcgcgattcgcaaacgcaatggccgccttgggctgcacggcggccgaaatgagttggaagagcggcgtggacattttgtcgttcggagcctccaaaaacggctgttggtgtgccgaggccattctcgtgttcaacgaccttgcag

SEQ ID NO: 87907 - DNA, 575 bp, Heterodera glycines
caccgtattccgaatggaagacagactcagactaccgtacacccacgcggttgaaagccttcgcttgtccaaccttcttccgctgaacctccacaaagtgcttcaaacggacgtcgaaatcggtggccataagctcaaaaagggcaccgccgttgtcaatcaaatcgcaacagtgcttttcgacgacaaaattttccctgaccatgagaagttcatgccgagccgttttttggaggaagacggaaaaatgcgaagagtggacgaattaattccgtttggaatcggcaaaaggtcgtgccctggcgaaaccctcggcagaatggaattggtccttttcacggcgaatttcttccacaaattccatgtttatccttgtgatcctttaaatccgccgaaatttgaaaagcgacaaacattcgctgtcaaattggcggattacaaatgcaaagtgacgaaaagaaagtgagaaaagagcaaatggaagtgccaatttggacattattaagcacatccatttaactttttgctgttgaaattgccaaacattcgcttaattaattaaacaaacattccgg

SEQ ID NO: 87908 - DNA, 768 bp, Heterodera glycines
  unsure (1)..(768): unsure at all n locations
agccgccaatttgggaagaggaagaactgtcaacagcagtcagtgaagagcacatcgaagacagcgaacatgcacattctgtggagccaacggaacttcaatttttggacgaatcggttgccgatgaagaggcggttcttggcagtgaaattacgctacaccaacacaaaatggagaaggaagaggaaaccacttttgaagagcacgacgacatgacagctccgaaatcggtttttggttcttcttcatttggctgcaacaaaagggagcactgcaaaagtgatgacgaggattattgtcacagcgcttgtgaagaggggccgacagaggagacaaagaatcattccccgccagaagaaagcagcaaagagaaggagggtgaacaggcggaagacacgggaactgggatgaccgacattgttgaagcagaagcgcttactgaacctggcactccccttcggcagatggacgagacgactaattcccagagaaatgaggaagaaacgtgcccaattcgagaggaggaacagcagacaaagacagaagagaattcgacggaagcgacagaagaaggaagaaggagctaaacgaagtgttaattgtgaaggtcggattttattaatgatattttagttttatcacattaataatggtgtctaaatgtttgaaaacccaccagaattactcgcctgattgacaaatactcccagcccnccacattcaagtatttctacattcacctaaatatttcttctcattgaatatttc

SEQ ID NO: 87909 - DNA, 726 bp, Heterodera glycines
  unsure (1)..(726): unsure at all n locations
attgtgacggaagcaagaaagggatggaggcggaattccacaacagacggagacactggcttaaagtggaaaagctatacaaaggaatatttgttgcgcaactctggaaggagcttgaggttcaagaaggccacacttcctttgaacacccagaagacatcgcttccctccctacgaccctattaactgatctcttgacaaaacaactaacagcggtcgaagaatgtaaatctgtcacttcgatgcccattcaattatgcgaacatggccgtatcaagcccggcccgtttattcggggtgaaataaaggcggtgaacacttcggctgcccgacgcctgatcagggaatttaatgtgaacacgactttgtacacgggagcgaacatctgtatcaactgctgctcaagacttcgtgatcaccaagaaactaggcgaaggggacggacagaggcgattttatactaccccgaaggcgctactttgtttatcaaattgaatggggatgagaatgatgggaacacaacaaagggcaagaaaaccaccactggaccatccgcggcagtgacgcgtcgagcagcgtcaaaagggctaataaaaattcgaatttgttcggatgagacgatcaatgccctgaagttgcgcatttacgagaagatcgaccagtctccagtcgaccagttgctntacatgggcggacaagtgttggatgggaatntgacgcttgaga

SEQ ID NO: 87910 - DNA, 447 bp, Heterodera glycines
acgctgcaaatggtccgaaaaaggcttttccatccgtcacaccgtcaatgccagtcacacaacatccgatcattcccaataacatttccgaaatgttttcaaaaatgcacatgaacaccagcgaaccgcaaaagaagcatcagttgtatatttttcacacccatcggttgcactgtcaaaaaccatcaaaaaccaccgctccgcaagcgaagtgttgccgacggcagtggcgaccgtgagaatggcacggctgccacaattaattgggccaaagcggacctttcagtttggcttaatgcgtacaaaaatgtctcttctcctgcggattcttttgccgcggtgataaattccgtgaaagcattggcacctgaccagtggttgttgttcaaggttcacaacacttccagtgacaaccggcagtaaaaaggtgcccgcttctttcaccat

SEQ ID NO: 87911 - DNA, 513 bp, Heterodera glycines
acattgctccgtttccgcactttcccctaaatcctttgaacttacattctcatggtcgtggcgaagaatatttgccggacgaaaaggccattttcggatttaaatctgttgttgtttctgagttttgtcctctgttctgagtttatcccggcaacgaatgcgaacgaaaacggcagaagcgcgccgtggggacggagaggagccttcaaagtcatcgcctttcgtccaaggcgcgccttggacattttggaatcggatggttttggcggatttcggaaaagagcattggatgtgatggacggcgatgggttcggttcatttcaaaagagagcgttggattcactcgaaggcgacgatttcatggggctgaagaaaaagaaggctttgactacagcggacggggacgacttcactgatttgggcaaaagagcattggatgttcttgacggagatgattttgttggcttcagaaaacgcagcgaaatgcaaaaaataaaaacataaaaaaaaaaa

SEQ ID NO: 87912 - DNA, 662 bp, Heterodera glycines
  unsure (1)..(662): unsure at all n locations
ccgaagatcgaactccgatatgtttaactcggacggagagattgaaattgatggacttttgataatggagcggtgcccgaattgatcaagttgtactttgatggtgggccagaagataacgagcgtcaactcactttgcgcatgtgtgccgcgccgtgcctttgcgatgggcttccatgcgagtgtaaattgaccgtttgctatgtgggactaatggacccggcgactgaagcgatccaatcgcaattctttcttgaaaatttcgagaaagacaatgaaattgccaacgattgtaaacaagcacaaaaaaaatggaaagcctttaatggacaagtgcttcatggtttccgactggaatatgatgcggatctccacacgctgaaagtgtcaacgtcaatcaactcgacaagaaaggtgcgatcaaatgctcaggcaaacgatgtgaaaagagcaaatcttctgtaattaacgggccgtaatgggctttcaagaaccgccagaatggagagatgtttcaataattttctaatgaatttaatctgtgaattatacctaaaattttaattgctattaaatattatatgaacgtattggatggaagcttgtgataaatgttatggttntaaaaaaaacanannnaaaaaaaaaaaaaaaaaaaaaaa

SEQ ID NO: 87913 - DNA, 701 bp, Heterodera glycines
  unsure (1)..(701): unsure at all n locations
aaattaaaaagacacaagaaaataatgaaaatgaaagaaacaaaaataaattcattcctgccgaaaatttttgtgagaaaataattaaaattcttcaaataccaaagtaataaattctttccttggctaaatgttcatcgaatttctctctcttccaatggatttgaaatgccgtggagaaaagtgaaaattgacaattagtggcggcatttctgcagagacgaggatggttttattaattcggcacaacaaaaaagagaaacaatgccattaattcaagcggaaattatccaatcggtggcgtcgaattgtgcttttacttcgtcgtttggctttcccattcgcttttggcatttttgctggcgaccaatgcctcgcggagtgtcggccattggctcgaccattggctggagccgagcagctattcgcgcgcactaagaatggacaattcggacattgaactgaaattgttccgtcaatcacttccaaatgtgctgggggcttttgccataaattcggtggtctttcgcctcatttttcgccttggaatgtccaaaaatggtcgttcccttttgctcatttcggtttggtttgcgcttaatgcgtacctcgcgagtgtccgatgccttcttttggtcattnttgccaccttcgtcctcctctccgtcactttgctctccaattgccaattgtttgcctgg

SEQ ID NO: 87914 - DNA, 860 bp, Heterodera glycines
  unsure (1)..(860): unsure at all n locations
attttatttaaattatcctccaaaatgcgcaccattctcttatagccatggtttgcttggtgatggctgtcctaatggaaatggcaaattcaaaggctgtcaaaaaatacaacaaaaaaggagcagtggcggcatcaccagcaaaaggaaaagcatcgccaaaaggaggcaaaagcccagcaaaaggaaaagcggcaaaaaaattgaaacctaaaaaggatgctaaaggcattaaagctaaaaaagcaaagccagcaaagaaaagcaaagcggcaaaagcagtaaagggagcgcctaagacagtcaaaaaactcgcatttgccaaaacagcagcgcaagtgaaagaaataaagtcaccagccaagccaatggttctaaaagcagtgccgccccaccaaatgcatttaatgaatgagaaagttcaaactgctgtgtctccacccgcccatgctcgttcgcttgcgaccgttccttacagtacaccggtggcagccgaccgtaactcactgccatcgtacacttcggatggcaccaatttggacatggcccatgagaatgatgattatcagaattattactacggaacggaagacagcagcagagaatttgatgcatcggcggaggaggaggatgaactgtatgaggagggggacggggcaatgagtgggcagacggacgactacggtattggcattggacaggagtacggtcatcaatcggtggaagtgccaccaaagtcggtgatgctcgactgaagacaccaggatttttgtaaaaactatttctcagatttttgaacatttgcattntatattcgcttagaagctaattntttttatctagctctaattatgtaaaaa

SEQ ID NO: 87915 - DNA, 758 bp, Heterodera glycines
  unsure (1)..(758): unsure at all n locations
gtaacttgatgtgtgttttttgggtcgaaatgagaaaaatactcgacacgaatgtttcctatttgagcatgggcctcttactgtaccttggcggacattcgcacagccattcccaccatgggcatggcacacattcgcaacggcaaaccgaccgtacgaactttgcagagcacgagtggggtacggtagacggacggccgggccaaaacggtggcaatcgccagacgcacggcacgcggagacagacgaacatcaacgtcagggcagcatttgtccatgtgctcggtgatctgatccaaagtgtcggggttttgttcgccggattgctaatttattggaaaccgaattggcacattctcgacccaatttgcacgttgcttttctccgcaattgttctcagcaccaccatttatatcatccgcgatgcgctcgttgtccttttggaaggtcgtccgtcgaccatcgattttcgccatgtttttgacgcacttgagcacattgaaggggtcaaaaaagtgcatgaccttcgaatttgggctctcactatggacaaagttgcaatttcggtccatttggaggtcgaatcggctgcggactcccaacaaattctgagggccaccactttgatgcttcgacgcgacttcaacgtgcacgagtcgaccattcaaattgagggctatcancccgaaacggccaattgtggccaatgtgtggtgccgacaaagtgaaaaagggcaaaacggaaggaaaagagaana

SEQ ID NO: 87916 - DNA, 721 bp, Heterodera glycines
  unsure (1)..(721): unsure at all n locations
acccgatagaatttattactttcctaataataagtttttttgtacaaaatgagcaactttatatttgtcgcctttttaactgcagcgttttttagctcaggcctcgctctaccggctccttatgatgctgaatcggtggtatcttctgaattaaatgtttcactactttcagctgacgcaaatgttgaagcagcaattaccaatgaaagtgatgctgctgctgagatacaagctccatcaattccggtaccaattgaacatcaaactgctgctgacattactcatccaactgaaactggcaatgagtcttctattgcatcatcatcatccacgccgaaaagtgagcagacgccaaaaaaagtgatgaacatgaaaagcgcgatggaaggcgcggcggccaacgtgtacgggtggcttccgttagaccagcagcccaagacgatcgctgaagcggcagcaaaagcaaagcagacgcccgccaaacttccggctgactacgacgtgaaccgcgtggcggaacgcgcggcggcccgtgtgtacgggtggcttccggaagacaagcagcctaaggcgatctatgacgcggcggagaaggcaaagaacacgcccaaaccgccgggcgactacgacgtggagcgcgtggcgcannaagcggcacggctcgtctacggtgtgctgcccatcggcatgcagcccagcttcgccggccctagcactgaca

SEQ ID NO: 87917 - DNA, 733 bp, Heterodera glycines
tttccatcgaaatacaatcttctctgtttccctctacatatcccaaaattgttccccaatgctgcaagctcatcagtaccaacttcggcaaggtcatcgtcgcgtttctgctcgcagcattttggcccatttcggtttcgaattctcgaacgactaccgacttggctgcggacattacagtaaagtgtacaaaggctatttcaaggaagcgcaacgcacttttgccatcaaagtcaccgacttggaaagcgtttccgagaagttcaagcaaaagtttctgccacgtgagctggaagtttggcgggaattggaccacccgaacctcgtctatttgtacaaagatttccagtggaacaattatcagttcgcagtgatggaattggttgttggtggtgacttgttcctccaaaaatgtggccacgtcagcgaaacgacctgtcacaattggatgctccaaattgttgctgctttggattatctccaccgtaagggaatcgctcatcgcgatctgaagctggaaaacgtccttctttgtgaaaacggcgtcatcaaagtcactgactacggattctctaagcagagttctgatttgtcttcaacattttgcgggtcgcgttcctattcgtcaccggagaatttgcttggcatcgcttatgacatgttcaaatcggacatttggtcattaggcgtcaccgcgttcatcatgatcacaaacacaatgcctttccatgaa

SEQ ID NO: 87918 - DNA, 558 bp, Heterodera glycines
  unsure (1)..(558): unsure at all n locations
caaagaaatggacgaaattcgagaggaggaggaggagtgcaagcgaaaattgttcaactctcggcactcgcccttcacttacccgaacaatgggtggcagtcccatcagcagttgaacgccagtcagagagcatccatcaatgggggtggtggtggtgtgacgaatcgccgggttcaaggctccaaatgggtcgaaagagttcagccgatgtcgggccagcccgtgccgtacaatgggggcggcaaaggcgggggcggtgggcagaaacatcgtgctggtggaggcggtggtcgaaggtctcaggcgccgcagcgcaaccgacgggacaaggctgatgacgaatgaaaagagcaaaggatgatgatgcggaggaaggaagagtaggggaagagagcaatgtgtgggcgcacaatgtgtgaacaatgaggggaatttgactgatttttggcgccgaatttggacaccttttgttttatttctataatggtttcgtccctttctttctcttcttttgtgcgtaaattatgatccnnnnnanaaaaaaaaaaaaaaaaaaa

SEQ ID NO: 87919 - DNA, 537 bp, Heterodera glycines
  unsure (1)..(537): unsure at all n locations
cnttctgtccgtcccctgttccgctcagttcgccctcccttctccgacaacggcctcgtctcccccattccttcacttcctcaatggcacaacaacagtttcttatgacagtgatcaggaattggagtttccgttgtcattggttcgcgatgacggagtcatttacgccactcagctgagtgtgtcttacacgagaccacgggaacaacagttcaggacgggaattcaaggaacacaaccgaacagctagccggggaggacctttatttggttggatgttccgttctgttttctatccattgttattctcaatccatttgtcttaagttttcttccttatttattacagcatttacacttgcatagtttcataaatgtcattctaaatctattcaataattattttcaactaatgataatatatggtgtcgattacttctgtgtctgtcattgtttatccgttatcttgtctgaaaacacgaataaatctcgttgtcgcnnaanaaaaaaaaaaacaaaaaaaaaaaaaaataaaac

SEQ ID NO: 87920 - DNA, 688 bp, Heterodera glycines
attgaccggggacggcacgaatgacgggcccgctttgaagaaggcggacgtgggatttgccatgggaatcaccgggacagacgtcgccaaagaggcgtccgacataattctcacggacgacaatttcgcttctattgtcaaagcagtgatgtggggtcggaatgtgtacgactccatcgccaagttcctccaattccaactcactgtcaatgttgtggccgtagtcgtctcgttcgttggggcatgtgccattcaggacacccctctgaaggccgttcaaatgctgtgggtcaacctcatcatggacactttggcttctttgtctcttgccactgaattgccaacggaagatttgctgaagcgaaagccctacgggaggacaagtccgttgatttcgcgcacaatgatgaagaatatcattggccatgccgtttaccaactcaccgtgctgtttacgcttatcttcgcgggtgcctccctcttcggcattaccactggtctttacgctccgctctatgcgccgccctcgcaacacttcaccattgtgtttaacacctttgtgatgatgaccctctttaacgagatcaatgccagaaaaatccatggagagaggaacgtttttcagggcatgttcaataatccgatttactgcaccattttgggtgtttactctcatcctccaatttgt

SEQ ID NO: 87921 - DNA, 727 bp, Heterodera glycines
agtgccgaggattggcttgagtttgtgctgcccgaaagtgtcggaatggacggggatggggtgccacgaccattgtccttaacgtcgtgctgttcaaccacgacggggtaaagcgcaatgagccgatcggacatttcaccgtggacgccgagtcggcacttttcaacgcgacgttcaaaagggcggaggaaggcggagaaaaggcggaatggcacgcaataatgccattctgagcagcaggggaaaggcggaaacagaaaggacggaagagccccggggaatagactgatcggacggaacggaacccccgggggacggattgatcggacggaacggaaggaaagaccctcggtgggacaaactgatcggacggaacggaacccttggaggacggaaccgaaaaaaacagcctcaccaattcaattttaaatgaccctccggcgactcttttttcgctctttttgccgattttaaggaaaggaaaaacaacaaatttacaagattcataccaccaattattaattattacctatgatctccacggaacccaccaaaaatacagtatcccctcctcagttactgtaccccctcattcattcgtaataatcggaatgtactgtatttctatacccaacaaaaccaaaagcattccattaaagcaactgctgaccgactgactgatcgatacattcgcaatttatttgtcaaaatataaatggaaaaaagc

SEQ ID NO: 87922 - DNA, 357 bp, Heterodera glycines
tggcgaaaggcggaggaggagcagcagcagcgggcgaagggacgcgagtatttttgcgacatttgcggacggacactttggtttgcggacaatgtgcaggcgatcaaacacaaaaagggacaccagcaaaaggaggaggagaagccgaagcaggacgaagacggagaaagaacagatggatgaccaatagacactccgtttcaaaaaacgagagatgaaccaataaatagggagtgcacagaaaaaaacattcttattttggcgtactatttctttgtctctgataatagagaaaaatcgaattaacaccgatagagaaaaaaattctgcatcgacaaaaaaaaaaaaaaaaaaaaa

SEQ ID NO: 87923 - DNA, 365 bp, Heterodera glycines
  unsure (1)..(365): unsure at all n locations
cactgtctatgtgattgacctcgcccaagccatggacatttcgcatccgtcctcgctgcgcttcctccaccgggacatcacgaatgttttgaacttttttggtcgcattggctgtgagccgttgcccacgccgcacgcattctttcacgaagtgaccgacattgagttcgacccgaacaaaaatttgtatgttcaggtggagtctttcgagcgcgagaatcggaacatggacttgaagggggcgaaggcgtcgccagcaaattatgaactccatttacaccagcaggagagcacaggccgagcggactcgccttcacggccttacaattgaacacgaaacgaanaaaaaaaaaaaaaaaaaaaaa

SEQ ID NO: 87924 - DNA, 559 bp, Heterodera glycines
attttaaggagagccaccacaatcatatgcctgaaggttatgagtctggtcggggaaaatttgagttcgctctcggttacatcggttgttcggttatcggaggattcggagttggaagtgttcgtggaatgttcggcgagttaggaaatccacagaacagaactttggcttggaatccgtggtacactcggatgctgaatgccgccactaagcatggcagcggatacgcacaaactgctgggactgccatgtttctctattcggtcactgagttggggctgaagctgtcacgagccgatgacttgcttaattcttttatcgccggaccaatcgctggcggacttttccacggattgcctcatgggctgcgtgctggcggtgttggtgcattggccggactgggtttggtcaccgtctggaatttgtgtgatcgagacagcagaagagagttgcgcgaaatcctccgattgtcttaaatacgttgttgctcaaccttctttattatagtcgttattgaataaatttgtttgaaactcaaactcaaaaaaaaaaaaaaaaa

SEQ ID NO: 87925 - DNA, 152 bp, Heterodera glycines
  unsure (1)..(152): unsure at all n locations
cgtgatgggactcttacattgaagtgatatgagaagcgcgancctttcttcaacttaaagaaggagaaagtgatcgcaagaggaggaatttgctgatcactcccttaaactggcaaatgccctccctccgtttccctcccccgcccctttcg

SEQ ID NO: 87926 - DNA, 783 bp, Heterodera glycines
cacttctcggcctaatgtttacttaaacgcgctgatgatgttaaagtgggaccgaattcccagcgcaatgttttgccgtcggtggtgaagcgcgactttcacttctgccacctttgccaatcgaattcgcctccgcgttcatttcactgtccggtttgcaacttttgcgtcttccgccgtgaccaccactgttccttcaccggttcttgcgtgggtcacttcaatcagcgttattttgttgccgctgtatttaacctgtggccagtcgtgttttcatgctgcgtttggaattggcatgcgcttttgctcgccttctctccgatcagtctgtccgactttctcaaatgggtcttcccgcacatggctttgctgttccgcttcgtctctttccaccaattcttcgtgattttggcctttgccttctctttcatcactttgctcttcactacttatctcatctttgcccagattttctgtttttggcatggccaaacgcgtgtcgaatatttgatggatgtccacgcttataatttgtcctttcgagaaaatcttagcgcctgtcttggctcgcgatggcccttcatttttatttctcctttcattccatcgcagttggaaaccgatggaacgtttttcaggacacgcgaaagggaagaaatcggaaaatcgacaaagtatttttaggaagatgaaaattctactgctacttaataatgtgctttaatatctcattgtgtctctccctctgtgtgcgtaaatcacgattaatcatttgaattcatt

SEQ ID NO: 87927 - DNA, 741 bp, Heterodera glycines
ccggttttctgatgaagaaggagttggagtattttgccaaggcactcgagtcgcccacccgtccattcctggccattctcggcggtgccaaagtggcggacaaaattcagctgatcaacaatttgttggacaaggtggacgagatggtcatctgcggtggcatggcattcacttttactaagtgctcaccggcaaatccattggcaaatcgctgtttgacgaggagggttccaaaattatcaacgatttgatggcaaaagcgaaggacaaaaatgtgaaaattcaccaaccggttgattttgtggttggcgatgagttcaaagagggcactccattcgccaatgttgacgcaaaggatggaattccgaacggaaaaatgggcttggacattggtcaggaaactctcaaacaatttgccgaagtgattggacgtgcaaaaactgtcgtatggaatgggccggcgggtgtgttcgagtggccaaactttgcgcatgggaccaagggcatgttggaggcggtcattggcgcgaccaagtcgggtgcaacaaccataattggtggcggcgacacggccaccgcggcggagaaatggggagcagaggacaaagtcagccacgtgagcaccggtggtggtgccagtcttgaactgctcgaagcaaagttctgcccggcgtccccgctttgagcgatgctccgtgaacaaactgaattgcctcgactgactgacaattgaattggctg

SEQ ID NO: 87928 - DNA, 648 bp, Heterodera glycines
gaattttcgaagtgtccccggaagaagtgaagcactgccgaggaattctccgagaggctgcgaatccatcttcaaacgtatctttggagaatacaatgcggaggaaataatccagatgcgcgacgaaggagcatccaatgttgaaattgaggagaaaatcacagaggcactgaaccaaattcgaagtccgcagaagcgacaggaggccggccgatttgcgatgtcatgtcgccgaatattcgcaatgattgaacgtcgtcgacgatcggcggataacgccgaacattcgctggatcaactgttcaaatcgcatttgatttggctgaatgagcagcaacgggaggagctgaagcaaatgaaagggtccggaaagggacggacggaaatgcagcagagagtgatggaatggtacggacagttggaggggcaagagaagcagaaagcgcgagaacacctgcgggacggctgccgggacatattggcacaagtgttgggcaaagaaaaggctgaccaactgaagcaattgagagaaggcggcatgagcgggacggaattggaagcaaaagccaacgaaatggtggaccaaattcaggaggaggagaagaaggcgaaggccaaagaatttgggacagtgtgcagaaagatact

SEQ ID NO: 87929 - DNA, 283 bp, Heterodera glycines
acaaacgcgaacccaacattttctaattttcttccttctgctaatttgtgaaatgatcaactcattcccatcaaagtcgagtgaaagcggcgaaccgcctgcaaatggagcagaagtggcgcaaagtcgcaagaaacgtcaggccgaagaagtgaccactgaagagccaccatcagaaacaaacgatgccgaggatcaccaatctgcggcagcgggaaatggaaaagcaccaaaaaataagggcacaaagaacaagagcgacagcagcgactcgtcaagttcg

SEQ ID NO: 87930 - DNA, 690 bp, Heterodera glycines
cactgacttctggactttgttgaaaggacaacgagggcattcgacgcaaatgttcatcgcgttcggccccaccatgggcaaaatttggttgccggtcggctgcgagctttgctccactcggacttgaaccgatccgagattgccgaatcgcaccggcactgcggcaaggtgcaggacgcgtacgcgttgcgctgcgtgccccaggtccacggagttgtgcacgacacaattgcatttgtgaagggtattttggagacggagatcaactcggccaccgacaatccactggtgttttctgagattgaagaagtgatttcgggcggcaatttccacggtgaatatccggcaaaagtgttggattatttggcaattgccgtgcacgagttggcccagatgagtgagcgtcggctggagcgtctgctgaaccaccaactcagtgggcttccaacttttctgacccgcaacggcggactcaactcgggcttcatgacggtccaattgtgtgccgcaagttcggtgtccgagaacaaagtgttatgccatccatcatcagcggacagtattccgacaagttgcaaccaggaggaccacgtgtcaatgggcggcttttcggcacgaaaggcactgaaaattgttgaacacaccgaagcagtgcttgcgatggaactgatggcagcttgtcagggaatg

SEQ ID NO: 87931 - DNA, 151 bp, Heterodera glycines
gctaccgatcagacacacaatttgttccttgggagtggagataattacctcttacacgtgtacatgagtcgctagtgctcgaaaatatacacagcatttcctacgggtcgaccattctgcgtgaggggccctagaaggatcgtcggactct

SEQ ID NO: 87932 - DNA, 332 bp, Heterodera glycines
tcgcgcaccgagcggctggcggagcattgccgcgaggcggacattctcattgctgtagcgggcctgcgtgggatggtgcgcggcgattggattaatcccggcgcggtcgtcatcgactgcgggatcaacgcggtgcacattcctggttgaaaagcgccacctggtgggcgatgtgaatcgtgatgaggccaaggcggcggacggctttctgactcctgtgcccgggggtgttggcccaatgaccgtggcaatgctggtccgcaacaccttcctccaggcggtgtgccaaaaactgaactgccgtgtctgatccccttgggaccgttataagc

SEQ ID NO: 87933 - DNA, 678 bp, Heterodera glycines
  unsure (1)..(678): unsure at all n locations
tgggtggttgacggtgaattcgtaccacttcaccccacccgcccgtactgaagtgccggctcagtcaggcactcgaacaaattcagccggccatggccgtgggtgtccagccagctaatctgcacaagttcaactcaatttttaaacggactatcgccaattggtttgtccagtcgagtgcggttgactttctccaccttttactcgtctgcatgcgatggttgtgccgagaatatgaaatcccagcccgttacgtcatttcaattcacgacgaagttcgttatttggtcccggaaaaggacaaatatcgctgtgcgttggctctttcactgagcaatatgtatgtgagggcagcaatttctgaggcgttgggcatacgggaattgcccaggtcggtcgcctttttcagtcaggtggacattgactcagtgctccgcaaggaagtggacttggaatgccgaacgcccgatggaaaaacaattgaaaagggtgaggcactaaatatcgaacaaatcgtagagcatacgaacggacgccttggccgatgatcaacgatctcattttctcatatttctttactttctaagtgccttttccattcccgcggatctcaatagtttactcaacacttttatgttttatttggtttttcatttacatattaactaanattctcat

SEQ ID NO: 87934 - DNA, 784 bp, Heterodera glycines
ccgttgcgtggagtatttccttctatccgcagattattctcaacttccagcgaaagagtgtcattggtcttaacttcgattttttgctgctgaatgtcattggtttttcctgttacactgtttataatgtgttgctttatttcgatccgaatgttcagagaatttacattgaacggcatggacagcgcagtctgatcccagtccttatcaatgacgttgtgttcgcttcccatgctttgttggcatgcatcataacgggcgttcagtgctttttctatgagcgtggaaaccagcgcatttcgtacattggccgtgcctgggcttcccttctgctctgtttctcttcggtgtctttggcgttggcgcttttccgtgttttgaattggctcgatttcatcaattacctttcttactcaaaaatggccgtcactctgagcaaatatttccctcaggctattctcaactttaagcgaaaaagcaccgtcggttggagcattggcaatgttttgttggacttttccggtgggttcatggacatttgtcagatgtgtcttcaggcgaccaacacaaatgattggagcgctttcacgggaaaccctgtgaagtttgggcttggccttatttcgatgcttttcgacattctcttcatcatccagcactacgttctctacattaaaaaggacgtcaactcctcctcctcttccaacagagtagacaattcccacgccgtcacggcaacgactctcccaccgcctctcattgctgcgtctcccatggattacca

SEQ ID NO: 87935 - DNA, 531 bp, Heterodera glycines
taaagcgcaacaatgtcttctgacgaatcgacgacttcttctgccagtgttgtgagcgttcagctgcgtgaagtgcccatcaaagacttcaaggacgtgcttccggtgctgcagaaaacgctcaacgaattggaacatccgttcatcaagaaggccgaagaaataagcggaatggaacgtgagaagctcttctacatcacttcctctcttgtgctgctcgtgttgatgctctgccctggcaatatgcttctctctactcttatcactgtggcctacccaatgtacgcgagcttgttgaccctcaacactcaaaacacatcggaatacacccagtggctcgtttattggtgcgtgttcgccgagttttgccagttcgactatctctttggctctatcaatggccttctgctgctgtacgtgcctctgaagaccgtctttctgctctacttggcccttccgcaaacttatggcgctcacaacttgtacgtgaagcatatccgcaaagtgcttgccgtgacgaacgtattggac

SEQ ID NO: 87936 - DNA, 769 bp, Heterodera glycines
cctgcgggaaatactcccgagaaatgggactatgaaccaggtctgtcgcctcccatttcattgtcaacaacgtacaaacggaattggcctgggatgcccaaggggcatgattacataagagaaggcaatcccactcgtgatgtactccaagaaagcatagcgaccctggagagtgctcgccattgccgaattttcagctcaggacttgccgcaattgcagcagtgtcccatttgcttaattccggacagcatgtcatcgtgtcgggggattgtaacggcggcacgaaaaattatttcgacaaaatttgtgtgccgcatcatggcttggagctgagttttgtggatttgacgcgattggaaaacttggagaatgaatttaagcccaacacaaaaatggttttgtttgaaacaccctcaaatccgcttctaaaaatcgtcgacattgaagcggtgtgccgtatggttcgagcacgctcaaaagattgtgtcgtcgttgttgataatacgttcatgacaccgtactttcaacgcccgttggaacttggcgccgatgttacggtgcaatcgctcaccaaatacatcaacggacacaccgatgtgctgatgggcaccgtagttaccaacaaggagcagcttgatcagcacatatacgcccagcaaatttatgctggcgccgttccgtccgcctttgatgcctttttggtgcttcgtggcatcaaaacgctcccattgcgaatgcgccagcacatggaaaatgcgctggcaattg

SEQ ID NO: 87937 - DNA, 303 bp, Heterodera glycines
  unsure (1)..(303): unsure at all n locations
tattggccgtgtgggcattgtcggacatcgcgaacggcacccgggttcctttgacattgtgcacatcaaagacaaagttgtgaagggcagtacaaactgtgcaaggttaagaagcaggcggtcggtgacaagcaagtgccgtacattgtcgcgcagacgcgcgaacaccattcgctacccggacccgcacatcaaggcccaatgtgcgatttgctgtggtccgacccggacgattggagctggacgacgagctcaactactccttnctgcagtttgacccgccggccgcgcgtcggggcgagc

SEQ ID NO: 87938 - DNA, 720 bp, Heterodera glycines
gcccaagtttgagagtttccaaaaaacattctgcccatatggtcactttcttcgccagacattcagcttatttttcagtcagttgaccgcgatcggtccggtcaaatcagtgccgatgagcttaacaggcgctgtccaatggcacatggaagccgttcaaccccgagacgtgccgaatgatgatttcaatgttcgactcaaacaacgatgggggcatcaattttcaggaattcggcgcactttgggagtacatcaacgattggacgcgcacttttcgcactttcgaccgcgacaacagcggaaacatcgaccgcgacgaattggtcaatgcgttgacacaattcggttatcgtctgtccggcactttttacgatatgttaatgcgcaaatttgaccgaactcaaagcggtcgcataaacttcgacgacttcatccaactttgcgttgtgctccaaacactgactaccgcttttcgagaaaaggacaccgaccgggacggatggattcgaatttattatgaggaattcctcgccatggttttctcgctgaagatgtcaatgatggctaaacaatgagcaaaagaagggggaattattgactgataaggatttgctaatacagtaacccacttatttttgtatgttttctgttaaacattatttacatatcactttcaattttacgacatttttgtttgaataaaaatttggaaacttgctt

SEQ ID NO: 87939 - DNA, 410 bp, Heterodera glycines
  unsure (1)..(410): unsure at all n locations
ccccccccccccccccccccccccccncccntncccccccccccccccccccccccccgctcccctcntnnctcccctcgtccncgccccccctttcttnccccccctcctccttttcccccccttcctccccccccctcccccccccccccccccccccccccccccccccccgcccccctccccccccctttccccctcctcccttcccccccccccccctccctccccctcccctcccccccccccccccccgtccccacgccccttcccctccctctcccgcccccgccccgtccccccccccccccccccccctcccgcccccctcctccccccccctccccccccctccccccccccccgctcccccccccccccccccccccccccccccccccccccccccg

SEQ ID NO: 87940 - DNA, 585 bp, Heterodera glycines
  unsure (1)..(585): unsure at all n locations
ccttttagtgattggttaaagaaaatttttaaatttttttgccttaatatttctactctatgcgaatttgacaataatgtgtgatttggtcagcagaattgctagattttgaatgggaatacgatccaaggatcatcatcaatctcatcttttccttatgggcgttgcttctgctgatgatgactcagtgcctgatccaattgtgattaagttgggcgagtcattgagcctttctcagcttgtgcaaaaaattgaacaattacaaaaccgaactgttcgagagctgcttgttaccctacgtcgtcgcacgtacaaaatgcctgttgggcctcccgacccaaatggagatcgctttttccaaaatgggcatctcctagtggaagatgttgtgtacaattgggtaagaaaaacgcgtaactccatccacggaattgtccagcttcatgtgttatatgaggggattgcaatgctcgatgaagtcaattatcacttttagtgattggttaaagaaaatcttgtaaaattatctgccttcatattttgtactatttgcgaatttgacaataaatttgttccaatgaanaa

SEQ ID NO: 87941 - DNA, 347 bp, Heterodera glycines
caaacactggtcgtactcgaactgctggcggaggagggggcggaggaatgaacagcggcggactgtggcgcttttatactgaggactcgaccgggttgaaaattggacctgttcccgtgttggtcatgtcgttggtgttcatcgcttctgtgttcgtcctccacatttggggaaaatacagtcggactcattgaattctcactttgccgattcattcggtctatcggcagaaatgcgattttattcatagtttttacaaatcacttccatttaatggaatatttgttttgtatgtaattctgataaagtctttgttataaaaaaaaaaaaaaaaaaaaaaaaaaaaa

SEQ ID NO: 87942 - DNA, 283 bp, Heterodera glycines
aagagctctgagaccttgacctcgaccagtttattttgtacgactacgatgactataacgatggcaagactgaaatcatagcatacctatgcaatgaaatcactgagccgccggctacgacccttggtaattgccaaatgagacctggtaccccatgactgatatacattggtcaacacttgcaaatgttgatgacattcgtaaaggagtctctggcattatagacgaattgtctcctatgcgaactcgagtcaaatacactgacacttcgactgcgagcaat

SEQ ID NO: 87943 - DNA, 377 bp, Heterodera glycines
acagcatatgacaataccgatcattttggacacacccaatcaatgatacatgctaacattgtgccggccagcgacccaaaagataaactttaactatatcgggaggaacgtagcggattatgtgcttcgtcataagatattggacaatatcgatgatgactaaccaatggcaaatgccaagcgaacgaattttcatcatcacagctccattaatgatgacagtccgaatggacggccttactgactgataaaaagcaaaagggcgaagaaactagtgatccaggcgaatggaaaaaagaaagaccaatgccatgatataatggttaataatgcacacattgtgcgtgtcaccataaaaccggctaaccaacgcaatt

SEQ ID NO: 87944 - DNA, 336 bp, Heterodera glycines
  unsure (1)..(336): unsure at all n locations
gcgctgtttgaaagcctatgggcaaacatcaaattgcnatcgattgctcttcgtcattgtttgtaactgttgaacatgggaaatgacacctttaagttcaacaataaaacgtgaaagtcgcaaaaccacttgcggatgtggcaaaattgggtcagaccaacaaagagacagttcgactatgaagggactgcctgaagaactaccatcacaactcatactatgccattggacaccattctgcgatcccaacaatatggttatgtactcgacattgacggcaaaatgaacgacaccatcaaattgagctaataagtttgggctgttccgacattacat

SEQ ID NO: 87945 - DNA, 724 bp, Heterodera glycines
gctattttgcgattttgtgctatttttgcctccctacatattaccattttcgtttctttttaccacttttcgagaattcaatcttcatatattctgcactaaaattttttggaaaacgaacatcctgctaatggacattcaaaaacaaaattacaccgaacaatctttggaacttttgagtcaggaattgcggtccattttattggatccaaactcacaaatgccgactgaaacaacggaatccaacgaaaagaaagaaaatcccgaagacatttcgagcactgtgttctttgagcatcagcaggaattattgaatgagacagtttcgagtggtgatgaagattttcgttgtgtgtctgtaacatctaacgaatctgagattcaagaacctcgcttgtcaactcccacctcacaattgccgactgaaacatcggattcaagcggaaagaaagaaaatcccgaagacatttcaagcactgtgttctttgagcatcagcaggaattattgaatgagtcagtttcgagcggtgacgaagattctcgttgtgcgtctgtaacacctcccgaatcagaggttcaagaagctcgcttattgactcccacctcacaaatgccaactgaaacatcgaattcaaacggaaagaaagaaaatcccgaagacatttcgagcactgtgttttttgagcatcagaaagaattattgaatgaatcagtttcgagcggt

SEQ ID NO: 87946 - DNA, 775 bp, Heterodera glycines
  unsure (1)..(775): unsure at all n locations
ccggtctgttcttaacacagacagtgctgttgtgccgggtcgcgcacttttgtggacgcaaaaatttacgacgaattcatccaacggtcgaagcaaattgcggagaaacgcgtgcttggcaatcccttccatttggacaccgatcaaggcccacaaattgacggggaccaaatggataagatcctccagtacatcgaccagggaaggaaagagggcgccaaactgatcaccggtggcaagcaattcgggggcaaaggctttttcgttgagccaacaatttttgcgggtgttgaggatcagatgaaaattgcacaggaagaggttcattttcagtcctccccctccccatgattcaaataacattttgcttagatattcggccctgtgatgtccattataaaattcgacgggctcaaggacctcgtagaaaaggccaacagcacaatttatggtttagcagcaggagtaatgacacgtgatttggacaaggcgctctatgtggccaataacatcagagccggcaccgtttgggtgaattgctacgatgtttttgacccggcggctccattcggcggttacaaaatgtcgggcatcggacgcgaacttggggaatacggactatctgcttactcggaggcacggaaaatttaattatggtaatttttcgattcttaaggtgaaaactgtgaccatcaaagtgccccaaaagaactcttagtgggaaacaattaataacgacatanattagttaaacttttgaatttttatttcataa

SEQ ID NO: 87947 - DNA, 799 bp, Heterodera glycines
  unsure (1)..(799): unsure at all n locations
gcaacctttttggcgtcactttccattccaacggttctacggggccaatggttttttactcggaatttatggaatttgtcagcggagaaaactttagcaaagcgttgaaaaaggtcgatgccaatggggaaagtgaatcttccgacgccaaattaaacaatgccaacaaaaacaaacgccgccgttcccccggcggtgtttcatccttttcaatgccttcgccggtccgtgccgttctctccaaattcctcttcgccgctttctgcgccattttgctgctcattttcggaaattcgtctgaccctgcccaaattgtgtctccgtgggcttggcgaatgccgtggctgcaatggctgcttctcttttggtttctcattttcatgcagcgcgtccaatattattacgcgtggacaatgaccgatgccatctgcaatattagcggttttggcttcgatgggttcacaagcgatggaaagcccaagtgggacttgaccaccacagtggacgtgtggaaagtggagacagcgcaaagtttcaaagaaacgctggacggatggaatttgaaaacgatgttttggctgcgttacattgcctacgaaagaatgccgaaaaactacagaacattgtccacctacgcactttccgccgtttggcacggccttttcatgggttattacctttgttttgccaccggtgctctgataacagtcgccgggagaatgtctcgccgttgcattcgccaccatttccaacggaatgcatttcttcaccatttgtacaatttgctgactnttttggc

SEQ ID NO: 87948 - DNA, 589 bp, Heterodera glycines
ttactccccccccctaaacaattgcttattcaagaaggaattggacagctgatttccctcccaatctttgaattgtacaaagggaggcttaaatggggcggggggtgagctgctggcggtggtgacacacattccctgtaaatccccccagggactgacatcactcactcactcattcatttgtcagttccctcgtgcccattgatccgtcttcccttctcttcccaaagcgaccgatcggaggaattccctcaaacttataatagtggtcattaatgaattgtgcccatttggtctgatcagtcgttcgctgcttttgatcattcgttcccttccctccgctccctttcagtccgctgatctgtccccccccccctttccccgctgcttttccctcctcatttccgtattctcttcgctttccctgctgctgaaatacaaattagatggctaccatggtgcacatgtcctcgcatcatcagcagcataaaaaattgaaaacattccaagcttatcttccccccggtgcccgcacttacagttgcgcccattgccgtgccaatttggcccattcacaatgagctgatct

SEQ ID NO: 87949 - DNA, 599 bp, Heterodera glycines
atgacggcccaaccattgcccaggatccgactccctcccctcggcgtgtttttctccgtgacctttgttccctcttttgttgcccgccgctcccttcggctattgttgccaaattggcttttatgccaccggaaccgagttaccgaattttgaccagcgactcgggacggacgacgttggagctgatcgacggcaggacagagtggccacatgggcaagatgagctgaacaatgtcgaggtgttcttcacccgtactcaacgtcgcaataaaatcgcctgtatgttcgtccgacccttcgaactttcgcatttcacccttttgttttctcacggaaatgcggtggatattggccaaatgtgtaacttttaccttgggctcggctgtcgactgcggtgcaatgtgttcagctacgattactcgggttatggtcagtctacaggtcgtccttcggaaaaaaatctctacgcggatatcgctgcggcacttaaatctctcgaaagccgttatcaaattccaccggagcaggtcattttgtacggtcagagcattggaactgtgccttccatcgacttggccagttgttatccgcgcatcgct

SEQ ID NO: 87950 - DNA, 688 bp, Heterodera glycines
cactgcccgccttggggccaatttggccgactccttcgggagtcactctcccttcggacgaagaactccatctcgtcaacaccacggggcatcccaagggccgaattcacaaagccatgccaaacattgagcaaacagcagtacccaaccaaatgcattggacagcctacacaaaattgtagtggaaaaaaacgaccggcggaagcctacaaattgtgctcaaatccattctgtgtgcgatggcaccgctgcttcgaattgggctgtttgcagttgatatttttgccatcatcggatctcatttttatgcccatctttcgtctgactcaagcctatctgttatcaccaagtccccagactttaacgacgccgctgaatttgtcgcaacattcaaatccatgacggatgcaagtgccgacgttcttgataagatttccaacattggaaacggcgcctttactctcctcaagtttgcgggcccaataggccaaatggtacacattggtctatccatcggattgaagcagcaagactcgcccgagctccgtgcaatacaggccttacagagacaaatcaccgaacagttcgaaacactcttccgtaaaatcgatgactctattgttccgcaggagtatagagacttaatgacagactaccaaaagatgagtttatttttatttttttaaaa

SEQ ID NO: 87951 - DNA, 777 bp, Heterodera glycines
ccataagttttttccgtctatataaaacttaatggcggaaattgatatggccgaatttgagggtgctggtgaacgttataagtttttgatacaaccagtaaaggatcttgcagccaattgggatttggatattgccaaaacgcttgaggattacatccggaaagttgttgcggaaactaaaagaatcgatgccgaagctccggatgatgaatataggcggcacaaagttttcaatttcgctgaggccgctttgctcatccacgggacgacgacagtttatgcgcgaaaagtcgactacgtattgcaaaaagcccaaaacttttttgatcaattgagggaggacgaaaacattcaccaccagcagcagcaaaaaggaaaacgaaggaaagatgacccattggaagaaggtgctgaagcgacaggggaagagatggacgaaaatgcaaatgcggacgacgcgggcgagggaagggaaaaacgccaaccgaaggctaaccaaatcaattacgcttccctgggccatttgctcgatcgtctcattgtcagccagcgtcggacttcgcttcttcccgtcgttccaatcgcttttttttcactcactgacttcgagaaacgaaatgtgtcgctttgcacgcgcacaaatccaaccgaagtgttcgggtagatggaggacttcaagctcaattcgtgccacgtctatgggtcaattgctctgctcgatttcaaaacattgccatcgtccacaaattttcgcaattagtcatttactcccaaaaa

SEQ ID NO: 87952 - DNA, 689 bp, Heterodera glycines
ccgggtcgaagtgaaattaccaatatttcgaacactttttgaaggggcacgcaaaaaactaatgcgattcgatttacgcgattatccgacaccgccaaaagcgaaaattgaggagagtgtaacgcgcaaattcactgctagcgaatgcgtcgaattggagaaggactaccaacaaatgctcagacaatttcgaatatttctccgcgatttgctccgacaaataattcgggagccccgcttcaaatgtttccatttgccggtcgacaaaacggacgccgaagattactacgaaatcgtcaaacaaccgatgtgtttgagtcagatgatgggcaacatcgacgtgggcctttatgcctcaaaggatgcctttgcgaaggacattcaattgattcgcaacaatgccatcgagtacaacccggacaccgacatggactccaagcaaatacggcacgccgcaaatgccctcgtggacatgacggaggcactgttcagcatggaaatggacgacgatttcccgaccaaattggaggaggcgcgaaaattggtggaggaggcgaagcgatggacagaaaaaatggaatcggcggagaaagacgatggcacgaggaatggagggcgagaaaaaaacattgtgccgtcgacggtggcggaggacgagcgacggggcgacgtcggcacagagacacaac

SEQ ID NO: 87953 - DNA, 94 bp, Heterodera glycines
attacttttctctacttcggccttttgaattccaggagcgcggcctggtcgcccgcggcgatcacgttcgcccgtccttctccctgtgcttgct

SEQ ID NO: 87954 - DNA, 648 bp, Heterodera glycines
  unsure (1)..(648): unsure at all n locations
attccaatattttttttaattataatttccttttccaaaacctttaaaatgcgcgccattctcttcctggccatggtttgcttggtgatggctgttattcttgagacagccaattcaaaggcagtgaaaaataagaaaggagcagttgcaacgccagcaaaaggaaaagcggcgccgaaaggagcagcgaaaggaggaattaaaaaagacgcaaaatcaaagggaaaaggaaaaaaggacgccaaaggcaaaaaggacaaaaaagctaagccagccaaagggaaaggagtgcctaaaaatgacaaaaagtccccagcggcaaaagccaatgacaaaaagagcccaaccaaaccaatggcagcagtgaaagccgtgccaaaggcggcggagaatgctcagaagggaccgtcgagtgcggaagtggtggcggaggaaaacaacttggacactgaggcggtcgacgacttgggggcggaagagtcggactttgaccaattggcagaggacgaactgctcgaggacgacgccatggacggcgaggcggacgaattggagggcatggngggaagagacggagatggacagccaaatggcactttgatggacaaaatgaggcaaattggacaagtggctaacggaacaaaacga

SEQ ID NO: 87955 - DNA, 693 bp, Heterodera glycines
gaattgtaattattgatcgtctccccaatggcttcttcactcaccattgaaaaacgctgcaaacttttcaacacaaaacaaatggaatgccaattcgatggaactgaagccggaaaatgtgctttttgtgtaaagcttccgtgtaaatttggagcagttaattgtgcagaggaagtgagcatctcttgtgtaaatccgcaagaattggaaaaatgctgcaaggcgcgtgacaacgaatgctgcgtgtgtgtgctatgcgagaaaaacaaagttatgaaggttttggtcgaatgttgcggaaagcgcaccgaaacgagtgccgaggccgggaaagcgctttgcatttgtgtgccgaaaattggtggaggcaaatgtggaggacaagtgcaagtgaaacaatgcgatgcgaagctggttgacgagtgctgcgcagctaacacggagagtggcgactgctgttgcgtctgtttgagctgcaatgaccaaaagtgtgtggtcaccgtccgttgtcctgctggagaagcaaagtcgactggtccaacttgtactgcttcaaaatgcgaaagtgtgaagtgctgctgaagtcaaaaaactgatcgaagactgaaaggatgcatgcatttaactgactcagttttaaaaatgctttttcaattagcaaataaataattgccaaaaaaaaaaaaaaaaaaa

SEQ ID NO: 87956 - DNA, 649 bp, Heterodera glycines
aaaatatctgtaaagatgggttgaaataccatcctttctgtaacattggtgtactgcgaaagaccgatgataaatcattaatgaatggacagttggcgttagaggttttaaaatggaaaaatgggtgtgaaatcgtggcactttatttcggcgcccacatgagtcagcgatgtcgtgaatttataccggtgctcaagcagttctatgatcagttgaaaaaatctcccgaaacaatgccttttgaaattgtttttgtgccctttgaccgttccgaggatgaattccgcaactctttgcgcgatttgcacgacgattggctgtacattccctatgggagtgttcacattaacccattggccgcgaggtttaacatcattaattggggagtcattccgacattggttgtgcttaaggaggacggcactttgataaccatggctggacaagcagatgttcagtattcgtcagcatcagaagcaatggcccgctggcgctctactcctaaccccgaatccggattcaaagatttttcgaaattttaaatttccatatcttttttgttaatgttgctaaagcattggtttgatgtgtacaaccaacatgtgtgtcagggatggcacggaattccgatttccgaaatttttgatta

SEQ ID NO: 87957 - DNA, 86 bp, Heterodera glycines
cactctctctccctctctccattccctttttttttgcatacattaacgaaaaatgccaattccccccattcattttgctctttttc

SEQ ID NO: 87958 - DNA, 660 bp, Heterodera glycines
  unsure (1)..(660): unsure at all n locations
ccattgaaaaacgctgcaaactttntaacacaaaacaaatggaatgccaattcgatggaactgaagccggaaaatgtgctttttgtgtaaagcttccgtgtaaatttggagcagttaattgtgcagaggaagtgagcatctcttgtgtaaatccgcaagaattggaaaaatgctgcaaggcgcgtgacaacgaatgctgcgtgtgtgtgctatgcgagaaaaacaaagttatgaaggttttggtcgaatgttgcggaaagcgcaccgaaacgagtgccgaggccgggaaagcgctttgcatttgtgtgccgaaaattggtggaggcaaatgtggaggacaagtgcaagtgaaacaatgcgatgcgaagctggttgacgagtgctgcgcagctaacacggagagtggcgactgctgttgcgtctgtttgagctgcaatgaccaaaagtgtgtggtcaccgtccgttgtcctactggagaagcaaagtcgactggtccaacttgtactgcttcaaaatgcgaaagtgtgaagtgctgctgaagtcaaaaaactgatcgaagactgaaaggatgcatgcatttaactgactcagttttaaaaatgctttttcaattagcaaataaataattgttgataaaaaaaaaaaaannnaaaaaaaaaa

SEQ ID NO: 87959 - DNA, 162 bp, Heterodera glycines
ttgtacttcgactaccacttgcttttctgatggaccctcccgatctatccgagactcagccgaccattccgaaaaggggccaccaccaccggcgtcgcgtggatatctccgcctcgcgtttgccccgcgctgtgctcgtccgcatctttgggcatttgagtg

SEQ ID NO: 87960 - DNA, 512 bp, Heterodera glycines
aacgcgaacccaacattttctaattttcttcctttgctatttggaaatgaccactattcccatagagccggtgaaagcggggaaccgcctgcaagatggagcataagtggcgcagagccacaagatacgccaggccgatacaagtgaccactgaggagccaccatcaaaaacaaacgatgccaatgatcaccaatctgcggcaccgggaaatggaaaagcaccaaaaaataagggcaaaaagaacaagagcgacagcagcgactcgtcaagtgtcgaagagttcgtctatcgaaagtgacgagaacaataagctgaagaggatgaacaagcactgagcatcggtcgactcactaatgaggccggttaataggattgcggtcattagcgaagagtggactgtcagcaattaatgactgcaaaattgtaaagcggttattcttcgatgggaataaatgttattagtggaaaatggcaatgccattttaaactataagagataaattcacctcgt

SEQ ID NO: 87961 - DNA, 728 bp, Heterodera glycines
tggggccgtgctgtcgctgtacgcctctggccgtacacccggtatcgtgttggactccggcgacggtgtcacccacaccgtgccaatctacgagggttacgcgctgccccatgctattctccgcttggacttggccggccgtgacctcactgactacctgatgaagatcctcactgagcgtggttactccttcacgaccaccgccgagcgtgagattgtccgtgacatcaaggagaagctgtgctacgtggccctcgacttcgagcaggaaatggccaccgccgcttcgtcctcatcgctggagaagagctatgagctgcccgacggctaagtgattactgtcggaaacgagcgcttccgttgccctgaggcgttgttccagccatctttcctcggcatggagtcggctggcatccacgagacgtcgtacaactccatcatgaagtgcgacattgacatccgcaaagacttgtacgcgaacacggtgctgtccggcggctcgaccatgtacccgggcattgcggaccgtatgcagaaggagatcaccgcgctggcgccgtccacgatgaagatcaaaatcattgcgccgccggagcgcaaatattcggtgtggatcggcggctccatcctcgcctcgctctccactttccagcagatgtggatcagcaaatccgagtacgacgagtcgggcccgtccattgtgcaccgcaagtgcttctgattgagcg

SEQ ID NO: 87962 - DNA, 367 bp, Heterodera glycines
  unsure (1)..(367): unsure at all n locations
gaacagaagaaattcccggatgcaccggcgacctgacacctcttctgaccagtctgttgaccgctgtaaagcgatctcttcggctgtccgcaaggcgggattggcacaattgtacggagttgcgggaaatgtaaatgtgcaaggggaagacgtgaagaaattggatgtgctgagcaacgaactgatgattaacatgttgaagtcgtcatacaccgtttccactttggtttctgaagagaacgaacaggtcattgaggtggaagtgagcggcacccaaggcaaatacatcgtcacgttcgacccgctggacgggtcatcgaacatcgactgtttggtgtccatcggaaccatcttcggcatcnttcag

SEQ ID NO: 87963 - DNA, 558 bp, Heterodera glycines
cctttgttttggatggtaacgcgtaaaagttctaacaaaatcctgagcaaattcgtgaaatgatcaaagagactgccattccgcccaccgttttgcgagtgcacaacgaacgggcgaaggagtcgcttcagttggtcaacaacgaatacttgacgaaagcgtccgttcattttgacacaacgccactccatgtcgattaccgtgttcttggtccgccagcaactctctatcggaacaaccatcgtgtcactcctgccacgtcaaactgtgaatggcgtccgggtgacgctttggtgaatgcacaaattggcacctgggtagcctatgcgtttgggaaccctgtgggtgactcggtgcgacgattaggcctaaccgaaacgatgtggagaaatttcgtggacaagtatgcaagtgaaatgcgtaacaagggcattgtttgtgtgcctccggtgcgtgtctctatttgctggtatacgtccgtgaacgaggtcttgaatattttgcacaaggaagctctgaacggggggcgttgagttctgtctcattggtcatgcgaaa

SEQ ID NO: 87964 - DNA, 556 bp, Heterodera glycines
ttaccgatttgttgaagaaatacatttgtcacatcaatcaaatgcctaaatcgaaagagttggatgcgttgcgtattcgttttgaatatttgtcggcacttcttgaacttttggatgctctttttccatctattgaatcgcttctctcgaattccaatgacattgaaacaagatttgtgcccgatttgaaacggtccaacttgctactaccaaaatgcattcaacttaacaaaatgatttcgaacacaatatgtgttggttcgcagccttccgatggatttgactccgatttttcttggcttcccgtctttgatgccaattcgtctttatattttggacttcccagtttccctcgtaaatcaaggcttcttccgagagttggcgcgtgcgaatactttaataatctgttggaaaaaattttgtttgttgtttccaatttgccggaaataccacttaccgtcgagggaataattgagcttcttcaacaaattggtgaggatgactcatgcgttctcatccgttcactcactcaacttctcataatgccgaatgacca

SEQ ID NO: 87965 - DNA, 465 bp, Heterodera glycines
tggagcagcaaaaaaacaagagcgggagagagagcgcgagagggacagagagacgacggcgaaggagaaaaaggagcgaaagcgaagcaggtcgcgggagaagaagcgcgacaaggacgaggaaaagtcttcaaaaaagagcaaaaagagttcctcgagtgatttgtcccattcgcccaaaaaggcaaagaaagagccgcaaacgccgccgtcggaacggacaaacgccagcggtaaaggaaaggaatgaatgaaagcacagaaaaagggcgaaaacggcttttcatttgcattggacagacaaattgcaatttttttgctttgttaatttatttttcctttaaagtgtataaatttttgtttgtttaaaaaaaaaaaaaaaaaaaaaaaaaaaaaaaaactctgcaataagaaaccaatgattaataaaaattaccgaggacaacatggaaggccgggagcatg

SEQ ID NO: 87966 - DNA, 417 bp, Heterodera glycines
ttaaagatccgaaaaaatgccaaacattttcaaaatccttctgattgtgcttttggccgtcgtctcattccgtctctcggcttctactggtgacaaaaaaactgctaatgatgggagtggaaacaactcatcagctgggattggtacgaagatcaaaagaattgtcaccgctggactgctcttcacttccctggcgacgggtggggcggaagcgattgggcgaagcaatgctcagggaggaaatgccgccggattggtgccatcgcatgtgaccaatcgctcaatggctccaccacctcctcctgtgcaatttgaaatgggggcaaatcgattagaaaaaatgagggcacacctacgcgaacttgctgagaaaatgccggtcaatgaatcgaagcgtctgtcaccgagtggacccga

SEQ ID NO: 87967 - DNA, 753 bp, Heterodera glycines
  unsure (1)..(753): unsure at all n locations
cccgagaaatgggacatgaatacggtggttccaccaatttcactggcaacaacatataagcagcaatttgctggaatgcccaaaggtcatgattacgcacgaggcggcaatcccacccgtgatgtgctacaacaaagcattgccgcgctggaaaatgctcgtcactgtcgcgtgttcagctccggactttcagccacagcagcaatggcaaattggcttcattctggcgaccacattattgcgtcggatgatggctatggtggcactcaacgctattttcggcaaatctctgtccagcatcatggcatggaattgagctttgttgatttaacgaaattgtcaaacttggagaaggaatttaagccgaatacgaagatggtgtggtttgaaacaccctcaaatcctcttctgaaagtgatagacattgaagcagtgtgtcgtgcagttcagtcacgatcaaaagaatgcattattgtagtcgacaacacgtttatgacaccgtactttcaacgtccgttggaacttggcgctgatgttgtgatgcattcgttgaccaagtacatcaacgggcacaccgatgtgctgatgggtgccatggtgaccaacaatgatgagcttgatcaacaccttaactcacagcaactcgctgctggtgccgtcccgtcaccgtttgacgtctatttggtgatccgtggcatcaaaacgctccatttgcgaatgcgacagcacatggaaaatgcatnggcagttgca

SEQ ID NO: 87968 - DNA, 280 bp, Heterodera glycines
tgaggaatttttcgtcgacagaattctcctcccagcgaatacagaataagctgtttgcgaattcttcttccatcagttcggatggccgcgaacttcagattgaatattggacttcactcggttacccatttccttcatcttcgacagcgcactgcaattacatttcaccaaatgatgtgggacactcgaacaatgcaaatgtcgggagcaaattttcgatgaaagcatctgtccggaccctttccattgttcgtgaaccgatgtccaatttgctgtcaat

SEQ ID NO: 87969 - DNA, 393 bp, Heterodera glycines
  unsure (1)..(393): unsure at all n locations
tcccgccgcctgtctgctgttggcacttcgcatgaagggcatcggcgaatggggacccgttttgcacaagtacaccggcttcaaacattctgatattgaaccgctgatgtggcgtctcaatcggatgatcatcgaacgtaaacagcattatccggacttggacactgttttcctaaatatagccatgaaattttcttcgaagtggcgaagactaagcagctgagggaacattgattgaattatgccatttttgattgatggcctattggcattaaagtatttgtgtcattttttttaattaacaataaactgaaagaaggataaaaaaaaaaaaaaaaaaaaaaaaaaaaaaaaaaaaaaaaaaaaaaaaaaaaaaaaaaaaaaaaaaaannt

SEQ ID NO: 87970 - DNA, 465 bp, Heterodera glycines
  unsure (1)..(465): unsure at all n locations
caatgcgatgcgaagctggttgacgagtgctgcgcagctaacacggagagtggcgactgctgttgcgtctgtttgagctgcaatgaccaaaagtgtgtggtcaccgtccgttgtcctgctggagaagcaaagtcgactggtccaacttgtactgcttcaaaatgcgaaagtgtgaagtgctgctgaagtcaaaaaactgatcgaagactgaaaggatgcatgcatttaactgactcagttttaaaaatgctttttcaattagaaaaaataaataattgttgaaaaaaaaaaaaaaaaaaaaaaaaaaaaaaaaaaaaaaaaaaaaaaaaaaaaaaaaaaaaaaaaaaaaaaaaaaaaaaaatttaaaaaaaaaaaaaaaaaaaaaaaaaantcccctggggggtttcccccctgttttaaaacttataaaaatttcgggcccccccggggggcccccattttggg

SEQ ID NO: 87971 - DNA, 712 bp, Heterodera glycines
  unsure (1)..(712): unsure at all n locations
tggacgttgcccgtctcttccccttctactgttcatattgttccattatggagttgttgttgccattctacataaattgtttccccggatgatgccttctacgtttcaggacacctccaattcggaacaacagtacaaaaggcagctgaaagccaagaatgagacggccaaatttttgcaagattcgctggaagaaattgcgctggctcgccaggagcaagggcatgcccacggggcgcaagcaatcgaatttgctcaattccttaaaaaggttcgtacgggtgagggcggctatgtgaacaaccaggagctgttcaagttcagcaagttgttcgaggacgaactgacgctggacaatctgagcatggtccatctgcgagcgttgtgccgtctgttgggcattgctcagtttggaacgccggaaattttgcgatttcgtctgcgcatgaaactgcgcgagttgaaggcggatgaccaactcattgaacgggagggcggtgttgaagtgctttctgcccaagagttgcaggcggcgtgccgcgcacgcggaatgcgagcgcttgggctcagcgaagaacgacttcggcaacagctaaggcaatgggttgagctgtcgttggatgagcaggtgccgccctcactgttgttgttgacccgtgccatgtactttcccgnagacgtggacttcactgctcgcattcgttccattggt

SEQ ID NO: 87972 - DNA, 531 bp, Heterodera glycines
  unsure (1)..(531): unsure at all n locations
catcttcttccgatgacgctgataatgaagaaaccgatggatgtgcgtgccctgctgaaaagccacaatcaccgcatcattcctcctcatcatcaccagtgatgccatcatcccccaaacattcttctttgccttcatcacccaaacatcattcttctgaggatgaagcggaagtgaagcaatcaccacctcatcatcattcatcttccgactcggaaaaagaagaacaaaaacttcatgcctgattcataggcaccagaaccagttggatttgaacagatgaatttgagaagtaccatctgcaaatagggacacttttttcaaatattaccattttacgaatttccacctttttaacacacactttctatcttttatatcatagattaatgatatggaaatttttattctatcctttaaaaattgtgtcgtcttgaattgttattattaatagctattttaaagaaatgatttgcacttaanaaaaaaaaaaaaaaaaaaaaaagccnaaaaaaaaaaaaaaaaaaaaaa

SEQ ID NO: 87973 - DNA, 327 bp, Heterodera glycines
attgcctattaattagtctttatgatgatgggccatcctcatgcccatggtccctctgtgcctctctcctccgctctctctgtcgctgcctctgatcagcaagatcactgctgtgccgtgtgcggctgcgtcggtgccaccatttattgttccgttttttcgtgccgtccctgcgcttctttctttcgccgttccatcaaagaccaacgcgagtacaaatgccgcgcgaatggcgactgtccaattgacaaaggtgagagagagaaagccaagagtatgaatggcaagtggttattttgataacactttgttcatctttggattagg

SEQ ID NO: 87974 - DNA, 155 bp, Heterodera glycines
tactgtccacattttgctgtcggatgttgcgtgcgactgagtgatgtgaacttgaccagtttatttcatgcaagcgagatggatatagctagggcgaggatgaaatcctcagaatcctacgggatgaaatactgcgccccgggtacaaccatctt

SEQ ID NO: 87975 - DNA, 645 bp, Heterodera glycines
  unsure (1)..(645): unsure at all n locations
atttccccgtgttaccgtatgcgatttttctgtttttaaatattctcaacctgtcaattttaccattgaatgcgttttgccgttgaatatgttcaacgaaaaaattttcgtgttttttttcttttggctttgttttttgttggcattgaccgttttctcaattttcctttggttggaccgtgtgcgaaatcggcgagactatttccgaaaattattgcagatttatgcgcgaaatgatcacaaaattatgtcggaagagtcggcgctcaatttgtgctcatttgggtccgaccttcgcattgtttttggccttttgcacgacaaaattgggctgattttttgtgcgaaaattttccggagaatgtgcgaaatcaaaagtgaagaagaaaaagggatggaggaaaaagaaaaaagcgaaaaaggaagaagggaaacggaagagaaagaaaaagaggaggaaaaggaatgaaaaggaaacggaggaaaaggaagaagggaaacggaagagaaagaaaaagagcaggaaaaggaagaagggaaacggaagagaaagaggaggaaaaggaatgaaatggaaacggaggaaaaggaagaagggaaacggaagagaaagaaaaagaggaggaaaaggaatgaaaagganac

SEQ ID NO: 87976 - DNA, 544 bp, Heterodera glycines
tactgaaatgggcgtaattacgtggggccgcaagaaatcgccgtcgtccctcacggcgtccgtttctccgtcgacgtttccgtgccgagccgcggttatcttctggaagatttcgacgagacattttcaacttcccgaattgggcccaatcggtgccaacggattggcaaatgctcattgttttcgcattccgaccgcttggcttgaggagagagagactcatttcatcatcatcaacaaattacaaggacaactcttcgccgctgaacagaatcattcgcctttcgatgtcttcgcttggcgtggcaattattttccgtataaattatacttgcgtcattttatgagtgctaacgagcggggcttttgaccattgcgacccgagcattatcactgtgctcaccgtccctggccttcgtaagggcgtcgaactcgccaattttgtcattttcccgccgcgttggttcgtcgccgatggcactttccgtactccttatttccaccgaaattgtctgagcgaatctatgggtctgatcgatgggcg

SEQ ID NO: 87977 - DNA, 640 bp, Heterodera glycines
agaacaaagccgcagtttttttcgaggaaggaaaatacgacgaatgcatcgaaatgtgtggaaaagcggtggaagttggacgagagaatcgggcggactatgcgctggtggcaaaggcttacgctcgaatggcaaacagttacaaaatgaaggacgaccccaagaaggcactgcacttctacgaaaaggcattgtcgggacatcgcgacccggacattgtgaagaagcacaaggaattagcgaaggaagtcaaagagatggagcagaaggcatacattgacccggaattgtcggataaagaaaagaacttgggcaaccaattgttcaagaaaggcgattaccccggggctatgagacattacaacgaggcgattaaacggaatccggacaacgctgtgctctactcgaaccgtgccgcgtgcttcaccaaacttatggaattccaaagggccgtcgacgactgcgacctttgcctgaagaaggacccttctttcgttaaggcgtacatcagaaagggcgctgctttgtccgcaatgcgcgagttcggccgagcccaaaaggcttatgaggacgcattgcaaatggacccgagcaatcatgaagcgatggagggactgcgcacgtgcatgcagtcgaacga

SEQ ID NO: 87978 - DNA, 680 bp, Heterodera glycines
cgccactgcgaaaagcgtacccaaacttggacatccagtggacggcggggtcggactggacaacatcgaacactgtgcgaacgcaggggccaatatgatcgtttctgggactggaatcgttcggtcggctgacccgcgtcagacaatgcaaaagatgagggaaactgtcgaaattgcttcctcaaaagaaacactcggcgtttaaatcgttttccattttaaaataacgaagatcgtttttgatttattgttatcactttctgttcacttatcttaagttagatagtctaaatgaaattcatttgttcaaaaaaaaaaaaaaaaaaaaaaaaaaaaaaaaaaaaaaaaaaaaaaaaaaaaaaaaaaaaaaaaaaaaaaaaaaaaaaaaaaaaggggccaataaaaaaaaaaaaaaaaaaaaaatccttttggttgttccccccggttaaacccctaagaatatcgggccccccggggggcccacttttgggaaaaccccccaccgggggggggcctaaccttgggtttttttttggggcccccaaaaaattgggggaaaaaccgggcaatacctgttccctcgggagaaaattgttttcctttaaaattcccccaaacaataaaaccgggaaacataaaagggaaaacccggggggccccttaggggggcccccccccca

SEQ ID NO: 87979 - DNA, 744 bp, Heterodera glycines
ccaaagcggcggtgaagcagcggcggcaattcgtgtgctcgtgacgggtggcaccggactggtcgggtcggcaattcgacaggtggtgacggaggaggagcagcaacagaagccccagcggttgcaggagcagtggtttttcgtgggcagcagcgagtgcgacctgaccgacttggagcagacgcgggcgcttttccgccacgttcggccgacgcacgtggtcaatttggcggcaatggtcggcggactgttccacaacttgcgccacaacctccaattctttgtcaagaatttggcgatctgtcaaaatgttctccaatgctgccatgagactgacgtggaacggtgcgtttcgtgcctttccacgtgcattttccccgacaaaacgccgtacccaattgacgagacaatggtacataacggaccgccgcatgacagcaattttggctattcgtacgccaaacgaatgatcgatgtactcaaccgcggatatgctcaggagcacaatcgaaagtacacttcggcagtgccgtgcaatgtgtttggaccgcatgacaatttcaatttggagaacgcccacgtggtcccggcactgatccacaagtgctttttggccaagcgcgacggcggccctttggtggttgccggctcgggcaaaccgttgcggcaattcatttactcgttggacctcggccgtctctttgtgtgggcaatccgcgaatacgaggacgtggaacccatcat

SEQ ID NO: 87980 - DNA, 643 bp, Heterodera glycines
agatttatgcctgggccttacccgcgtaacgaagaagaacgaagggcggctgccataaaatacggactacggcccgaggattacaagccccatcacccactcgacttcgtcaaccacattggagactatcccgaaattggcgttgtcacgtacgaacagagagacccttacgacaattactcgcacacaatgcatcgtcgcaattggaatgaacccgtcccacgccaattcacgcggtaccgttacgaccgctggtcgtataccggactggacgaagagaactacgagccgagagaagtgctccgcactttgctgatgtactttgtgcctgtgtttttgctggcttattggttgatcagaacgccggaagaccctttctactggtttaagcaaaaatatgagccggtgtatcgtcctcgagtaatgcctcgccaatacccttacgactatttccgcgcgtggccattcgaagagtacacaaagtatcccgttctgaactacacttttgagccggcagacgaaggatttgacccgaaagaagctgaagtgaaacatccattcaatgagacatctcgcgtccccctttaagcaaagaaaagattgcctttccgtttgtatattgcaggaaatagacaattttatt

SEQ ID NO: 87981 - DNA, 620 bp, Heterodera glycines
  unsure (1)..(620): unsure at all n locations
ctcggacttgagttggtactaaaattgaggagctgttcaggaatatatttgttcgaccgggcgatcgtctgctccttctttccgtggatcatctattggattaagcggaggaacagtcacattctcacaggattcacttttcgtcgtcggaacatttcatataccgatctgaagatgacaatccctcgtttctcttctccgttttaccattgctcggcggttgcgctcgatgctttgtacagatggagtatcaaagtctgtcttcctcactttctcggtgttgacatgttgctcattgagcgtggcgaaatttgcgaaaattttgtgagtgaaatggttgaccagggatttcacatgtgcgtgtggactgttaacgacaaaaatgaaatggcttggatcgcacataagttgaaaatcccatttcttacggactttccacataaggctcggggggttctggacggagcaaacggagtgcccacggaattgaccttcgaattgaattaggaacataaaatcaagtttttgtatgaagtgtatgtttgtttcattgtatagtaatatntgatgtctttaccggtatttatttatttacttcttggaaataaacgcaaaacctt

SEQ ID NO: 87982 - DNA, 646 bp, Heterodera glycines
atttccccgtgttaccgtatgcgatttttctgtttttaaatattctcaacctgtcaattttaccattgaatgcgttttgccgttgaatatgttcaacgaaaaaattttcgtgttttttttcttttggctttgttttttgttggcattgaccgttttctcaattttcctttggttggaccgtgtgcgaaatcggcgagactatttccgaaaattattgcagatttatgcgcgaaatgatcacaaaattatgtcggaagagtcggcgctcaatttgtgctcatttgggtccgaccttcgcattgtttttggccttttgcacgacaaaattgggctgattttttgtgcgaaaattttccggagaatgtgcgaaatcaaaagtgaagaagaaaaagggatggaggaaaaagaaaaaagcgaaaaaggaagaagggaaacggaagagaaagaaaaagaggaggaaaaggaatgaaaaggaaacggaggaaaaggaagaagggaaacggaagagaaagaaaaagagcaggaaaaggaagaagggaaacggaagagaaagaggaggaaaaggaatgaaatggaaacggaggaaaaggaagaagggaaacggaagagaaagaaaaagaggaggaaaaggaatgaaaaggaaacc

SEQ ID NO: 87983 - DNA, 659 bp, Heterodera glycines
gtgagcaaaacgtttgaagaaactggcattcctttgacaaagtcgattcgaccattgaaaagaagctgtcagatgaatacgctgtgaaaggatttccaactctcaaaatactccgaaatggccgaaggttcgattataatgggccgagagaagccgacgggatcgtttcgtatatgttggaccaggccaagccggccgccaaacggctcaattcggcgaaggaggtgctcaagttcatgtccccctctgatgtgacagtcgtcggctttttctcctccgaaagcggcgctttttacgaagcttttgctgacgcggcggaaaggacgcgcggtgattttgccgttgggtacgccttggacggtgccattgcgcagcattttggcgcaaaatttggcgaagtagtactcttctggccagagatattccattcggagtacgagcccaaacggaagattttcccacgagagacggccacaagcgaagagttggtttccttctggcgcgacaatgccattccgttggttggccaaatgacccgtgccaattcggccacgcggtaccaccgccgcccattggtggccgtttattacaacgtcgacttctccttggcctacagagatgggacgcaattttggcggaagaaagtgttggccattgcc

SEQ ID NO: 87984 - DNA, 260 bp, Heterodera glycines
  unsure (1)..(260): unsure at all n locations
tatcgtccgacaaaaaaaacangtggnaggggaaatggatttnnnnnnaaggaggtggggcagatctctctcnttgtttnctnacctttcctttgctttnttttgcatgttttcaatgcaatgggaaccctttaacttgttggggcttttggggccccccaatgaaaaaagggggggcctttggcccaaaaaanaccaaaaaggggggcgcgcccccaaattttttgggggggggggggttttttttttggggggggggg

SEQ ID NO: 87985 - DNA, 251 bp, Heterodera glycines
ttatattttatgatacaatctccaaactccgacgatgattcattgaagacgctttgttatcagctgctcgtgccaacttctgctgctaatatcggtttcgcaatcggtgattttcaaattcacgtgcagccagaaatgcccgagattattaactttgtcgttccggagctcattccgctcttaaaacacacaatgaaatcgctgaatagaatttttgtctttttcgaagaacttttgtcatgccgatttcc

SEQ ID NO: 87986 - DNA, 525 bp, Heterodera glycines
tcatttaaatcgctttttgcgtcggacgagggattgcgacgtggtcgagtgggcctattgcttcgatgtccatttgaatgcttttttcccgttgctcattcttctccacgtcattttacctttgcttttctacggattggttgattaccaaaattttctcgcccgcttttttggcaattccatttggtgcattgccaccatttattataattacattactttcctcggctataccgcacttcccacgctgaaaaacacgcaattcttcctctacccaatcactttccttttcattttcttcgttgccgccacaagcgccggttggaacgtttcgatcaccgcgatggacttttaccatttccgagtaacgaacgcagaccgtagaggatgacatggagagagagaaagaggaagcaaaatagacgaaggaccatccccaacttaaaaccaacccaagtcattgtccgttccaaaagagtgcataaatatattccatagaccaaaaaaaaaaaaaaaaaaaaaaaa

SEQ ID NO: 87987 - DNA, 824 bp, Heterodera glycines
  unsure (1)..(824): unsure at all n locations
acaccgccgctttaactgcatcgtcgacgaacacttcaagacacgcaaatggaaattgggctgcatgcgaatttgcccaaaattggagaaaatggcactaagcaattgcaaattgtcaattccgatgcaaagccattgccaattccgcaaaatccgttgcccaacaaagtcatcggattcagacacattcagatccattacatcgatcaaaatgtcatcgcatttctccgccgttttcaccgtcgtattttcgatgtttgttcaatggttttgtacattcacacagacaatgaccgcattttggactactttttgctcaacatttggccaatgtttcgtcattcaatgcgtctgatgaatttgaattccatctctttacgccgtctgcgccaattggccggcccgtcactgctcagcgattgtccatcacttcgctttgtctcttttaatgaagccattctgcccgcttttccgcctgatgaaagtgccaatgcttcggatggccaagcgctggccaaatggctgttcacgccccgtccggatggtcagttcaagtggttcagaggctttgtcaattcaccggatcaatggtctccaacgatggaacagctgaaaacggcattttccaatgcttcttctccaattacttaccgtatttccttggcgttttcgtccacatcaattgactccgttgtgccatttgatgatctgatcaacgaagtgactgggggagaaattgacactggaacanaatgacacanatgattgttggctcagccgttgtccaattgcatgggattaccgaaagtggaaaatctgtcaga

SEQ ID NO: 87988 - DNA, 388 bp, Heterodera glycines
atgttccacattcagcactatcgcatgatcgactagtgacgtgacacagagacctggaccagtttattttattctattgagatgaaactgcgacggcgaggatgaaatgctcagattccccgggaagaaatgctgcgccccgggtacaacacatctataatacaatggatggctgatccccataactgaccacattgggtactttctgaatctgttgatgccgatgataaggtttctttggcatagtaggcgcattagtaccttggtgtcgtggatcagataaaaccacttcacttgtgcctgattcgtgagccccagaccctgcgtttttgcacctgataaattgatttccctcggccgcgatcgacgtatggagcatctttcctca

SEQ ID NO: 87989 - DNA, 791 bp, Heterodera glycines
  unsure (1)..(791): unsure at all n locations
tattgtcgtgatgtactccgttatgagaatgaaacactttcgagacagcctgagtgtgaacctttactcactgattggatacataggctgcttttcgctcgaatacggtcggtctttcccggtactgtcccaacaaattggtcgatgtggtaaactccggccacattttgtccttccttagccaatattacacttcgccacgcattgttttggcaggcgtgggtgttgaccagcaatttcttgtcgactcgggcaaagagttgttcgacccacgcgaaaccacttgggagaagcatcccgaacgtctcttgacacaattgccgcccgtggacgaatctttggcccaatacacaggtggcgaagtgctcattgagaaggacctcagtcagatggcacttggccctacgccattcccaaatttggcacatattgtcatcggattcgagggtgtcaatgtgagtgatgccgattttgtgcccttttgtgtgctccaaagtttgatgggcggtggtgggagtttcagtgccggtgggcccggaaaagggatgtacacgcgactatacgtggatgtccttaaccagcaccattggatatacaatgctaccgctttcaatcattcctacatggactccggtcttttttgcattcgcgccagcgccgacccgactaagcttaacgatttggtggacattattctcgcggagttcggccgtcttactaagggcgcgtggctggatgaattggagagggccaaagntcagctgaagtcgcaactgttgatgaacctcgaa

SEQ ID NO: 87990 - DNA, 480 bp, Heterodera glycines
gttgctcaagttcatcaacagtaccattctcaacaacacctatcaaaatggcacgacaaatgaaagaagcgggaaagccgtcgtacaagctgtacgttcgacggatgctgaagcaaactcacccggacaaggaaatctcaacgcgtgtgttgaacatcatggagtcgttcctcaacgatttgatggatcgcattgcaacggaagcatacgctcattgctctctataaccgccgcaagaccatgaatcttcgtgatatgcagtccgccgtccaactgtgcctccctgtcggaatggccacgcgtgcgaatcgcaaggcatatgatgtggtggcacagtacaatgctgctaggaaacggaagggcatcttggggcaattctgcagttggttgggattttgagggagcaatgaggacgatatttttgacatttgatgtacagtgaatatattgtaatgcaagtctgtatcacatgttcaggtg

SEQ ID NO: 87991 - DNA, 359 bp, Heterodera glycines
  unsure (1)..(359): unsure at all n locations
actcgtcgacggcgggcgtcttcgtcaaaaaaagtcgacacaaagtctgggcccattccatcgccgctggaagcgtttttgaaaccgcagctgaacaacgcgatgtccgacccgtctcagaactgtctgattcttctgcaagtgctctacgggctgaacacattttggtggcgaatttttgatgcaaatgatgccgacactgatgaggacgacaatgatgctgctgatgaggaggagggctccgatggagaggaggaaacgacggatgaagtcgaggacaacgagcagaaacaaccgcanacaaatntaccaccaatcacacacagaccgatcatcgccccgagtttcttctactcacc

SEQ ID NO: 87992 - DNA, 139 bp, Heterodera glycines
acatcctttcggcgatctgagcggcggcatcgaagagaccctgtccgaacgcgtcctgaatcaggatgagatcgacagcctgctgggctttgacatgggcgacgacgacggctctgagcggtcgggcatccgcgccatc

SEQ ID NO: 87993 - DNA, 337 bp, Heterodera glycines
ctcacgacagaagatacttctggcacagatcgcgtctttggattgtctgtgaacgtatgagggctggtgagccacgtcatctttcgccgacgcgggggatgtacaccgtataccccaactacaacaatggcttccgaacaatcgaactattcctcgaccactaccttcgcaccggaacatctgtcaccaccgagcgattcgtcactctcaggaaggccgtgcaccgggcgaattgggagctgtcgcactcatccatcaccgtcagctcagagttggggagaggggcattcagcgtggtcaaataagcagtgctcacctaacgcaatgggaacaacta

SEQ ID NO: 87994 - DNA, 746 bp, Heterodera glycines
acatcgtttatttcttttgtattcacatcgtttaaaatcaaaacaaatgcctcaaaacgagcatattgaactacacagaaaacgccatgggcgaaaattggatcacgaagagcgcacgcgaaagaaactggccagagctgttcatgaccgttcaaaagtggccaagaaattgcggaaagggaaggcgaagttgtaccacaagaagagatatgcggagaaggtccaaatgcgaaaattgatcaaacaacacgaggagaagaagcaaaaggggacgacggacactcaaacggagggagcagtccccgcctatttgttggaccggcaaaaggaaacggcggggaaggcactttcgactgccatcaaacagaaacggaaggaaaaagcggcaaagtaccaagtgcctttgccaaaagtgagggcggtcagcgacgcggaggccttcaaagttgtcaatacgggaaaaactagacgaaaagggtggaaaaggatggtcaccaaagtcactttcgtcggcgaaacattcacacggaaaccggcaaaattcgaacgattcattcgtccgatgggtctccgttttaaaaaggcacatgtcacccatcctgaactgaagaccactttttgccttccgttggttggcgtcaaaaagaacccttcttctcaattgtacacttccctcggcgtcatcactaaagggacaattatcgaagtgaatgtcagtgaactcggaatggtcacacagggcgggc

SEQ ID NO: 87995 - DNA, 204 bp, Heterodera glycines
caaaaacattgtttgaaatttttaaataatttctgctaaatgaaatatttaatagccgtgtaacgctaaggtagcgtaatcaaaagtttattaattgtaaacctgtatgaaagaagagtcgagaagtagctatccctgcccaagattttgaaattaaagaatattaaaaaatagattctctcttacaagacgagaagaccctag

SEQ ID NO: 87996 - DNA, 594 bp, Heterodera glycines
  unsure (1)..(594): unsure at all n locations
caatttcttatcgtcagcttctgttcattgctgcttttctcttcatcggttgtcatgcgcatgatggcgttgatacacgcatctggcgagcttcacttgtgccacggcgaaggacggtgcaatcaatggcttcacagcgggtgacggtggtctgacaattggttccgacgccactaatgccactggtgctattatcctctttggtttccagacgagcaacaagaaggatttgagcttcaaagtctttgcgccaacatcagcatcatgcctctcatcagtgaacaacttcgtcatcagcggccgaatttgtaaactcgaagcgttggagacagagactgaatcggctaactgtccggaagaagacagcgctggctccggttgcaactcccgcagtgtcacctgccaaatgacaaccaaagaaatcgcggaatcggatgacggtcgagtgttcaaagtcgacttgggaaatctcacacaagtgacgtcactgtgcacgaagtggaaggcgcatttcaccaacgttcgtcaagtgatggaatcaagcggaggcggagaaccgcgtgtgtctactcgtacttcngcggcgggcggtgg

SEQ ID NO: 87997 - DNA, 774 bp, Heterodera glycines
accgtagttgtccataagcttttccttctcccccaataattccgttcgctttctccgctttttctctccgatgacttccccctttcactccctcgtggagtctcagcgggaattctttcggacgggcaaaaccgccgaattggcacatcggaggcagcagctgaagaaactgcgcaagacaatcctcgacaacagcgaatttctctgcgaagccgtgcaaaaggacctgaaaagggacgcgaaactgaattatccgctcgaaatttcgtcggtgatcattgaaattgaatatgtactcgacaatttggagcgatggacggcgcctttaaatgtcgaaaagactttcaccacacttctcgactccccgcaaatcgttcgcgagccgaagggcgtcgttttgctcattggtccatggaattaccccctcaacactttgctaatgcctttggtcgacgttttagccgctgggaatactgccattttgaaaccgtccgaagtcgcgtcgaacaccgccgccgccgttgacgaaattatttcgaaggcatttgaccggaattatttggcagtggtgcagggcggcattgaacagaccggcgaattgctgaaggaaaagttcgaccacattgtgttcaccgggtcagcgctggtcgcccgccacatttccagggcggccgcggaacatttgacgccctgcactttggaactcggcggaaaatcgcccgtgttcatcgactccaacgtggaccttccgatcaccgcgcgtcgattggcctg

SEQ ID NO: 87998 - DNA, 173 bp, Heterodera glycines
  unsure (1)..(173): unsure at all n locations
ttgtaaatttcggcatcaccgcagcaggtccactcctactatgtccagggggacaacccctacgatcagcatgcggatttggatgtgccgcaccgtcccaagaacaacagccgtttaattcgaacatttcgcggagcaaggcaaggccgggatgccgaagaacgacctgngct

SEQ ID NO: 87999 - DNA, 352 bp, Heterodera glycines
  unsure (1)..(352): unsure at all n locations
cagctgtcggatgagggcactacggctgctgccctctgccaaggccatttgctgcatggaccatttgcactgctgccccgaggacacccaatgcgatttgccgcaacaaaaatgtgtgaattcggacggaaattcgcagccattccatcggaaaatgccggcaaaaactcaaaacggagagacagttgagcaaaaaggaacggacaaagaagcgacagaagaagtgatttgccccgacggaagttcgaagtgtccgccccgtgccacgtgttgtccgctcggcgacggattcggacgccgtcgaaaagactnttggcgactcgaaactaacgctcagcaaagcatatcctac

SEQ ID NO: 88000 - DNA, 677 bp, Heterodera glycines
aagcggggtttcttttgcattataattgtaataattgatcgtctccccaatggcttcttcactcaccattgaaaaacgctgcaaacttttcaacacaaaacaaatggaatgccaattcgatggaactgaagccggaaaatgtgctttttgtgtaaagcttccgtgtaaatttggagcagttaattgtgcagaggaagtgagcatctcttgtgtaaatcagcaagaattggaaaaatgctgcaaggcgcgtgacaacgaatgctgcgtgtgtgtgctatgcgagaaaaacaaagttatgaaggttttggtcgaatgttgcggaaagcgcaccgaaacgagtgccgaggccgggaaagcgctttgcatttgtgtgccgaaaattggtggaggcaaatgtggaggacaagtgcaagtgaaacaatgcgatgcgaagctggttgacgagtgctgcgcagctaacacggagagtggcgactgctgttgcgtctgtttgagttgcaatgaccaaaagtgtgtggtcaccgtccgttgtcctgctggagaagcaaagtcgactggtccaacttgtactgcttcaaaatgcgaaagtgtgaagtgctgctgaagtcaaaaaactgatcgaagactgaaaggatgcatgcatttaactgactcagttttaaaaatgctttttcaat

SEQ ID NO: 88001 - DNA, 544 bp, Heterodera glycines
  unsure (1)..(544): unsure at all n locations
taattcctgcgtattattgcggctgctgttctctgtccgtgccatcatcaaatcaaatcaacgaaagctgagccatcggaagtgtgcacaaatcgactaccaaacgaaactgggcaccacaaatcaacaaaatcatcattatcatcagcagtaaaagtggtgcagaaggaaacgcatggaccaaatcggcggcactttcagcgaccaaatttggctcgacacattggcgtggattggacgtggcgaggtcggatggcacttggcgctggtcaacgcccgcttcgccgccctggtgaacatgcagctgcagcagaggcggntggtgtttggaggagtttcacatcantgagcggaagccgaaacggactggcgccgaagtgttgagcttggcaaacaacggctcctacttctcgttgccattggccacctcaccgttgccggacagtgtcatcggattcaacggcacattcaacatttggtatttggacgcagaagtgatcaattttctgcaacgatttcggcgcctcttcaacacgtacatctc

SEQ ID NO: 88002 - DNA, 707 bp, Heterodera glycines
  unsure (1)..(707): unsure at all n locations
ccgcaacattaagtgacgaattggaacggttgaaggaggaattgacacggaagacggaagagaacggcaaaatggaatcgaaatttggggaagtgaatcaatggtggaacgacgccaagtggagagtgggcgaattggaggccgaaacggcacatcgaagccatctgttggacagagcccaccatcgaattggtgaattggagaggagattggcgaacaatctttccttcgaggatttgaggcgagagaaggaaacgctggagggacgagtggccgaactcaccaaagcactcgacgacgcaaaatggagggtcggagaattggaagcggaaatgacacggaaggacaacttcgaggaacagaagcgaaagttggagtggcgacttggagagatgacacagtggtggaacgacgcgaaatggagaatcggcgaattggaggcgactttgggacacgagggaagcgcacgcaataaccgaggggaaggcaatggagacgacaacttanctgagactttgggacggttcagggaactgttgagcgacggcattttgctcatcagaaaacagtcacatttggacagagacaagtggaagatgatgaaatatgagcatgcactggagaaggatgttcgtctgaggagttgttggttccaagtcgattctgaaaggcatcangaagtgtttctgattggcacttttgtgaat

SEQ ID NO: 88003 - DNA, 443 bp, Heterodera glycines
ctccctattttccccgtcattttggtgttgaaaatgtcttcagaaattccgtatgtttattatttccattttcctattgtttttcatttcttttgctcgactttaaccaattttagagaaaaaacaaattttgaaagtttagcttttttgaagcttaaacatcaattttgggttccctcactttgatgctgcttttcccttcccttcccttcccttccattcccttcccttccattccattcattcattcattcattcattcattcatttctcttattcattttcagttggtctgccgtgtttcttctattggtcgattgtgccaccattcttttttggttctttttggacaatgcaaaaaaacgacgacgcccacacaaaaaagaaatctttatctgcggcgattgttggcttttggtgttcgattttcttgcgccttctca

SEQ ID NO: 88004 - DNA, 720 bp, Heterodera glycines
caagaaattgtcctttaaggccacctaatctgtctgtctgtaatatttgtttgcttcgccaccgtcgaatttatgcaacttttggcaaccgatgattattattttattaaatctgttaaaacaattctgaaatgctgcaggaccacagcgaacatttcagtttttcgccattgtgaccttgccgcacttgaagattttgagctattgggagatgtttttgcatttatcgggaaaatcactgtcgatgacatttcttatcttcttctcgtctccgaatgttcggagatagccgaaattgaaacggtgaatgcaacattaacacgagttgagagagtatgcgcattacctgtgttaactgatggtatgatccataagaaattgttcgacattccgtcacttgacggttttgaacgtctgaaaaatcgtccgaggaatttgcttaagcttatgtcacacaaagtgccgatcaaaaacctgccaacttcgcctaaactcatcgacgaaattatcgcctttttcaaccagccaaaaagtttctatttttcgcataatttcgacataactaaaacattgcaacagagtggctgtcttggttcttccacttctgacaatcgctttttttggaacaaaaatttgctgaaggaaatgttcgtcaacgacggttcgccaattcctgcattcaaagaatgggatactccgctcatttaccgattcatcgag

SEQ ID NO: 88005 - DNA, 455 bp, Heterodera glycines
gcattgccatgattatcgggcggggcgtaaacaagcggacgaaccaatgttaaaggtggaaatggctgctggtggtgatcatcccatgttaccacattggtcactggatccactcaccttgttctgagccatatgaaatggggggtggtacaaccgaaaaagtgtcggcacgcctgcacaaactgcctgaggaaaagccggtactggaattacagcgtccgatgccgagaggacccgacccacatctttattagggccgtggatggatctaactgatgaacagagaatggatcgataattgtcaaattgtataatatggtcttttatgccttagttgttcaactgaacaaatgttccacaggtctgtatgctccctgcagtgatcgaatctttgcagaaagatcgaacggcctcatatttggacagattggaattgcgaaaaaggactgctctgt

SEQ ID NO: 88006 - DNA, 720 bp, Heterodera glycines
gaatcgttttattacggcggcaattttaatgaagagaatgtcatccatgttcaaaaaggaaaatgatcagaagaacattttggaaaaaatcagtgaattggagaagcagacacagaaaaaggggtttttaaaattccaagaaaattgttgggattccttcgcttgtacaaggacatcgaaatcagtggagacaaaagtctcattgtccagcataagggaaatgattggccctccgtcttcgctaaatatccgattgtgctgaataagcatttgtctgactttttttactacgaaattccagttatgaaaaaagacgaaaggcattatgggctcgcttttggattcgctgttaaacagcagacaaaattggatgtagacattcgatataaaaagggcacttatgcctatgaaagcgatggctatttatgtattaacggaggaggaaagggaccaaatgccgaatatttatacggtgctggtgataccgtaggaattggcgtcaattcggccactcgacagatcattttcaccaaaaatgggcttcgtttggatacttctgattttttcgttgatccatcttttgctgatgattctctttatccattcgtttctttgcttgactctggtgacaaaattgaggcgaattttgggcccaatttcaaattcgatttggcgactctctgaaggaagaattaattattcactaatgttttcgatcaa

SEQ ID NO: 88007 - DNA, 644 bp, Heterodera glycines
  unsure (1)..(644): unsure at all n locations
ctgctgtatacaaatgtctttccgtctgctgggcattctctgcgttcttctcttcgtggcgcaactcacaaacggcgatgcagcttggaacgatgccaatgatgtgaaccccttcaaaggtcatcaggaacgcgctctggcattcaacgagaaactcaagcatgcggaagagaacacacccgaaaatgtcagccctacgccgacgccgtccatcaacgctacggagacgcctgatacgaacgcgacgatgactacctccgaggtgactggcacgtcgaccgaaggcccaactatcaagacgaccgcaaagcctgctccgccctcgaccagcagcttccaaatgacgatcctcaatatcgtcttaacgggacttatcgccgtgattcttcttgtcgacatcgtcctggctgtggtcaagtgtaagaagtaggaagaactgaaggaagaaggaaggaagagccgacctaccgctggtgtaaacaattgctcgataccaaataatctgtgtggcctgttcatcgtgatcttttatatccatgtgtcttgtttggagaccgtattctccctattctgttgtctaattgtatgtatatatacctataaacgatgtgcgcggaaaaaaaaannnnnnnnnnnnaaannnn

SEQ ID NO: 88008 - DNA, 505 bp, Heterodera glycines
cattcgctgaatttgttgtgcacttttgggtaaaatgcattttgcagaataagtttgaaacggcgcgcaattttctcgaacttggcgtcaaaagggtgacgctgctgcccgaaaccgagccgaccattttgctgtccttttactgctgctacgctgaggcgctgttccacaccggcgacatcgaacgtgcgcttgactacgccaagcgggcgcaaaaactgtcgcaagggagtgacattgatgcggctgtgcgggcgtacgtgcgcgacttctcacggcaaatcgaacgcgacacactgcgggcatctgttcggtcaaacaacgaaaggacggcttcttcttcttcttcaacttcactttctgcagagggcgcagaaggcacagaaaagggaatttcgaattggctgtggcccttcaaataatttaaaaaattgttttgcctaattttgcatcgttttttataaacaaatttgttttgaaaaaaaaaaaaaaaaaaaaaaaaaaa

SEQ ID NO: 88009 - DNA, 712 bp, Heterodera glycines
  unsure (1)..(712): unsure at all n locations
tggatgtgatgttctacggtacacacccgtgggtgctgttcatccgtctgcatgcgatcatgtgcgatcgactagcaaagatcaaaaggcgcactgaagagcttgccgaggagtaccacgtggagttggcgattcgggagaggcaaaagaaattgtttgaggaaaagggcgactcggtagaggcgcagctgatgaacgccgttgacgtgcacttgggactgcgcgacctgaagaaaccgttgcaaaatccggagaatttctaccagatcatgttgcaggaaatgaagaatctgctggatggacaagtcgacgcctccaaattcgaggacacattgagaagcatgttcgacaccagagcatacgttttgttcacaatggacaaacttgtcaacacgttggttcgtcagctgcaaaactttgtcggcgactcggccagcggacaatgtgtcgaacagttcgagaaatatttcgaccagcgagtcaatgggtgcgaaagtgggcaacccgctgctcgtgtggacaaagactacagcgaagcgatggaaaaggtgttgctcaatcagcactgcttcaaaatgttctttttcaatcgcgaccatccggtggtgaccatcgaactgattgacacggacgagacggagagtgaggagnagggaagaggaanaannanagtgccaatgtggtggcactgcacaattggaagcattntctc

SEQ ID NO: 88010 - DNA, 507 bp, Heterodera glycines
ggaaaatttgacggcggagcccaatcgattcagtgcgatcaatcaaaaataactaaaacgtggcgaatttatttgacctcggcattttaaattaacaaatttttatgaaatttcattttttcaaaatctaaattggccaatttgaaaaaagtgtgcggaaattgtcagactgaaccgaccgcggccgcttcatgtggcattttatttctaaggcatccgtgatgtgttccgcgaaatgttgcgcgaggaggggcaccgtgcgctgttccgcggcttcgtgcccgtcatgttgtgcgcattccacgccaacgcggcctgcttctccgggcttgagctggcgctgtgggcatttcgccaagcgggcatttgaaaaaaccatttttgctttaattcaaattcagtgctaatttaatcttattgtatttactgtattatgtcgaaaaattaaaaatcttttgctcataaatctcttatgtttcataaaaaaaaaaaaaaaaaaaaaaaaaa

SEQ ID NO: 88011 - DNA, 806 bp, Heterodera glycines
  unsure (1)..(806): unsure at all n locations
ttttttgaaaaggcaaaaaaaattaataaaaaaattatttacataagcaattcctttttcgtagcttacaatgttggctttctccttatttcctaactttttgcttctccttttggcaatttgccatgtccacggaatgttcggaagggaaagagaacgaaaatcggaggaaaagcgcacaaacagcagaagcagtagcagagaaaatcgtgagccagacaatggcatcctttccatcgaagttgtgccgagtttggctggcaaccctttacacggctatcgcttcgtcgttcggtgcggcactctcaaatttcgcgagtattcgcgagcggagtctgaagaattgcgatggatttacccaacgaaagagccggaaaaagtcgaaattcaactgaccaaagaacgatgtgtgaatatggccgtgttcatttttatgacaacgcgaaatcagacggacacaaatctttggaataaacaattccaagcgaacaccagctcacgccatttgtccgtcgatttcgtccattactcaaaattgacagtgtcccccaatttgggccaagtggtcagacagtcgtactatgtccaagtgcgctgcgcaaacactacaaagggacccggatgtgcttttccacaccgaattcaaatcggagactggtggttgtgctgctggagaacccgaattgtgtgggtgttcaccgncaaactgtggggtggtgtgggncaaaccaaaagctaaaggaaaacaaacccaaatttgtactgaaaaacatcggcattactcaatcgctcccgtgccacggatt

SEQ ID NO: 88012 - DNA, 778 bp, Heterodera glycines
aggcattggaaactgatcagacgaagcaaagcaaagagactaatgatcaaaggaccaaaacgatcgatcagaccaagccaaaggaagagattaatgttcaaaagaagccagaaattactgatcaaagcaacggcctggacaaaccaaaagaagcattgactgatcagagcaacaaaaaagagcatgacatcaacaaagaacaaattaatgctgagaagatgctaaaggacgtgatagctgatcatggaaagctaaaggcattggaaactgatcagatgaaaaaaaacgaagagatcgatggtcaaaagaccaaaatgatcggtcagacaaagccaaaggaagggattaatgatcaagaaaaaccgaaggcgaattcaactgattttatgaagccaaaggaagagactaatgatcaggaagagccaaaaacgatcggaactgatcagataaagccaaaggaagatgctgccaatacttcggtgaagtctaaagcagtgattattgatctgggcgatcccaaagagaataatgtcaacgatcggaagaagacaactacggatgataaagcgccaaaagtgatgccattcgcccaaactgagaaatcattgcacaaaatcaatgaccaaattgatcagcggatcaagccgagagaagaaaaccgggaccacattaagcaaagccgtgccaacactgagcatccattgcccggccaacggatcaagcccacaaaattcaaaaagccattcgatccgttatcaacagtggccgacactttgga

SEQ ID NO: 88013 - DNA, 753 bp, Heterodera glycines
gtggaaaatttttcggataaattatatataaaaggcacaaaaaattcatttggttgccatttttccattatttaattaccggcaattcatcttcatcaatcatcccttctctgtgtacaacgaaaacgacgacaattgagcaatgtcggaccatccagatgctgcgctggccgacctcagctgcgtggcaaacgacgtttggctggacactctgttttggattgaccgcgctgaagttggcacgaagtttgcactgatcgacgcgcgcttcggcaggctggtagccacgcatttcaaactgcgcaaatggaagctgggcgagctgggcattcatcgggcaccaagcggatgggaccggggcggcacggcggctgtcaccgttatggacgaccacccgttgatgaatcgactgccgcttgccaagtgtcctgcaccgaacggcgtgattggcttccgtgccatctacatttggtacgtcgacctggaagtgatcacatttctgcagtgcctgcaacgcgttctcaacctcggcactgctttgcagttcaccatccattcgaaggatgtccgctgctgggcgctgatgtcccaacgcatttggccactgatcgcgcacgccgtcaccacgctgcacgacatgaaggacgtcgacttcgcgctgttgcgtcgccatgtgtcgccgaatgtgctgttcgactgtgtcaagcttcgtgtcatcaccaacacgcacatgttcccggtccaaccgccctt

SEQ ID NO: 88014 - DNA, 483 bp, Heterodera glycines
gccattatgaaatgcactggagaaaaggccttaggctgtgtcattgcgcctgaattggccaaagacaccaacaatgatggacaaaagttgctgaaaaccgtgagaaggcaatggctgatctttccaaatgcaccgaatgatccgattgatctccttgccaatgcgaatccctattcacgactctttgctgactcggctaaaaagcgagatgagcccaagtctcggcataacctaacattcaactcaactgcggatgatccaattgcaacagaaaaggatgctgatcaaacatctaattgggccggtgcccatgacactgcttttctgtctggcactttgtcctccaatcagcgaattgagtgcggcactcaacaaatccgttatgaaaaaggtgttcgcactgctctgtacttttctcgtggtaaaagcaatgccttcgtcacccatgctatctgtgccaaggaaaattcgttgagtactcat

SEQ ID NO: 88015 - DNA, 200 bp, Heterodera glycines
  unsure (1)..(200): unsure at all n locations
cctcttctgtagtcctaagaattccctcccctttttctccatttcttaaatgatgtnnccaacgcaaccaaaaacattctcggcactccacaatcgtcgacaatgttagtttcgaccccaaagtgagcgccaatttccttcacaaagccatcgaagagaagcgaaaggatgagattatccatttgctgtgcaccattttc

SEQ ID NO: 88016 - DNA, 282 bp, Heterodera glycines
ccaaattttttttttaatgcatatattaacaactcaatttggctcaaatttctcatcaccgcatttctgttcaaaattgcttgctctaaatttggttcaagtgaaaataaaggcctctttttttattttggttatggtagcaacttgcttgaagaacgtatccatgtacaggtaaaaggtgctacttttgtggcaattggagcgctgaagggttacaggctggcatttgttgatttcgaagaaccgaatcgttggcacagtgcagccgcaacaattgagcag

SEQ ID NO: 88017 - DNA, 680 bp, Heterodera glycines
aaatttctcccgaggaaagcacttcggctttttctgcggtgatttattcgtacgcaaccaaaatgttcttcaaagggctccacggagacgtttcttttgacgacctttgggaattgcataaggaaagacaagcggaagtgttaatggagcgatactatcgagcggacaaatcgaaaggcgaagggccgatcactttctgtgcatttgtgtggcgattggtcaaatgtacttgggagtggcaaatttgctccattttgctgtccgttctcgttgtcttttgtctttacgcaaacgccgtatttctcagagtgatcgtcacattcgttgacctcggcttccctttgtggctgtccatggccgctctttgtgtgctcttttttgtggattttactggcaaggtgatgctcgcgcgtcgcgacttcgattctttcattgctttgctcagtttgcgttccatcatttcttgtgcaattcttgacaagctgttcaaattgtcctcctccgctcgtcagtctttttccaccggcgaagtcgtcaatttcttgtccacggatttgtttcgcatttcttacttttggctcacaattcgcagctttgtctattgccctttcatgattggctttgcaagtttcggactttggatggagttgggggatgagttctgtggttcggtttcgccg

SEQ ID NO: 88018 - DNA, 375 bp, Heterodera glycines
  unsure (1)..(375): unsure at all n locations
ggagagaaggaggaaaagaagtagaaagcaggaagcagagaaaaaggagaatgaggagcaaaagcctgctggtaagaaggagaagcgcgccgcagagaaagaggaaaagaagtcagaaagcaaggaagcagagaaaaaggagaatgaggagcaaaagcctgctggcaagaaggagaaacgcgccgcagagaaagaggaaaagaagacggaaagcaaggaagcagagaaaaaggagaatgaggagcaaaagcctgctggtaagaaggagaagcgcgccgcagagaaggaggaaaagaagtcagaaagaaaggaagcagagaaaaaggagaatgaggagcaaaagcctgctggcnaaaaaaaaaaaaaaaaaaaaaa

SEQ ID NO: 88019 - DNA, 835 bp, Heterodera glycines
  unsure (1)..(835): unsure at all n locations
attctgcgcacaanatgtctgcagaaccaaccattattacctcttctcgctggccatctccgacctgcttctgcttgtgcttggccttccatggaattacacggcgttttcggtgccgtttacccatataaatttngcgaattcatctgcanaggtcgcgcatttctaatcgaattcacaangtatgccctccattttgaccactcacttgcttttcagtggaagcgatggctcgcaannttgtttcccgttgcgcataaaaaatttctcaacttttggaccgggccgtccaaaacaatcgnnccccgtttgcttttttggcttttttgggccggtcngccgcgtcctttaatttgttgggggacacaatatgcttgttcccaaggggccacttataaaccttttggttgcccttctgttcttcaaccggcacactttttatgcggcccccaaaattgcccaagggggtttttatgaaaccatttgcacaaagggaaaatttatttttttgggccttcccaattttttttttctcccccccccccctttaaaaacccttggttttttttcaacaaggttccccacagggggggcccccgggagaacacccttttttttgaggcgcaggtgtgggaaaaaaaaaaaaaaacctccccgcaaaaaagaatgtcaaaaaaaatcttttctcccggggggggggagattttttttcttcctggtggggggggttttcttaccaccaccgggggtgttgcggggttttttataaaaaaaaaaaacccggaaagaaaaaacccggaggaaaggaaaaaaaaaaaaaaaacccccccccccc

SEQ ID NO: 88020 - DNA, 590 bp, Heterodera glycines
gattcattcaccttcctttctaatacaaatactttctcctctttgatacgctgattccttccaatgccttctgagtacggcattgaaaccgactcagtgactcttcagcgttttgtgctaaacgaacagaagaaattcccggatgcaaccggcgacctgaccactcttctgaccagtctgttgaccgctgtcaaagcgatctcttcggctgtccgcaaggcgggattggcacaattgtacggagttgcgggaaatgtaaatgtgcaaggggaagacgtgaagaaattggatgtgctgagcaacgaactgatgattaacatgttgaagtcgtcatacaccgtttccactttggtttctgaagagaacggacaggtcattgaggtggaagtgagcggcacccaaggcaaatacatcgtcacgttcgacccgctgggcgggtcatcgaacgtcgactgttttgtgtccatcggaaccatcttcggcatcttcagaaaggcgagcaacacttccaccaaggaggaggacactctgcagacaggacggaaaatggtagctgcggggtacgcattgtacgggtcggccactatggt

SEQ ID NO: 88021 - DNA, 126 bp, Heterodera glycines
gccttctccgcatttgttaagccgccggtctcctctacaaataacacacaaccatcatgtcggaaaagaaagtcaaaaaggtgaagaaaaagtccaggaccgggtccgaggcgagctacttcgacc

SEQ ID NO: 88022 - DNA, 414 bp, Heterodera glycines
aaattgcgcgctgcacattgtgccaaggactgccattgaggtattgtgcagcacccacgcattttactatggacgaatctatatgaccgggactaacacaaacagaacacattgccacgaatgtatccccacttgggccggaatttacaagcgcatccgattgacaacaaagcgaggcacgtttccagctgtttgtccgtggcttcaaacataccaaatattggttcgaccaatggtaacagtctccggaaaagacattgccaaagcccacccaagtagaattgcaactcccatctgagaaaatggtcattctggattacattatacggaataccgaccgatgaaatgacaattggatgatttgttacacaccacccacagcggaagcacaatctccagagtgggcccggacat

SEQ ID NO: 88023 - DNA, 666 bp, Heterodera glycines
ccgttgtccgctactttgttttgtgttgtgctgccagcgccgaccattcgtctcagcccttcccatcatttcaaattccattattcccgtgattgtccaaatgatcggcggaatcctggaagatatctggacgagatttatcgacttggtggaggacatctctgatcagtacgacgattctgagcaaccaacaatcatccaccacgaaccggcaacaccaacaacaatgtttgacaactatggtccgattgagaagattgttgtggtcggcaccggcctcatgggcagtggcattgcgcaaattgcggttgagtcgggcgtcaaagtgtgcctggtgggccgtagtcaagaaaagtgtgatcagacccggctgaagatcaacacgggagtgcaaaagtcgatcaagaagcgcatggcaaatgaaactgccgaggcacaacagcagttggtcgaggcgacaatggaaagccttgagctggtggccaacttggatgaagcgggcttgtcagatgccgacattgtcattgagggcggtggttgaaaatctgaaggtgaagcagaagctgttcacggaattggaagccaaggtcagcgagaagtgtctattggtcaccaacacttcgtcctttctgctcgaggacgtgtcctgcaaaatgggcgccgcca

SEQ ID NO: 88024 - DNA, 371 bp, Heterodera glycines
  unsure (1)..(371): unsure at all n locations
ggtggcgttcttgcgcatgcaacccttcctcagatggcaaactccattttgatgatgacgagaactgggttttcatggacggaagaaaaattggaaaccatcgctttacggatttgtattgggtagcgctgcatgaaattggccatgtgttgggcttgtcccattcgaacattgaaactgctattatggccccattttatcaagacccacgtgatttggtcgattggcgtggcaattacaaaaggccagagctgactcatgatgatgtccgcgcagcgcaacaaatatacggcaaacgatatggtcggttgggcacttccancaactgatcggtctcgtggtaatcctccaactgccgctggtgganggcg

SEQ ID NO: 88025 - DNA, 429 bp, Heterodera glycines
ttttcggtggagcaagggaggagtgaaaatcgacccgaagaaatactccgcttatgaaattgagaaaatcactcgcagttttaccatcgagttagcgaaaaaaggatttctcgggccaggtgttgatgttccggcgcctgacatgggaaccggagaacgagaaatggcttggtagcggatttttcatttttgagatttttacaattttaggattgctgatacgtatgctcaaactgtgggacacactgacaaggacgcatcggcttgtgtcacgggaaagcctattgttgctggcggtattcatggacgtgtttcggcaacgggtcgtggactctggaagggcttggctgttttcatcaatgatgaaaagttcatgactaaacttggccttacgactggcttcaagggaaagacattcatcgtccaagg

SEQ ID NO: 88026 - DNA, 741 bp, Heterodera glycines
tatgaatttgcgaatattacttttctttgctgtatttattccttcagcgaggtctttctatttgccaggtttagcgcctgtgaacttttgtgagggaaaggataaaaagcccacttgcccgaataaagtgactttgttcgtaaacaagcttgacagtgatcaatccgtcatcccatatgaataccacagcttcgacttttgtattggtagtgagcaagagtcgcctgtcgaaaacttgggtcaggttttgttcggtgaacggattaggccaagtccctatgagataaatttcaaagaaaacaaacagtgttcgtacctttgtgagaaggattacaaaagttcggacaaatcacaccaagaaaaattgcggttgcttcagcgtggaatgaagctcaactaccaacaccattggatcattgacaacatgcctgtcactttctgcttcataaatcaacaaaatatgaatgtatgcaccactggcttcccaatgggttgttatgtgacaaaggaggggaagcccaaagatgcctgcgttttggatggacgttaccgacagcaggacagtttttacctgttcaaccacgtagatattaagattgagtacagagacatgtctgatgatccaaatttcctcgatgagaaaattggtggccgtataattcggatcaaagtgcagccaagaagcatcaaacatgaaagcaaagctggaatgaattgcggaatggaagccgctccccagcc

SEQ ID NO: 88027 - DNA, 808 bp, Heterodera glycines
tatttgtatttggcgacggaggaaaaagtctcccattccgtcttggtcagtgcgctttgtacggctccgattgcgtccgttgtgcgcgtgacccgtactgctcgtggtccatcgctcgtcggcagtgtttccccacagattcgtctcattcgggcgccgtcggatggatcgttttgggcactcgtcccacagcgactttcccttcccccgccgacgaagtgaccgaacggtgcgcaaaatatacgaaaactgtggcagtgactgtctttcccggcgattctgtccatttgaaatgtccgagcgaaggacaaatggcacagtggaaacacaacggacggaaaattccatccgatgaagaaatgccacattttgtgcattcgatgagcggcggattggtgctgataaacgcaaccgaaacgatggacggcacttacgaatgcgcgacggaagaaagtgcaaatggaaaagtgccattggccatttactcactgaagtgggacgggcgctgactgcgcccgtcccaaaagtgtggaacagttccgatcggctcaaagggagtggtgccgtcggatggacacttataggagcaatttgtcaaaatgggaaagcattcgcgatgccaatggacaaggcaaagacctttgtgacacaaatgccgaaacggaaaggaggacggactcggggaattttgttgcctaactttggcattttcacacccacaaaatcagaggcttaaattgaccctaagacaaacccaggcaaaacattccatcgtaattctctacttccgattgctcactcatttatt

SEQ ID NO: 88028 - DNA, 259 bp, Heterodera glycines
ggctgctttctcgtccttcgctttgtcctcccttctccacttttcctcctttccctttcgtcctttgtgttttgtcactttcgcccccattttcctccgttccttcaaaaagcgtcggttgaacaacgtcgtcagtacaacagaatcgtgaccagccaaaacgacaccaaagcacaaatcaacagcaatgtgtataattgggcttcaaatgcgggagttgcgagcgattacaacaatttcacatcggagcagaagcagc

SEQ ID NO: 88029 - DNA, 716 bp, Heterodera glycines
tcctccttttccgggcaacgacgcagcagtcgaaacaaccgacgcagaagtgggcgcaacggcaccagtcaaacggcacagtgacaacaccattatttatcatcagcaacagcaacagcagcgacgcatgggccaaatcaatctctgcgacgacgtttggttggacacattggcatggatcaatcgtggagaagtcggcatgaagttcgcgctggtcaatgctcggttcaacactttggtggacaggcatttcgagcagaggaagtggtgctttggcgagtttcacatctgtgagcggatgacggaagaatcgggcgcagaaatcatgacatcgatcgacggctccgacttcagcacgttgccattgcccaccactccgctgccggacagtgtcgtcggcttccaatcaatctccatttggtacatcaacgaagaggtcatcaattttctgtgcacaattcgccgtctcctcgccgaagacattgcgctggaattttccacttacttcacagaatatcgcagttggaaagtgatggcacgacacatttggccgctgttgcgggatgggatcagcactttgttcctgaagaagtgtgacttggccatgctccgtaaacacgtgtcgcccaccgtgctgttcgactgtgccggcctgcaccgaatccacacgcaaatgctgcccgagtgtccgtctgctgacggtgctgtcgatggag

SEQ ID NO: 88030 - DNA, 605 bp, Heterodera glycines
  unsure (1)..(605): unsure at all n locations
taaaagatccgaaaaaatgccaaacattttcaaaatccttctgattgtgcttttggccgtcgtctcattccgtctctcggcttctactggtgacaaaaaaactgctaatgatgggagtggaaacaactcatcagctgggattggtacgaagatcaaaagaattgtcaccgctggactgctcttcacttccctggcgacgggtggggcggaagcgattgggcgaagcaatgctcagggaggaaatgccgccggattggtgccatcgcatgtgaccaatcgctcaatggctccaccacctcctcctgtgcaatttgaaatgggggcaaatcgattagaaaaaatgagggcacacctacgcgaacttgctgagaaaatgccggtcaatgaatcgaagcgtctgtcaccgagtggacccgacccacatcatcattagggccatggatggatctaacggaggaagaaagaatggatgcttagttttcagattttattctatcctcttttatttattagtttttcaaaacaaatttcttccacaactttttaaactatttgttgttttgaatctttttagataaatctaaaccccttaaaaaaaaaaanaa

SEQ ID NO: 88031 - DNA, 605 bp, Heterodera glycines
  unsure (1)..(605): unsure at all n locations
taaaagatccgaaaaaatgccaacattttaaaatccttctgattgtgcttttggccgtcgtctcattccgtctctcggcttctactggtgacaaaaaaactgctaatgatgggagtggaaacaactcatcagctgggattggtacgaagatcaaaagaattgtcaccgctggactgctcttcacttccctggcgacgggtggggcggaagcgattgggcgaagcaatgctcagggaggaaatgccgccggattggtgccatcgcatgtgaccaatcgctcaatggctccaccacctcctcctgtgcaatttgaaatgggggcaaatcgattagaaaaaatgagggcacacctacgcgaacttgctgagaaaatgccggtcaatgaatcgaagcgtctgtcaccgagtggacccgacccacatcatcattagggccatggatggatctaacggaggaagaaagaatggatgcttagttttcagattttattctatcctcttttatttattagtttttcaaaacaaatttcttccacaactttttaaactatttgttgttttgaatctttttagataaatctaaaccccttaaaaaaaaaaaaanaa

SEQ ID NO: 88032 - DNA, 815 bp, Heterodera glycines
  unsure (1)..(815): unsure at all n locations
tcgcctaaaattccgtttctgaccttcggcgatttggcggaacaatcgtgcaaagtcagttttggatggatcaaaaactatggaccattggcaaagaacattgtcaacataatcacaatcgtccaccaattcggcatctgcagcatgtactatctgtcattgcatcaacctttcaaacggtctttgataaagaaaaagctgacaatgagcccaagggaaaagacccaacatggtttctcgtcatattgcttccgattgtcgctctcaattccattgtgtccatgcgtatcctctcaattatgtgccttctcggaaatgtgttgatgatcaccagtttgacactcattctctttatgctgtcccaaattgtattcacggaaagagctcattccattccgtttgccctgccatccgcagaaggctttttcaaagcgtgtggtaccatcattgtctcttgcctcgcccagtcattggtgcttcctatggagaacaaaatcaaaaaacccagtcaaatgttgggcccttttggcgttttatccattggtatcgctatttcgactatcgtttacgcaattgtcggttttctcggctatagtgcttatggagagagccttcgtgatagtgtcttgaaccatcttgaatgtgttagtaacgcanaagagttgactgttttgacttatatcattcggattgccctctgtctgtccatcttcgcttcttttatgctccanatgtttgttatcgtcgggcgtttgtggcctctactcgaaaacggatcgaaaactttctcgtatttggaaaattggcattcattc

SEQ ID NO: 88033 - DNA, 457 bp, Heterodera glycines
  unsure (1)..(457): unsure at all n locations
agttcccgccgtttacgccaaaacgcctccccaaatcctgtgaacgcttctgttgcgcctcccccgccaaaccccgagaactcttctgtgcctgtaccgccaaaactgcagaatggcattgacattgtcttttccgatatggaaattccccttggagtgcctccttctgctgggagtggaagaagcactaagcccggcattggccatcactttgtgatggtttttgttgccgtggctttggtctgcacggcaattcgccatggcattttgctttaagcggagaaatgaaaatgatggaagagcaaaagaatgaaaacggaaatgcgataaagaaaatgatccaaaaataagcattccatttataataaccatttaaatatcttttccaaataatagcaatgattttttatttattaaatttaaagntaattaaaaaaaaaaaaaaaaaaaaaaaaaa

SEQ ID NO: 88034 - DNA, 440 bp, Heterodera glycines
agactctatttttatgacacttaaaatttctactgacgcattcctactcacgcctttccccggagccgattgattccctattgattatacgcacagattgaaaatgttaatgctccgatgattggatgataaggattaaaatatcagaactggcatttccctgatggtaagaccattcttattggccctgattcgatctcaatgccacttattctgcaggcgacaatgctcaaagcaaaggaccatccacttgaaacatgactgcagatcatgcgtgcactaacggcgcgcaaagtccaagaagagcaaatgcctgctttgtggcaactcatagatgcaccaagattatcaaccaccatgatcagctccgtccatcggacaatcaaactttgactcgggtcacttgagaagattcaaagattctcccaacttttttggca

SEQ ID NO: 88035 - DNA, 820 bp, Heterodera glycines
  unsure (1)..(820): unsure at all n locations
ccgtttctttatttagaaaatgctaaatgaactttgtaagcgaagaagagttgcaaaagcagcgtgaagctggcgaagaaaagcctgagagttcagagccggtggacaaacgaacactttacgaacggttgaaagagcaaaaggacatcaagcaattggaatacgatgaaacgcacgcattgaagaaccaattccgtggcattgacgaggccgagtcggactttcttacacaagtggagcgggccaaggaggagcaggaggcacgcaagcgcaaggaggagcaggaactggtgcgattgagccgacaattgacgcaacaacacgcgaccggtgccacgactgacaagcaacaacacgcactgttggagaagccacaaaaagcgaccgccgccgcttcgtcagggatcagcagacaggcggcactgatcacatcgctcgtccgccgcaaaagaccgctttcaactgattctgaaccaaaatcggcgcgtggcgaagtgccatcgccgccctcgtcgtctgacagtgacaagcgcaagaccaatganaccgtcgaaggcttcagggcggtccgccaccaaaacaacggcacgaatcgcattgccaaatcattggagtgcttcccggcttaccgaactactccgattcgagtgacgaggccgagagtagcagcaacagcgagagtttggagtcgggattgccatgtgtggcaatttacgcgggtaaaggcgcaccaaagccgcacggagagtgttgaaatggatacgaacgaacgtgatgaggacatgctttttatgacgtatttttgcgaaatccgctcata

SEQ ID NO: 88036 - DNA, 364 bp, Heterodera glycines
  unsure (1)..(364): unsure at all n locations
tgccgtcgatttcctcccaataaaaagcatcaaattctcgaagaagaaatgaagccatcattcaacttcaaacttttcgcatccgtctttcttgtgctttgtgtggcctcacttgtcctctgtcagcataagccagcagcagcatgtaaaccgcccaaaaacgtgggaagaggcaacttggcactcacgcgatggtggtgggacggccgtagttgtaagcaattcatctacaaagggcagggcggcaacacaaacaatttcccatcaaagaagctttgtgatcaagtgtgcaagccatgaatgagtcgtggaaagaaggtgcagcgtgaagagaccagcnnaaaaaaaaaaaaaaaaaaaaaaa

SEQ ID NO: 88037 - DNA, 772 bp, Heterodera glycines
cattgcgtccgttacattttaaattcttctatatgcggacgatcgtctacttcaaactgttgcaaattgtgctcggtttggccttcgtgtggcaacttctttcatttcaccaattctgcggcacatttgtctgtccaaaggccttcctccatgacatctctgttggccactgcaaacgctttacgctgatcggaaaggactcaaagacgggcgaattcggcgctgtgttggacgagcgcaaatggcacaaccaactgttcatgagcagcaccaacggtctcccaatcaaagaacagcagcagcaattcatggacgaattggccgccaaattgccgtgccctggacgccactgtattccgattacgacgccttcgttttttttctggactgagaagaacagaaatctcttcgacaatgttatggactccttttccggccaactgttgctcgcattgtgctcgcttctcaccattggcattggcttcgcccggatgttacgccctgcggcagaatatgaatgcttcgactattgcatggccctctattctgtcttttgctggtgttgctctgcttgggcctcatcgtatttgctgctctattggacaccttattggtcttgcatgaacttccgtgcggatgacacaaatgtgccgttggtcacttttgtgttcgacatcgtcatggtgtgttcgttcgtcttcgagatgttcttcaacaattcgctggtgaaaaaacggcccgagatgcttcagtcgctgccgctaatcgcaaa

SEQ ID NO: 88038 - DNA, 648 bp, Heterodera glycines
tttttaaattcttctattatgcggacgatcgtctacttcaaactgttgcaaattgtgctcggtttggccttcgtgtggcaacttctttcatttcaccaattctgcggcacatttgtctgtccaaggccttcctccatgacatctctgttggccactgcaaacgctttacgctgatcggaaaggactcaaagacgggcgaattcggcgctgtgttggacgagcgcaaatggcacaaccaactgttcatgagcagcaccaacggtctcccaatcaaagaacagcagcagcgattcatggacgaattggccgccaaattgccgtgccctggacgccactgtattccgattacgacgccttcgttttttttctggactgagaagaacagaaatctcttcgacaatgttatggactccttttccggccaactgttgctcgcattgtgctcgcttctcaccattggcattggcttcgcccggatgttacgccctgcggcagaatatgaatgcttcgactattgcatggccctctattctgtcttttgctggtgttgctctgcttgggcctcatcgtatttgctgctctattggacaccttattggtcttgcatgaacttccgtgcggatgacacaaatgtgccgttggtcactt

SEQ ID NO: 88039 - DNA, 823 bp, Heterodera glycines
  unsure (1)..(823): unsure at all n locations
cccttttctctttgcctttagtctttttatttcggcgttcttttttgtgtattcagctgatgaatcgattaaaccaccgacaagaaatgttctaatcacagcggaagaagagaaacaaagagatgttgaaggtttcttggcaatcaaagccatccatgccgttctcgacgatgacaattcgggctcaattgatcggtttgaatctgccgatttcttgaaagaagatctcaaatttggcggttcggacaaaataaggcgagaaaatgcatttcacagtaacgacgaggcgataactgtggacgatttgtgggagaattggttccaatccgaggaacgcggatggaccaacaaacaagtggtcgaatggttgaccaaccaagtcaaactgccgcaatatgccaacggttttttgagtgccgaagtgactggcctggaccttccgaaaatggcagtgcaaaattcttcgtttctttccacaaaaattggcataaagaattacgtgcatcgtcagaaacttcagctaaaggctctcgacttggttntgtttggcttccaagacacttcttcgattgccaaagacattgccttggccggtctgctgggactgctcgttgccgttttggtcatcttcaaaaacacaaaaaccgttccaagaaacanatggaggaactgtcgacagtgctgaacaaattgcgcgacatggaaacggattntgcgggagttcanaacagacttgaggatgagaacttaaacgacagccagcagcgaagaatcgaaacatcgattggtgagaaccaattgcgagaattggaaacgacgacgg

SEQ ID NO: 88040 - DNA, 685 bp, Heterodera glycines
  unsure (1)..(685): unsure at all n locations
caccttttaaatacttaaaatgcgcgccattctcttcctggcctggtttgcttggtgatggctgttattcttgagacagccaactcaaaggcagtgaaaaaagacaataagaaaggagcagttgcaacgccagcaaaaggaaaagcggcgccgaaaggagcagcgaaaggaggaattaaaaaagacgcaaaatcaaagggaaaaggaaaaaaggacgccaaaggcaaaaaggacaaaaaagctaaaccagccaaagggaaagcatcgcctaaaaatgacaaaaaatccccagcggcaaaagccaatgacaaaaagagcccaaccaaaccaatggcagcagtgaaagccgtgccaaaggcggcggagaatgctcagaagggaccgtcgagtgcggaagtggtggcggaggaaaacaacttggacactgaggcggtcgacgacttgggggcggaagagtcggactttgaccaattggcagaggacgaactgctcgaggacgacgccatgggcggcgaggcggacggatgggaaggattgggggaggagacgganatggacagccaaatggcactctgatggccaactaattggacaaattacaaacggaacaaaacgggacaaatgacacaaaatattatttatcatttttggcatatcattgaaaataaatagaatttattttaca

SEQ ID NO: 88041 - DNA, 617 bp, Heterodera glycines
cattgtccttttgcgacggattagggaaccgacgaagaaaatcttggaattttacacaagtctgaaattgatgtgtcggtgctccccggcggttatttaaccaaagttcgcattgcctgctgcattttgcgctttctgaccgatgaacaggtgaggacaatgttcaacattagcatagaccaattttacggaaatttcgtcactatgctcaaccagcggctttactcattgtgccgcatcgattcgtcgccgaaggatctgaaggaggccgaaagggtggactttgtgcgaaccattctctcgccccaatcaattttccgccaaactcctgaaatcgcccgtcttttggtttgtctgatcgtcgacaatgacattgatggcctgacaacacttggcaaagctgcccaacgtctcgtccaacttcgtctgtccgtccctctcttggaattgctgaaatatttgcgcaacatcaagggaaaggacatcagaaccatcccaaacatttcggcattttttgctaagacctttgaggcactctttgacaagatcgatgcaccagcaactgatcggaaggaacttgcttcgctcgttttcttcttgatcagctgccccgttga

SEQ ID NO: 88042 - DNA, 780 bp, Heterodera glycines
ggcaccggcgtctttcctcggcactttgtacctgcgcccttcgaacgatacgatcacgaaatcacccaacattcactgcgtctctatgccgatgaggagggtcatttggcccaaagagcgtacattgctcggcagttggagttccccgagctcagactcatcgaatacgattgtggtaaactccaaatgttggcccgtcttctcgagagtcttttctccaataagcaccgctgtctgattttcacacaaatgtctcgcatgttggacattctgcaggcctttctgtcctaccacaactacaaatactttcggttggacggctccactcacatcgatcagcgacaggcgatgatggagcggttcaattcggacagttcggtgttctgcttcattttgtcgactcggtcggggggcgttggcgtcaaccttaccggggcggacaccgtcattttctacgactcggattggaacccgacaatggacgcacaagcacaggacagatgtcacagaattggacaaactcgaaatgtcaccatttatcggctcatcagtgaaaagacaatagaggaaaatattctgacgaaatccatgcaaaagcgacggcttgggggagatggccattgaccagggcgaattcacgcccgacttcttcaaaaacaccggcaatctgcgggatttgttcagcaacgagacagccgttgccaaaataattgcgcccgttgtggacgaaccgaagacatcaaagacgtcgaagcggcaatgaatcgggtcgaggaccac

SEQ ID NO: 88043 - DNA, 130 bp, Heterodera glycines
ttcgaacgcgcaattcggcaacccgcgggcggcgtcaaatggatgcgctttgggaaaaggacgccccagggcaaatggatgcgattcggaaagcggaaaatggcaatcgataggggcaagtgggtacggt

SEQ ID NO: 88044 - DNA, 733 bp, Heterodera glycines
catccgcaaattgattctcaccatatgccccatgcttatgtgctttcgctgcagttgggctcctcagttgccgaggacattggccgcggctatttcgccaatatgaacgacgaagtggcggccgtgtgccaacagttggccgaggacgcgcgacttgcgaacggttacaatgccatcggattttcacaaggcgcactttttgttcgtgcgctcgcccaacggtgtccgcacccgcccattcgaaatttgatttccatcggagggcctcagcagggcatttttgggctccccttttgccccggttccttttacgtttgctcgctcatccgtcgtttgcttgacaatggcgcgtacaccgaatttgcacaacacaacctcgtccaagcgcaatattggcatgacccaaatttggccgagggctatcgccgcgcgaacattttcctggccgacgtgaactgtgaacggagctgcgacagcacgtatcgcgacaacatgggcaaactgcgcaactttgtgctggtcggtttcagcaatgaccacaaattggtgccgaaggaaacggcgtgggttcggtttctacgccgacaacgacacacaaacgatagtgccaatggagcagactgaactttacaagcaggatcgcattggactgaaaacactgaacgagtcgaaccgtctccattttctgactttcaacggcgaacatctccaaatacccaccgatctgttcatc

SEQ ID NO: 88045 - DNA, 801 bp, Heterodera glycines
  unsure (1)..(801): unsure at all n locations
cagtgaaaattttttcggccgaagcgaaggaacttcaatcgtacaaaaacaaaatcatggagatttgggaaatttccagaaggaaggcacgaccaagggccttatgtttggcggtttccaactaccggttacctcgcgctcacttcaatgctttactatggcagtgtgctgattgccgacggctgtttgacctacggcgatctctcttcctttatgctttattcggctttatgttttggcggcattactaatttccagctgttttatacggagttaatgcgcggtttgggcgcttcggcgcgtattttcgaacttcgcgaccaaaaaccatcgatttccagtgaaggtggccttgtgattaatgctctgaataaggaagtccgattcgaatccgtcgctttttcttatttgaaccgagaatccatcttcagcgacattacatttcgcattcctaaggcatcggttaccgcaattgtgggagcgtctggaagtggaaaatcgaccattgcgcatttactattgaggttgtacagtccgactgcaggtcgaataatggtcgacgacatcgaccttaaacaattggacctttcatcttggcggagaatgatcggaactgtcagccaggagcccattctcttctctacctcaattcgtgacaacattctctacggagttgagaacagccatttgataaccgacgaagagctcacagaagcggcagaacaatcgaactgtttggagtttatcagaagttttcccaatggatntgacactgttcttggtgaacatggctcttcatgt

SEQ ID NO: 88046 - DNA, 301 bp, Heterodera glycines
gatgtgctctggttggagttggatgtatcatggagagcgtaaatgctaatccgacaaatggtagatcgaaaactccaacgaacagaacgaatacacgacaaactccgcatggtctgtctgaacggtgggcccggtaacaacaaatggccccaacatctcaattgctggttcgccacactgtacgcagcatggtagctaccagaaccatgctgctggaaattcaccgactgccattccgaaaaaagaaaatgcgactggtgctccggcgggtgcaccaactagaaagagagactgtactcat

SEQ ID NO: 88047 - DNA, 772 bp, Heterodera glycines
  unsure (1)..(772): unsure at all n locations
gaaacacttttgggtccccaaaaaacgctttcgaagtggcgtggttccgagaacgccgttgaaagtggttgcaccgttggaagaacgcgtggaaatcagtgcggacgacaagactaaggagaaaatcccacttccctcctcgcttgtcgtgagtgtgccgatcactccgctgaagacgtccacgtcagtggtggacatgacactgtcggaagaactcgtggaaagcagtgcggacgacaagactaaggagaaaatcccacttccctcctcgcttgtcgtgagtgtgccgatcactccgctgaagacgtccacgtcagtggtggacatgacactgtcggaagaactcgtggaaatcagtgcgtacgacatgactaaagaaaaaatcccacttccttccactgaagacaactacaacgtggacgatttatcctcaaacgatgaaacggaccccgaagattcgccgaagaaacaaatccccaaatgggcccaaaaagagtacttggcgcagcaaatcaatggccttcagcgaattgacgtgttggaaaaagttgaaaaatattttggccgcattcggcaacctgcactgattgactttttcaagcagtccaagaagaaatatacgaagaggcggtcttcgagcgcagtttgggacagtccgatgtccgaccctacgcccggctntggtcgtttccagaagtttcagaaatcgtctaattgagcattttcaaaccaatcctgatctccgataacgatttatttatttttttactaa

SEQ ID NO: 88048 - DNA, 430 bp, Heterodera glycines
acgtggaccttccgtatcccgcgcgtcgattggcctggggcaaatggcttaactgtggccagacatgcttggcacccgactacgtaatggtgaccaacgaaatgaagccgagactggtcgaggaactgaaggcggtgcttgtggaatattacgggacgaatccggagacgagcaaagactacagccgagtcatcaacgaagcccactttgaccgtatttgcgcgttgctgaaaaactctgtcggcattgaaatttgcaaaatgggacagcccaaccgggaggatttgttcattccgccgaccattttggaggtgcaaaccgacgacgcactgatgcaatccgaaatttttgggcccattcttccgtttctcatcgtccgttcttttgacgaggccattgacattataaagcgggggagagaagccattgg

SEQ ID NO: 88049 - DNA, 618 bp, Heterodera glycines
cgatcggtttgctggcacggactaccgcccattcacttggctcgattgggatgaacacgagcgggagttgagcccacagtgagtatttgattgtttctaacaaattgaccgttgtccgctcctcttcgatttgctgcttttgctctccgatttgggtttccatggccttttcttttgtttgccgctcatcaaagcgcaatttgccaatgtactttctcaattggagtgtactcctctcaaagatttgcccatttccgtcgcaattaggcagcgatgcaggcaactctttgcacttctcatttcggctgattttttccccgatctgatcgacatttgcgttgaaatgctccccgagacgacaaatcacgaaatggctgtgttaatgcgtgacttgtggaactttttgaagtccctcttctccatgtcttcctctccaacgtcgcttcattcgtccgatgttcgtccgatgcctccgccgtctccgaatcgaatggacgcgctcacttccaaagagggtcgtctgcttacctccaccattttgctgattggacagcgtcacatcgcatcgatgggtccgttgttggccaaactcgtggaccttttgggcggagttgagag

SEQ ID NO: 88050 - DNA, 425 bp, Heterodera glycines
  unsure (1)..(425): unsure at all n locations
ggcgtgtggtgtaaggatgtgtcatattgagacctatattttcatggattttgagacaacgggactttttgacgacggccacaacaacccgttgaccaaccccaatcggtccaatgagacggccagagaacgtgcccagaggctggacaacctcatcaagtcagatggaaatcgctttcctaaaatcacggaaatggcttatatgtcggtgccgcgggtgttgttccttgagggaacggagcaaatgtccgcgcgccatttatcatcgatgtcgcaagacggcgaagaaggcattgagccggtgcaggtcgttacgaatgtacacgtgcgacagctgagtccgcagcttaatgacaaggagcggttcaagtaagaggaattgcaacggaaagtgccaagaatggcccggagtcgtccacctgnnc

SEQ ID NO: 88051 - DNA, 520 bp, Heterodera glycines
  unsure (1)..(520): unsure at all n locations
agtcgatgaggaaacaaaggtggatttgattaaacggcagcgggaagagaacaacgcatccgcgacctgatgctgacaaataccaagaaattggcaggtcgtgatagactgataaggcagcaggagatcaaaatacagagactggaaagggcgaatacgcaaaaatcggacagccttaaacgcaaaatggaggaaatgcaaaaattgaagaagaaggaaaggcgtaagacaatgttcgaaacgaacaatccacgaaagcctctaacgccaataaacgagcaactgactccagagagtaaacatctcgagcgcctgaacacgacatacattgttgatacgccatctgaggaacagaagaaagggcgtttattgggagaattaccggaggaaaaggattccaattatcaaattcccccccttttgagtggttgttgtccgaaaggaccttctgtttaaacatatgattnanaaaaaaaaaaaaaaaaaaaaaaaaaaaaaaaaaaaaaaaaaaaaaaaanna

SEQ ID NO: 88052 - DNA, 140 bp, Heterodera glycines
caaattcgggtttattgtgatggacggaaacggatcactttttgggactttgcaggaaatgccgggaagtgctacacaaattctctgtcgaattacctaagaagcatggaaggggagggcaatctgcactgcgatttgca

SEQ ID NO: 88053 - DNA, 310 bp, Heterodera glycines
  unsure (1)..(310): unsure at all n locations
tgccgagaggacaagcccatcgacccaacccatctctgatcgactgcttgtgcacctggccaaatttgcgagacaaatcgcgcaaatgctctctagggactcccatttaaatttgacagctcgtttcaacggagtgcgcgggtgggaaatcggttgtccgaatgttcggcccgaagagcctaattcatcgggcgtaatcgtctgaacaaagtgacaacagacaaacaatgagttccaaaatttacagttccatcgtacgcgaagtgatcggtcgcgtgcggctgagtgcgtcnagcaactcgcaaagcta

SEQ ID NO: 88054 - DNA, 767 bp, Heterodera glycines
  unsure (1)..(767): unsure at all n locations
cactcgccgaagatgttggggacatggcatcactgttggactccaatgggaaataccgctgcaacacctatggattgtgctttgagccaatagacaatgagatttgcttgggctcttccaaccgaattctcattggcatggtgcttgccccggctgaccgtgacgtcacttgccttctctttgccactgctcgttctttttaccaggaacaacaacattccgtcggatcttgtccaaaaattgtaaccaaatgcacggttaacttgcgtcccattgaattcaatctttcggaggagggccgtgaatcgatgtcatctcccatttataatgcccattggacttcgactgaaccgatttggtctttgtgcttcaattcgcaccacatgaaaatttgcgttggcatggaaaaatgtgccaaaatactgaacgtactcagtggacaaaatttttatgtcggaagcggcggaaaaaatgtcatttcgtgtattttttccaaggacggaaataccctttttctgggccggaaaaatgccgatgtttccatgttggacatgcgcatgacatcgaaccataaagttggcgaattggcccagtcgccctctaccggatacatgcatttgctacagacacgtcctcacactttagtcactgagaattntgaaggaaagatcaaactttgggatgtgcgtggccgttgtcaacccttggccgaattggagattgggcaccgcaattcctcacataaattaccttgcttcgttgatgct

SEQ ID NO: 88055 - DNA, 730 bp, Heterodera glycines
  unsure (1)..(730): unsure at all n locations
attactttttaattttgttaattattaataacctattttttgcttttttaatttgttaacatttctccttccctctgtccctccctttgccatttcccaccataacgcccatcaccacctttaaaagaacagaacaggcgaatggcgagtcaaaatggggatttggagaaccaactggaaatttgccaagggttggtcaacgaactccgagcggaagtcgattcattgcgcggcgaactgagcgaatgcaaattgcctttccgaatttccaacagcgaacttcaaaatatcaccgttcgtcactctcgcactggcgacgccgtggagcgaattgggccacggaaagcgaacaccaaaagtctgctgaagccacgtgcgcgtctctgttccaacactccgaaaatggctgtgccgtctgaaaagcgtgccaagcgtggattgaccaaagacagcgaagatgacgacaatttccgcaccgcggaatttgtgccgaccactccccgtccgcaatttctgttgcctccgcttgtgctcaccccgctcagcagccgtttcccccctcttccgcggcgttcattttctgtcgaaccaactccaactcatatacagaaaaacgctgaacagcaactgacaatnattcgggacggcaacggcgacatgccgtgtccgttcagtcaaaagcggctgaatgacaacggcgaaattcagtgtccgtcttcctccacgtnct

SEQ ID NO: 88056 - DNA, 729 bp, Heterodera glycines
  unsure (1)..(729): unsure at all n locations
taattcttcctgcatattattgccgctgctgttctccatccgtccgtgccatcaaatcaaatcaaatcaacggcagctgagcacaggcagaagtgtgcacaaattgacgacacaacaaacaacaaaactgggcactgcacaatcaaaagcatcatcttcatcatcggaagaaggagaagcaaaagtgacgcagaaggaggagccgacaactgacaaacagcagcaacaaacaagcaaagcgagcggagcaacaccagcaacagcaggatcaagcagttcaggcaccaccgcggcaacgcatggaacaaatcgacactttcaccgaccaaatttggctggacacgttggcatggcttggacgtgaagagatcggctggcactttgcgctggtcaatgcccgcttcgccgccctggtggacacgcagttgcagcagaggcgatggtacttgacggagttgcacatcaataagcgcaggtcgagagggagcggcgcagaagtgatggtcttgaacagcgaaggcgccttcttctcattgccattggcaaccatctgattacggaatttcgcgcttggcaagcgatggcacggcacatttggcccctgttgaggaacggacttcgcacgctggtcagcctgaagcgcaaacaactggcactgatgcgcaaacacgtgtcgccaaccgtcctcttcgactgtccgaaccttgtcgaaatatcaccccgatnttg

SEQ ID NO: 88057 - DNA, 685 bp, Heterodera glycines
gtgggagccgaaaaggaagaaacaagaaaggagagggcaaagcggaagaagctaagaaagatgaagccaaaaaggaggagccgaaaacggaagaggccaaaaaggaagaagcaaagcccagtgccccggccgtcttaactgaagctgccgataatgtgaacaaagcggtcgatgacttaagcgttaaacaggcaaaagcattgaaaaacgcggccgaagcaacggcagagaaaacgccggaagagcaggaaaaagcattgaaagaagtggcagaaaaaggaggaaacgaacagctgaagacggctgtcaacaaaattttggaggcaaaagcgaaaaacgacgcggaattggaaagcgaagtgaaaacgaaaacggcaacactttctgaggacagcaaaaaggccagcgcagagttgactttgataattgaagacaaaaagacgactttggacgagaaggtgaagcggacggaggagctgacagccaaaatgtcggacaacacgaagaaggagctgaatctgaacaacagtgccgacgtcgtcgccttcgtcaagtcgtactccgccgtcgccgtgccggcggtggccacggagggcaaagcatgatcaatcagtctgatcggaggattcggcattgttgtgtgatgaaatgtagccaatagtgaaattcattgattaaattaatt

SEQ ID NO: 88058 - DNA, 94 bp, Heterodera glycines
tacagttgaagtacttgaatagtagaatatgtttttggtgatttgagatagtggtatgcatgagggttgtatttatggttttatgtttagaata

SEQ ID NO: 88059 - DNA, 318 bp, Heterodera glycines
acggctctaagtgaaggggagcattacgcaaaatctgcccaaaatgaaatccatttgtgatcgtccgcttgcttttcactttggttatgtttttcggttttgctattcaaatgtacgtcgtggtggaaatgctgtggcccgaatttgtcaaatttctgcgcaatttatgtccaaattttggggtttataatgaaaatgatcacaaaaatatggtcggcattgaattgctcttccgtgccgcgctcgtcaccgtctccatgctaattggcctcgctgtgcctgaattggagaatatcattccgttggttggtgccaccg

SEQ ID NO: 88060 - DNA, 548 bp, Heterodera glycines
  unsure (1)..(548): unsure at all n locations
acaaacggaggaggaggaggaagaagagaaggaaacagtttcagtggttgcggaaagtgtttatggcgacgacgaggacattgacgaggaggagagagagggggcggagaatcatccgccgcgaaggcaaatgccgtcgattgaacgcaatggaacgacgacaaaaagcaatgggcccaataaagcgagcaaaagcaacaatgtggacaagaggaagggcatcgtcgcacaaaacatgcgttcgggttggatcagcaaggcattgctcagccgtcctccgctgtcgcgaccgccaaaacggaagcggaacaaccgggacaccaccacggtcattgtgcttgagcaagacaatgccgccgacaagggtcaagagcaaaacaacaccgggaatggtcaagagcagggcaacaatgccgccaaacttcgagagcacaagcgcgacacaacnagctgatgtgcttaggtccggcaatgcttcgcctttggcgcgcagcactcctcagccgatggaccaggaaaatgagcaatcgtgcagcaaccgactcttc

SEQ ID NO: 88061 - DNA, 407 bp, Heterodera glycines
cggagagcttatttacccggtcagcgctgttgccttccacccggtccaccgaactttcgcccgggagggagcgattacatcgttaacatgtgggacccgttcaaccggaagcgcttatgccaatttaggaagttcccaagctctgttgtaagcctctcattctctcctgatggtggaatgctcgcaattgcttctacttatatgtacgaggaggaacgcgatccgaatcccatccccgagagttcattaacgattcgccgtatgacagagctagaagtccgtccaaagtaaaatttgtttttttctcatctgttatctcattccgaacaaagctcaggttcaatattatttttatatttgcaaataaattcactttgttcgaaaaaaaaaaaaaaaaaaaaaaaaaa

SEQ ID NO: 88062 - DNA, 752 bp, Heterodera glycines
aagtgcgtattggctttggtgatgccgaccccctttgggactcagagaatgaaaagtacaaagtgctgtgccgaacattcatgtttccaggcagctctgtcattggttacatgcggctgttggtctccttagtgtccagtctcttttttgcgtaccaatacatgatggccgtcactggccgattgtcctccgaccattggattaaccaagtgactgctcgctttatgtcacaggcaatgatgtccatctgtttgcaagtgattgtcgtcgtacttatggtccacggtgtgaaggctgagaagaagtccttgttgcttccttttattgcgtatgctgcgatcgcagttttggctggttcgatcaaggttatgagtgatttggtgtatttggacacgagcgtctacaaaaacaatgaggcggagagtcgagccgccaaagtgcaatttctcactaatctgttgcgcactgtgctccaggcctggtgtctgtctgttgtttggcgttgctatggttacctgaccgaaaaaaaggtggcacgtcagattcgtgaacaactcaactcaactgcgaccgcattcaattacccggagaatttgatggggcacccgtcgatgccgcagcagcctcctccttacgcggctgttgtcactgctccgatcgcaattgggccgtccaatgacaagccacagacttcagcgacgaacacatccgctactgcttctcatattcagcagtagcaatacaatgagatc

SEQ ID NO: 88063 - DNA, 737 bp, Heterodera glycines
tgaacattctgctgaagtctgttctattcatctctcttctgtcactgtttggtgattgcatgaaaaactcagatcaaattggagtcaaaagaaaatcagcaggaataagaattgaggaaccaaatgatgtaaaaggcaaaggaaaagtcgtcgaaacaagcagaaaaggcaaagaaaaagtcggcgaaaaaataagcgttatgaacacagctgaacgcattgaaaaaatggaccttgcccaagacaaagctaaaatggatatagacaccaatggcaaacccaaacaaaatgaggaaaatgctcctccaaaatatgttttcatttggagcggtagcaatgagaagaagaaccttgaggttgacctcagagtgacccgtcactccaaaaaaaactcagcgaattattccatgccaaaagtgatcaatccgtcaatgcaaaacacggaaagcaggaagcattaccggttccgaaacaggaagctgaaaaaatactgaaggaagtggaagaatggtacgcacatcacaaaaatgataaacataaaaacgctccagtttttgtgttcaagtgtaaagacaatgtcagtctggtgataaatgttcatcttgatgcagtccggctttccaaggagttgtcaaatatgcttgaagatactgccgacgaaggatatccgaagccaatcccgagtccagttccgaatttcaaaagtgacatcacgcttaaactgattaaattgtgtg

SEQ ID NO: 88064 - DNA, 635 bp, Heterodera glycines
  unsure (1)..(635): unsure at all n locations
cactttttgggctgaagttttttgcaaaagactggaatcccattgctatgaatggcccgaattggacaaaaatatttttgcccaaattggccaattatttgcaaatgcaaaacgagaacaagttctaaccttggataagcttgaaagagtgaaaagcgtgcgcattaatttggacaaattgtgtgccaaaattgaccgaatgtataatcaattccgtttccaattgccgaacacttggaaaaatgaattgtgcgcaaatgagacatttcaatacgtctcacattacacaacacgtgctggaaaaagaaaacaatctgaaaatgcaaaaatatgtaaggggtgtaagaatgaggagcgtaaaattgcgttcgacccatgcggccactttttcttgtgcaaaaaatgtgccaataccataaaaacatgtcccgaatgcaaagtgaaagtcaaggagagactggaaatttttaatgtctgacaaaatgccaatctttaaaatttaaatttgtagcgaaatatttatttgaaggtattaaagcatgaaagaaagcggaaatacattcagaaatcgttctatcatttttttaatatccaatgttttgttgataaaatctggcatttcaaanaaaaaaaaa
